United States Patent Application Publication US 2010/0081129 A1 - sequence listing, part 2

SEQ ID NO: 1998 - DNA, 4741 bp, Homosapiens
ggcggctggggcgttgctgtcgtgcgtccgcaggcgtcaggtgctcagacccgagggccgggaagggatttgggtttcacaggaacctggggcgggggtccgctatcttggggctgtcgggaccgctgcttaaatttggcccagtccagacctcgagtcgggcccccagccaggcccacgcccaggtccaggcccaggccggtagggatcctctagggtcccagctcgcctcgatggagctcctcccgccgctgcctcagtccttcctgttgctgctgctgttgcctgccaagcccgcggcgggcgaggactggcagtgcccgcgcaccccctacgcggcctctcgcgactttgacgtgaagtacgtggtgcccagcttctccgccggaggcctggtacaggccatggtgacctacgagggcgacagaaatgagagtgctgtgtttgtagccatacgcaatcgcctgcatgtgcttgggcctgacctgaagtctgtccagagcctggccacgggccctgctggagaccctggctgccagacgtgtgcagcctgtggcccaggaccccacggccctcccggtgacacagacacaaaggtgctggtgctggatcccgcgctgcctgcgctggtcagttgtggctccagcctgcagggccgctgcttcctgcatgacctagagccccaagggacagccgtgcatctggcagcgccagcctgcctcttctcagcccaccataaccggcccgatgactgccccgactgtgtggccagcccattgggcacccgtgtaactgtggttgagcaaggccaggcctcctatttctacgtggcatcctcactggacgcagccgtggctgccagcttcagcccacgctcagtgtctatcaggcgtctcaaggctgacgcctcgggattcgcaccgggctttgtggcgttgtcagtgctgcccaagcatcttgtctcctacagtattgaatacgtgcacagcttccacacgggagccttcgtatacttcctgactgtacagccggccagcgtgacagatgatcctagtgccctgcacacacgcctggcacggcttagcgccactgagccagagttgggtgactatcgggagctggtcctcgactgcagatttgctccaaaacgcaggcgccggggggccccagaaggcggacagccctaccctgtgctgcgggtggcccactccgctccagtgggtgcccaacttgccactgagctgagcatcgccgagggccaggaagtactatttggggtctttgtgactggcaaggatggtggtcctggcgtgggccccaactctgtcgtctgtgccttccccattgacctgctggacacactaattgatgagggtgtggagcgctgttgtgaatccccagtccatccaggcctccggcgaggcctcgacttcttccagtcgcccagtttttgccccaacccgcctggcctggaagccctcagccccaacaccagctgccgccacttccctctgctggtcagtagcagcttctcacgtgtggacctattcaatgggctgttgggaccagtacaggtcactgcattgtatgtgacacgccttgacaacgtcacagtggcacacatgggcacaatggatgggcgtatcctgcaggtggagctggtcaggtcactaaactacttgctgtatgtgtccaacttctcactgggtgacagtgggcagcccgtgcagcgggatgtcagtcgtcttggggaccacctactctttgcctctggggaccaggttttccaggtacctatccaaggccctggctgccgccacttcctgacctgtgggcgttgcctaagggcatggcatttcatgggctgtggctggtgtgggaacatgtgcggccagcagaaggagtgtcctggctcctggcaacaggaccactgcccacctaagcttactgagttccacccccacagtggacctctaaggggcagtacaaggctgaccctgtgtggctccaacttctaccttcacccttctggtctggtgcctgagggaacccatcaggtcactgtgggccaaagtccctgccggccactgcccaaggacagctcaaaactcagaccagtgccccggaaagactttgtagaggagtttgagtgtgaactggagcccttgggcacccaggcagtggggcctaccaacgtcagcctcaccgtgactaacatgccaccgggcaagcacttccgggtagacggcacctccgtgctgagaggcttctctttcatggagccagtgctgatagcagtgcaacccctctttggcccacgggcaggaggcacctgtctcactcttgaaggccagagtctgtctgtaggcaccagccgggctgtgctggtcaatgggactgagtgtctgctagcacgggtcagtgaggggcagcttttatgtgccacaccccctggggccacggtggccagtgtcccccttagcctgcaggtggggggtgcccaggtacctggttcctggaccttccagtacagagaagaccctgtcgtgctaagcatcagccccaactgtggctacatcaactcccacatcaccatctgtggccagcatctaacttcagcatggcacttagtgctgtcattccatgacgggcttagggcagtggaaagcaggtgtgagaggcagcttccagagcagcagctgtgccgccttcctgaatatgtggtccgagacccccagggatgggtggcagggaatctgagtgcccgaggggatggagctgctggctttacactgcctggctttcgcttcctacccccaccccatccacccagtgccaacctagttccactgaagcctgaggagcatgccattaagtttgagtatattgggctgggcgctgtggctgactgtgtgggtatcaacgtgaccgtgggtggtgagagctgccagcacgagttccggggggacatggttgtctgccccctgcccccatccctgcagcttggccaggatggtgccccattgcaggtctgcgtagatggtgaatgtcatatcctgggtagagtggtgcggccagggccagatggggtcccacagagcacgctccttggtatcctgctgcctttgctgctgcttgtggctgcactggcgactgcactggtcttcagctactggtggcggaggaagcagctagttcttcctcccaacctgaatgacctggcatccctggaccagactgctggagccacacccctgcctattctgtactcgggctctgactacagaagtggccttgcactccctgccattgatggtctggattccaccacttgtgtccatggagcatccttctccgatagtgaagatgaatcctgtgtgccactgctgcggaaagagtccatccagctaagggacctggactctgcgctcttggctgaggtcaaggatgtgctgattccccatgagcgggtggtcacccacagtgaccgagtcattggcaaaggccactttggagttgtctaccacggagaatacatagaccaggcccagaatcgaatccaatgtgccatcaagtcactaagtcgcatcacagagatgcagcaggtggaggccttcctgcgagaggggctgctcatgcgtggcctgaaccacccgaatgtgctggctctcattggtatcatgttgccacctgagggcctgccccatgtgctgctgccctatatgtgccacggtgacctgctccagttcatccgctcacctcagcggaaccccaccgtgaaggacctcatcagctttggcctgcaggtagcccgcagcatggagtacctggcagagcagaagtttgtgcacagggacctggctgcgcggaactgcatgctggacgagtcattcacagtcaaggtggctgactttggtttggcccgcgacatcctggacagggagtactatagtgttcaacagcatcgccacgctcgcctacctgtgaagtggatggcgctggagagcctgcagacctatagatttaccaccaagtctgatgtgtggtcatttggtgtgctgctgtgggaactgctgacacggggtgccccaccataccgccacattgacccttttgaccttacccacttcctggcccagggtcggcgcctgccccagcctgagtattgccctgattctctgtaccaagtgatgcagcaatgctgggaggcagacccagcagtgcgacccaccttcagagtactagtgggggaggtggagcagatagtgtctgcactgcttggggaccattatgtgcagctgccagcaacctacatgaacttgggccccagcacctcgcatgagatgaatgtgcgtccagaacagccgcagttctcacccatgccagggaatgtacgccggccccggccactctcagagcctcctcggcccacttgacttagttcttgggctggacctgcttagctgccttgagctaaccccaagctgcctctgggccatgccaggccagagggcagtggccctccaccttgttcctgccctttaactttcagaggcaataggtaaatggggcccattaggtccctcactccacagagtgagccagtgagggcagtcctgcaacatgtatttatggagtgcctgctgtggaccctgtcttctgggcacagtggactcagcagtgaccacaccaacactgacccttgaaccaataaaggaacaaatgactattaaagcacaaa

SEQ ID NO: 1999 - protein, 1400 aa, Homosapiens
MELLPPLPQSFLLLLLLPAKPAAGEDWQCPRTPYAASRDFDVKYVVPSFSAGGLVQAMVTYEGDRNESAVFVAIRNRLHVLGPDLKSVQSLATGPAGDPGCQTCAACGPGPHGPPGDTDTKVLVLDPALPALVSCGSSLQGRCFLHDLEPQGTAVHLAAPACLFSAHHNRPDDCPDCVASPLGTRVTVVEQGQASYFYVASSLDAAVAASFSPRSVSIRRLKADASGFAPGFVALSVLPKHLVSYSIEYVHSFHTGAFVYFLTVQPASVTDDPSALHTRLARLSATEPELGDYRELVLDCRFAPKRRRRGAPEGGQPYPVLRVAHSAPVGAQLATELSIAEGQEVLFGVFVTGKDGGPGVGPNSVVCAFPIDLLDTLIDEGVERCCESPVHPGLRRGLDFFQSPSFCPNPPGLEALSPNTSCRHFPLLVSSSFSRVDLFNGLLGPVQVTALYVTRLDNVTVAHMGTMDGRILQVELVRSLNYLLYVSNFSLGDSGQPVQRDVSRLGDHLLFASGDQVFQVPIQGPGCRHFLTCGRCLRAWHFMGCGWCGNMCGQQKECPGSWQQDHCPPKLTEFHPHSGPLRGSTRLTLCGSNFYLHPSGLVPEGTHQVTVGQSPCRPLPKDSSKLRPVPRKDFVEEFECELEPLGTQAVGPTNVSLTVTNMPPGKHFRVDGTSVLRGFSFMEPVLIAVQPLFGPRAGGTCLTLEGQSLSVGTSRAVLVNGTECLLARVSEGQLLCATPPGATVASVPLSLQVGGAQVPGSWTFQYREDPVVLSISPNCGYINSHITICGQHLTSAWHLVLSFHDGLRAVESRCERQLPEQQLCRLPEYVVRDPQGWVAGNLSARGDGAAGFTLPGFRFLPPPHPPSANLVPLKPEEHAIKFEYIGLGAVADCVGINVTVGGESCQHEFRGDMVVCPLPPSLQLGQDGAPLQVCVDGECHILGRVVRPGPDGVPQSTLLGILLPLLLLVAALATALVFSYWWRRKQLVLPPNLNDLASLDQTAGATPLPILYSGSDYRSGLALPAIDGLDSTTCVHGASFSDSEDESCVPLLRKESIQLRDLDSALLAEVKDVLIPHERVVTHSDRVIGKGHFGVVYHGEYIDQAQNRIQCAIKSLSRITEMQQVEAFLREGLLMRGLNHPNVLALIGIMLPPEGLPHVLLPYMCHGDLLQFIRSPQRNPTVKDLISFGLQVARSMEYLAEQKFVHRDLAARNCMLDESFTVKVADFGLARDILDREYYSVQQHRHARLPVKWMALESLQTYRFTTKSDVWSFGVLLWELLTRGAPPYRHIDPFDLTHFLAQGRRLPQPEYCPDSLYQVMQQCWEADPAVRPTFRVLVGEVEQIVSALLGDHYVQLPATYMNLGPSTSHEMNVRPEQPQFSPMPGNVRRPRPLSEPPRPT

SEQ ID NO: 2000 - DNA, 447 bp, Homosapiens
ctgcaggtagcccgcagcatggagtacctggcagagcagaagtttgtgcacagggacctggctgcgcggaaagccgcagttctcacccatgccagggaatgtacgccggccccggccactctcagagcctcctcggcccacttgacttagttcttgggctggacctgcttagctgccttgagctaaccccaagctgcctctgggccatgccaggccagagggcagtggccctccaccttgttcctgccctttaactttcagaggcaataggtaaatggggcccattaggtccctcactccacagagtgagccagtgagggcagtcctgcaacatgtatttatggagtgcctgctgtggaccctgtcttctgggcacagtggactcagcagtgaccacaccaacactgacccttgaaccaataaaggaacaaatgactattaaagcac

SEQ ID NO: 2001 - protein, 43 aa, Homosapiens
MEYLAEQKFVHRDLAARKAAVLTHARECTPAPATLRASSAHLT

SEQ ID NO: 2002 - DNA, 331 bp, Homosapiens
tgagaagctaaagccaccccctgtccctacaagctcctcattccctctccccacagcactccctgccattgatggtctggattccaccacttgtgtccatggagcatccttctccgatagtgaagatgaatcctgtgtgccactgctgcggaaagagtccatccagctaagggacctggactctgcgctcttggctgaggtcaaggatgtgctgattccccatgagcgggtggtcacccacagtgaccgagtcattggcaaaggccactttggagttgtctaccacggagaatacatagaccaggcccagaatcgaatccaatgtgccatc

SEQ ID NO: 2003 - protein, 32 aa, Homosapiens
MVWIPPLVSMEHPSPIVKMNPVCHCCGKSPSS

SEQ ID NO: 2004 - DNA, 814 bp, Homosapiens
atgactgccccgactgtgtggccagcccattgggcacccgtgtaactgtggttgagcaaggccaggcctcctatttctacgtggcatcctcactggacgcagccgtggctgccagcttcagcccacgctcagtgtctatcaggcgtctcaaggctgacgcctcgggattcgcaccgggctttgtggcgttgtcagtgctgcccaagcatcttgtctcctacagtattgaatacgtgcacagcttccacacgggagccttcgtatacttcctgactgtacagccggccagcgtgacagatgatcctagtgccctgcacacacgcctggcacggcttagcgccactgagccagagttgggtgactatcgggagctggtcctcgactgcagatttgctccaaaacgcaggcgccggggggccccagaaggcggacagccctaccctgtgctgcgggtggcccactccgctccagtgggtgcccaacttgccactgagctgagcatcgccgagggccaggaagtactatttggggtctttgtgactggcaaggatggtggtcctggcgtgggccccaactctgtcgtctgtgccttccccattgacctgctggacacactaattgatgagggtgtggagcgctgttgtgaatccccagtccatccaggcctccggcgaggcctcgacttcttccagtcgcccagtttttgccccaacccgcctggcctggaagccctcagccccaacaccagctgccgccattcctgacctgtgggcgttgcctaagggcatggcatttcatgggctgtggctggtgt

SEQ ID NO: 2005 - protein, 63 aa, Homosapiens
MRVWSAVVNPQSIQASGEASTSSSRPVFAPTRLAWKPSAPTPAAAIPDLWALPKGMAFHGLWL

SEQ ID NO: 2006 - DNA, 399 bp, Homosapiens
acctgccgccccagccgccgctgtacactggcgcttagcgctcagccgacccgagggcgccgggctgggcgggcggagtcgggccgtgggggcggggccgcgaggaaggcttggcctagcccaggccctccgcccatccgactcttccggcccttggaggcctggctcctgtaccttcacctggcgtcttggcgcctttttctcagcggcctgtgggtggatgtgcatggtgtggcctggagagagcctggagctccatgagcacctgaagactgaaagaggaaatggaagtgggggcggccacacccagtgcagggttgatactgtgccctgaggtgacataaaagacactccttttccaaagcagaattggccaggaaatgaataaacacccggaga

SEQ ID NO: 2007 - protein, 37 aa, Homosapiens
MCMVWPGESLELHEHLKTERGNGSGGGHTQCRVDTVP

SEQ ID NO: 2008 - DNA, 600 bp, Homosapiens
tcttccggcccttggaggcctggctcctgtaccttcacctggcgtcttggcgcctttttctcagcggcctgtgggtggatgtgcatggtgtggcctggagagagaagctccacgtgcaaacagatagggaagcagagcctgtatcctgacagctggcctggtggccactcctgcactgagcctgaaggaccgcagagcacatggagggttgggcaccactgccaacagcatcaccccacacagaataaaaccaaagaaagaaggttggggagataatctggggattttctaggcccccagtcccatccatcaggacaatcaagagtaatggttcccagcaagagtcagagcccagaaggaaaaggcgcaggctgccttgtcagacagtgggccagaggaactaagaggctgcatgccctcaacaggaacctgcggtagcatccacagaggtcccctctgagactgagactaagaggagcaatccaaaacaaccaccacaacaccacaaggcccaggatgctgaatgccaaggaaactagggcatgtctaagtcttgcgcaagaacacacaggccacgtaaatctcatagaccagtaattc

SEQ ID NO: 2009 - protein, 65 aa, Homosapiens
MCMVWPGERSSTCKQIGKQSLYPDSWPGGHSCTEPEGPQSTWRVGHHCQQHHPTQNKTKERRLGR

SEQ ID NO: 2010 - DNA, 2406 bp, Homosapiens
ggctggagctgggccttggccgcgagaggccggcgaaagctatcttcctgcaccggcggccgggtgagggcggtgggagggagcggtgcctgcgctgtggccatgtctgtgtacgcagggggccggggccccgcgaagctgtgccctcaggccggccccggccggacacccttacccctccatgggtccggcagagggcagtgaccggcaccttctgtgcgtcctggactcctctgagaaacaggagagctcaaaggatggctactgacatgcagaggaagagaagcagcgaatgccttgatggcacattgactccttctgatggacagagtatggagagagctgagagccccacaccaggaatggcccagggaatggagccagatggctacaaggtagtattcgtgcgccggagcccgctggtgctagtggcggtggctcgtacgcggcagtcggcacaagagctggcgcaggagctgctctacatctactaccagatcctaagccttcttaccggtgcgcagctgagccacatcttccagcagaagcagaactatgatttgcggcgcctactctcgggctcagagcgcatcaccgacaacctgctgcagctcatggcacgagaccccagcttcctgatgggggcggcacggtgcctgcccctggcggcggccgtgcgcgacactgtgagcgccagcctgcagcaggcgcgtgcgcgcagcctggtcttctccatcctgctggcccgcaaccagctcgtggcactcgtgcgccgaaaggaccaatttctgcaccccatcgacctgcacctgctcttcaacctcattagttcctcctcgtcctttcgcgagggcgaggcctggacgcccgtgtgcctgcccaaattcaacgcagccggcttcttccacgcacacatctcttacctagagcctgacactgacctctgcctgctgcttgtctccactgaccgtgaggacttctttgcagtctctgactgccgccgccgcttccaggagcgccttcgcaagcgcggagcccacctggccctgcgagaggcactgcgcacaccctactacagcgttgcccaagtgggcatccctgacctgcgtcacttcctctataagtcaaagagctcgggactcttcaccaggtgagggagggccttgagggcactgctgtagcgggacagggacatgtggagtcgggaggctgtttggtcctgagctctgagatgtagccctgaagctgtccctacctttggaagcagaccagtgtgctgggcctgttttactctggcaccagagacccagactctccatcaccccatgagcataccctctctactttattaaccagaaggcctggaaatgcccaatatacccagagaaggaaactggaacagaggtctccggggtcccttgccctggagcaactctactttaggggtcattttggtccagctcaggaagcacagccctcctccaccccctcccccagcagaggggctgggaagatatggcctccctttgtcccttttggcccacaggattcctagctcacctttcctctactccagatctgtcactctgtcttggacatctaaactcaacctggcctctccaaagaggggtcaccaaagacactatgagcttagggggtaagaggggacatagctctagtctcagtgggcccagccctgtcctggggtgcctgctatggtggggagacaatgccctgtcctaagggagcacctggagggtaggacataagatagagtcttcctggataggaataggtgtttctaaatctctagagaagacagtggaagtcattcctttgcaaacccactccctccaccctgtctgcagccctgagattgaggccccatacaccagtgaagaggagcaggagcggctgctgggcctctaccagtacttgcacagtcgtgcccacaatgcctctcgcccactcaagaccatttactacacgggccccaacgagaacctcctggcctgggtaaggcagccctgggatgggctgggctttatggaggtcctaggtatgggccatgaggggcctctaacctagatgacgaccctttgccccttctccaggtgacaggcgcctttgagctctacatgtgttacagccccctggggaccaaggcgtcagccgtcagtgccatccataagctgatgcgctggatccgcaaagaggaagaccgcctcttcattctcacgcccctcacctattgatgggaatgtgtgcgggctcagccttcctggacacactaggtgtgggaagccataggagcctccagatgggggctggcctctcttgcccagccagcgggcagggactgtgggttggtgaatgcattaaagtgctttggggaagacacttgtc

SEQ ID NO: 2011 - protein, 298 aa, Homosapiens
MATDMQRKRSSECLDGTLTPSDGQSMERAESPTPGMAQGMEPDGYKVVFVRRSPLVLVAVARTRQSAQELAQELLYIYYQILSLLTGAQLSHIFQQKQNYDLRRLLSGSERITDNLLQLMARDPSFLMGAARCLPLAAAVRDTVSASLQQARARSLVFSILLARNQLVALVRRKDQFLHPIDLHLLFNLISSSSSFREGEAWTPVCLPKFNAAGFFHAHISYLEPDTDLCLLLVSTDREDFFAVSDCRRRFQERLRKRGAHLALREALRTPYYSVAQVGIPDLRHFLYKSKSSGLFTR

SEQ ID NO: 2012 - DNA, 1584 bp, Homosapiens
ggctggagctgggccttggccgcgagaggccggcgaaagctatcttcctgcaccggcggccgggtgagggcggtgggagggagcggtgcctgcgctgtggccatgtctgtgtacgcagggggccggggccccgcgaagctgtgccctcaggccggccccggccggacacccttacccctccatgggtccggcagagggcagtgaccggcaccttctgtgcgtcctggactcctctgagaaacaggagagctcaaaggatggctactgacatgcagaggaagagaagcagcgaatgccttgatggcacattgactccttctgatggacagagtatggagagagctgagagccccacaccaggaatggcccagggaatggagccagatggctacaaggtagtattcgtgcgccggagcccgctggtgctagtggcggtggctcgtacgcggcagtcggcacaagagctggcgcaggagctgctctacatctactaccagatcctaagccttcttaccggtgcgcagctgagccacatcttccagcagaagcagaactatgatttgcggcgcctactctcgggctcagagcgcatcaccgacaacctgctgcagctcatggcacgagaccccagcttcctgatgggggcggcacggtgcctgcccctggcggcggccgtgcgcgacactgtgagcgccagcctgcagcaggcgcgtgcgcgcagcctggtcttctccatcctgctggcccgcaaccagctcgtggcactcgtgcgccgaaaggaccaatttctgcaccccatcgacctgcacctgctcttcaacctcattagttcctcctcgtcctttcgcgagggcgaggcctggacgcccgtgtgcctgcccaaattcaacgcagccggcttcttccacgcacacatctcttacctagagcctgacactgacctctgcctgctgcttgtctccactgaccgtgaggacttctttgcagtctctgactgccgccgccgcttccaggagcgccttcgcaagcgcggagcccacctggccctgcgagaggcactgcgcacaccctactacagcgttgcccaagtgggcatccctgacctgcgtcacttcctctataagtcaaagagctcgggactcttcaccagccctgagattgaggccccatacaccagtgaagaggagcaggagcggctgctgggcctctaccagtacttgcacagtcgtgcccacaatgcctctcgcccactcaagaccatttactacacgggccccaacgagaacctcctggcctgggtgacaggcgcctttgagctctacatgtgttacagccccctggggaccaaggcgtcagccgtcagtgccatccataagctgatgcgctggatccgcaaagaggaagaccgcctcttcattctcacgcccctcacctattgatgggaatgtgtgcgggctcagccttcctggacacactaggtgtgggaagccataggagcctccagatgggggctggcctctcttgcccagccagcgggcagggactgtgggttggtgaatgcattaaagtgctttggggaagaca

SEQ ID NO: 2013 - protein, 393 aa, Homosapiens
MATDMQRKRSSECLDGTLTPSDGQSMERAESPTPGMAQGMEPDGYKVVFVRRSPLVLVAVARTRQSAQELAQELLYIYYQILSLLTGAQLSHIFQQKQNYDLRRLLSGSERITDNLLQLMARDPSFLMGAARCLPLAAAVRDTVSASLQQARARSLVFSILLARNQLVALVRRKDQFLHPIDLHLLFNLISSSSSFREGEAWTPVCLPKFNAAGFFHAHISYLEPDTDLCLLLVSTDREDFFAVSDCRRRFQERLRKRGAHLALREALRTPYYSVAQVGIPDLRHFLYKSKSSGLFTSPEIEAPYTSEEEQERLLGLYQYLHSRAHNASRPLKTIYYTGPNENLLAWVTGAFELYMCYSPLGTKASAVSAIHKLMRWIRKEEDRLFILTPLTY

SEQ ID NO: 2014 - DNA, 2363 bp, Homosapiens
gggagaaacaatcctaacgtccctttctctcacttgaaatgaactgctagctggctcggacggagaggcccagagtccagggctgttctgtgtgggactctagactcggaggaggcgcccaggcccctagaaggcggcgccggatgaggcaatcgcggacccgggtcaggacctgcccacggctctgctgggactaggagcccagaaccagtccctcggcgccgcaggcggccaaacgctaaggactacatttcccacaatgcaccccgggggcgggccgagtcgggctgagcggctggagctgggccttggccgcgagaggccggcgaaagctatcttcctgcaccggcggccgggtgagggcggtgggagggagcggtgcctgcgctgtggccatgtctgtgtacgcagggggccggggccccgcgaagctgtgccctcaggccggccccggccggacacccttacccctccatgggtccggcagagggcagtgaccggcaccttctgtgcgtcctggactcctctgagaaacaggagagctcaaaggatggctactgacatgcagaggaagagaagcagcgaatgccttgatggcacattgactccttctgatggacagagtatggagagagctgagagccccacaccaggaatggcccagggaatggagccaggtgcgggccaggagggtgccatgttcgtccatgcccgttcctacgaggacctgactgagtcagaggatggggcagcttctggggacagccacaaggagggtaccaggggtcccccgccgctgcctacagacatgcgccagatcagccaggactttagcgagctaagcacccagctgacgggtgtggcccgggacctgcaggaggagatgctgccaggaagctctgaggattggctggaacccccaggggcagttgggcgaccagccacagagccccccagggagggcacaaccgagggggatgaggaggatgccacggaggcatggcgcctgcaccagaagcatgtctttgtgctgagtgaggcagggaagcctgtgtactcccgctatgggtctgaggaggcactttccagcactatgggtgttatggtggccctggtgtccttcctggaggcagacaagaacgccatccgctccatccatgcagatggctacaaggtagtattcgtgcgccggagcccgctggtgctagtggcggtggctcgtacgcggcagtcggcacaagagctggcgcaggagctgctctacatctactaccagatcctaagccttcttaccggtgcgcagctgagccacatcttccagcagaagcagaactatgatttgcggcgcctactctcgggctcagagcgcatcaccgacaacctgctgcagctcatggcacgagaccccagcttcctgatgggggcggcacggtgcctgcccctggcggcggccgtgcgcgacactgtgagcgccagcctgcagcaggcgcgtgcgcgcagcctggtcttctccatcctgctggcccgcaaccagctcgtggcactcgtgcgccgaaaggaccaatttctgcaccccatcgacctgcacctgctcttcaacctcattagttcctcctcgtcctttcgcgagggcgaggcctggacgcccgtgtgcctgcccaaattcaacgcagccggcttcttccacgcacacatctcttacctagagcctgacactgacctctgcctgctgcttgtctccactgaccgtgaggacttctttgcagtctctgactgccgccgccgcttccaggagcgccttcgcaagcgcggagcccacctggccctgcgagaggcactgcgcacaccctactacagcgttgcccaagtgggcatccctgacctgcgtcacttcctctataagtcaaagagctcgggactcttcaccagccctgagattgaggccccatacaccagtgaagaggagcaggagcggctgctgggcctctaccagtacttgcacagtcgtgcccacaatgcctctcgcccactcaagaccatttactacacgggccccaacgagaacctcctggcctgggtgacaggcgcctttgagctctacatgtgttacagccccctggggaccaaggcgtcagccgtcagtgccatccataagctgatgcgctggatccgcaaagaggaagaccgcctcttcattctcacgcccctcacctattgatgggaatgtgtgcgggctcagccttcctggacacactaggtgtgggaagccataggagcctccagatgggggctggcctctcttgcccagccagcgggcagggactgtgggttggtgaatgcattaaagtgctttggggaagaca

SEQ ID NO: 2015 - protein, 652 aa, Homosapiens
MHPGGGPSRAERLELGLGRERPAKAIFLHRRPGEGGGRERCLRCGHVCVRRGPGPREAVPSGRPRPDTLTPPWVRQRAVTGTFCASWTPLRNRRAQRMATDMQRKRSSECLDGTLTPSDGQSMERAESPTPGMAQGMEPGAGQEGAMFVHARSYEDLTESEDGAASGDSHKEGTRGPPPLPTDMRQISQDFSELSTQLTGVARDLQEEMLPGSSEDWLEPPGAVGRPATEPPREGTTEGDEEDATEAWRLHQKHVFVLSEAGKPVYSRYGSEEALSSTMGVMVALVSFLEADKNAIRSIHADGYKVVFVRRSPLVLVAVARTRQSAQELAQELLYIYYQILSLLTGAQLSHIFQQKQNYDLRRLLSGSERITDNLLQLMARDPSFLMGAARCLPLAAAVRDTVSASLQQARARSLVFSILLARNQLVALVRRKDQFLHPIDLHLLFNLISSSSSFREGEAWTPVCLPKFNAAGFFHAHISYLEPDTDLCLLLVSTDREDFFAVSDCRRRFQERLRKRGAHLALREALRTPYYSVAQVGIPDLRHFLYKSKSSGLFTSPEIEAPYTSEEEQERLLGLYQYLHSRAHNASRPLKTIYYTGPNENLLAWVTGAFELYMCYSPLGTKASAVSAIHKLMRWIRKEEDRLFILTPLTY

SEQ ID NO: 2016 - DNA, 428 bp, Homosapiens
gtccatgcccgttcctacgaggacctgactgagtcagaggatggggcagcttctggggacagccacaaggagggtaccaggggtcccccgccgctgcctacagacatgcgccagatcagccaggactttagcgagctaagcacccagctgacgggtgtggcccgggaccagctcgtggcactcgtgcgccgaaaggaccaatttctgcaccccatcgacctgcacctgctcttcaacctcattagttcctcctcgtcctttcgcgagggcgaggcctggacgcccgtgtgcctgcccaaattcaacgcagccttcctggacacactaggtgtgggaagccataggagcctccagatgggggctggcctctcttgcccagccagcgggcagggactgtgggttggtgaatgcattaaagtgctttgggg

SEQ ID NO: 2017 - protein, 106 aa, Homosapiens
MRQISQDFSELSTQLTGVARDQLVALVRRKDQFLHPIDLHLLFNLISSSSSFREGEAWTPVCLPKFNAAFLDTLGVGSHRSLQMGAGLSCPASGQGLWVGECIKVL

SEQ ID NO: 2018 - DNA, 2229 bp, Homosapiens
agtaagagtctgcgggaccggcagctgtacttcatctcccagcgggccgagcgctgaaggcagcggcgcggcgcctttgtggtagcagtggccccgcgcggaggaagttccggtgtccgcggcgctgggtcggtggcggaggctgaggagaaggaggagcgggccgtggaggcttcgccgcctaggtactgctataaccagaatttggtagaaaaaggatttacttgttggggccctcttgataaaaagagatgtggggggattctcgacctgctaacagaactggaccttttcgggaactctaatgatccaggacaaagaagttaccctggagtatgtatcaagcctggatttttggtactgcaaacgatgtaaggcaaacattggtgggcaccgatcttcctgttcattctgcaagaacccaagagaagtgacagaggccaagcaagaattaataacctaccctcagcctcagaaaacatccataccagcaccattggaaaaacagcccaaccagcccctaagaccagctgataaggaacctgaacccaggaagagggaagaaggccaagagtcacgcttaggacatcaaaagagagaagcagaaaggtatctgcctccttctcgaagggaagggccaactttccgaagagaccgagagagggagtcatggtctggagagacacgccaggatggagagagcaaaactatcatgctaaagcgtatctatcgttccacaccacctgaggtgatagtggaagtgctggagccctatgtccgccttactactgccaacgtccgtatcatcaagaacagaacaggccctatggggcatacctatggctttattgacctcgactcccatgcggaagctcttcgtgtggtgaagatcttacagaaccttgatccgccatttagcattgatgggaagatggtagctgtaaacctggccactggaaaacgaagaaatgattctggggaccattctgaccacatgcattactatcagggtaaaaaatatttccgagataggaggggaggtggcagaaattcagactggtcttcagatacaaatcgacaaggacaacagtcatcatctgactgctacatatatgattctgctactggctactattatgaccccttggcaggaacttattatgaccccaatacccagcaagaagtctatgtgccccaggatcctggattacctgaggaagaagagatcaaggaaaaaaaacccaccagtcaaggaaagtcaagtagcaagaaggaaatgtctaaaagagatggcaaggagaaaaaagacagaggagtgacgaggtttcaggaaaatgccagtgaagggaaggcccctgcagaagacgtctttaagaagcccctgcctcctactgtgaagaaggaagagagtccccctccacctaaagtggtaaacccactgatcggcctcttgggtgaatatggaggagacagtgactatgaggaggaagaagaggaggaacagacccctcccccacagccccgcacagcacagccccagaagcgagaggagcaaaccaagaaggagaatgaagaagacaaactcactgactggaataaactggcttgtctgctttgcagaaggcagtttcccaataaagaagttctgatcaaacaccagcagctgtcagacctgcacaagcaaaacctggaaatccaccggaagataaaacagtctgagcaggagctagcctatctggaaaggagagaacgagagggaaagtttaaaggaagaggaaatgatcgcagggaaaagctccagtcttttgactctccagaaaggaaacggattaagtactccagggaaactgacagtgatcgtaaacttgttgataaagaagatatcgacactagcagcaaaggaggctgtgtccaacaggctactggctggaggaaagggacaggcctgggatatggccatcctggattggcttcatcagaggaggctgaaggccggatgaggggccccagtgttggagcctcaggaagaaccagcaaaagacagtccaacgagacttaccgagatgctgttcgaagagtcatgtttgctcgatataaagaactcgattaagaaaggagacaagttccatgggatacaacctccctcttgttttgtttgtctctccttttcttttgttactgttcttgctgctagaacttttttaaataaactttttttcaatgtgatta

SEQ ID NO: 2019 - protein, 601 aa, Homosapiens
MIQDKEVTLEYVSSLDFWYCKRCKANIGGHRSSCSFCKNPREVTEAKQELITYPQPQKTSIPAPLEKQPNQPLRPADKEPEPRKREEGQESRLGHQKREAERYLPPSRREGPTFRRDRERESWSGETRQDGESKTIMLKRIYRSTPPEVIVEVLEPYVRLTTANVRIIKNRTGPMGHTYGFIDLDSHAEALRVVKILQNLDPPFSIDGKMVAVNLATGKRRNDSGDHSDHMHYYQGKKYFRDRRGGGRNSDWSSDTNRQGQQSSSDCYIYDSATGYYYDPLAGTYYDPNTQQEVYVPQDPGLPEEEEIKEKKPTSQGKSSSKKEMSKRDGKEKKDRGVTRFQENASEGKAPAEDVFKKPLPPTVKKEESPPPPKVVNPLIGLLGEYGGDSDYEEEEEEEQTPPPQPRTAQPQKREEQTKKENEEDKLTDWNKLACLLCRRQFPNKEVLIKHQQLSDLHKQNLEIHRKIKQSEQELAYLERREREGKFKGRGNDRREKLQSFDSPERKRIKYSRETDSDRKLVDKEDIDTSSKGGCVQQATGWRKGTGLGYGHPGLASSEEAEGRMRGPSVGASGRTSKRQSNETYRDAVRRVMFARYKELD

SEQ ID NO: 2020 - DNA, 3688 bp, Homosapiens
tgaaggcagcggcgcggcgcctttgtggtagcagtggccccgcgcggaggaagttccggtgtccgcggcgctgggtcggtggcggaggctgaggagaaggaggagcgggccgtggaggcttcgccgcctaggtactgctataaccagaatttggtagaaaaaggatttacttgttggggccctcttgataaaaagagatgtggggggattctcgacctgctaacagaactggaccttttcgtgggagccaagaagaaaggtttgctcccgggtggaacagggattatcctcctcctccccttaagagtcatgctcaagagagacactctggcaactttcctggcagagattcacttccctttgatttccaggggcattcggggcctccttttgcaaatgtagaggagcattctttcagctatggagctagagacggaccgcatggtgactatcgaggaggggagggacctggacatgatttcagggggggagatttttcgtcttctgatttccagagcagagattcatcacagttggacttcaggggtagggacatacattctggggattttcgggatagagaaggaccacctatggactataggggtggagatggtacttctatggattatagaggtagggaggcacctcatatgaactacagagacagggatgctcacgctgttgacttcagaggtagggatgctcctccatctgacttcaggggccggggcacttatgatttagattttagaggccgggatggatcccatgcagattttaggggaagggatttatcagatttggattttagggccagagaacagtcccgttctgattttaggaatagagatgtatctgatttggactttagagacaaagacggaacacaagtagactttagaggccgaggttcaggtactactgatctagactttagggacagggatacgccacattcagatttcagaggtagacaccgatctaggactgatcaggattttaggggcagagagatgggatcttgtatggaatttaaagatagggagatgccccctgtggatccaaatattttggattacattcagccctctacacaagatagagaacattctggtatgaatgtgaacaggagagaagaatccacacatgaccatacgatagaaaggcctgcttttggcattcagaagggagaatttgagcattcagaaacaagagaaggagaaacacaaggtgtagcctttgaacatgagtctccagcagactttcagaacagccaaagtccagttcaagaccaagataagtcacagctttctggacgtgaagagcagagttcagatgctggtctgtttaaagaagaaggcggtctggactttcttgggcggcaagacaccgattacagaagcatggagtaccgtgatgtggatcataggctgccaggaagccagatgtttggctatggccagagcaagtcttttccagagggcaaaactgcccgagatgcccaacgggaccttcaggatcaagattataggaccggcccaagtgaggagaaacccagcaggcttattcgattaagtggggtacctgaagatgccacaaaagaagagattcttaatgcttttcggactcctgatggcatgcctgtaaagaacttgcagttgaaggagtataacacaggttacgactatggctatgtctgcgtggagttttcactcttggaagatgccatcggatgcatggaggccaaccagggaactctaatgatccaggacaaagaagttaccctggagtatgtatcaagcctggatttttggtactgcaaacgatgtaaggcaaacattggtgggcaccgatcttcctgttcattctgcaagaacccaagagaagtgacagaggccaagcaagaattaataacctaccctcagcctcagaaaacatccataccagcaccattggaaaaacagcccaaccagcccctaagaccagctgataaggaacctgaacccaggaagagggaagaaggccaagagtcacgcttaggacatcaaaagagagaagcagaaaggtatctgcctccttctcgaagggaagggccaactttccgaagagaccgagagagggagtcatggtctggagagacacgccaggatggagagagcaaaactatcatgctaaagcgtatctatcgttccacaccacctgaggtgatagtggaagtgctggagccctatgtccgccttactactgccaacgtccgtatcatcaagaacagaacaggccctatggggcatacctatggctttattgacctcgactcccatgcggaagctcttcgtgtggtgaagatcttacagaaccttgatccgccatttagcattgatgggaagatggtagctgtaaacctggccactggaaaacgaagaaatgattctggggaccattctgaccacatgcattactatcagggtaaaaaatatttccgagataggaggggaggtggcagaaattcagactggtcttcagatacaaatcgacaaggacaacagtcatcatctgactgctacatatatgattctgctactggctactattatgaccccttggcaggaacttattatgaccccaatacccagcaagaagtctatgtgccccaggatcctggattacctgaggaagaagagatcaaggaaaaaaaacccaccagtcaaggaaagtcaagtagcaagaaggaaatgtctaaaagagatggcaaggagaaaaaagacagaggagtgacgaggtttcaggaaaatgccagtgaagggaaggcccctgcagaagacgtctttaagaagcccctgcctcctactgtgaagaaggaagagagtccccctccacctaaagtggtaaacccactgatcggcctcttgggtgaatatggaggagacagtgactatgaggaggaagaagaggaggaacagacccctcccccacagccccgcacagcacagccccagaagcgagaggagcaaaccaagaaggagaatgaagaagacaaactcactgactggaataaactggcttgtctgctttgcagaaggcagtttcccaataaagaagttctgatcaaacaccagcagctgtcagacctgcacaagcaaaacctggaaatccaccggaagataaaacagtctgagcaggagctagcctatctggaaaggagagaacgagagggaaagtttaaaggaagaggaaatgatcgcagggaaaagctccagtcttttgactctccagaaaggaaacggattaagtactccagggaaactgacagtgatcgtaaacttgttgataaagaagatatcgacactagcagcaaaggaggctgtgtccaacaggctactggctggaggaaagggacaggcctgggatatggccatcctggattggcttcatcagaggaggctgaaggccggatgaggggccccagtgttggagcctcaggaagaaccagcaaaagacagtccaacgagacttaccgagatgctgttcgaagagtcatgtttgctcgatataaagaactcgattaagaaaggagacaagttccatgggatacaacctccctcttgttttgtttgtctctccttttcttttgttactgttcttgctgctagaacttttttaaataaactttttttcaatgtgatta

SEQ ID NO: 2021 - protein, 1123 aa, Homosapiens; identical to SEQ ID NO: 175

SEQ ID NO: 2022 - DNA, 2305 bp, Homosapiens
gcagtggccccgcgcggaggaagttccggtgtccgcggcgctgggtcggtggcggaggctgaggagaaggaggagcgggccgtggaggcttcgccgcctaggtactgctataaccagaatttggtagaaaaaggatttacttgttggggccctcttgataaaaagagatgtggggggattctcgacctgctaacagaactggaccttttcggatcaagattataggaccggcccaagtgaggagaaacccagcaggcttattcgattaagtggggtacctgaagatgccacaaaagaagagattcttaatgcttttcggactcctgatggcatgcctgtaaagaacttgcagttgaaggagtataacacagggaactctaatgatccaggacaaagaagttaccctggagtatgtatcaagcctggatttttggtactgcaaacgatgtaaggcaaacattggtgggcaccgatcttcctgttcattctgcaagaacccaagagaagtgacagaggccaagcaagaattaataacctaccctcagcctcagaaaacatccataccagcaccattggaaaaacagcccaaccagcccctaagaccagctgataaggaacctgaacccaggaagagggaagaaggccaagagtcacgcttaggacatcaaaagagagaagcagaaaggtatctgcctccttctcgaagggaagggccaactttccgaagagaccgagagagggagtcatggtctggagagacacgccaggatggagagagcaaaactatcatgctaaagcgtatctatcgttccacaccacctgaggtgatagtggaagtgctggagccctatgtccgccttactactgccaacgtccgtatcatcaagaacagaacaggccctatggggcatacctatggctttattgacctcgactcccatgcggaagctcttcgtgtggtgaagatcttacagaaccttgatccgccatttagcattgatgggaagatggtagctgtaaacctggccactggaaaacgaagaaatgattctggggaccattctgaccacatgcattactatcagggtaaaaaatatttccgagataggaggggaggtggcagaaattcagactggtcttcagatacaaatcgacaaggacaacagtcatcatctgactgctacatatatgattctgctactggctactattatgaccccttggcaggaacttattatgaccccaatacccagcaagaagtctatgtgccccaggatcctggattacctgaggaagaagagatcaaggaaaaaaaacccaccagtcaaggaaagtcaagtagcaagaaggaaatgtctaaaagagatggcaaggagaaaaaagacagaggagtgacgaggtttcaggaaaatgccagtgaagggaaggcccctgcagaagacgtctttaagaagcccctgcctcctactgtgaagaaggaagagagtccccctccacctaaagtggtaaacccactgatcggcctcttgggtgaatatggaggagacagtgactatgaggaggaagaagaggaggaacagacccctcccccacagccccgcacagcacagccccagaagcgagaggagcaaaccaagaaggagaatgaagaagacaaactcactgactggaataaactggcttgtctgctttgcagaaggcagtttcccaataaagaagttctgatcaaacaccagcagctgtcagacctgcacaagcaaaacctggaaatccaccggaagataaaacagtctgagcaggagctagcctatctggaaaggagagaacgagagggaaagtttaaaggaagaggaaatgatcgcagggaaaagctccagtcttttgactctccagaaaggaaacggattaagtactccagggaaactgacagtgatcgtaaacttgttgataaagaagatatcgacactagcagcaaaggaggctgtgtccaacaggctactggctggaggaaagggacaggcctgggatatggccatcctggattggcttcatcagaggaggctgaaggccggatgaggggccccagtgttggagcctcaggaagaaccagcaaaagacagtccaacgagacttaccgagatgctgttcgaagagtcatgtttgctcgatataaagaactcgattaagaaaggagacaagttccatgggatacaacctccctcttgttttgtttgtctctccttttcttttgttactgttcttgctgctagaacttttttaaataaactttttttcaatgtgatta

SEQ ID NO: 2023 - protein, 601 aa, Homosapiens; identical to SEQ ID NO: 2019

SEQ ID NO: 2024 - DNA, 4329 bp, Homosapiens
ggaggaagttccggtgtccgcggcgctgggtcggtggcggaggctgaggagaaggaggagcgggccgtggaggcttcgccgcctaggtactgctataaccagaatttggtagaaaaaggatttacttgttggggccctcttgataaaaagagatgtggggggattctcgacctgctaacagaactggaccttttcggactgggtgaaagctttttctgcagcagtcatgttgaaaaccttgtgttgactttcctcgtgttctgaaatgggagcataaaagtttactccgccacttcgtcttaaaatagcaaaactttgctgttttctgcagatctaggaccttgttacagaactctgccaaaaaaaaaatgtttacagaagaatgtgctgtgattagagaagaatatgctggtgtgtagatttcaaactctctggacaatatgaataacactgtctttgtttctacagtgggagccaagaagaaaggtttgctcccgggtggaacagggattatcctcctcctccccttaagagtcatgctcaagagagacactctggcaactttcctggcagagattcacttccctttgatttccaggggcattcggggcctccttttgcaaatgtagaggagcattctttcagctatggagctagagacggaccgcatggtgactatcgaggaggggagggacctggacatgatttcagggggggagatttttcgtcttctgatttccagagcagagattcatcacagttggacttcaggggtagggacatacattctggggattttcgggatagagaaggaccacctatggactataggggtggagatggtacttctatggattatagaggtagggaggcacctcatatgaactacagagacagggatgctcacgctgttgacttcagaggtagggatgctcctccatctgacttcaggggccggggcacttatgatttagattttagaggccgggatggatcccatgcagattttaggggaagggatttatcagatttggattttagggccagagaacagtcccgttctgattttaggaatagagatgtatctgatttggactttagagacaaagacggaacacaagtagactttagaggccgaggttcaggtactactgatctagactttagggacagggatacgccacattcagatttcagaggtagacaccgatctaggactgatcaggattttaggggcagagagatgggatcttgtatggaatttaaagatagggagatgccccctgtggatccaaatattttggattacattcagccctctacacaagatagagaacattctggtatgaatgtgaacaggagagaagaatccacacatgaccatacgatagaaaggcctgcttttggcattcagaagggagaatttgagcattcagaaacaagagaaggagaaacacaaggtgtagcctttgaacatgagtctccagcagactttcagaacagccaaagtccagttcaagaccaagataagtcacagctttctggacgtgaagagcagagttcagatgctggtctgtttaaagaagaaggcggtctggactttcttgggcggcaagacaccgattacagaagcatggagtaccgtgatgtggatcataggctgccaggaagccagatgtttggctatggccagagcaagtcttttccagagggcaaaactgcccgagatgcccaacgggaccttcaggatcaagattataggaccggcccaagtgaggagaaacccagcaggcttattcgattaagtggggtacctgaagatgccacaaaagaagagattcttaatgcttttcggactcctgatggcatgcctgtaaagaacttgcagttgaaggagtataacacaggttacgactatggctatgtctgcgtggagttttcactcttggaagatgccatcggatgcatggaggccaaccagggaactctaatgatccaggacaaagaagttaccctggagtatgtatcaagcctggatttttggtactgcaaacgatgtaaggcaaacattggtgggcaccgatcttcctgttcattctgcaagaacccaagagaagtgacagaggccaagcaagaattaataacctaccctcagcctcagaaaacatccataccagcaccattggaaaaacagcccaaccagcccctaagaccagctgataaggaacctgaacccaggaagagggaagaaggccaagagtcacgcttaggacatcaaaagagagaagcagaaaggtatctgcctccttctcgaagggaagggccaactttccgaagagaccgagagagggagtcatggtctggagagacacgccaggatggagagagcaaaactatcatgctaaagcgtatctatcgttccacaccacctgaggtgatagtggaagtgctggagccctatgtccgccttactactgccaacgtccgtatcatcaagaacagaacaggccctatggggcatacctatggctttattgacctcgactcccatgcggaagctcttcgtgtggtgaagatcttacagaaccttgatccgccatttagcattgatgggaagatggtagctgtaaacctggccactggaaaacgaagaaatgattctggggaccattctgaccacatgcattactatcagggtaaaaaatatttccgagataggaggggaggtggcagaaattcagactggtcttcagatacaaatcgacaaggacaacagtcatcatctgactgctacatatatgattctgctactggctactattatgaccccttggcaggaacttattatgaccccaatacccaggtgagtttggggcttttttttttttttttttttttttacctctgtcaatgattcttttgagaaaagcacccataatttgctacttgaggattttattccctggattctctggatgctcattgcatgaaaagtggaaaagtttagatctatggaaacagaactgttgcctatatggaaaatcagtgccttgtggcaatacaggtaagaacagtgttgctcttgaaaaagtggacagtgggtggtctgaatgtgtcctggtccctggagtgggtttttagattgatgtggactcttcttagacttgtaagtaaaaaagttgtttcttcccctaaaagggaactgtgcgccttagacctggaattgctgggaaactgaaacattctgtagacttacttgtttccaactgtatcgcagcaagaagtctatgtgccccaggatcctggattacctgaggaagaagagatcaaggaaaaaaaacccaccagtcaaggaaagtcaagtagcaagaaggaaatgtctaaaagagatggcaaggagaaaaaagacagaggagtgacgaggtttcaggaaaatgccagtgaagggaaggcccctgcagaagacgtctttaagaagcccctgcctcctactgtgaagaaggaagagagtccccctccacctaaagtggtaaacccactgatcggcctcttgggtgaatatggaggagacagtgactatgaggaggaagaagaggaggaacagacccctcccccacagccccgcacagcacagccccagaagcgagaggagcaaaccaagaaggagaatgaagaagacaaactcactgactggaataaactggcttgtctgctttgcagaaggcagtttcccaataaagaagttctgatcaaacaccagcagctgtcagacctgcacaagcaaaacctggaaatccaccggaagataaaacagtctgagcaggagctagcctatctggaaaggagagaacgagagggaaagtttaaaggaagaggaaatgatcgcagggaaaagctccagtcttttgactctccagaaaggaaacggattaagtactccagggaaactgacagtgatcgtaaacttgttgataaagaagatatcgacactagcagcaaaggaggctgtgtccaacaggctactggctggaggaaagggacaggcctgggatatggccatcctggattggcttcatcagaggaggctgaaggccggatgaggggccccagtgttggagcctcaggaagaaccagcaaaagacagtccaacgagacttaccgagatgctgttcgaagagtcatgtttgctcgatataaagaactcgattaagaaaggagacaagttccatgggatacaacctccctcttgttttgtttgtctctccttttcttttgttactgttcttgctgctagaacttttttaaataaactttttttcaatgtgatta

SEQ ID NO: 2025 - protein, 697 aa, Homosapiens
MDYRGGDGTSMDYRGREAPHMNYRDRDAHAVDFRGRDAPPSDFRGRGTYDLDFRGRDGSHADFRGRDLSDLDFRAREQSRSDFRNRDVSDLDFRDKDGTQVDFRGRGSGTTDLDFRDRDTPHSDFRGRHRSRTDQDFRGREMGSCMEFKDREMPPVDPNILDYIQPSTQDREHSGMNVNRREESTHDHTIERPAFGIQKGEFEHSETREGETQGVAFEHESPADFQNSQSPVQDQDKSQLSGREEQSSDAGLFKEEGGLDFLGRQDTDYRSMEYRDVDHRLPGSQMFGYGQSKSFPEGKTARDAQRDLQDQDYRTGPSEEKPSRLIRLSGVPEDATKEEILNAFRTPDGMPVKNLQLKEYNTGYDYGYVCVEFSLLEDAIGCMEANQGTLMIQDKEVTLEYVSSLDFWYCKRCKANIGGHRSSCSFCKNPREVTEAKQELITYPQPQKTSIPAPLEKQPNQPLRPADKEPEPRKREEGQESRLGHQKREAERYLPPSRREGPTFRRDRERESWSGETRQDGESKTIMLKRIYRSTPPEVIVEVLEPYVRLTTANVRIIKNRTGPMGHTYGFIDLDSHAEALRVVKILQNLDPPFSIDGKMVAVNLATGKRRNDSGDHSDHMHYYQGKKYFRDRRGGGRNSDWSSDTNRQGQQSSSDCYIYDSATGYYYDPLAGTYYDPNTQVSLGLFFFFFFFYLCQ

SEQ ID NO: 2026 - DNA, 411 bp, Homosapiens
ggaagttccggtgtccgcggcgctgggtcggtggcggaggctgaggagaaggaggagcgggccgtggaggcttcgccgcctaggtactgctataaccagaatttggtagaaaaaggatttacttgttggggccctcttgataaaaagagatgtggggggattctcgacctgctaacagaactggaccttttcggtaagttctcaaatttgaatattgaaattgccagtattttaattataaatgtgtaacattttcgcctaccttctgagtagctgggattacaggcgcgtgccactatgcctggctaatttcattattttaatattaaaaaatacccaaatattttatttctttttgtctcttagcgaaggaatacatatttggctagtaaggaaagctagcaaaattta

SEQ ID NO: 2027 - protein, 55 aa, Homosapiens
MCNIFAYLLSSWDYRRVPLCLANFIILILKNTQIFYFFLSLSEGIHIWLVRKASK

SEQ ID NO: 2028 - DNA, 1588 bp, Homosapiens
ctgggtcggtggcggaggctgaggagaaggaggagcgggccgtggaggcttcgccgcctaggtactgctataaccagaatttggtagaaaaaggatttacttgttggggccctcttgataaaaagagatgtggggggattctcgacctgctaacagaactggaccttttcgatctaggaccttgttacagaactctgccaaaaaaaaaatgtttacagaagaatgtgctgtgattagagaagaatatgctggtgtgtagatttcaaactctctggacaatatgaataacactgtctttgtttctacagtgggagccaagaagaaaggtttgctcccgggtggaacagggattatcctcctcctccccttaagagtcatgctcaagagagacactctggcaactttcctggcagagattcacttccctttgatttccaggggcattcggggcctccttttgcaaatgtagaggagcattctttcagctatggagctagagacggaccgcatggtgactatcgaggaggggagggacctggacatgatttcagggggggagatttttcgtcttctgatttccagagcagagattcatcacagttggacttcaggggtagggacatacattctggggattttcgggatagagaaggaccacctatggactataggggtggagatggtacttctatggattatagaggtagggaggcacctcatatgaactacagagacagggatgctcacgctgttgacttcagaggtagggatgctcctccatctgacttcaggggccggggcacttatgatttagattttagaggccgggatggatcccatgcagattttaggggaagggatttatcagatttggattttagggccagagaacagtcccgttctgattttaggaatagagatgtatctgatttggactttagagacaaagacggaacacaagtagactttagaggccgaggttcaggtactactgatctagactttagggacagggatacgccacattcagatttcagaggtagacaccgatctaggactgatcaggattttaggggcagagagatgggatcttgtatggaatttaaagatagggagatgccccctgtggatccaaatattttggattacattcagccctctacacaagatagagaacattctggtatgaatgtgaacaggagagaagaatccacacatgaccatacgatagaaaggcctgcttttggcattcagaagggagaatttgagcattcagaaacaagagaaggagaaacacaaggtgtagcctttgaacatgagtctccagcagactttcagaacagccaaagtccagttcaagaccaagataagtcacagctttctggacgtgaagagcagagttcagatgctggtctgtttaaagaagaaggcggtctggactttcttgggcggcaagacaccgattacagaagcatggagtaccgtgatgtggatcataggctgccaggaagccagatgtttggctatggccagagcaagtcttttccagagggcaaaactgcccgagatgcccaacgggaccttcagg

SEQ ID NO: 2029 - protein, 43 aa, Homosapiens
MWGDSRPANRTGPFRSRTLLQNSAKKKMFTEECAVIREEYAGV

SEQ ID NO: 2030 - DNA, 1732 bp, Homosapiens
gcggaggctgaggagaaggaggagcgggccgtggaggcttcgccgcctaggtactgctataaccagaatttggtagaaaaaggatttacttgttggggccctcttgataaaaagagatgtggggggattctcgacctgctaacagaactggaccttttcggactgggtgaaagctttttctgcagcagtcatgttgaaaaccttgtgttgactttcctcgtgttctgaaatgggagcataaaagtttactccgccacttcgtcttaaaatagcaaaactttgctgttttctgcagatctaggaccttgttacagaactctgccaaaaaaaaaatgtttacagaagaatgtgctgtgattagagaagaatatgctggtgtgtagatttcaaactctctggacaatatgaataacactgtctttgtttctacagtgggagccaagaagaaaggtttgctcccgggtggaacagggattatcctcctcctccccttaagagtcatgctcaagagagacactctggcaactttcctggcagagattcacttccctttgatttccaggggcattcggggcctccttttgcaaatgtagaggagcattctttcagctatggagctagagacggaccgcatggtgactatcgaggaggggagggacctggacatgatttcagggggggagatttttcgtcttctgatttccagagcagagattcatcacagttggacttcaggggtagggacatacattctggggattttcgggatagagaaggaaatgtctaaaagagatggcaaggagaaaaaagacagaggagtgacgaggtttcaggaaaatgccagtgaagggaaggcccctgcagaagacgtctttaagaagcccctgcctcctactgtgaagaaggaagagagtccccctccacctaaagtggtaaacccactgatcggcctcttgggtgaatatggaggagacagtgactatgaggaggaagaagaggaggaacagacccctcccccacagccccgcacagcacagccccagaagcgagaggagcaaaccaagaaggagaatgaagaagacaaactcactgactggaataaactggcttgtctgctttgcagaaggcagtttcccaataaagaagttctgatcaaacaccagcagctgtcagacctgcacaagcaaaacctggaaatccaccggaagataaaacagtctgagcaggagctagcctatctggaaaggagagaacgagagggaaagtttaaaggaagaggaaatgatcgcagggaaaagctccagtcttttgactctccagaaaggaaacggattaagtactccagggaaactgacagtgatcgtaaacttgttgataaagaagatatcgacactagcagcaaaggaggctgtgtccaacaggctactggctggaggaaagggacaggcctgggatatggccatcctggattggcttcatcagaggaggctgaaggccggatgaggggccccagtgttggagcctcaggaagaaccagcaaaagacagtccaacgagacttaccgagatgctgttcgaagagtcatgtttgctcgatataaagaactcgattaagaaaggagacaagttccatgggatacaacctccctcttgttttgtttgtctctccttttcttttgttactgttcttgctgctagaacttttttaaataaactttttttcaatgtgatta

SEQ ID NO: 2031 - protein, 333 aa, Homosapiens
MELETDRMVTIEEGRDLDMISGGEIFRLLISRAEIHHSWTSGVGTYILGIFGIEKEMSKRDGKEKKDRGVTRFQENASEGKAPAEDVFKKPLPPTVKKEESPPPPKVVNPLIGLLGEYGGDSDYEEEEEEEQTPPPQPRTAQPQKREEQTKKENEEDKLTDWNKLACLLCRRQFPNKEVLIKHQQLSDLHKQNLEIHRKIKQSEQELAYLERREREGKFKGRGNDRREKLQSFDSPERKRIKYSRETDSDRKLVDKEDIDTSSKGGCVQQATGWRKGTGLGYGHPGLASSEEAEGRMRGPSVGASGRTSKRQSNETYRDAVRRVMFARYKELD

SEQ ID NO: 2032 - DNA, 2266 bp, Homosapiens
gaaactcaatttggaaaataatttcgaaaatgattgtgagcctgaatacccagcatgccaaatgttttgtcacatagcattttaaaattttatttatttgtttgttttttgagacaagtctctctctgtctcccaggtggagtgcaggggtatgatctcagctcactgcagcctttgcctcctaggttcaagtgattctcctcccttagcctcctgagtagctgggactacaggtgtatgccaccatgcctggctaattattgtatttttttttttagtagagatggcgtttcaccatgttggccaggctgatctcaaactcctgacctcaagtgatccacctacctcagcctcccaaagtgctgggactataagtgtgagccaccgcacctgccatttggattggcaatctgcaagattttattacttaaatgcaacagatgttctcattcattgttctgaagcttggagttccaatgaaaaatttaggtggagaactgagtttagaaaatccatataatgtttagtaaaactagtatttcataaatgctgaatgacagagattggtctttaaattaaaacaacagtgtgatgttgggtattttttttctttcaaaatactaaggattagatcagtggtcagcaaactacagctgatagcctgtttttgtaaataaagttttactggaaaacagccactcttactcatttgcagattgtgtatggctgctttcatgctatgatggcagagttgaatagttgtaacagagattgtataacccacaaaatccgatatgtttacgaactggctcttcatggaaaaagtttcctgacctctcatctagatcaatggggttgtacgttaccatttaaaaatatttaggttgtaatctatcctcttattacttgtatttatgggtaactattttgtaagtaaggctgtttcgtatagaattaacgtggtttaggtaagcattcagaaatgttaggttaatttagctttattgtctaacttttttcaaatttagaacatttgtctttgactcgtttaaacttatttaaaattatattttcccaccttaattttagtttaaatgtaagtcattatatgctgttttttaacatctttgactaggagggagacagtttttgggaactaatttgaaccaaaacagatataggaaaatgattttgttacatttcctttgaacttttcttttaaaatttgtttttatttggttgaaaataattttcataactactgatattttatattagtagaatggtttcttgattcgtctgtataaaatacaaatctaagaaccctgctacagtaagttactctaaatctatttgatcttaatttagaagagtaagataatctttaggccatgttggatgtgttctggtcagaaaacatgtagatttcatacctcagtcctcatcccatgagtgtctgatgaagcttaaatcttcctgcaagaaagacttgaatgattttaaacatgagagacactgtatttagtggtaacatcttaattttagtgttaaattgtattgcctaagaagaacatctagggcgggcgtggcggctcacgcctgtaatcccagcactttgggaggccgaggcgggtggatcacgaggtcaggagatcaagaccatcctggctaacacggtgaaaccccgcctctacaaaaaatacaaaaaaattagctgggcgtggtagcgggcgcctgtagtcccagccccttgggaagctgaggcaggagaatggcgtgaacccgggaggcggagcttgcagtgagccaatatcgcgccactgcactccagcctgggcgacagagcgagactccgtctcaaaaaaaaaaaaaagaagaacatctaaacttgctcctcttatgatgaaccacatagacataactagtgttaatgggggtcagtggaagtcatcatgttctgaaaatccattaaatgtacatcattctagtgtttaggttaatgctgttaaattcctgttactttaagaaagggttggccgggcatggtggctcacgcctgtaaccctaaccttggggagacagagatgggtggctcacctgaggtcaagagttcaagaccagcctgggcagcatggtaaaaccccatctctgctaaaaataaaaaaattagctgggcatggtggcgcatgcctgtaatcccagctactctggaggctgaggcatgagaattgcttgaacccaggaggcagaggctgcagtgaaccga

SEQ ID NO: 2033 - protein, 46 aa, Homosapiens
MPNVLSHSILKFYLFVCFLRQVSLCLPGGVQGYDLSSLQPLPPRFK

SEQ ID NO: 2034 - DNA, 596 bp, Homosapiens
ggcagagattcacttccctttgatttccaggggcattcggggcctccttttgcaaatcgagaggagcaaaccaagaaggagaatgaagaagacaaactcactgactggaataaactggcttgtctgctttgcagaaggcagtttcccaataaagaagttctgatcaaacaccagcagctgtcagacctgcacaagcaaaacctggaaatccaccggaagataaaacagtctgagcaggagctagcctatctggaaaggagagaacgagagggaaagtttaaaggaagaggaaatgatcgcagggaaaaggacaggcctgggatatggccatcctggattggcttcatcagaggaggctgaaggccggatgaggggccccagtgttggagcctcaggaagaaccagcaaaagacagtccaacgagacttaccgagatgctgttcgaagagtcatgtttgctcgatataaagaactcgattaagaaaggagacaagttccatgggatacaacctccctcttgttttgtttgtctctccttttcttttgttactgttcttgctgctagaacttttttaaataaactttttttcaatgtg

SEQ ID NO: 2035 - protein, 62 aa, Homosapiens
MIAGKRTGLGYGHPGLASSEEAEGRMRGPSVGASGRTSKRQSNETYRDAVRRVMFARYKELD

SEQ ID NO: 2036 - DNA, 1302 bp, Homosapiens
agcagagattcatcacagttggacttcaggggtagggacatacattctggggattttcgggatagagaaggaccacctatggactataggggtggagatggtacttctatggattatagaggtagggaggcacctcatatgaactacagagacagggatgctcacgctgttgacttcagaggtagggatgctcctccatctgacttcaggggccggggcacttatgatttagattttagaggccgggatggatcccatgcagattttaggggaagggatttatcagatttggattttagggccagagaacagtcccgttctgattttaggaatagagatgtatctgatttggactttagagacaaagacggaacacaagtagactttagaggccgaggttcaggtactactgatctagactttagggacagggatacgccacattcagatttcagaggtagacaccgatctaggactgatcaggattttaggggcagagagatgggatcttgtatggaatttaaagatagggagatgccccctgtggatccaaatattttggattacattcagccctctacacaagatagagaacattctggtatgaatgtgaacaggagagaagaatccacacatgaccatacgatagaaaggcctgcttttggcattcagaagggagaatttgagcattcagaaacaagagaaggagaaacacaaggtgtagcctttgaacatgagtctccagcagactttcagaacagccaaagtccagttcaagaccaagataagtcacagctttctggacgtgaagagcagagttcagatgctggtctgtttaaagaagaaggcggtctggactttcttgggcggcaagacaccgattacagaagcatggagtaccgtgatgtggatcataggctgccaggaagccagatgtttggctatggccagagcaagtcttttccagagggcaaaactgcccgagatgcccaacgggaccttcaggatcaagattataggaccggcccaagtgaggagaaacccagcaggcttattcgattaagtggggtacctgaagatgccacaaaagaagagattcttaatgcttttcggactcctgatggcatgcctgtaaagaacttgcagttgaaggagtataacacaggttacgactatggctatgtctgcgtggagttttcactcttggaagatgccatcggatgcatggaggccaaccaggccagattacctgtccctaatactgagcagaagctggtgaatgaaacaggagatccctcagtc

SEQ ID NO: 2037 - protein, 407 aa, Homosapiens
MDYRGGDGTSMDYRGREAPHMNYRDRDAHAVDFRGRDAPPSDFRGRGTYDLDFRGRDGSHADFRGRDLSDLDFRAREQSRSDFRNRDVSDLDFRDKDGTQVDFRGRGSGTTDLDFRDRDTPHSDFRGRHRSRTDQDFRGREMGSCMEFKDREMPPVDPNILDYIQPSTQDREHSGMNVNRREESTHDHTIERPAFGIQKGEFEHSETREGETQGVAFEHESPADFQNSQSPVQDQDKSQLSGREEQSSDAGLFKEEGGLDFLGRQDTDYRSMEYRDVDHRLPGSQMFGYGQSKSFPEGKTARDAQRDLQDQDYRTGPSEEKPSRLIRLSGVPEDATKEEILNAFRTPDGMPVKNLQLKEYNTGYDYGYVCVEFSLLEDAIGCMEANQARLPVPNTEQKLVNETGDPS

SEQ ID NO: 2038 - DNA, 457 bp, Homosapiens
catgttgaccaggctggtcttgaacacctgacctcaggtgatctgcccaccttggcctcccaaagtgctggaattacagacgtgagccaccatgcccggctgagagtatctttattcttaaaaaatcaaaatgtttaggaaggcaggagacactaatagggctgggctagtcttgtggaggcagtggatggacgctttggctggcctagggaagaatctgtgattcagtgctgcagggatcaggtgatcctggtgagagaggtcctggaacaagggttaatttggtcatttttggaatgacctgggatttggcttatttattttatttttaaaatttcccgctgggcacagtggctcaaacctgtaattccagcactttggaacgccaaggccagtggatcactcgagctcaggagttcgagaccaccctgggcaacatggtgaaactctatctctc

SEQ ID NO: 2039 - protein, 30 aa, Homosapiens
MFRKAGDTNRAGLVLWRQWMDALAGLGKNL

SEQ ID NO: 2040 - DNA, 797 bp, Homosapiens
cgcctgtaatcccagcactttgggaggccgagacgggtggattgcctgaggtcaggagttcgagagcagcctggccaacatggtgaaaccctgtctctactaaaaatacaaaaattaccaggtgtggtggcgcacacctgtagtcccaactattcagaaggctgaggtagggaggatggcttgaacccaggaggttgaggctgcagtgagccatgatcatgccgctgcactccagcttgggtgatagagcaagaccctgtctcaataaaataaaatataaaataaacattattctagataaactatcagttcatcaatatccttaacaagaaatgtgcacacataatctatgcactagaggatgaatgacaacacttaaacacctgtggagagggggacataaagatatactgtaacctccaagttcaacttgaatgaagaagatacctaataacactcaatgtcacctgcagcctacaagaattttctgataaaagaactacctgcaatgctacctgcagaaacaacaggctgtttactgtaggaaggcaggtatggtcatggtcttctgccctcacatgcctgaatgcttgtgcactcattccttagacacttcatgacaggtgttagcccaactctcttgctgtctgtctagaaatcccgagaggtcctgaacaaaagcactatgtgaactggctgtctaaaatcaagctgccacccaaagcagcactgcctgccactttcagccaactctgaatcccaagaggtggataaggagccagggaaaatgagaagtt

SEQ ID NO: 2041 - protein, 37 aa, Homosapiens
MIMPLHSSLGDRARPCLNKIKYKINIILDKLSVHQYP

SEQ ID NO: 2042 - DNA, 684 bp, Homosapiens
gagaggagcaaaccaagaaggagaatgaagaagacaaactcactgactggaataaactggcttgtctgctttgcagaaggcagtttcccaataaagaagttctgatcaaacaccagcagctgtcagacctgcacaagcaaaacctggaaatccaccggaagataaaacagtctgagcaggagctagcctatctggaaaggagagaacgagagggaaagtttaaaggaagaggaaatgatcgcagggaaaagctccagtcttttgactctccagaaaggaaacggattaagtactccagggaaactgacagtgatcgtaaacttgttgataaagaagatatcgacactagcagcaaaggaggctgtgtccaacaggctactggctggaggaaagggacaggcctgggatatggccatcctggattggcttcatcagaggaggctgaaggccggatgaggggccccagtgttggagcctcaggaagaaccagcaaaagacagtccaacgagacttaccgagatgctgttcgaagagtcatgtttgctcgatataaagaactcgattaagaaaggagacaagttccatgggatacaacctccctcttgttttgtttgtctctccttttcttttgttactgttcttgctgctagaacttttttaaataaactttttttcaatgtgatt

SEQ ID NO: 2043 - protein, 73 aa, Homosapiens [sequence omitted]

SEQ ID NO: 2044 - DNA, 250 bp, Homosapiens
tcagaggaggctgaaggccggatgaggggccccagtgttggagcctcaggaagaaccagcaaaagacagtccaacgagacttaccgagatgctgttcgaagagtcatgtttgctcgatataaagaactcgattaagaaaggagacaagttccatgggatacaacctccctcttgttttgtttgtctctccttttcttttgttactgttcttgctgctagaacttttttaaataaactttttttcaatgtg

SEQ ID NO: 2045 - protein, 53 aa, Homosapiens
MLFEESCLLDIKNSIKKGDKFHGIQPPSCFVCLSFSFVTVLAARTFLNKLFFN

SEQ ID NO: 2046 - DNA, 3771 bp, Homosapiens
actgtgggtaggagacggccgtcggcggaggcgccattttgtgtagccgccgaaccttgttggaggttctggggcgcagaaccgctactgctgcttcggtctctccttgggaaaaaataaaatttgaaccttttggagctgtgtgctaaatcttcagtgggacaatgggttcagacaaaagagtgagtagaacagagcgtagtggaagatacggttccatcatagacagggatgaccgtgatgagcgtgaatcccgaagcaggcggagggactcagattacaaaagatctagtgatgatcggaggggtgatagatatgatgactaccgagactatgacagtccagagagagagcgtgaaagaaggaacagtgaccgatccgaagatggctaccattcagatggtgactatggtgagcacgactataggcatgacatcagtgacgagagggagagcaagaccatcatgctgcgcggccttcccatcaccatcacagagagcgatattcgagaaatgatggagtccttcgaaggccctcagcctgcggatgtgaggctgatgaagaggaaaacaggtgagagcttgcttagttcctgatattattgttctcttccccattcccacctcagtccctaaagaacatcctgattcccccagtcttcaagcacatgaattcagaatgaaaggtttgccatggctaaggaatgtgactctttgaaaaccatgttagcatctgaggaacttttttaaactttgttttagggacttttttttccttaggtaagtaatgatttataaactcctttttttttttgactatagtcggttgcatggttactttaagcgtggaatcaaatggagtggcatttagttcaggcggcttgttccttgccatggcaaagtatcaagaagatccccaagtcaagtcacatttgtaaagctgcttcccaattggctttgtcacgcagtgttgaagcagtgggagagagattcacctgttataaaggaactgactaacacaagtatcccgtctatatctgaatgctgtctctaggtgtaagccgtggtttcgccttcgtggagttttatcacttgcaagatgctaccagctggatggaagccaatcaggttgcttcactcaccaagtctagatattcatgaaaatggaacaagtctgtacaattttaaaaaaaggttgaaggagtggtttgttccaaaggagtgacttttttttaaaaaaaaagctttgtatatattaaaattgatgttactagaataagtacagtaccaaggacttcattatagaatttgttctgcctttaaacatggctacctacctggcagggctttgttaactactgaatacctgtctggtaatcactaaaacatcttaatgtttcccttttttctagtttgttatattcctattatgtccattgagagtaagcttagtatatcaaactctccatttgacagtgaagagaacatagtgaaagtctgtggcggcatttttataagtaattccttatttctgcctgaagaccacaaagcctcctggaggcgtaactgctcagaccggtcttcagggaatatttaaggacttagtggaatttatgaacaataagtctgatgagattagcctgggagtggtgtcctgcagctgtctaatctagttagagtggcattaacattctaatctccttgagaatgccttttatagtctgttcaaagcaagtcattgatggttcttcgaggtagtgttaactgaagtgttcttcagtttgtcaagataatgttcagtgcttggcacttaaataacattttttgcaagaactccaaggcacattattgaatgcctttaaccaagtgcattctgggaagtttgcttgactcattatcttgcttttctgcagcattctgtgatttgagtcatccatgaatccatgaataaaagttacattctttgattggtaatattgccatttataacaagactcactaatgagggtatcactttgactgactgatttgttaaagtttttaagcctctcattttcctaacccagaaatcacagcctgattttattaaaagtagagcttcattcatttcataccatagataccatcctagtaaatccagaacatatacaaggttcatgtgagtctgctttcttgacatgatagcattgtttgatgcagtggatatgtcagaatgactaacctaggagtttaaaactcctaagaaactaaaacctgtaagacatttaaaagtctccacaattttaatgtatacaaagctatgttactgtgtaacacattacagttcaaattcactccagaaataaaaggccagtaggattagggactcactggtagtttggagtctcccagcacacatccctcctagtgggatgatctattcacatatctcccagcttttttatttttgcttctgtatatcacagtgagtggatggcccttcagctttttctctcctggccagacatgcagtcttgcctttagatatcgcagagacaaaattcacagcatgtcttaaatcttccaggatttgcaagaaccaaattgctcaacagtatgtatgtttagaggggttagactcctttttaaaatctggatatctaaccacctacttaaatctgtttgatagtgtcaaaccacccccacccttgatcctcccacccccaagaaaaagaaaagatgctcctgttaaatgaaggctctttaggggtaggtgctaggtatactcttggctagattgattcagctcagaattttgactttttaaagctaagtccttgtagtcacatggttgacttgaaggatgaggtggtgtgtgcatttatgagcttttcctacccccctgaagaaacttcattggcctcctggttactcaccttgaagagagtaccatccattttagtgaaaaacacatctgtcacctaggacatgacatggttgcagttgacaggaaaaaaaaaatctcatttagttgttttagagttggtggcattcagaatagtccctcttgagaaagaattgtaaccagattccctttaaaaatgagttcccctccctttccccccaaaggactcatcctgaagcagaaggtgtggggggaaggagaaatgtaaaggcttttactttgcataaggatgggggactggggaaaaaggtgaagcgaagcccaaggacaccatgctaagggcaaaagtaagagacagtctcagaactgagagaattgtgtcttctgctttttgaagtagactgtcacactcaggcagcctgtcaatgctgaatgttaggacttctgtctccgctggagacacggcctggtgcaagtcagcgtttagtgtttgacagctttctcagcactccctgactccgtttacctttactccgcatcccattctcttactgcctatctgaaggattggatgggcagagtataggtggcggtggttggtcctccccgtatgttgtccatttaattccagagcactgatttttccgaagtgtgctctgccctgggaaaatggacacatgttcctcacaatgggaataactaattacttcttttcttacagaaaaagttggtgattcaaggaaagcacattgcaatgcattatagcaatcccagacctaagtttgaagattggctttgtaacaaggtaagcatatgttcttcccaaatagacaaaactcctttaggatattgctgtttttttctgtttgtttatttgactgtccaaac

SEQ ID NO: 2047 - protein, 143 aa, Homosapiens
MGSDKRVSRTERSGRYGSIIDRDDRDERESRSRRRDSDYKRSSDDRRGDRYDDYRDYDSPERERERRNSDRSEDGYHSDGDYGEHDYRHDISDERESKTIMLRGLPITITESDIREMMESFEGPQPADVRLMKRKTGESLLSS

SEQ ID NO: 2048 - DNA, 3120 bp, Homosapiens
actgtgggtaggagacggccgtcggcggaggcgccattttgtgtagccgccgaaccttgttggaggttctggggcgcagaaccgctactgctgcttcggtctctccttgggaaaaaataaaatttgaaccttttggagctgtgtgctaaatcttcagtgggacaatgggttcagacaaaagagtgagtagaacagagcgtagtggaagatacggttccatcatagacagggatgaccgtgatgagcgtgaatcccgaagcaggcggagggactcagattacaaaagatctagtgatgatcggaggggtgatagatatgatgactaccgagactatgacagtccagagagagagcgtgaaagaaggaacagtgaccgatccgaagatggctaccattcagatggtgactatggtgagcacgactataggcatgacatcagtgacgagagggagagcaagaccatcatgctgcgcggccttcccatcaccatcacagagagcgatattcgagaaatgatggagtccttcgaaggccctcagcctgcggatgtgaggctgatgaagaggaaaacaggtgtaagccgtggtttcgccttcgtggagttttatcacttgcaagatgctaccagctggatggaagccaatcagaaaaagttggtgattcaaggaaagcacattgcaatgcattatagcaatcccagacctaagtttgaagattggctttgtaacaagtgctgccttaacaatttcaggaaaagactaaaatgcttccgatgtggagcagacaagtttgactctgaacaggaagtgcctcctggaaccacagagtcggttcagtctgtggattactactgtgatacgatcattcttcggaacatagctccgcacactgtggtggattccatcatgacagcactgtctccttacgcgtctttagctgtcaataacatccgcctcataaaagacaaacagacccagcagaacagaggcttcgcatttgtgcagctgtcctctgcaatggatgcttctcagctgcttcagatattacagagtctccatcctcctttgaaaattgatggcaaaactattggggttgattttgcaaaaagtgccagaaaagacttggtcctctcagatggtaaccgcgtcagcgctttctctgtagctagtacggctattgctgctgctcagtggtcatccacccagtctcaaagtggtgaaggaggcagtgttgactacagttatctgcaaccaggtcaagatggctatgcccaatatgctcagtattcacaggattatcagcagttttatcaacaacaagctggaggattggaatctgatgcatcatctgcatcaggcacagcagtgaccaccacctcagcggctgtagtgtcccagagtcctcagctgtataatcaaacctccaatccacctggctctccgactgaggaagcacagcctagcactagcacaagtacacaggccccagccgcttcccctactggtgtagttcctggtaccaaatatgcagtacctgacacgtccacttaccagtatgatgaatcttcaggatattactatgatccgacaacagggctctattatgaccccaactcgcaatactactataattccttgacccagcagtacctttactgggatggggaaaaagagacctacgtgccagctgcagagtctagctcccaccagcagtcgggcctgcctcctgcaaaagaggggaaagagaagaaggagaaacccaagagcaaaacagcccagcagattgccaaagacatggaacgctgggctaagagtttgaataagcagaaagaaaactttaaaaatagctttcagcctgtcaattccttgagggaagaagaaaggagagaatctgctgcagcagacgctggctttgctctctttgagaagaagggagccttagctgaaaggcagcagctcatcccagaattggtgcgaaatggagatgaggagaatcccctcaaaaggggtctggttgctgcttacagtggtgacagtgacaatgaggaggagctggtggagagacttgagagtgaggaagagaagctagctgactggaagaagatggcctgtctgctctgccggcgccagttcccgaacaaagatgccctagtcaggcaccagcaactctcagaccttcacaagcaaaacatggacatctatcgacgatccaggctgagcgagcaggagctggaagccttggagctaagggagagagagatgaaataccgagaccgagctgcagaaagacgggagaagtacggcattccagaacctccagagcccaagcgcaagaagcagtttgatgccggcactgtgaattacgagcaacccaccaaagatggcattgaccacagtaacattggcaacaagatgctgcaggccatgggctggcgggaaggctctggcttgggacgaaagtgtcaaggcattacggctcccattgaggctcaagttcggctaaagggagctggcctaggagccaaaggcagcgcatatggtttgtcgggcgccgattcctacaaagatgctgtccggaaagccatgtttgcccggttcactgagatggagtgagagagagagagagagagagatgacaaggagcacaagaagtggtccatctcccgaattcgctgttaccgcctgtctctttaagggcatgccttgtgctgttaatagatcttagggtgaaccacttcattctgcagggttctccctcccaccttaaagaagttccccttatgtgggttgcctggtgaatggccttccttcccgccagagggcttgtgaacagaccggagaggacagtggattgtttatactccagtgtacatagtgtaatgtagcgtgtttacatgtgtagcctatgttgtggtccatcagcccctcacattcctaggggtttgagatgctgtaggtggtatgtgacaccaaagccacctctgtcatttgttgtgatgtcttttcttggcaaaagccttgtgtatatttgtatattacacatttgtacagaattttggaagattttcagtctagttgccaaatctggctcctttacaaaagaaataccttgagaaatggg

SEQ ID NO: 2049 - protein, 815 aa, Homosapiens; identical to SEQ ID NO: 177

SEQ ID NO: 2050 - DNA, 1175 bp, Homosapiens
atcccctgtgccatgagaatgagccattaaggatcttatctcaactatatgccctgtaacaaaccccttttactcttacttccacctacaaatatttccattagatgttatcacatataaccaaagtcattcataaatactgcttgaaaagctttgagatttccagggcttttttccctaagtacacaggctgacagtcaagatatggtaacaataacaaattgcaaaatgctctaagaacttagtatgaataaaatgtgaagcccaatttttaagaatccaaataatactgacataaatgctacaaccccaaaactaagagttcagcccaatacctcaatgaaagaaatatgggtcatgttctaacctgctgggctgttttgctcttggtttctaacactcaaatcaatacttgtagcagtttctttttttttttttttgagacagtcttgctctgtcgcccaggctggagtgcaatggcacgatctcggctcactgcaagctccgcctctcagattcatgccattctcctgcctcagcctcctgagtaactgggactacaggcgcccgccaccacggctggctaatttttttgtagttttagtagagacagggtttcaccgtgctagccaggatggtctcgatctcctgaccttgtgatccgcctgcctcagaatcctaaagtgctgggattacaggcgtgagccaccgcacctggccaaccctcagtaatattcttttaggcttagctagacttttgagaactctagcccctagccacaatagcactttgccactcatccctctcctgccaaaagcctctgactccagccaaatcaagccgattgctaggccttatctagattcagtacctttctattccctgctcatgtgatacccctccgcctgaagggcccatctaccacaccattcccttagttttccacgcctataatcctagcactttgggagacccaggcgggaggattgattgaagacaagagttcaagaccagtctaggcaataaagagagaccttgtctctacaaaaaaaaaaacaaacgataaaaaaaaaaattagctcggagtggtgacacatgcctgtaatcccagctacttgggaggctgaggctggtggattgcctgagccccaaaagttggaggctgctgtgagcc

SEQ ID NO: 2051 - protein, 66 aa, Homosapiens
MGHVLTCWAVLLLVSNTQINTCSSFFFFFFETVLLCRPGWSAMARSRLTASSASQIHAILLPQPPE

SEQ ID NO: 2052 - DNA, 447 bp, Homosapiens
cagggaggcaaagtaaaggatgctggacacaaaaggtaatctattgtctgactccacttatatgaaatgtcaagaacagagggctgggcacatggtggtgtatatacacatgtaatatacaaatgtatagacatgtataaacattcaaagaattgcacatttctgttttgtgtatttttttgtgtgtatattatacctcaaaacattttttaaccctacaattaaaacttacaatctccatataaaaattacattttggtggctttgaagaagttaaaactaatctgagtcatatattcttttgcaggaaatatttcattttatgcctcataaatgcactaagcgaaactacttctagtgaaattgaggaggaaagcagcacatttacttgcgagttggggtcataatagagccctgttgtcggatcatagtaatatcctgaagatt

SEQ ID NO: 2053 - protein, 48 aa, Homosapiens
MSRTEGWAHGGVYTHVIYKCIDMYKHSKNCTFLFCVFFCVYIIPQNIF

SEQ ID NO: 2054 - DNA, 2343 bp, Homosapiens
gttgtgtctgttagccacgccaccttacccagaagagacagacactgtctcctgggtccctgttgagcagatagagtgagcgactggaaaatagaggagaggatatgtgacacctctcctctgttgcaattcctgctgagcttgggtcccttcaccaacacctccttccagctctgtgctagtgtttacaccctgtgtgtggctgcctggtttatgtaaatagtctgtggaacagagtgagacaaattgctctttgggtgccctctaggtaggcccagggattaaattaatgggaactagactttttaaatttttattatcattttttttgagatggagtcttactctgttgcccagactggagtgcagtggcatgatcttggctcactgccacctcctccatctcccaggttcaagcagttctcttgcctcagcctcctgagtagctgggattacaggtgtgccatcatgcccagctaatttttgtatttttagtagagatgagttatcaccatgttggccaggctggtcttgaactcctgaccttgggtgatctgcccaccaccacctcccaaagtgctaggattacgggcatgagccactgctcccggctgggaactaaactttttaaagaaatcatattctatttttactctagcagtgtcacacctctttgctaggtggttcatcacctttacttataccaaggtgtgcccagggtcttttctgggcaggaaatatcactagtccacaacatactttatcttttttttgacaaaatatgtaatcgactgacatagcagaaagtctgcattaattgttttttgtttgttgttttctagtactactataattccttgacccagcagtacctttactgggatggggaaaaagagacctacgtgccagctgcagagtctagctcccaccagcagtcgggcctgcctcctgcaaaagaggggaaagagaagaaggagaaacccaagagcaaaacagcccagcagattgccaaagacatggaacgctgggctaagagtttgaataagcagaaagaaaactttaaaaatagctttcagcctgtcaattccttgagggaagaagaaaggagagaatctgctgcagcagacgctggctttgctctctttgagaagaagggagccttagctgaaaggcagcagctcatcccagaattggtgcgaaatggagatgaggagaatcccctcaaaaggggtctggttgctgcttacagtggtgacagtgacaatgaggaggagctggtggagagacttgagagtgaggaagagaagctagctgactggaagaagatggcctgtctgctctgccggcgccagttcccgaacaaagatgccctagtcaggcaccagcaactctcagaccttcacaagcaaaacatggacatctatcgacgatccaggctgagcgagcaggagctggaagccttggagctaagggagagagagatgaaataccgagaccgagctgcagaaagacgggagaagtacggcattccagaacctccagagcccaagcgcaagaagcagtttgatgccggcactgtgaattacgagcaacccaccaaagatggcattgaccacagtaacattggcaacaagatgctgcaggccatgggctggcgggaaggctctggcttgggacgaaagtgtcaaggcattacggctcccattgaggctcaagttcggctaaagggagctggcctaggagccaaaggcagcgcatatggtttgtcgggcgccgattcctacaaagatgctgtccggaaagccatgtttgcccggttcactgagatggagtgagagagagagagagagagagatgacaaggagcacaagaagtggtccatctcccgaattcgctgttaccgcctgtctctttaagggcatgccttgtgctgttaatagatcttagggtgaaccacttcattctgcagggttctccctcccaccttaaagaagttccccttatgtgggttgcctggtgaatggccttccttcccgccagagggcttgtgaacagaccggagaggacagtggattgtttatactccagtgtacatagtgtaatgtagcgtgtttacatgtgtagcctatgttgtggtccatcagcccctcacattcctaggggtttgagatgctgtaggtggtatgtgacaccaaagccacctctgtcatttgttgtgatgtcttttcttggcaaaagccttgtgtatatttgtatattacacatttgtacagaattttggaagattttcagtctagttgccaaatctggctcctttacaaaagaaataccttgagaaatggg

SEQ ID NO: 2055 - protein, 272 aa, Homosapiens [sequence omitted]

SEQ ID NO: 2056 - DNA, 644 bp, Homosapiens
tggtaccaggaggctgtcaggcctagcactcaaggacctgactgctccacgcagttgacaaaatgtgattcattactaaagtgtgacatgcagtaatggggatttgttaacatttcggatgaggcattactttatccaggtacatagccaccgccatcttcctattgtacatttccagtgacctgtcctccttttgtctccagaggggtctggttgctgcttacagtggtgacagtgacaatgaggaggagctggtggagagacttgagagtgaggaagagaagctagctgactggaagaagatggcctgtctgctctgccggcgccagttcccgaacaaagatgccctagtcaggcaccagcaactctcagaccttcacaagcaaaacatggacatctatcgacgatccaggctgagcgagcaggagctggaagccttggagctaagggagagagaggtgaatgggaaactgtgccacaaggaagaggatattgggataattgcctttagcttttatttgtagcatttagttccagatcccaggggcagggtaggaggatttgtcatacccttgtcatctgaccattgtagttcatgtagcctagacccagcctctgtgtgccttgtgagcctcacattgtcc

SEQ ID NO: 2057 - protein, 73 aa, Homosapiens
MACLLCRRQFPNKDALVRHQQLSDLHKQNMDIYRRSRLSEQELEALELREREVNGKLCHKEEDIGIIAFSFYL

SEQ ID NO: 2058 - DNA, 2755 bp, Homosapiens
aatgcctcaggactggaggtcctcccactctgctgatgtgggagaccccccacgtggggactgccagtataccgcttcccttcgggctggccagtcctcaagtagagacactgaggtagggcaagcgcatctacggggaagagcgctgcctcgggcgttaatgggagagagagctgaggcagaagggggatcggaactcccgctccagaagcgtgaaggtgggggtgtatgagagcacccacccagaaccttgcaggaaaaagttgctttgcacatgggtgaccccgcaggccacatcatccacacatccatacgccgccccgtaggtaaggggtccgggcctccaggacaggagactcagctctgggaggacggccaccatctctggctcagtcacatttggtccccagattctggcaaccctgggtaaaagctcagtcacctgacctagtgacgaccacaagggcactgggaggcatcccaagacccagctcactccagggctggacctcaaccttgtacctgcaggaccacccaccaggagacagaagagagaaaactgtatatgaagacaaggatttctccagaagagaccaggagcaagtataaggactggaggaataaaatgggctacggaacacaggcagatgaagcaaatcacccacccctcaatgcctgctcagcaagcatccacgcctaggaaagggccccaaagtattcctctgaaggtctgggaaaggtatggtaattacaggcacacattatacaggatagctcaatgtcagcagaactcacataaacaggatgaacatggtctacaagagtctgacctaagctgtgctcccaggacagagcaggggcaattacgggtggagctcctgcctagaaggccagtgggtaggggcctccgatcctgggatatgatgcctcaatgtgggctctgatcaatttaaagatttcttatcatgggtgaaaaccctactaaattttttttttttttgagacagagtcgctgttgcccaggctggagtgcagtggcgtgatctcggctcactgcaacctcctcctgccaggttctagcaattctcctgcctcagcttcctgactagctgggattacaggcacacgctgccacgtccagttaatattttgtattttagtagagacggggtttcaccgtgttgcccaggctggtctcaaacttctgggctcaggcaatccaccctcctcggcctcccaaagtgctgggattacaggtgtgagctcatgcctgtaatctgccccttcatgctaaggtaaagctgctcctggctcccaggctctatgagtgctctgatctcatctctggaaccggcctgtaagcctggcaaacatcaagacctgaccccactgcttacctcaatgggagccgtaatgccttgacactttcgtcccaagccagagccttcccgccagcccatggcctgcagcatcttgttgccaatgttactgtggtcaatgccatctttggtgggttgctcgtaattcctgccagtggcaaacacacagttacttaaaacagccagggccccagcttacgaactggaaaatgtgcacatcacatacacagtgccggcatcaaactgcttcttgcgcttgggctctggaggttctggaatgccgtacttctcccgtctttctgcagctcggtctcggtatttcatctacatgggagaaaaaacactgctggaaatgttcacagacttcaacctgtaaccgtctaatgcacctattcaaaactatcccctcaagtatttttaaatctgaagaatgctttttttagactgctctgaaataccaaattcccttgttcccatcatcatacctagtcatatctgaaatgttaaatttgtaaatatgaattgtgtggaaccaggggcagaactatgtctccaacaagcagttttatttaattagccaccctctgtcaagctactcaaccagcccactgggcagtgggtacagcttgcgaagaggaaggcagagttgcccgttctcctcagcatttggacaggcatacctccaacatttggaaaggcatacctccaacatcaaggaggcttccagagacctgttcagcagtcgctggggaggtggaaccatagatagtagggcaggaagggtgtggggagaagaaaagcaaaagccttaactacaaacacttcagaaatatctcaggtgggagatttcaaacccacttgctcatttctaaaccacaggcctctatttgcatttaaatccctgcccacctggccgccaacctgccccaaccaccagcactaactgcttgcccattattgtgtcacaggcttctctcttgcctttgttcccagatctgcttgccatgccctgcccacccttcctttcatatcacctgcaataacctcacgtcctgctgtcccttgggattaatttgaagcgcacttctttgcccatgaaggcttccctggccaggccaaactagaccactctctccataacaaaatccagcgtatttaagcagcaagctctggcattgctgtgagagagtctcggcagtgtgcttctgccttgtgcacccttatgatgaagggacaatgtgaggctcacaaggcacacagaggctgggtctaggctacatgaactacaatggtcagatgacaagggtatgacaaatcctcctaccctgcccctgggatctggaactaaatgctacaaataaaagctaaaggcaatt

SEQ ID NO: 2059 - protein, 51 aa, Homosapiens
MGDPAGHIIHTSIRRPVGKGSGPPGQETQLWEDGHHLWLSHIWSPDSGNPG

SEQ ID NO: 2060 - DNA, 319 bp, Homosapiens
tttgaaatctcccacctgagatatttctgaagtgtttgtagttaaggcttttgcttttcttctccccacacccttcctgccctactatctatggttccacctccccagcgactgctgaacaggtctctggaagcctccttgatgttggaggtatgcctttccaaatgttggagatgaaataccgagaccgagctgcagaaagacgggagaagtacggcattccagaacctccagagcccaagcgcaagaagcagtttgatgccggcactgtgaattacgagcaacccaccaaagatggcattgaccacagtaacattgg

SEQ ID NO: 2061 - protein, 54 aa, Homosapiens
MPFQMLEMKYRDRAAERREKYGIPEPPEPKRKKQFDAGTVNYEQPTKDGIDHSN

SEQ ID NO: 2062 - DNA, 932 bp, Homosapiens
ccgagaccgagctgcagaaagacgggagaagtacggcattccagaacctccagagcccaagcgcaagaagcagtttgatgccggcactgtgtatgtgatgtgcacattttccagttcgtaagctggggccctggctgttttaagtaactgtgtgtttgccactggcaggaattacgagcaacccaccaaagatggcattgaccacagtaacattggcaacaagatgctgcaggccatgggctggcgggaaggctctggcttgggacgaaagtgtcaaggcattacggctcccattgaggctcaagttcggctaaagggagctggcctaggagccaaaggcagcgcatatggtttgtcgggcgccgattcctacaaagatgctgtccggaaagccatgtttgcccggttcactgagatggagtgagagagagagagagagagagatgacaaggagcacaagaagtggtccatctcccgaattcgctgttaccgcctgtctctttaagggcatgccttgtgctgttaatagatcttagggtgaaccacttcattctgcagggttctccctcccaccttaaagaagttccccttatgtgggttgcctggtgaatggccttccttcccgccagagggcttgtgaacagaccggagaggacagtggattgtttatactccagtgtacatagtgtaatgtagcgtgtttacatgtgtagcctatgttgtggtccatcagcccctcacattcctaggggtttgagatgctgtaggtggtatgtgacaccaaagccacctctgtcatttgttgtgatgtcttttcttggcaaaagccttgtgtatatttgtatattacacatttgtacagaattttggaagattttcagtctagttgccaaatctggctcctttacaaaagaaataccttgagaaatggg

SEQ ID NO: 2063 - protein, 66 aa, Homosapiens
MLQAMGWREGSGLGRKCQGITAPIEAQVRLKGAGLGAKGSAYGLSGADSYKDAVRKAMFARFTEME

SEQ ID NO: 2064 - DNA, 1156 bp, Homosapiens
cacctgcagcatctcaaacccctaggaatgtgaggggctgatggaccacaacataggctacacatgtaaacacgctacattacactatgtacactggagtataaacaatccactgtcctctccggtctgttcacaagccctctggcgggaaggaaggccattcaccaggcaacccacataaggggaacttctttaaggtgggagggagaaccctgcagaatgaagtggttcaccctaagatctattaacagcacaaggcatgcccttaaagagacaggcggtaacagcgaattcgggagatggaccacttcttgtgctccttgtcatctctctctctctctctctctcactccatctcagtgaaccgggcaaacatggctttccggacagcatctttgtaggaatcggcgcccgacaaaccatatgcgctgcctttggctcctaggccagctccctttagccgaacttgagcctgggaaagcacagagactgtcagctgggaggtagggtatgggctgctccacctctcaccatgcccactccttacccagcaggaccacccaccaggagacagaagagagaaaactgtatatgaagacaaggatttctccagaagagaccaggagcaagtataaggactggaggaataaaatgggctacggaacacaggcagatgaagcaaatcacccacccctcaatgcctgctcagcaagcatccacgcctaggaaagggccccaaagtattcctctgaaggtctgggaaaggtatggtaattacaggcacacattatacaggatagctcaatgtcagcagaactcacataaacaggatgaacatggtctacaagagtctgacctaagctgtgctcccaggacagagcaggggcaattacgggtggagctcctgcctagaaggccagtgggtaggggcctccgatcctgggatatgatgcctcaatgtgggctctgatcaatttaaagatttcttatcatgggtgaaaaccctactaaattttttttttttttgagacagagtcgctgttgcccaggctggagtgcagtggcgtgatctcggctcactgcaacctcctcctgccaggttctagcaattctcctgcctcagcttcctgactagctgggattacaggcacacgct

SEQ ID NO: 2065 - protein, 98 aa, Homosapiens
MKQITHPSMPAQQASTPRKGPQSIPLKVWERYGNYRHTLYRIAQCQQNSHKQDEHGLQESDLSCAPRTEQGQLRVELLPRRPVGRGLRSWDMMPQCGL

SEQ ID NO: 2066 - DNA, 1182 bp, Homosapiens
taatcccagctagtcaggaagctgaggcaggagaattgctagaacctggcaggaggaggttgcagtgagccgagatcacgccactgcactccagcctgggcaacagcgactctgtctcaaaaaaaaaaaaaatttagtagggttttcacccatgataagaaatctttaaattgatcagagcccacattgaggcatcatatcccaggatcggaggcccctacccactggccttctaggcaggagctccacccgtaattgcccctgctctgtcctgggagcacagcttaggtcagactcttgtagaccatgttcatcctgtttatgtgagttctgctgacattgagctatcctgtataatgtgtgcctgtaattaccatacctttcccagaccttcagaggaatactttggggccctttcctaggcgtggatgcttgctgagcaggcattgaggggtgggtgatttgcttcatctgcctgtgttccgtagcccattttattcctccagtccttatacttgctcctggtctcttctggagaaatccttgtcttcatatacagttttctctcttctgtctcctggtgggtggtcctgctgggtaaggagtgggcatggtgagaggtggagcagcccataccctacctcccagctgacagtctctgtgctttcccaggctcaagttcggctaaagggagctggcctaggagccaaaggcagcgcatatggtttgtcgggcgccgattcctacaaagatgctgtccggaaagccatgtttgcccggttcactgagatggagtgagagagagagagagagagagatgacaaggagcacaagaagtggtccatctcccgaattcgctgttaccgcctgtctctttaaagggcttgtgaacagaccggagaggacagtggattgtttatactccagtgtacatagtgtaatgtagcgtgtttacatgtgtagcctatgttgtggtccatcagcccctcacattcctaggggtttgagatgctgtaggtggtatgtgacaccaaagccacctctgtcatttgttgtgatgtcttttcttggcaaaagccttgtgtatatttgtatattacacatttgtacagaattttggaagattttcagtctagttgccaaatctggctcctttacaaaagaaataccttgagaaatggg

SEQ ID NO: 2067 - protein, 74 aa, Homosapiens
MVCRAPIPTKMLSGKPCLPGSLRWSEREREREMTRSTRSGPSPEFAVTACLFKGLVNRPERTVDCLYSSVHSVM

SEQ ID NO: 2068 - DNA, 3802 bp, Homosapiens
agcgcagcgcaggacctgggtacgccgcgaggaaccgtgcagcccagcgcggccgcccggcccgggtccagcagccaggagagcgcagcgcttcgaagccgagtgcgcgccaccgcccgcgccccgcgctggggaatgcgccctcggcgcgccggccagggggcgcccgcagcccaccccaggggaggcggccccgagcgcccctgagccttcccatggcccgggctggggcccgggccctcggctgctgacgcgcccgaagcccgcggaaccggttaagccgcggccgcggcgccgatcccggctgaggcgcagcggcgagaggtcgcgggcagggccatggccccggggggccgctagcgcggaccggcccaacgggagccgctccgtgccgccgccgccgcccgggcgcccaggccccgccgctgcggaagaggtttctagagagtggagcctgcttcctgggccctaggcccctcccacaatgcttgtcgccggtcttcttctctgggcttccctactgaccggggcctggccatccttccccacccaggaccacctcccggccacgccccgggtccggctctcattcaaagagctgaaggccacaggcaccgcccacttcttcaacttcctgctcaacacaaccgactaccgaatcttgctcaaggacgaggaccacgaccgcatgtacgtgggcagcaaggactacgtgctgtccctggacctgcacgacatcaaccgcgagcccctcattatacactgggcagcctccccacagcgcatcgaggaatgcgtgctctcaggcaaggatgtcaacggcgagtgtgggaacttcgtcaggctcatccagccctggaaccgaacacacctgtatgtgtgcgggacaggtgcctacaaccccatgtgcacctatgtgaaccgcggacgccgcgcccaggccacaccatggacccagactcaggcggtcagaggccgcggcagcagagccacggatggtgccctccgcccgatgcccacagccccacgccaggattacatcttctacctggagcctgagcgactcgagtcagggaagggcaagtgtccgtacgatcccaagctggacacagcatcggccctcatcaatgaggagctctatgctggtgtgtacatcgattttatgggcactgatgcagccatcttccgcacacttggaaagcagacagccatgcgcacggatcagtacaactcccggtggctgaacgacccgtcgttcatccatgctgagctcattcctgacagtgcggagcgcaatgatgataagctttacttcttcttccgtgagcggtcggcagaggcgccgcagagccccgcggtgtacgcccgcatcgggcgcatttgcctgaacgatgacggtggtcactgttgcctggtcaacaagtggagcacattcctgaaggcgcggctcgtctgctctgtcccgggcgaggatggcattgagactcactttgatgagctccaggacgtgtttgtccagcagacccaggacgtgaggaaccctgtcatttacgctgtctttacctcctctggctccgtgttccgaggctctgccgtgtgtgtctactccatggctgatattcgcatggtcttcaacgggccctttgcccacaaagaggggcccaactaccagtggatgcccttctcagggaagatgccctacccacggccgggcacgtgccctggtggaaccttcacgccatctatgaagtccaccaaggattatcctgatgaggtgatcaacttcatgcgcagccacccactcatgtaccaggccgtgtaccctctgcagcggcggcccctggtagtccgcacaggtgctccctaccgccttaccactattgccgtggaccaggtggatgcagccgacgggcgctatgaggtgcttttcctgggcacagaccgcgggacagtgcagaaggtcattgtgctgcccaaggatgaccaggagttggaggagctcatgctggaggaggtggaggtcttcaaggatccagcacccgtcaagaccatgaccatctcttctaagaggcaacaactctacgtggcgtcagccgtgggtgtcacacacctgagcctgcaccgctgccaggcgtatggggctgcctgtgctgactgctgccttgcccgggacccttactgtgcctgggatggccaggcctgctcccgctatacagcatcctccaagaggcggagccgccggcaggacgtccggcacggaaaccccatcaggcagtgccgtgggttcaactccaatgccaacaagaatgccgtggagtctgtgcagtatggcgtggccggcagcgcagccttccttgagtgccagccccgctcgccccaagccactgttaagtggctgttccagcgagatcctggtgaccggcgccgagagattcgtgcagaggaccgcttcctgcgcacagagcagggcttgttgctccgtgcactgcagctcagcgatcgtggcctctactcctgcacagccactgagaacaactttaagcacgtcgtcacacgagtgcagctgcatgtactgggccgggacgccgtccatgctgccctcttcccaccactgtccatgagcgccccgccacccccaggcgcaggccccccaacgcctccttaccaggagttagcccagctgctggcccagccagaagtgggcctcatccaccagtactgccagggttactggcgccatgtgccccccagccccagggaggctccaggggcaccccggtctcctgagccccaggaccagaaaaagccccggaaccgccggcaccaccctccggacacatgaggccagctgcctgtgcctgccatgggccagcctagcccttgtcccttttaatataaaagatatatatatatatatatatatataaaatatctatattctatacacaccctgcccctgcaaagacagtatttattggtgggttgaatatagcctgcctcagtggcagcatcctccaaaacttagacccatgctggtcagagacggcagaaaacagagcctgcctaaccaggcccagccagttggtggggccaggccaggaccacacagtccccagactcagctggaagtctacctgctggacagcctccgccaagatctacaggacaaagggagggagcaagccctactcggatggggcacggactgtccaccttttctgatgtgtgttgtcagcctgtgctgtggcatagacatggatgcgaggaccactttggagactggggtggcctcaagagcacacagagaagggaagaaggggccatcacaggatgccagcccctgcctgggttgggggcactcagccacgaccagccccttcctgggtatttattctctatttattggggataggagaagaggcatcctgcctgggtgggacagcctcttcagccccttctcccctccccgcctggccagggcagggccaccccactctacctccttagctttccctgtgccactttgactcagaggctgggagcatagcagaggggccaggcccaggcagagctgacgggaggccccagctctgaggggagggggtccgtggtagaggcctggggccggtagaggctccccagggctcccttatgtccaccacttcaggggatgggtgtggatgtaattagctctggggggcagttgggtagatgggtgggggctcctggtggccttctgctgcccaggccacagccgcctttgggttccatcttgctaataaacactggctctgggactaga

SEQ ID NO: 2069 - protein, 785 aa, Homosapiens
MLVAGLLLWASLLTGAWPSFPTQDHLPATPRVRLSFKELKATGTAHFFNFLLNTTDYRILLKDEDHDRMYVGSKDYVLSLDLHDINREPLIIHWAASPQRIEECVLSGKDVNGECGNFVRLIQPWNRTHLYVCGTGAYNPMCTYVNRGRRAQATPWTQTQAVRGRGSRATDGALRPMPTAPRQDYIFYLEPERLESGKGKCPYDPKLDTASALINEELYAGVYIDFMGTDAAIFRTLGKQTAMRTDQYNSRWLNDPSFIHAELIPDSAERNDDKLYFFFRERSAEAPQSPAVYARIGRICLNDDGGHCCLVNKWSTFLKARLVCSVPGEDGIETHFDELQDVFVQQTQDVRNPVIYAVFTSSGSVFRGSAVCVYSMADIRMVFNGPFAHKEGPNYQWMPFSGKMPYPRPGTCPGGTFTPSMKSTKDYPDEVINFMRSHPLMYQAVYPLQRRPLVVRTGAPYRLTTIAVDQVDAADGRYEVLFLGTDRGTVQKVIVLPKDDQELEELMLEEVEVFKDPAPVKTMTISSKRQQLYVASAVGVTHLSLHRCQAYGAACADCCLARDPYCAWDGQACSRYTASSKRRSRRQDVRHGNPIRQCRGFNSNANKNAVESVQYGVAGSAAFLECQPRSPQATVKWLFQRDPGDRRREIRAEDRFLRTEQGLLLRALQLSDRGLYSCTATENNFKHVVTRVQLHVLGRDAVHAALFPPLSMSAPPPPGAGPPTPPYQELAQLLAQPEVGLIHQYCQGYWRHVPPSPREAPGAPRSPEPQDQKKPRNRRHHPPDT

SEQ ID NO: 2070 - DNA, 3543 bp, Homosapiens
ctgactggtgctccctctcttccatcttgggctgtctgcatgtgtctcattcccccactctctcctgtgcctcccctctaccgtaataatcaggtccaggtttctctgtactgggagaagacctgtggctggagcaggcagggatgcaccctatctgttccccattcctccaggtgggagggagaaggagtaacccactttattggccacagatgcaggggagaaaggagaaagcatgctgggagctggaaagagccctaagatcacctggtttctagagagtggagcctgcttcctgggccctaggcccctcccacaatgcttgtcgccggtcttcttctctgggcttccctactgaccggggcctggccatccttccccacccaggaccacctcccggccacgccccgggtccggctctcattcaaagagctgaaggccacaggcaccgcccacttcttcaacttcctgctcaacacaaccgactaccgaatcttgctcaaggacgaggaccacgaccgcatgtacgtgggcagcaaggactacgtgctgtccctggacctgcacgacatcaaccgcgagcccctcattatacactgggcagcctccccacagcgcatcgaggaatgcgtgctctcaggcaaggatgtcaacggcgagtgtgggaacttcgtcaggctcatccagccctggaaccgaacacacctgtatgtgtgcgggacaggtgcctacaaccccatgtgcacctatgtgaaccgcggacgccgcgcccaggattacatcttctacctggagcctgagcgactcgagtcagggaagggcaagtgtccgtacgatcccaagctggacacagcatcggccctcatcaatgaggagctctatgctggtgtgtacatcgattttatgggcactgatgcagccatcttccgcacacttggaaagcagacagccatgcgcacggatcagtacaactcccggtggctgaacgacccgtcgttcatccatgctgagctcattcctgacagtgcggagcgcaatgatgataagctttacttcttcttccgtgagcggtcggcagaggcgccgcagagccccgcggtgtacgcccgcatcgggcgcatttgcctgaacgatgacggtggtcactgttgcctggtcaacaagtggagcacattcctgaaggcgcggctcgtctgctctgtcccgggcgaggatggcattgagactcactttgatgagctccaggacgtgtttgtccagcagacccaggacgtgaggaaccctgtcatttacgctgtctttacctcctctggctccgtgttccgaggctctgccgtgtgtgtctactccatggctgatattcgcatggtcttcaacgggccctttgcccacaaagaggggcccaactaccagtggatgcccttctcagggaagatgccctacccacggccgggcacgtgccctggtggaaccttcacgccatctatgaagtccaccaaggattatcctgatgaggtgatcaacttcatgcgcagccacccactcatgtaccaggccgtgtaccctctgcagcggcggcccctggtagtccgcacaggtgctccctaccgccttaccactattgccgtggaccaggtggatgcagccgacgggcgctatgaggtgcttttcctgggcacagaccgcgggacagtgcagaaggtcattgtgctgcccaaggatgaccaggagttggaggagctcatgctggaggaggtggaggtcttcaaggatccagcacccgtcaagaccatgaccatctcttctaagaggcaacaactctacgtggcgtcagccgtgggtgtcacacacctgagcctgcaccgctgccaggcgtatggggctgcctgtgctgactgctgccttgcccgggacccttactgtgcctgggatggccaggcctgctcccgctatacagcatcctccaagaggcggagccgccggcaggacgtccggcacggaaaccccatcaggcagtgccgtgggttcaactccaatgccaacaagaatgccgtggagtctgtgcagtatggcgtggccggcagcgcagccttccttgagtgccagccccgctcgccccaagccactgttaagtggctgttccagcgagatcctggtgaccggcgccgagagattcgtgcagaggaccgcttcctgcgcacagagcagggcttgttgctccgtgcactgcagctcagcgatcgtggcctctactcctgcacagccactgagaacaactttaagcacgtcgtcacacgagtgcagctgcatgtactgggccgggacgccgtccatgctgccctcttcccaccactgtccatgagcgccccgccacccccaggcgcaggccccccaacgcctccttaccaggagttagcccagctgctggcccagccagaagtgggcctcatccaccagtactgccagggttactggcgccatgtgccccccagccccagggaggctccaggggcaccccggtctcctgagccccaggaccagaaaaagccccggaaccgccggcaccaccctccggacacatgaggccagctgcctgtgcctgccatgggccagcctagcccttgtcccttttaatataaaagatatatatatatatatatatatataaaatatctatattctatacacaccctgcccctgcaaagacagtatttattggtgggttgaatatagcctgcctcagtggcagcatcctccaaaacttagacccatgctggtcagagacggcagaaaacagagcctgcctaaccaggcccagccagttggtggggccaggccaggaccacacagtccccagactcagctggaagtctacctgctggacagcctccgccaagatctacaggacaaagggagggagcaagccctactcggatggggcacggactgtccaccttttctgatgtgtgttgtcagcctgtgctgtggcatagacatggatgcgaggaccactttggagactggggtggcctcaagagcacacagagaagggaagaaggggccatcacaggatgccagcccctgcctgggttgggggcactcagccacgaccagccccttcctgggtatttattctctatttattggggataggagaagaggcatcctgcctgggtgggacagcctcttcagccccttctcccctccccgcctggccagggcagggccaccccactctacctccttagctttccctgtgccactttgactcagaggctgggagcatagcagaggggccaggcccaggcagagctgacgggaggccccagctctgaggggagggggtccgtggtagaggcctggggccggtagaggctccccagggctcccttatgtccaccacttcaggggatgggtgtggatgtaattagctctggggggcagttgggtagatgggtgggggctcctggtggccttctgctgcccaggccacagccgcctttgggttccatcttgctaataaacactggctctgggactaga

SEQ ID NO: 2071 - protein, 754 aa, Homosapiens
MLVAGLLLWASLLTGAWPSFPTQDHLPATPRVRLSFKELKATGTAHFFNFLLNTTDYRILLKDEDHDRMYVGSKDYVLSLDLHDINREPLIIHWAASPQRIEECVLSGKDVNGECGNFVRLIQPWNRTHLYVCGTGAYNPMCTYVNRGRRAQDYIFYLEPERLESGKGKCPYDPKLDTASALINEELYAGVYIDFMGTDAAIFRTLGKQTAMRTDQYNSRWLNDPSFIHAELIPDSAERNDDKLYFFFRERSAEAPQSPAVYARIGRICLNDDGGHCCLVNKWSTFLKARLVCSVPGEDGIETHFDELQDVFVQQTQDVRNPVIYAVFTSSGSVFRGSAVCVYSMADIRMVFNGPFAHKEGPNYQWMPFSGKMPYPRPGTCPGGTFTPSMKSTKDYPDEVINFMRSHPLMYQAVYPLQRRPLVVRTGAPYRLTTIAVDQVDAADGRYEVLFLGTDRGTVQKVIVLPKDDQELEELMLEEVEVFKDPAPVKTMTISSKRQQLYVASAVGVTHLSLHRCQAYGAACADCCLARDPYCAWDGQACSRYTASSKRRSRRQDVRHGNPIRQCRGFNSNANKNAVESVQYGVAGSAAFLECQPRSPQATVKWLFQRDPGDRRREIRAEDRFLRTEQGLLLRALQLSDRGLYSCTATENNFKHVVTRVQLHVLGRDAVHAALFPPLSMSAPPPPGAGPPTPPYQELAQLLAQPEVGLIHQYCQGYWRHVPPSPREAPGAPRSPEPQDQKKPRNRRHHPPDT

SEQ ID NO: 2072 - DNA, 1211 bp, Homosapiens
ccgtccatgctgccctcttcccaccactgtccatgagcgccccgccacccccaggcgcaggccccccaacgcctccttaccaggagttagcccagctgctggcccagccagaagtgggcctcatccaccagtactgccagggttactggcgccatgtgccccccagccccagggaggctccaggggcaccccggtctcctgagccccaggaccagaaaaagccccggaaccgccggcaccaccctccggacacatgaggccagctgcctgtgcctgccatgggccagcctagcccttgtcccttttaatataaaagatatatatatatatatatatatataaaatatctatattctatacacaccctgcccctgcaaagacagtatttattggtgggttgaatatagcctgcctcagtggcagcatcctccaaaacttagacccatgctggtcagagacggcagaaaacagagcctgcctaaccaggcccagccagttggtggggccaggccaggaccacacagtccccagactcagctggaagtctacctgctggacagcctccgccaagatctacaggacaaagggagggagcaagccctactcggatggggcacggactgtccaccttttctgatgtgtgttgtcagcctgtgctgtggcatagacatggatgcgaggaccactttggagactggggtggcctcaagagcacacagagaagggaagaaggggccatcacaggatgccagcccctgcctgggttgggggcactcagccacgaccagccccttcctgggtatttattctctatttattggggataggagaagaggcatcctgcctgggtgggacagcctcttcagccccttctcccctccccgcctggccagggcagggccaccccactctacctccttagctttccctgtgccactttgactcagaggctgggagcatagcagaggggccaggcccaggcagagctgacgggaggccccagctctgaggggagggggtccgtggtagaggcctggggccggtagaggctccccagggctcccttatgtccaccacttcaggggatgggtgtggatgtaattagctctggggggcagttgggtagatgggtgggggctcctggtggccttctgctgcccaggccacagccgcctttgggttccatcttgctaataaacactggctttggg

SEQ ID NO: 2073 - protein, 41 aa, Homosapiens
MGVDVISSGGQLGRWVGAPGGLLLPRPQPPLGSILLINTGF

SEQ ID NO: 2074 - DNA, 1286 bp, Homosapiens
cagttgattgcaggtcctcctggggccagaagggtgcctgggaggccaggttctggggatcccctccatccagaagaaccacctgctcactctgtcccttcgcctgctgctgggaccatgggggctggggccagtgctgaggagaagcactccagggagctggaaaagaagctgaaagaggacgctgagaaggatgctcgaaccgtgaagctgctgcttctgggtgccggtgagtccgggaagagcaccatcgtcaagcagatgaagattatccaccaggacgggtactcgctggaagagtgcctcgagtttatcgccatcatctacggcaacacgttgcagtccatcctggccatcgtacgcgccatgaccacactcaacatccagtacggagactctgcacgccaggacgacgcccggaagctgatgcacatggcagacactatcgaggagggcacgatgcccaaggagatgtcggacatcatccagcggctgtggaaggactccggtatccaggcctgttttgagcgcgcctcggagtaccagctcaacgactcggcgggctactacctctccgacctggagcgcctggtaaccccgggctacgtgcccaccgagcaggacgtgctgcgctcgcgagtcaagaccactggcatcatcgagacgcagttctccttcaaggatctcaacttccggatgttcgatgtgggcgggcagcgctcggagcgcaagaagtggatccactgcttcgagggcgtgacctgcatcatcttcatcgcggcgctgagcgcctacgacatggtgctagtggaggacgacgaagtgaaccgcatgcacgagagcctgcacctgttcaacagcatctgcaaccaccgctacttcgccacgacgtccatcgtgctcttccttaacaagaaggacgtcttcttcgagaagatcaagaaggcgcacctcagcatctgtttcccggactacgatggacccaacacctacgaggacgccggcaactacatcaaggtgcagttcctcgagctcaacatgcggcgcgacgtgaaggagatctattcccacatgacgtgcgccaccgacacgcagaacgtcaaatttgtcttcgacgctgtcaccgacatcatcatcaaggagaacctcaaagactgtggcctcttctgaggccagggcctgtgctgcagtcggggacaaggagcttccgtctggcaaggccggggcacaatttgcactcccctcagctagacgcacagactcagcaataaacctttgcatcaggc

SEQ ID NO: 2075 - protein, 350 aa, Homosapiens; identical to SEQ ID NO: 181

SEQ ID NO: 2076 - DNA, 2420 bp, Homosapiens
cagttgattgcaggtcctcctggggccagaagggtgcctgggaggccaggttctggggatcccctccatccagaagaaccacctgctcactctgtcccttcgcctgctgctgggaccatgggggctggggccagtgctgaggagaagcactccagggagctggaaaagaagctgaaagaggacgctgagaaggatgctcgaaccgtgaagctgctgcttctgggtgccggtgagtccgggaagagcaccatcgtcaagcagatgaagattatccaccaggacgggtactcgctggaagagtgcctcgagtttatcgccatcatctacggcaacacgttgcagtccatcctggccatcgtacgcgccatgaccacactcaacatccagtacggagactctgcacgccaggacgacgcccggaagctgatgcacatggcagacactatcgaggagggcacgatgcccaaggagatgtcggacatcatccagcggctgtggaaggactccggtatccaggcctgttttgagcgcgcctcggagtaccagctcaacgactcggcgggctactacctctccgacctggagcgcctggtaaccccgggctacgtgcccaccgagcaggacgtgctgcgctcgcgagtcaagaccactggcatcatcgagacgcagttctccttcaaggatctcaacttccggatgttcgatgtgggcgggcagcgctcggagcgcaagaagtggatccactgcttcgagggcgtgacctgcatcatcttcatcgcggcgctgagcgcctacgacatggtgctagtggaggacgacgaagtgaaccgcatgcacgagagcctgcacctgttcaacagcatctgcaaccaccgctacttcgccacgacgtccatcgtgctcttccttaacaagaaggacgtcttcttcgagaagatcaagaaggcgcacctcagcatctgtttcccggactacgatggacccaacacctacgaggacgccggcaactacatcaaggtgcagttcctcgagctcaacatgcggcgcgacgtgaaggagatctattcccacatgacgtgcgccaccgacacgcagaacgtcaaatttgtcttcgacgctgtcaccgacatcatcatcaaggagaacctcaaagactgtggcctcttctgaggtgcctgaattcatgcgtgtcagtcaccctgagacctggtagccctagctgccttgcagccccaaaccccaggaccctatcagccccctgggactccctggccccaacctgccacctcaccaaagctctgagccctgctagccttgaggcgcggaccctcccccatacctcccacagtatcccagcgcctcatgcccccaaccccaagccctgcccttcaccgcccggctgcactggcctctaggactcacagcagccagccccagctaggaacgggcaggacttggggcagctgaagctcacggtgactcagcagtgcccaactgaccaatctcccgcagctctcctgcccctgggggcccacgactcacctggtgggcctgggctcagcaaacagccctccctcccagtatttcatcaaggacagggaatatccctcccacacacaggccagctgctcaccctgccacctccatgtgacaagtttgacacctgtctacccagagccagtgactgtccctcccagcagcctccaaagggtccaaagtccaagctagctctggcctgtgtggcccccacataaataaattagtggggagggggcagacctgggggcccttgggtgccagagtgagacacagcaggacccttccccaaatactaggctcagagcaacctccagccttctccagcaggatctgctccctgtgtccttggacagcagatccacacaccacttccccacccacacacagtaccctgggctggttggacaacaggatggtgtgttaaggggttaagggagggtactgttgacaccagctatggccaatagctgggctgtcctgaggggtggctggggacagagtccagctcccttggatcagcccagaggattcaggataggacaaaggccctggctgtgcccaaaagggtctacctcaggtggggttacaagcaaacctgggtgaccctcttgtccctaccagcagcttctcttgccccttccattcagggttccctggcaggggaagctgagagccatggctgaactatcagggacaaaggcccatgtccccacatccctgctccctccttcctcatccagcaccaaatctttgcttatgtccacaggccagggcctgtgctgcagtcggggacaaggagcttccgtctggcaaggccggggcacaatttgcactcccctcagctagacgcacagactcagcaataaacctttgcatcaggc

SEQ ID NO: 2077 - protein, 350 aa, Homosapiens; identical to SEQ ID NO: 181

SEQ ID NO: 2078 - DNA, 1875 bp, Homosapiens
cagttgattgcaggtcctcctggggccagaagggtgcctgggaggccaggttctggggatcccctccatccagaagaaccacctgctcactctgtcccttcgcctgctgctgggaccatgggggctggggccagtgctgaggagaagcactccagggagctggaaaagaagctgaaagaggacgctgagaaggatgctcgaaccgtgaagctgctgcttctgggtgccggtgagtccgggaagagcaccatcgtcaagcagatgaagattatccaccaggacgggtactcgctggaagagtgcctcgagtttatcgccatcatctacggcaacacgttgcagtccatcctggccatcgtacgcgccatgaccacactcaacatccagtacggagactctgcacgccaggacgacgcccggaagctgatgcacatggcagacactatcgaggagggcacgatgcccaaggagatgtcggacatcatccagcggctgtggaaggactccggtatccaggcctgttttgagcgcgcctcggagtaccagctcaacgactcggcgggctactacctctccgacctggagcgcctggtaaccccgggctacgtgcccaccgagcaggacgtgctgcgctcgcgagtcaagaccactggcatcatcgagacgcagttctccttcaaggatctcaacttccggatgttcgatgtgggcgggcagcgctcggagcgcaagaagtggatccactgcttcgagggcgtgacctgcatcatcttcatcgcggcgctgagcgcctacgacatggtgctagtggaggacgacgaagtgaaccgcatgcacgagagcctgcacctgttcaacagcatctgcaaccaccgctacttcgccacgacgtccatcgtgctcttccttaacaagaaggacgtcttcttcgagaagatcaagaaggcgcacctcagcatctgtttcccggactacgatggacccaacacctacgaggacgccggcaactacatcaaggtgcagttcctcgagctcaacatgcggcgcgacgtgaaggagatctattcccacatgacgtgcgccaccgacacgcagaacgtcaaatttgtcttcgacgctgtcaccgacatcatcatcaaggagaacctcaaagactgtggcctcttctgaggccagggcctgtgctgcagtcggggacaaggagcttccgtctggcaaggccggggcacaatttgcactcccctcagctagacgcacagactcagcaataaacctttgcatcaggctccagctgtcctttcttggtggaggacttaattatcacaagtcatgggcatttattaagtgcccagtgctgggttgggcatgaagtgggaagatggcccctcccaggaagaagtacctggcctgacaaggtggggcactcttgggggtatgggaccaactcatggcttttcacgggagttgaggagagaggagctgtggaaaatattcactgggacagtcttggatcaagagggagttttgaggtggaggctcattctggcagggaccgtagtgtctaccagccccagaaacatgggcttatggccacaggagttcagtggagcaagagcaggggaggagagacgtggacaggtgcccaaagccagtcggagggcctgggctttctcagaaggtgatggagagtcttggaagccctcgaggcaggaacataattgcagggctgggattagggtgagggaagtgaggcacactcaccttgggtgcaacatttaaggcgatgccaaaaaatttagtaaccaaggtaaataatattaggataatatttttaaaaatcaaatgaatgcaaaaccccacaatgaatgaaatatc

SEQ ID NO: 2079 - protein, 350 aa, Homosapiens; identical to SEQ ID NO: 181

SEQ ID NO: 2080 - DNA, 3009 bp, Homosapiens
cagttgattgcaggtcctcctggggccagaagggtgcctgggaggccaggttctggggatcccctccatccagaagaaccacctgctcactctgtcccttcgcctgctgctgggaccatgggggctggggccagtgctgaggagaagcactccagggagctggaaaagaagctgaaagaggacgctgagaaggatgctcgaaccgtgaagctgctgcttctgggtgccggtgagtccgggaagagcaccatcgtcaagcagatgaagattatccaccaggacgggtactcgctggaagagtgcctcgagtttatcgccatcatctacggcaacacgttgcagtccatcctggccatcgtacgcgccatgaccacactcaacatccagtacggagactctgcacgccaggacgacgcccggaagctgatgcacatggcagacactatcgaggagggcacgatgcccaaggagatgtcggacatcatccagcggctgtggaaggactccggtatccaggcctgttttgagcgcgcctcggagtaccagctcaacgactcggcgggctactacctctccgacctggagcgcctggtaaccccgggctacgtgcccaccgagcaggacgtgctgcgctcgcgagtcaagaccactggcatcatcgagacgcagttctccttcaaggatctcaacttccggatgttcgatgtgggcgggcagcgctcggagcgcaagaagtggatccactgcttcgagggcgtgacctgcatcatcttcatcgcggcgctgagcgcctacgacatggtgctagtggaggacgacgaagtgaaccgcatgcacgagagcctgcacctgttcaacagcatctgcaaccaccgctacttcgccacgacgtccatcgtgctcttccttaacaagaaggacgtcttcttcgagaagatcaagaaggcgcacctcagcatctgtttcccggactacgatggacccaacacctacgaggacgccggcaactacatcaaggtgcagttcctcgagctcaacatgcggcgcgacgtgaaggagatctattcccacatgacgtgcgccaccgacacgcagaacgtcaaatttgtcttcgacgctgtcaccgacatcatcatcaaggagaacctcaaagactgtggcctcttctgaggtgcctgaattcatgcgtgtcagtcaccctgagacctggtagccctagctgccttgcagccccaaaccccaggaccctatcagccccctgggactccctggccccaacctgccacctcaccaaagctctgagccctgctagccttgaggcgcggaccctcccccatacctcccacagtatcccagcgcctcatgcccccaaccccaagccctgcccttcaccgcccggctgcactggcctctaggactcacagcagccagccccagctaggaacgggcaggacttggggcagctgaagctcacggtgactcagcagtgcccaactgaccaatctcccgcagctctcctgcccctgggggcccacgactcacctggtgggcctgggctcagcaaacagccctccctcccagtatttcatcaaggacagggaatatccctcccacacacaggccagctgctcaccctgccacctccatgtgacaagtttgacacctgtctacccagagccagtgactgtccctcccagcagcctccaaagggtccaaagtccaagctagctctggcctgtgtggcccccacataaataaattagtggggagggggcagacctgggggcccttgggtgccagagtgagacacagcaggacccttccccaaatactaggctcagagcaacctccagccttctccagcaggatctgctccctgtgtccttggacagcagatccacacaccacttccccacccacacacagtaccctgggctggttggacaacaggatggtgtgttaaggggttaagggagggtactgttgacaccagctatggccaatagctgggctgtcctgaggggtggctggggacagagtccagctcccttggatcagcccagaggattcaggataggacaaaggccctggctgtgcccaaaagggtctacctcaggtggggttacaagcaaacctgggtgaccctcttgtccctaccagcagcttctcttgccccttccattcagggttccctggcaggggaagctgagagccatggctgaactatcagggacaaaggcccatgtccccacatccctgctccctccttcctcatccagcaccaaatctttgcttatgtccacaggccagggcctgtgctgcagtcggggacaaggagcttccgtctggcaaggccggggcacaatttgcactcccctcagctagacgcacagactcagcaataaacctttgcatcaggctccagctgtcctttcttggtggaggacttaattatcacaagtcatgggcatttattaagtgcccagtgctgggttgggcatgaagtgggaagatggcccctcccaggaagaagtacctggcctgacaaggtggggcactcttgggggtatgggaccaactcatggcttttcacgggagttgaggagagaggagctgtggaaaatattcactgggacagtcttggatcaagagggagttttgaggtggaggctcattctggcagggaccgtagtgtctaccagccccagaaacatgggcttatggccacaggagttcagtggagcaagagcaggggaggagagacgtggacaggtgcccaaagccagtcggagggcctgggctttctcagaaggtgatggagagtcttggaagccctcgaggcaggaacataattgcagggctgggattagggtgagggaagtgaggcacactcaccttgggtgcaacatttaaggcgatgccaaaaaatttagtaaccaaggtaaataatattaggataatatttttaaaaatcaaatgaatgcaaaaccccacaatgaatgaaatatc

SEQ ID NO: 2081 - protein, 350 aa, Homosapiens; identical to SEQ ID NO: 181

SEQ ID NO: 2082 - DNA, 1311 bp, Homosapiens
cctggggccagaagggtgcctgggaggccaggttctggggatcccctccatccagaagaaccacctgctcactctgtcccttcgcctgctgctgggaccatgggggctggggccagtgctgaggagaagcactccagggagctggaaaagaagctgaaagaggacgctgagaaggatgctcgaaccgctctgagccctgctagccttgaggcgcggaccctcccccatacctcccacagtatcccagcgcctcatgcccccaaccccaagccctgcccttcaccgcccggctgcactggcctctaggactcacagcagccagccccagctaggaacgggcaggacttggggcagctgaagctcacggtgactcagcagtgcccaactgaccaatctcccgcagctctcctgcccctgggggcccacgactcacctggtgggcctgggctcagcaaacagccctccctcccagtatttcatcaaggacagggaatatccctcccacacacaggccagctgctcaccctgccacctccatgtgacaagtttgacacctgtctacccagagccagtgactgtccctcccagcagcctccaaagggtccaaagtccaagctagctctggcctgtgtggcccccacataaataaattagtggggagggggcagacctgggggcccttgggtgccagagtgagacacagcaggacccttccccaaatactaggctcagagcaacctccagccttctccagcaggatctgctccctgtgtccttggacagcagatccacacaccacttccccacccacacacagtaccctgggctggttggacaacaggatggtgtgttaaggggttaagggagggtactgttgacaccagctatggccaatagctgggctgtcctgaggggtggctggggacagagtccagctcccttggatcagcccagaggattcaggataggacaaaggccctggctgtgcccaaaagggtctacctcaggtggggttacaagcaaacctgggtgaccctcttgtccctaccagcagcttctcttgccccttccattcagggttccctggcaggggaagctgagagccatggctgaactatcagggacaaaggcccatgtccccacatccctgctccctccttcctcatccagcaccaaatctttgcttatgtccacaggccagggcctgtgctgcagtcggggacaaggagcttccgtctggcaaggccggggcacaatttgcactcccctcagctagacgcacagactcagcaataaacctttgcatcaggc

SEQ ID NO: 2083 - protein, 68 aa, Homosapiens
MGAGASAEEKHSRELEKKLKEDAEKDARTALSPASLEARTLPHTSHSIPAPHAPNPKPCPSPPGCTGL

SEQ ID NO: 2084 - DNA, 1900 bp, Homosapiens
cctggggccagaagggtgcctgggaggccaggttctggggatcccctccatccagaagaaccacctgctcactctgtcccttcgcctgctgctgggaccatgggggctggggccagtgctgaggagaagcactccagggagctggaaaagaagctgaaagaggacgctgagaaggatgctcgaaccgctctgagccctgctagccttgaggcgcggaccctcccccatacctcccacagtatcccagcgcctcatgcccccaaccccaagccctgcccttcaccgcccggctgcactggcctctaggactcacagcagccagccccagctaggaacgggcaggacttggggcagctgaagctcacggtgactcagcagtgcccaactgaccaatctcccgcagctctcctgcccctgggggcccacgactcacctggtgggcctgggctcagcaaacagccctccctcccagtatttcatcaaggacagggaatatccctcccacacacaggccagctgctcaccctgccacctccatgtgacaagtttgacacctgtctacccagagccagtgactgtccctcccagcagcctccaaagggtccaaagtccaagctagctctggcctgtgtggcccccacataaataaattagtggggagggggcagacctgggggcccttgggtgccagagtgagacacagcaggacccttccccaaatactaggctcagagcaacctccagccttctccagcaggatctgctccctgtgtccttggacagcagatccacacaccacttccccacccacacacagtaccctgggctggttggacaacaggatggtgtgttaaggggttaagggagggtactgttgacaccagctatggccaatagctgggctgtcctgaggggtggctggggacagagtccagctcccttggatcagcccagaggattcaggataggacaaaggccctggctgtgcccaaaagggtctacctcaggtggggttacaagcaaacctgggtgaccctcttgtccctaccagcagcttctcttgccccttccattcagggttccctggcaggggaagctgagagccatggctgaactatcagggacaaaggcccatgtccccacatccctgctccctccttcctcatccagcaccaaatctttgcttatgtccacaggccagggcctgtgctgcagtcggggacaaggagcttccgtctggcaaggccggggcacaatttgcactcccctcagctagacgcacagactcagcaataaacctttgcatcaggctccagctgtcctttcttggtggaggacttaattatcacaagtcatgggcatttattaagtgcccagtgctgggttgggcatgaagtgggaagatggcccctcccaggaagaagtacctggcctgacaaggtggggcactcttgggggtatgggaccaactcatggcttttcacgggagttgaggagagaggagctgtggaaaatattcactgggacagtcttggatcaagagggagttttgaggtggaggctcattctggcagggaccgtagtgtctaccagccccagaaacatgggcttatggccacaggagttcagtggagcaagagcaggggaggagagacgtggacaggtgcccaaagccagtcggagggcctgggctttctcagaaggtgatggagagtcttggaagccctcgaggcaggaacataattgcagggctgggattagggtgagggaagtgaggcacactcaccttgggtgcaacatttaaggcgatgccaaaaaatttagtaaccaaggtaaataatattaggataatatttttaaaaatcaaatgaatgcaaaaccccacaatgaatgaaatatc

SEQ ID NO: 2085 - protein, 68 aa, Homosapiens; identical to SEQ ID NO: 2083

SEQ ID NO: 2086 - DNA, 2445 bp, Homosapiens
gcagccgagttcagccgggagcagagcgaaccgcaccggcccgagcggagcgccgcacgttcccaaccgcgaggccagacatctgactgttggtgtgagaccagtgctcctggtggtgtgccctgagccatggaggcgcctttgcagacagagatggtggagctggtgcccaatggcaaacactcagaggggctgctcccggtcatcacccccatggcaggcaaccagaggtcgaggaccctgcacggagctgtatggagggcaagagcttcctacagaaaagtcccagcaaggagccacacttcactgacttcgaggggaagacatcattcgggatgtcagtgttcaacctcagcaatgccatcatgggcagcggcatcctgggactcgcctatgccatggccaatacgggcattatccttttcctgttcctgttgacagctgtcgccttgctctccagctactccatccacctgctactcaagtcctcaggggtcgtgggcatccgtgcctatgagcagctgggctaccgtgcctttgggaccccaggaaagctggcagcagccctggccatcacgctccagaacatcggagccatgtccagctacctgtacatcatcaagtctgagctgccacttgtcatacagaccttcctgaacctggaggagaaaacctcggactggtacatgaacgggaactacctggtaatccttgtctctgtcaccatcattctgcccctggcactgatgcggcagcttggctacctgggctactccagcggcttctctcttagctgcatggtgttcttcctaattgcagtcatctacaaaaagttccacgtgccctgcccactgccccccaacttcaacaacaccacaggcaacttcagccacgtggagatcgtgaaggagaaggtgcagctgcaggtcgagcctgaggcttcagccttctgcactcccagctacttcacgctcaactcacagacagcatacaccatccccatcatggccttcgccttcgtctgccaccccgaggtgctgcccatctatactgagctcaaggacccctccaagaagaagatgcagcacatctccaacctgtccatcgctgtcatgtacatcatgtacttcctggctgccctcttcggctacctcaccttctacaacggggtggagtcggagctgctgcacacctacagcaaggtggacccgtttgacgtcctgatcctgtgtgtgcgcgtggccgtgctgacagcagtcacgctcacagtgcccatcgttctgttcccggtgcgccgcgccatccagcagatgctgtttccaaaccaggagttcagctggctgcggcatgtgcttattgccgttggcctgctcacttgtatcaacctgctggtcatctttgcccccaacatcctgggcatctttggggtcatcggtgccacatctgccccattcctcatcttcatcttccctgccatcttctacttccgaatcatgcccacggagaaggagcctgcaagatccacccccaaaatcctggccctgtgttttgctatgcttggcttcttgctgatgaccatgagcttgagcttcatcatcattgactgggcctcagggaccagccggcatggaggaaaccactagggtgaccctcatcctgttctgtctactcaccctagcagccctgcccagactcttcagcccctgctcccatccagtggccagtcgggggaggagaaagacgcgattaacactgtggcattcagccaggccccatgtcctctctgtggaaggtttttgttcaagagccaggaccaaggcccttgggccactaccctgctaggctctggagctgtagaggcttcctgaactgggagcagggtagggctgtcgccttagatcccgcccaagcccctcattccctccttgcacagatgcatacactggggcccagcagctgcctcctgaggtgacacagcctgtaggaacatacacagctgggatcagcctgcagccatcccccgaccctgctgctaggccacggtctgcgccctggggcctcatctcccccagcccacttgttttccccccttttattccctaggcccttttcagactcctgggcccttggatactcttctcccatctcccttcacaggatgacaccctcccataccccatagctggggccagcaggttctgctgagggtggggctggtgtagggacccccaagagacccctgtcctgtcccttcaccagtcctggggaggctgggactccccctgccacaagcctgggccacagctcacattccactgctgggagaagaaacaggccgaggcccagagtggcctgcccccgggagccaaagaccccagtggccacactgggatagggtggggaggctggcagccctcttttataaatattatacataagaccagc

SEQ ID NO: 2087 - protein, 462 aa, Homosapiens
MEGKSFLQKSPSKEPHFTDFEGKTSFGMSVFNLSNAIMGSGILGLAYAMANTGIILFLFLLTAVALLSSYSIHLLLKSSGVVGIRAYEQLGYRAFGTPGKLAAALAITLQNIGAMSSYLYIIKSELPLVIQTFLNLEEKTSDWYMNGNYLVILVSVTIILPLALMRQLGYLGYSSGFSLSCMVFFLIAVIYKKFHVPCPLPPNFNNTTGNFSHVEIVKEKVQLQVEPEASAFCTPSYFTLNSQTAYTIPIMAFAFVCHPEVLPIYTELKDPSKKKMQHISNLSIAVMYIMYFLAALFGYLTFYNGVESELLHTYSKVDPFDVLILCVRVAVLTAVTLTVPIVLFPVRRAIQQMLFPNQEFSWLRHVLIAVGLLTCINLLVIFAPNILGIFGVIGATSAPFLIFIFPAIFYFRIMPTEKEPARSTPKILALCFAMLGFLLMTMSLSFIIIDWASGTSRHGGNH

SEQ ID NO: 2088 - DNA, 562 bp, Homosapiens
cgagttcagccgggagcagagcgaaccgcaccggcccgagcggagcgccgcacgttcccaaccgcgaggccagacatctgactgttggtgtgagaccagtgctcctggtggtgtgccctgagccatggaggcgcctttgcagacagagatggtggagctggtgcccaatggcaaacactcagaggggctgctcccggtcatcacccccatggcaggcaaccagaggtcgaggaccctgcacggagctgtatggagggcaagagcttcctacagaaaagtcccagcaaggagccacacttcactgacttcgaggggaagacatcattcgggatgtcagtgttcaacctcagcaatgccatcatgggcagcggcatcctgggactcgcctatgccatggccaatacgggcattatccttttcctgtgagtgccctcagagaaacttctaaagataggggccctaagcaagccaccaatcatgacctcccaggacccgccagttccctgtcccagcatccaggctgcagtgggtgggcacttcttacactaacaaaccgcggctg

SEQ ID NO: 2089 - protein, 107 aa, Homosapiens
MEAPLQTEMVELVPNGKHSEGLLPVITPMAGNQRSRTLHGAVWRARASYRKVPARSHTSLTSRGRHHSGCQCSTSAMPSWAAASWDSPMPWPIRALSFSCECPQRNF

SEQ ID NO: 2090 - DNA, 2423 bp, Homosapiens
acacgttgcccagccgtgtggctgggatggtcggtacccatggccgtgcggtcgagccttgatgctccaggacagtcctggaaggcttcctggcagatccgtgggaagaaagccgacagaagggcgggaggcgggaggggaaaggtcccccgggatgggtagggcctcaacgctgggcatcggcgcaggtgtgtactgcagggagccagccagaccccccacggactgcctgaccttgggggaagcccggagtagaggaagaggccggacccccagacccgccattgactatgtccgccattgactatgtgttctgagagaaatttttttttttttttttgagactgagtctcactctttcgcccaggccggagtgcagtggcgcgatctcggctcactgcaagctccgcctcccgggttcacgccattctcctgcctcagcctcccgagtagctgggactacaggcgcccgctaccgcgcccggctaattttttgtatttttaatagagacggggtttcaccgtgttagccaggatggtctcgatctcctgacctcgtgatccgcccgccttggcctcccagagtgctgggatgacaggcgtgagcctctgagagcaaattttacccagttcctctctatcctcccgatgactctgaaatcaaactcagcaagtcatccgagcccccacggcgcagcggccctaggctggcatgggcgatgcggagctactccgccctcaggaagcaggcgaggtgcccagcgggagaatcacccacatcaccgtctaatctctgctgtgaagtggaagcgcgagaaggagggagcgtctcatgacggagggtgtgaagacgctaggctggacgaagcagaaaggcgggtgtcactggggacgttctgagggtgctggggagtcagggaagagcaccatcgtcaagcagatgaagatcatccacgaggatggctactccgaggaggaatgccggcagtaccgggcggttgtctacagcaacaccatccagtccatcatggccattgtcaaagccatgggcaacctgcagatcgactttgccgacccctccagagcggacgacgccaggcagctatttgcactgtcctgcaccgccgaggagcaaggcgtgctccctgatgacctgtccggcgtcatccggaggctctgggctgaccatggtgtgcaggcctgctttggccgctcaagggaataccagctcaacgactcagctgcctactacctgaacgacctggagcgtattgcacagagtgactacatccccacacagcaagatgtgctacggacccgcgtaaagaccacggggatcgtggagacacacttcaccttcaaggacctacacttcaagatgtttgatgtgggtggtcagcggtctgagcggaagaagtggatccactgctttgagggcgtcacagccatcatcttctgcgtagccttgagcgcctatgacttggtgctagctgaggacgaggagatgaaccgcatgcatgagagcatgaagctattcgatagcatctgcaacaacaagtggttcacagacacgtccatcatcctcttcctcaacaagaaggacctgtttgaggagaagatcacacacagtcccctgaccatctgcttccctgagtacacaggggccaacaaatatgatgaggcagccagctacatccagagtaagtttgaggacctgaataagcgcaaagacaccaaggagatctacacgcacttcacgtgcgccaccgacaccaagaacgtgcagttcgtgtttgacgccgtcaccgatgtcatcatcaagaacaacctgaaggactgcggcctcttctgaggggcagcggggcctggcgggatgggccaccgccgactttgtaccccccaacccctgaggaagatgggggcaagaagatcacgctccccgcctgttcccccgccgcttttctcctctttcctctctttgttctcagctccccctgtcccctcagctccagacgtaggggaggggttgccacaggcctccctgtttgaagcctgcccttgtctgagatgctggtaatggccatggtacccccttctgggcatctgttctggtttttaaccattgtcttgttctgtgatgaggggaggggggcacatgctgagtctcccaaggctgcgtctggaggggcccctgcttctccagcctggacccccagctttgcccaacaccagcccctgccccagcccaagtccaaatgtttacagggagcctcctgcccagtcccccaaccccagccgctcggaggccccaaaggaaaaagcacaagaagcgtgagacgccaccattcctggaaaccacagtccacctgctcattctcgtagctttttaaaaaaatgaaagtaaaggaaaaaaaaaaaactgc

SEQ ID NO: 2091 - protein, 339 aa, Homosapiens
MTEGVKTLGWTKQKGGCHWGRSEGAGESGKSTIVKQMKIIHEDGYSEEECRQYRAVVYSNTIQSIMAIVKAMGNLQIDFADPSRADDARQLFALSCTAEEQGVLPDDLSGVIRRLWADHGVQACFGRSREYQLNDSAAYYLNDLERIAQSDYIPTQQDVLRTRVKTTGIVETHFTFKDLHFKMFDVGGQRSERKKWIHCFEGVTAIIFCVALSAYDLVLAEDEEMNRMHESMKLFDSICNNKWFTDTSIILFLNKKDLFEEKITHSPLTICFPEYTGANKYDEAASYIQSKFEDLNKRKDTKEIYTHFTCATDTKNVQFVFDAVTDVIIKNNLKDCGLF

SEQ ID NO: 2092 - DNA, 2866 bp, Homosapiens
acacgttgcccagccgtgtggctgggatggtcggtacccatggccgtgcggtcgagccttgatgctccaggacagtcctggaaggcttcctggcagatccgtgggaagaaagccgacagaagggcgggaggcgggaggggaaaggtcccccgggatgggtagggcctcaacgctgggcatcggcgcaggtgtgtactgcagggagccagccagaccccccacggactgcctgaccttgggggaagcccggagtagaggaagaggccggacccccagacccgccattgactatgtccgccattgactatgtgttctgagagaaatttttttttttttttttgagactgagtctcactctttcgcccaggccggagtgcagtggcgcgatctcggctcactgcaagctccgcctcccgggttcacgccattctcctgcctcagcctcccgagtagctgggactacaggcgcccgctaccgcgcccggctaattttttgtatttttaatagagacggggtttcaccgtgttagccaggatggtctcgatctcctgacctcgtgatccgcccgccttggcctcccagagtgctgggatgacaggcgtgagcctctgagagcaaattttacccagttcctctctatcctcccgatgactctgaaatcaaactcagcaagtcatccgagcccccacggcgcagcggccctaggctggcatgggcgatgcggagctactccgccctcaggaagcaggcgaggtgcccagcgggagaatcacccacatcaccgtctaatctctgctgtgaagtggaagcgcgagaaggagggagcgtctcatgacggagggtgtgaagacgctaggctggacgaagcagaaaggcgggtgtcactggggacgttctgagggtgctggggagtcagggaagagcaccatcgtcaagcagatgaagatcatccacgaggatggctactccgaggaggaatgccggcagtaccgggcggttgtctacagcaacaccatccagtccatcatggccattgtcaaagccatgggcaacctgcagatcgactttgccgacccctccagagcggacgacgccaggcagctatttgcactgtcctgcaccgccgaggagcaaggcgtgctccctgatgacctgtccggcgtcatccggaggctctgggctgaccatggtgtgcaggcctgctttggccgctcaagggaataccagctcaacgactcagctgcctactacctgaacgacctggagcgtattgcacagagtgactacatccccacacagcaagatgtgctacggacccgcgtaaagaccacggggatcgtggagacacacttcaccttcaaggacctacacttcaagatgtttgatgtgggtggtcagcggtctgagcggaagaagtggatccactgctttgagggcgtcacagccatcatcttctgcgtagccttgagcgcctatgacttggtgctagctgaggacgaggagatgaaccgcatgcatgagagcatgaagctattcgatagcatctgcaacaacaagtggttcacagacacgtccatcatcctcttcctcaacaagaaggacctgtttgaggagaagatcacacacagtcccctgaccatctgcttccctgagtacacaggggccaacaaatatgatgaggcagccagctacatccagagtaagtttgaggacctgaataagcgcaaagacaccaaggagatctacacgcacttcacgtgcgccaccgacaccaagaacgtgcagttcgtgtttgacgccgtcaccgatgtcatcatcaagaacaacctgaaggactgcggcctcttctgaggggcagcggggcctggcgggatgggccaccgccgactttgtaccccccaacccctgaggaagatgggggcaagaagatcacgctccccgcctgttcccccgccgcttttctcctctttcctctctttgttctcagctccccctgtcccctcagctccagacgtaggggaggggttgccacaggcctccctgtttgaagcctgcccttgtctgagatgctggtaatggccatggtacccccttctgggcatctgttctggtttttaaccattgtcttgttctgtgatgaggggaggggggcacatgctgagtctcccaaggctgcgtctggaggggcccctgcttctccagcctggacccccagctttgcccaacaccagcccctgccccagcccaagtccaaatgtttacagggagcctcctgcccagtcccccaaccccagccgctcggaggccccaaaggaaaaagcacaagaagcgtgagacgccaccattcctggaaaccacagtccacctgctcattctcgtagctttttaaaaaaatgaaagtaaaggaaaaaaaaaaaactgcaaatctagaaaactttttagagaaaaactatttaaaactgtcagatcctgaccagcaagcccccccccagccccccttccaagtgactccgtgccttgagtgtgtctgcgtgtttacacccgtccctctgctggccgcccccgtgcgagcggcacccctgccctgccctccacagaattgggttccaagggctgttccagacaactgccaacgtcactgagggccctgccccagcggccctggccccaggctctattaacctaaaatgtagctccctagcgctaacctaggaaccgccgctgcctgctggggggccacgcccctcatgcccttgtcccaggcccggggccttcagcgttgaacacttccttgcttttttcacatgttttatggaattgttcacctggtttgaaataataaaatgtagaaagaaaaaaaatacc

SEQ ID NO: 2093 - protein, 339 aa, Homosapiens; identical to SEQ ID NO: 2091

SEQ ID NO: 2094 - DNA, 2102 bp, Homosapiens
ccgagtagctgggactacaggcgcccgctaccgcgcccggctaattttttgtatttttaatagagacggggtttcaccgtgttagccaggatggtctcgatctcctgacctcgtgatccgcccgccttggcctcccagagtgctgggatgacaggcgtgagcctctgagagcaaattttacccagttcctctctatcctcccgatgactctgaaatcaaactcagcaagtcatccgagcccccacggcgcagcggccctaggctggcatgggcgatgcggagctactccgccctcaggaagcaggcgaggtgcccagcgggagaatcacccacatcaccgtctaatctctgctgtgaagtggaagcgcgagaaggagggagcgtctcatgacggagggtgtgaagacgctaggctggacgaagcagaaaggcgggtgtcactggggacgttctgagggcccctggttgctaaggctcagtgtggggagaagaagggctgctaccctgttggatggagtatgcagggcatcttcctgccagctctgcccagggcaccatattggcatgcaccagctgcacaggtgctggggagtcagggaagagcaccatcgtcaagcagatgaagatcatccacgaggatggctactccgaggaggaatgccggcagtaccgggcggttgtctacagcaacaccatccagtccatcatggccattgtcaaagccatgggcaacctgcagatcgactttgccgacccctccagagcggacgacgccaggcagctatttgcactgtcctgcaccgccgaggagcaaggcgtgctccctgatgacctgtccggcgtcatccggaggctctgggctgaccatggtgtgcaggcctgctttggccgctcaagggaataccagctcaacgactcagctgcctactacctgaacgacctggagcgtattgcacagagtgactacatccccacacagcaagatgtgctacggacccgcgtaaagaccacggggatcgtggagacacacttcaccttcaaggacctacacttcaagatgtttgatgtgggtggtcagcggtctgagcggaagaagtggatccactgctttgagggcgtcacagccatcatcttctgcgtagccttgagcgcctatgacttggtgctagctgaggacgaggagatgaaccgcatgcatgagagcatgaagctattcgatagcatctgcaacaacaagtggttcacagacacgtccatcatcctcttcctcaacaagaaggacctgtttgaggagaagatcacacacagtcccctgaccatctgcttccctgagtacacaggggccaacaaatatgatgaggcagccagctacatccagagtaagtttgaggacctgaataagcgcaaagacaccaaggagatctacacgcacttcacgtgcgccaccgacaccaagaacgtgcagttcgtgtttgacgccgtcaccgatgtcatcatcaagaacaacctgaaggactgcggcctcttctgaggggcagcggggcctggcgggatgggccaccgccgactttgtaccccccaacccctgaggaagatgggggcaagaagatcacgctccccgcctgttcccccgccgcttttctcctctttcctctctttgttctcagctccccctgtcccctcagctccagacgtaggggaggggttgccacaggcctccctgtttgaagcctgcccttgtctgagatgctggtaatggccatggtacccccttctgggcatctgttctggtttttaaccattgtcttgttctgtgatgaggggaggggggcacatgctgagtctcccaaggctgcgtctggaggggcccctgcttctccagcctggacccccagctttgcccaacaccagcccctgccccagcccaagtccaaatgtttacagggagcctcctgcccagtcccccaaccccagccgctcggaggccccaaaggaaaaagcacaagaagcgtgagacgccaccattcctggaaaccacagtccacctgctcattctcgtagctttttaaaaaaatgaaagtaaaggaaaaaaaaaaaactgc

SEQ ID NO: 2095 - protein, 339 aa, Homosapiens
MEYAGHLPASSAQGTILACTSCTGAGESGKSTIVKQMKIIHEDGYSEEECRQYRAVVYSNTIQSIMAIVKAMGNLQIDFADPSRADDARQLFALSCTAEEQGVLPDDLSGVIRRLWADHGVQACFGRSREYQLNDSAAYYLNDLERIAQSDYIPTQQDVLRTRVKTTGIVETHFTFKDLHFKMFDVGGQRSERKKWIHCFEGVTAIIFCVALSAYDLVLAEDEEMNRMHESMKLFDSICNNKWFTDTSIILFLNKKDLFEEKITHSPLTICFPEYTGANKYDEAASYIQSKFEDLNKRKDTKEIYTHFTCATDTKNVQFVFDAVTDVIIKNNLKDCGLF

SEQ ID NO: 2096 - DNA, 2545 bp, Homosapiens
ccgagtagctgggactacaggcgcccgctaccgcgcccggctaattttttgtatttttaatagagacggggtttcaccgtgttagccaggatggtctcgatctcctgacctcgtgatccgcccgccttggcctcccagagtgctgggatgacaggcgtgagcctctgagagcaaattttacccagttcctctctatcctcccgatgactctgaaatcaaactcagcaagtcatccgagcccccacggcgcagcggccctaggctggcatgggcgatgcggagctactccgccctcaggaagcaggcgaggtgcccagcgggagaatcacccacatcaccgtctaatctctgctgtgaagtggaagcgcgagaaggagggagcgtctcatgacggagggtgtgaagacgctaggctggacgaagcagaaaggcgggtgtcactggggacgttctgagggcccctggttgctaaggctcagtgtggggagaagaagggctgctaccctgttggatggagtatgcagggcatcttcctgccagctctgcccagggcaccatattggcatgcaccagctgcacaggtgctggggagtcagggaagagcaccatcgtcaagcagatgaagatcatccacgaggatggctactccgaggaggaatgccggcagtaccgggcggttgtctacagcaacaccatccagtccatcatggccattgtcaaagccatgggcaacctgcagatcgactttgccgacccctccagagcggacgacgccaggcagctatttgcactgtcctgcaccgccgaggagcaaggcgtgctccctgatgacctgtccggcgtcatccggaggctctgggctgaccatggtgtgcaggcctgctttggccgctcaagggaataccagctcaacgactcagctgcctactacctgaacgacctggagcgtattgcacagagtgactacatccccacacagcaagatgtgctacggacccgcgtaaagaccacggggatcgtggagacacacttcaccttcaaggacctacacttcaagatgtttgatgtgggtggtcagcggtctgagcggaagaagtggatccactgctttgagggcgtcacagccatcatcttctgcgtagccttgagcgcctatgacttggtgctagctgaggacgaggagatgaaccgcatgcatgagagcatgaagctattcgatagcatctgcaacaacaagtggttcacagacacgtccatcatcctcttcctcaacaagaaggacctgtttgaggagaagatcacacacagtcccctgaccatctgcttccctgagtacacaggggccaacaaatatgatgaggcagccagctacatccagagtaagtttgaggacctgaataagcgcaaagacaccaaggagatctacacgcacttcacgtgcgccaccgacaccaagaacgtgcagttcgtgtttgacgccgtcaccgatgtcatcatcaagaacaacctgaaggactgcggcctcttctgaggggcagcggggcctggcgggatgggccaccgccgactttgtaccccccaacccctgaggaagatgggggcaagaagatcacgctccccgcctgttcccccgccgcttttctcctctttcctctctttgttctcagctccccctgtcccctcagctccagacgtaggggaggggttgccacaggcctccctgtttgaagcctgcccttgtctgagatgctggtaatggccatggtacccccttctgggcatctgttctggtttttaaccattgtcttgttctgtgatgaggggaggggggcacatgctgagtctcccaaggctgcgtctggaggggcccctgcttctccagcctggacccccagctttgcccaacaccagcccctgccccagcccaagtccaaatgtttacagggagcctcctgcccagtcccccaaccccagccgctcggaggccccaaaggaaaaagcacaagaagcgtgagacgccaccattcctggaaaccacagtccacctgctcattctcgtagctttttaaaaaaatgaaagtaaaggaaaaaaaaaaaactgcaaatctagaaaactttttagagaaaaactatttaaaactgtcagatcctgaccagcaagcccccccccagccccccttccaagtgactccgtgccttgagtgtgtctgcgtgtttacacccgtccctctgctggccgcccccgtgcgagcggcacccctgccctgccctccacagaattgggttccaagggctgttccagacaactgccaacgtcactgagggccctgccccagcggccctggccccaggctctattaacctaaaatgtagctccctagcgctaacctaggaaccgccgctgcctgctggggggccacgcccctcatgcccttgtcccaggcccggggccttcagcgttgaacacttccttgcttttttcacatgttttatggaattgttcacctggtttgaaataataaaatgtagaaagaaaaaaaatacc

SEQ ID NO: 2097 - protein, 339 aa, Homosapiens; identical to SEQ ID NO: 2095

SEQ ID NO: 2098 - DNA, 1937 bp, Homosapiens
agctgggactacaggcgcccgctaccgcgcccggctaattttttgtatttttaatagagacggggtttcaccgtgttagccaggatggtctcgatctcctgacctcgtgatccgcccgccttggcctcccagagtgctgggatgacaggcgtgagcctctgagagcaaattttacccagttcctctctatcctcccgatgactctgaaatcaaactcagcaagtcatccgagcccccacggcgcagcggccctaggctggcatgggcgatgcggagctactccgccctcaggaagcaggcgaggtgcccagcgggagaatcacccacatcaccgtctaatctctgctgtgaagtggaagcgcgagaaggagggagcgtctcatgacggagggtgtgaagacgctaggctggacgaagcagaaaggcgggtgtcactggggacgttctgagggtgctggggagtcagggaagagcaccatcgtcaagcagatgaagatcatccacgaggatggctactccgaggaggaatgccggcagtaccgggcggttgtctacagcaacaccatccagtccatcatggccattgtcaaagccatgggcaacctgcagatcgactttgccgacccctccagagcggacgacgccaggcagctatttgcactgtcctgcaccgccgaggagcaaggcgtgctccctgatgacctgtccggcgtcatccggaggctctgggctgaccatggtgtgcaggcctgctttggccgctcaagggaataccagctcaacgactcagctgcctactacctgaacgacctggagcgtattgcacagagtgactacatccccacacagcaagatgtgctacggacccgcgtaaagaccacggggatcgtggagacacacttcaccttcaaggacctacacttcaagatgtttgatgtgggtggtcagcggtctgagcggaagaagtggatccactgctttgagggcgtcacagccatcatcttctgcgtagccttgagcgcctatgacttggtgctagctgaggacgaggagatgaaccgcatgcatgagagcatgaagctattcgatagcatctgcaacaacaagtggttcacagacacgtccatcatcctcttcctcaacaagaaggacctgtttgaggagaagatcacacacagtcccctgaccatctgcttccctgagtacacaggggccaacaaatatgatgaggcagccagctacatccagagtaagtttgaggacctgaataagcgcaaagacaccaaggagatctacacgcacttcacgtgcgccaccgacaccaagaacgtgcagttcgtgtttgacgccgtcaccgatgtcatcatcaagaacaacctgaaggactgcggcctcttctgaggggcagcggggcctggcgggatgggccaccgccgactttgtaccccccaacccctgaggaagatgggggcaagaagatcacgctccccgcctgttcccccgccgcttttctcctctttcctctctttgttctcagctccccctgtcccctcagctccagacgtaggggaggggttgccacaggcctccctgtttgaagcctgcccttgtctgagatgctggtaatggccatggtacccccttctgggcatctgttctggtttttaaccattgtcttgttctgtgatgaggggaggggggcacatgctgagtctcccaaggctgcgtctggaggggcccctgcttctccagcctggacccccagctttgcccaacaccagcccctgccccagcccaagtccaaatgtttacagggagcctcctgcccagtcccccaaccccagccgctcggaggccccaaaggaaaaagcacaagaagcgtgagacgccaccattcctggaaaccacagtccacctgctcattctcgtagcttttt

SEQ ID NO: 2099 - protein, 339 aa, Homosapiens; identical to SEQ ID NO: 2091

SEQ ID NO: 2100 - DNA, 3898 bp, Homosapiens
attaaattaaattccaggaagcagtgctaatgacagccctaacgagtcacgggagaggctaccagccccagcctttggaaagcatggcaaggaggactaggcaataacatgaacaaagcagtagctcctgggaatagaattgattatcatttcccaggccccccaaggaccctgggcttcccaggggaggtggcctttggagactgcctatgcaacaggcacagtggcaggttgtaccatgaactcttcaaggacaaagaaaaggagggaggttaagtttaggccttggccccaaagccctgagagctcctgagttccctgcagggcttgggtagctcctccccagtcatacaggaacaccctgaatgccagaaccagttgggtttgtagggctaggtgtggatcactggcttggagatgttggtgcccctacctcagcatcccctggagactttggaaccccctgtgtggcttgttcctccatgatgcctcatggcagtcccctctcacaccagtcttctcttgctctcgctattctggcccggctggactcctctctggtttgggagcatccagctccttcccaacccagggcccttgcacttgctgctgcctctgtcgtcactctcttctggcttgttacaagactggtccttccacatgattcaaagatcccctcctcagactatcttctcctgcacatacctcccagtggctctagtgtcaccctgttgatttcctctgaaatggtgaagttcatttccctgtttgtttggtgtgtgttcctcaaggacagggcccagctgcctcttttaccatagggttctcagcacattggcaggcaatatgttcagggaacagtggttgaacagatgaccccttcctctggatcctcccgcactgccccccagccgccacccctgtgtcaggttgggcccccttgcctaatccagaagcttatggggaaggggtgctggggcctgaattctccaggtcaaagccaatgatctgtgaagagggtggatgaccagaaagggggactttgggatccaggacccccaggcttttgagttttcctcctggacgaagagaggcctgggaagaggggtctgcaagggagcagggagggagggcaggatggctgactccagtttcagaacttccactgggctaagaagcaggaaggggaaagcgcaggagttgaaccaggaagtagaacctgccccagggcagtaaggcgggagcaagctgtagccacgaggtctacaagcagtagctgcaaggctgtgattgagttggtcacaggtccttggccagggactccctgtcatctgggagccgtggaggtagggtggtcaggatcctgaactctgggcatccctgtggggtcctacctagtcctggactctgggcagggacaggcacacccaccccgaaactgcctttggggaagtgctagcagcttccccttcctagagcctgcaggcaagcatgtcacagcccactgagagggtcttcattcctcaacctgctcagggctactgctcgataggaactcaggccaagctggacctgctgtgctgcctgtggtgagccccaagactattctggcagtaggggtgaaccagcagctgccacttctccattccagctgaggggccaccctcaactctgctgatgtcattccattgtcctttatggtctagtccaagcggtgctgggcctggtgggcatggggtcaagtcatgcctcctctggtgctcgtgaggccctggctaggcagctgccctctgcccccaaaatgaactctcctgaaaggactcctggattcctgagtatgaagaaactgagatgcccacgatgtacctcactgatgactgtgactggctcctggcccactctggacctcagctgactcagctgcaaagcaaggggtgctggggagtcagggaagagcaccatcgtcaagcagatgaagatcatccacgaggatggctactccgaggaggaatgccggcagtaccgggcggttgtctacagcaacaccatccagtccatcatggccattgtcaaagccatgggcaacctgcagatcgactttgccgacccctccagagcggacgacgccaggcagctatttgcactgtcctgcaccgccgaggagcaaggcgtgctccctgatgacctgtccggcgtcatccggaggctctgggctgaccatggtgtgcaggcctgctttggccgctcaagggaataccagctcaacgactcagctgcctactacctgaacgacctggagcgtattgcacagagtgactacatccccacacagcaagatgtgctacggacccgcgtaaagaccacggggatcgtggagacacacttcaccttcaaggacctacacttcaagatgtttgatgtgggtggtcagcggtctgagcggaagaagtggatccactgctttgagggcgtcacagccatcatcttctgcgtagccttgagcgcctatgacttggtgctagctgaggacgaggagatgaaccgcatgcatgagagcatgaagctattcgatagcatctgcaacaacaagtggttcacagacacgtccatcatcctcttcctcaacaagaaggacctgtttgaggagaagatcacacacagtcccctgaccatctgcttccctgagtacacaggggccaacaaatatgatgaggcagccagctacatccagagtaagtttgaggacctgaataagcgcaaagacaccaaggagatctacacgcacttcacgtgcgccaccgacaccaagaacgtgcagttcgtgtttgacgccgtcaccgatgtcatcatcaagaacaacctgaaggactgcggcctcttctgaggggcagcggggcctggcgggatgggccaccgccgactttgtaccccccaacccctgaggaagatgggggcaagaagatcacgctccccgcctgttcccccgccgcttttctcctctttcctctctttgttctcagctccccctgtcccctcagctccagacgtaggggaggggttgccacaggcctccctgtttgaagcctgcccttgtctgagatgctggtaatggccatggtacccccttctgggcatctgttctggtttttaaccattgtcttgttctgtgatgaggggaggggggcacatgctgagtctcccaaggctgcgtctggaggggcccctgcttctccagcctggacccccagctttgcccaacaccagcccctgccccagcccaagtccaaatgtttacagggagcctcctgcccagtcccccaaccccagccgctcggaggccccaaaggaaaaagcacaagaagcgtgagacgccaccattcctggaaaccacagtccacctgctcattctcgtagctttttaaaaaaatgaaagtaaaggaaaaaaaaaaaactgcaaatctagaaaactttttagagaaaaactatttaaaactgtcagatcctgaccagcaagcccccccccagccccccttccaagtgactccgtgccttgagtgtgtctgcgtgtttacacccgtccctctgctggccgcccccgtgcgagcggcacccctgccctgccctccacagaattgggttccaagggctgttccagacaactgccaacgtcactgagggccctgccccagcggccctggccccaggctctattaacctaaaatgtagctccctagcgctaacctaggaaccgccgctgcctgctggggggccacgcccctcatgcccttgtcccaggcccggggccttcagcgttgaacacttccttgcttttttcacatgttttatggaattgttcacctggtttgaaataataaaatgtagaaagaaaaaaaatacc

SEQ ID NO: 2101 - protein, 303 aa, Homosapiens
MKIIHEDGYSEEECRQYRAVVYSNTIQSIMAIVKAMGNLQIDFADPSRADDARQLFALSCTAEEQGVLPDDLSGVIRRLWADHGVQACFGRSREYQLNDSAAYYLNDLERIAQSDYIPTQQDVLRTRVKTTGIVETHFTFKDLHFKMFDVGGQRSERKKWIHCFEGVTAIIFCVALSAYDLVLAEDEEMNRMHESMKLFDSICNNKWFTDTSIILFLNKKDLFEEKITHSPLTICFPEYTGANKYDEAASYIQSKFEDLNKRKDTKEIYTHFTCATDTKNVQFVFDAVTDVIIKNNLKDCGLF

SEQ ID NO: 2102 - DNA, 1776 bp, Homosapiens
cccgccgtcggtgcgcggcggtagggaaggcgcctcccgcagtcgctcggaactgccgacccgagtgcttcccgcagagggctggtggtgggagcggagtgggtcgggcggggccgagccgggccgtgggccgtgtgggggccgggcggcggccgggccggcggacggcgggatgggctgcaccgtgagcgccgaggacaaggcggcggccgagcgctctaagatgatcgacaagaacctgcgggaggacggagagaaggcggcgcgggaggtgaagttgctgctgttgggtgctggggagtcagggaagagcaccatcgtcaagcagatgaagatcatccacgaggatggctactccgaggaggaatgccggcagtaccgggcggttgtctacagcaacaccatccagtccatcatggccattgtcaaagccatgggcaacctgcagatcgactttgccgacccctccagagcggacgacgccaggcagctatttgcactgtcctgcaccgccgaggagcaaggcgtgctccctgatgacctgtccggcgtcatccggaggctctgggctgaccatggtgtgcaggcctgctttggccgctcaagggaataccagctcaacgactcagctgcctactacctgaacgacctggagcgtattgcacagagtgactacatccccacacagcaagatgtgctacggacccgcgtaaagaccacggggatcgtggagacacacttcaccttcaaggacctacacttcaagatgtttgatgtgggtggtcagcggtctgagcggaagaagtggatccactgctttgagggcgtcacagccatcatcttctgcgtagccttgagcgcctatgacttggtgctagctgaggacgaggagatgaaccgcatgcatgagagcatgaagctattcgatagcatctgcaacaacaagtggttcacagacacgtccatcatcctcttcctcaacaagaaggacctgtttgaggagaagatcacacacagtcccctgaccatctgcttccctgagtacacaggggccaacaaatatgatgaggcagccagctacatccagagtaagtttgaggacctgaataagcgcaaagacaccaaggagatctacacgcacttcacgtgcgccaccgacaccaagaacgtgcagttcgtgtttgacgccgtcaccgatgtcatcatcaagaacaacctgaaggactgcggcctcttctgaggggcagcggggcctggcgggatgggccaccgccgactttgtaccccccaacccctgaggaagatgggggcaagaagatcacgctccccgcctgttcccccgccgcttttctcctctttcctctctttgttctcagctccccctgtcccctcagctccagacgtaggggaggggttgccacaggcctccctgtttgaagcctgcccttgtctgagatgctggtaatggccatggtacccccttctgggcatctgttctggtttttaaccattgtcttgttctgtgatgaggggaggggggcacatgctgagtctcccaaggctgcgtctggaggggcccctgcttctccagcctggacccccagctttgcccaacaccagcccctgccccagcccaagtccaaatgtttacagggagcctcctgcccagtcccccaaccccagccgctcggaggccccaaaggaaaaagcacaagaagcgtgagacgccaccattcctggaaaccacagtccacctgctcattctcgtagcttttt

SEQ ID NO: 2103 - protein, 355 aa, Homosapiens; identical to SEQ ID NO: 187

SEQ ID NO: 2104 - DNA, 1811 bp, Homosapiens
cccgccgtcggtgcgcggcggtagggaaggcgcctcccgcagtcgctcggaactgccgacccgagtgcttcccgcagagggctggtggtgggagcggagtgggtcgggcggggccgagccgggccgtgggccgtgtgggggccgggcggcggccgggccggcggacggcgggatgggctgcaccgtgagcgccgaggacaaggcggcggccgagcgctctaagatgatcgacaagaacctgcgggaggacggagagaaggcggcgcgggaggtgaagttgctgctgttgggtgctggggagtcagggaagagcaccatcgtcaagcagatgaagatcatccacgaggatggctactccgaggaggaatgccggcagtaccgggcggttgtctacagcaacaccatccagtccatcatggccattgtcaaagccatgggcaacctgcagatcgactttgccgacccctccagagcggacgacgccaggcagctatttgcactgtcctgcaccgccgaggagcaaggcgtgctccctgatgacctgtccggcgtcatccggaggctctgggctgaccatggtgtgcaggcctgctttggccgctcaagggaataccagctcaacgactcagctgcctactacctgaacgacctggagcgtattgcacagagtgactacatccccacacagcaagatgtgctacggacccgcgtaaagaccacggggatcgtggagacacacttcaccttcaaggacctacacttcaagatgtttgatgtgggtggtcagcggtctgagcggaagaagtggatccactgctttgagggcgtcacagccatcatcttctgcgtagccttgagcgcctatgacttggtgctagctgaggacgaggagatgaaccgcatgcatgagagcatgaagctattcgatagcatctgcaacaacaagtggttcacagacacgtccatcatcctcttcctcaacaagaaggacctgtttgaggagaagatcacacacagtcccctgaccatctgcttccctgagtacacaggggccaacaaatatgatgaggcagccagctacatccagagtaagtttgaggacctgaataagcgcaaagacaccaaggagatctacacgcacttcacgtgcgccaccgacaccaagaacgtgcagttcgtgtttgacgccgtcaccgatgtcatcatcaagaacaacctgaaggactgcggcctcttctgaggggcagcggggcctggcgggatgggccaccgccgactttgtaccccccaacccctgaggaagatgggggcaagaagatcacgctccccgcctgttcccccgccgcttttctcctctttcctctctttgttctcagctccccctgtcccctcagctccagacgtaggggaggggttgccacaggcctccctgtttgaagcctgcccttgtctgagatgctggtaatggccatggtacccccttctgggcatctgttctggtttttaaccattgtcttgttctgtgatgaggggaggggggcacatgctgagtctcccaaggctgcgtctggaggggcccctgcttctccagcctggacccccagctttgcccaacaccagcccctgccccagcccaagtccaaatgtttacagggagcctcctgcccagtcccccaaccccagccgctcggaggccccaaaggaaaaagcacaagaagcgtgagacgccaccattcctggaaaccacagtccacctgctcattctcgtagctttttaaaaaaatgaaagtaaaggaaaaaaaaaaaactgc

SEQ ID NO: 2105 - protein, 355 aa, Homosapiens; identical to SEQ ID NO: 187

SEQ ID NO: 2106 - DNA, 2254 bp, Homosapiens
cccgccgtcggtgcgcggcggtagggaaggcgcctcccgcagtcgctcggaactgccgacccgagtgcttcccgcagagggctggtggtgggagcggagtgggtcgggcggggccgagccgggccgtgggccgtgtgggggccgggcggcggccgggccggcggacggcgggatgggctgcaccgtgagcgccgaggacaaggcggcggccgagcgctctaagatgatcgacaagaacctgcgggaggacggagagaaggcggcgcgggaggtgaagttgctgctgttgggtgctggggagtcagggaagagcaccatcgtcaagcagatgaagatcatccacgaggatggctactccgaggaggaatgccggcagtaccgggcggttgtctacagcaacaccatccagtccatcatggccattgtcaaagccatgggcaacctgcagatcgactttgccgacccctccagagcggacgacgccaggcagctatttgcactgtcctgcaccgccgaggagcaaggcgtgctccctgatgacctgtccggcgtcatccggaggctctgggctgaccatggtgtgcaggcctgctttggccgctcaagggaataccagctcaacgactcagctgcctactacctgaacgacctggagcgtattgcacagagtgactacatccccacacagcaagatgtgctacggacccgcgtaaagaccacggggatcgtggagacacacttcaccttcaaggacctacacttcaagatgtttgatgtgggtggtcagcggtctgagcggaagaagtggatccactgctttgagggcgtcacagccatcatcttctgcgtagccttgagcgcctatgacttggtgctagctgaggacgaggagatgaaccgcatgcatgagagcatgaagctattcgatagcatctgcaacaacaagtggttcacagacacgtccatcatcctcttcctcaacaagaaggacctgtttgaggagaagatcacacacagtcccctgaccatctgcttccctgagtacacaggggccaacaaatatgatgaggcagccagctacatccagagtaagtttgaggacctgaataagcgcaaagacaccaaggagatctacacgcacttcacgtgcgccaccgacaccaagaacgtgcagttcgtgtttgacgccgtcaccgatgtcatcatcaagaacaacctgaaggactgcggcctcttctgaggggcagcggggcctggcgggatgggccaccgccgactttgtaccccccaacccctgaggaagatgggggcaagaagatcacgctccccgcctgttcccccgccgcttttctcctctttcctctctttgttctcagctccccctgtcccctcagctccagacgtaggggaggggttgccacaggcctccctgtttgaagcctgcccttgtctgagatgctggtaatggccatggtacccccttctgggcatctgttctggtttttaaccattgtcttgttctgtgatgaggggaggggggcacatgctgagtctcccaaggctgcgtctggaggggcccctgcttctccagcctggacccccagctttgcccaacaccagcccctgccccagcccaagtccaaatgtttacagggagcctcctgcccagtcccccaaccccagccgctcggaggccccaaaggaaaaagcacaagaagcgtgagacgccaccattcctggaaaccacagtccacctgctcattctcgtagctttttaaaaaaatgaaagtaaaggaaaaaaaaaaaactgcaaatctagaaaactttttagagaaaaactatttaaaactgtcagatcctgaccagcaagcccccccccagccccccttccaagtgactccgtgccttgagtgtgtctgcgtgtttacacccgtccctctgctggccgcccccgtgcgagcggcacccctgccctgccctccacagaattgggttccaagggctgttccagacaactgccaacgtcactgagggccctgccccagcggccctggccccaggctctattaacctaaaatgtagctccctagcgctaacctaggaaccgccgctgcctgctggggggccacgcccctcatgcccttgtcccaggcccggggccttcagcgttgaacacttccttgcttttttcacatgttttatggaattgttcacctggtttgaaataataaaatgtagaaagaaaaaaaatacc

SEQ ID NO: 2107 - protein, 355 aa, Homosapiens; identical to SEQ ID NO: 187

SEQ ID NO: 2108 - DNA, 824 bp, Homosapiens
agtcgctcggaactgccgacccgagtgcttcccgcagagggctggtggtgggagcggagtgggtcgggcggggccgagccgggccgtgggccgtgtgggggccgggcggcggccgggccggcggacggcgggatgggctgcaccgtgagcgccgaggacaaggcggcggccgagcgctctaagatgatcgacaagaacctgcgggaggacggagagaaggcggcgcgggaggtgaagttgctgctgttgggtgctggggagtcagggaagagcaccatcgtcaagcagatgaagatcatccacgaggatggctactccgaggaggaatgccggcagtaccgggcggttgtctacagcaacaccatccagtccatcatggccattgtcaaagccatgggcaacctgcagatcgactttgccgacccctccagagcggtatgtgccctccgccccaccctctcccacctcccaaaaggtttcggggtggctggttgtggtggctcatgcctataaatcccagcactttgggacgccgaggcgggtggatcacctgaggtcaggaccagcctggccaacttggtgaaaccgcgtctctactaaaaatacaaaaattagccgagcatggtggcacgtgcctgtaatcccagctacttgggaggctgaagcaggagaattgcttgaacccgggaggcagaggatgcagtgagccaagatcgccccattgcactctagccttggtgacagagctagactccgtcacagaaaaaagtaaacaacaacaacaaaaaggttttagggcaagtctcatcctagggaatccaaga

SEQ ID NO: 2109 - protein, 126 aa, Homosapiens
MGCTVSAEDKAAAERSKMIDKNLREDGEKAAREVKLLLLGAGESGKSTIVKQMKIIHEDGYSEEECRQYRAVVYSNTIQSIMAIVKAMGNLQIDFADPSRAVCALRPTLSHLPKGFGVAGCGGSCL

SEQ ID NO: 2110 - DNA, 2171 bp, Homosapiens
agtcgctcggaactgccgacccgagtgcttcccgcagagggctggtggtgggagcggagtgggtcgggcggggccgagccgggccgtgggccgtgtgggggccgggcggcggccgggccggcggacggcgggatgggctgcaccgtgagcgccgaggacaaggcggcggccgagcgctctaagatgatcgacaagaacctgcgggaggacggagagaaggcggcgcgggaggtgaagttgctgctgttgggatcatccacgaggatggctactccgaggaggaatgccggcagtaccgggcggttgtctacagcaacaccatccagtccatcatggccattgtcaaagccatgggcaacctgcagatcgactttgccgacccctccagagcggacgacgccaggcagctatttgcactgtcctgcaccgccgaggagcaaggcgtgctccctgatgacctgtccggcgtcatccggaggctctgggctgaccatggtgtgcaggcctgctttggccgctcaagggaataccagctcaacgactcagctgcctactacctgaacgacctggagcgtattgcacagagtgactacatccccacacagcaagatgtgctacggacccgcgtaaagaccacggggatcgtggagacacacttcaccttcaaggacctacacttcaagatgtttgatgtgggtggtcagcggtctgagcggaagaagtggatccactgctttgagggcgtcacagccatcatcttctgcgtagccttgagcgcctatgacttggtgctagctgaggacgaggagatgaaccgcatgcatgagagcatgaagctattcgatagcatctgcaacaacaagtggttcacagacacgtccatcatcctcttcctcaacaagaaggacctgtttgaggagaagatcacacacagtcccctgaccatctgcttccctgagtacacaggggccaacaaatatgatgaggcagccagctacatccagagtaagtttgaggacctgaataagcgcaaagacaccaaggagatctacacgcacttcacgtgcgccaccgacaccaagaacgtgcagttcgtgtttgacgccgtcaccgatgtcatcatcaagaacaacctgaaggactgcggcctcttctgaggggcagcggggcctggcgggatgggccaccgccgactttgtaccccccaacccctgaggaagatgggggcaagaagatcacgctccccgcctgttcccccgccgcttttctcctctttcctctctttgttctcagctccccctgtcccctcagctccagacgtaggggaggggttgccacaggcctccctgtttgaagcctgcccttgtctgagatgctggtaatggccatggtacccccttctgggcatctgttctggtttttaaccattgtcttgttctgtgatgaggggaggggggcacatgctgagtctcccaaggctgcgtctggaggggcccctgcttctccagcctggacccccagctttgcccaacaccagcccctgccccagcccaagtccaaatgtttacagggagcctcctgcccagtcccccaaccccagccgctcggaggccccaaaggaaaaagcacaagaagcgtgagacgccaccattcctggaaaccacagtccacctgctcattctcgtagctttttaaaaaaatgaaagtaaaggaaaaaaaaaaaactgcaaatctagaaaactttttagagaaaaactatttaaaactgtcagatcctgaccagcaagcccccccccagccccccttccaagtgactccgtgccttgagtgtgtctgcgtgtttacacccgtccctctgctggccgcccccgtgcgagcggcacccctgccctgccctccacagaattgggttccaagggctgttccagacaactgccaacgtcactgagggccctgccccagcggccctggccccaggctctattaacctaaaatgtagctccctagcgctaacctaggaaccgccgctgcctgctggggggccacgcccctcatgcccttgtcccaggcccggggccttcagcgttgaacacttccttgcttttttcacatgttttatggaattgttcacctggtttgaaataataaaatgtagaaagaaaaaaaatacc

SEQ ID NO: 2111 - protein, 274 aa, Homosapiens
MAIVKAMGNLQIDFADPSRADDARQLFALSCTAEEQGVLPDDLSGVIRRLWADHGVQACFGRSREYQLNDSAAYYLNDLERIAQSDYIPTQQDVLRTRVKTTGIVETHFTFKDLHFKMFDVGGQRSERKKWIHCFEGVTAIIFCVALSAYDLVLAEDEEMNRMHESMKLFDSICNNKWFTDTSIILFLNKKDLFEEKITHSPLTICFPEYTGANKYDEAASYIQSKFEDLNKRKDTKEIYTHFTCATDTKNVQFVFDAVTDVIIKNNLKDCGLF

SEQ ID NO: 2112 - DNA, 1018 bp, Homosapiens
gccgacccgagtgcttcccgcagagggctggtggtgggagcggagtgggtcgggcggggccgagccgggccgtgggccgtgtgggggccgggcggcggccgggccggcggacggcgggatgggctgcaccgtgagcgccgaggacaaggcggcggccgagcgctctaagatgatcgacaagaacctgcgggaggacggagagaaggcggcgcgggaggtgaagttgctgctgttgggtgctggggagtcagggaagagcaccatcgtcaagcagatgaagtaagtgctcaggggccaacaaatatgatgaggcagccagctacatccagagtaagtttgaggacctgaataagcgcaaagacaccaaggagatctacacgcacttcacgtgcgccaccgacaccaagaacgtgcagttcgtgtttgacgccgtcaccgatgtcatcatcaagaacaacctgaaggactgcggcctcttctgaggggcagcggggcctggcgggatgggccaccgccgactttgtaccccccaacccctgaggaagatgggggcaagaagatcacgctccccgcctgttcccccgccgcttttctcctctttcctctctttgttctcagctccccctgtcccctcagctccagacgtaggggaggggttgccacaggcctccctgtttgaagcctgcccttgtctgagatgctggtaatggccatggtacccccttctgggcatctgttctggtttttaaccattgtcttgttctgtgatgaggggaggggggcacatgctgagtctcccaaggctgcgtctggaggggcccctgcttctccagcctggacccccagctttgcccaacaccagcccctgccccagcccaagtccaaatgtttacagggagcctcctgcccagtcccccaaccccagccgctcggaggccccaaaggaaaaagcacaagaagcgtgagacgccaccattcctggaaaccacagtccacctgctcattctcgtagcttttt

SEQ ID NO: 2113 - protein, 67 aa, Homosapiens
MGHRRLCTPQPLRKMGARRSRSPPVPPPLFSSFLSLFSAPPVPSAPDVGEGLPQASLFEACPCLRCW

SEQ ID NO: 2114 - DNA, 1053 bp, Homosapiens
gccgacccgagtgcttcccgcagagggctggtggtgggagcggagtgggtcgggcggggccgagccgggccgtgggccgtgtgggggccgggcggcggccgggccggcggacggcgggatgggctgcaccgtgagcgccgaggacaaggcggcggccgagcgctctaagatgatcgacaagaacctgcgggaggacggagagaaggcggcgcgggaggtgaagttgctgctgttgggtgctggggagtcagggaagagcaccatcgtcaagcagatgaagtaagtgctcaggggccaacaaatatgatgaggcagccagctacatccagagtaagtttgaggacctgaataagcgcaaagacaccaaggagatctacacgcacttcacgtgcgccaccgacaccaagaacgtgcagttcgtgtttgacgccgtcaccgatgtcatcatcaagaacaacctgaaggactgcggcctcttctgaggggcagcggggcctggcgggatgggccaccgccgactttgtaccccccaacccctgaggaagatgggggcaagaagatcacgctccccgcctgttcccccgccgcttttctcctctttcctctctttgttctcagctccccctgtcccctcagctccagacgtaggggaggggttgccacaggcctccctgtttgaagcctgcccttgtctgagatgctggtaatggccatggtacccccttctgggcatctgttctggtttttaaccattgtcttgttctgtgatgaggggaggggggcacatgctgagtctcccaaggctgcgtctggaggggcccctgcttctccagcctggacccccagctttgcccaacaccagcccctgccccagcccaagtccaaatgtttacagggagcctcctgcccagtcccccaaccccagccgctcggaggccccaaaggaaaaagcacaagaagcgtgagacgccaccattcctggaaaccacagtccacctgctcattctcgtagctttttaaaaaaatgaaagtaaaggaaaaaaaaaaaactgc

SEQ ID NO: 2115 - protein, 67 aa, Homosapiens; identical to SEQ ID NO: 2113

SEQ ID NO: 2116 - DNA, 657 bp, Homosapiens
gccgacccgagtgcttcccgcagagggctggtggtgggagcggagtgggtcgggcggggccgagccgggccgtgggccgtgtgggggccgggcggcggccgggccggcggacggcgggatgggctgcaccgtgagcgccgaggacaaggcggcggccgagcgcttcattctcgtagctttttaaaaaaatgaaagtaaaggaaaaaaaaaaaactgcaaatctagaaaactttttagagaaaaactatttaaaactgtcagatcctgaccagcaagcccccccccagccccccttccaagtgactccgtgccttgagtgtgtctgcgtgtttacacccgtccctctgctggccgcccccgtgcgagcggcacccctgccctgccctccacagaattgggttccaagggctgttccagacaactgccaacgtcactgagggccctgccccagcggccctggccccaggctctattaacctaaaatgtagctccctagcgctaacctaggaaccgccgctgcctgctggggggccacgcccctcatgcccttgtcccaggcccggggccttcagcgttgaacacttccttgcttttttcacatgttttatggaattgttcacctggtttgaaataataaaatgtagaaagaaaaaaaat

SEQ ID NO: 2117 - protein, 82 aa, Homosapiens
MKVKEKKKTANLENFLEKNYLKLSDPDQQAPPQPPFQVTPCLECVCVFTPVPLLAAPVRAAPLPCPPQNWVPRAVPDNCQRH

SEQ ID NO: 2118 - DNA, 854 bp, Homosapiens
gccgacccgagtgcttcccgcagagggctggtggtgggagcggagtgggtcgggcggggccgagccgggccgtgggccgtgtgggggccgggcggcggccgggccggcggacggcgggatgggctgcaccgtgagcgccgaggacaaggcggcggccgagcgctctaagatgatcgacaagaacctgcgggaggacggagagaaggcggcgcgggaggtgaagttgctgccccagcccaagtccaaatgtttacagggagcctcctgcccagtcccccaaccccagccgctcggaggccccaaaggaaaaagcacaagaagcgtgagacgccaccattcctggaaaccacagtccacctgctcattctcgtagctttttaaaaaaatgaaagtaaaggaaaaaaaaaaaactgcaaatctagaaaactttttagagaaaaactatttaaaactgtcagatcctgaccagcaagcccccccccagccccccttccaagtgactccgtgccttgagtgtgtctgcgtgtttacacccgtccctctgctggccgcccccgtgcgagcggcacccctgccctgccctccacagaattgggttccaagggctgttccagacaactgccaacgtcactgagggccctgccccagcggccctggccccaggctctattaacctaaaatgtagctccctagcgctaacctaggaaccgccgctgcctgctggggggccacgcccctcatgcccttgtcccaggcccggggccttcagcgttgaacacttccttgcttttttcacatgttttatggaattgttcacctggtttgaaataataaaatgtagaaagaaaaaaaat

SEQ ID NO: 2119 - protein, 84 aa, Homosapiens
MGCTVSAEDKAAAERSKMIDKNLREDGEKAAREVKLLPQPKSKCLQGASCPVPQPQPLGGPKGKSTRSVRRHHSWKPQSTCSFS

SEQ ID NO: 2120 - DNA, 1496 bp, Homosapiens
gccgacccgagtgcttcccgcagagggctggtggtgggagcggagtgggtcgggcggggccgagccgggccgtgggccgtgtgggggccgggcggcggccgggccggcggacggcgggatgggctgcaccgtgagcgccgaggacaaggcggcggccgagcgctctaagatgatcgacaagaacctgcgggaggacggagagaaggcggcgcgggaggtgaagttgctgctgttgggtgctggggagtcagggaagagcaccatcgtcaagcagatgaagtaagtgctcaggggccaacaaatatgatgaggcagccagctacatccagagtaagtttgaggacctgaataagcgcaaagacaccaaggagatctacacgcacttcacgtgcgccaccgacaccaagaacgtgcagttcgtgtttgacgccgtcaccgatgtcatcatcaagaacaacctgaaggactgcggcctcttctgaggggcagcggggcctggcgggatgggccaccgccgactttgtaccccccaacccctgaggaagatgggggcaagaagatcacgctccccgcctgttcccccgccgcttttctcctctttcctctctttgttctcagctccccctgtcccctcagctccagacgtaggggaggggttgccacaggcctccctgtttgaagcctgcccttgtctgagatgctggtaatggccatggtacccccttctgggcatctgttctggtttttaaccattgtcttgttctgtgatgaggggaggggggcacatgctgagtctcccaaggctgcgtctggaggggcccctgcttctccagcctggacccccagctttgcccaacaccagcccctgccccagcccaagtccaaatgtttacagggagcctcctgcccagtcccccaaccccagccgctcggaggccccaaaggaaaaagcacaagaagcgtgagacgccaccattcctggaaaccacagtccacctgctcattctcgtagctttttaaaaaaatgaaagtaaaggaaaaaaaaaaaactgcaaatctagaaaactttttagagaaaaactatttaaaactgtcagatcctgaccagcaagcccccccccagccccccttccaagtgactccgtgccttgagtgtgtctgcgtgtttacacccgtccctctgctggccgcccccgtgcgagcggcacccctgccctgccctccacagaattgggttccaagggctgttccagacaactgccaacgtcactgagggccctgccccagcggccctggccccaggctctattaacctaaaatgtagctccctagcgctaacctaggaaccgccgctgcctgctggggggccacgcccctcatgcccttgtcccaggcccggggccttcagcgttgaacacttccttgcttttttcacatgttttatggaattgttcacctggtttgaaataataaaatgtagaaagaaaaaaaatacc

SEQ ID NO: 2121 - protein, 67 aa, Homosapiens; identical to SEQ ID NO: 2113

SEQ ID NO: 2122 - DNA, 2466 bp, Homosapiens
cagtatgggcgtgtgtgggtgtgggtgtgtgagatacgccgcaggtctcccagattcatgagtcagtacgcgtgtgtgttacactgtaggtctcctagattctagccttctagcctccatctgctcagggcagacctgagcgcagtgagcagagggcggggcattgggccatgtccagaaagctgaagtgtgacgctgtgctcctgcttaggcccctggttgctaaggctcagtgtggggagaagaagggctgctaccctgttggatggagtatgcagggcatcttcctgccagctctgcccagggcaccatattggcatgcaccagctgcacaggttggcgagcctatgtatgtgagaacagggtggctccttcatggctggccaagtctccagccaagaccccccaggacagtggggagccatggtgggcagcagagcttgtgggaggcaaaggcctgcagagagtctgccatggggcacaggtgctctaggttaccttgaccactgtggccctgccagctgcattcctggtagctcaactgcccaccaggcccagctgcctccatctcacggtgcagctggtgggaaggttagttctgcctcctgggctacaggtgtctgggcatttgttctgtgcctgtggagcccctctgggcctgccccctgaccacctgtgccctctgttccaggtgctggggagtcagggaagagcaccatcgtcaagcagatgaagtaagtgctgtattccagaggcagtgctcaaactccagcttcccctcttcaccctctgggcctgcactgcccccgactacaggcccagccagtcttagccaggcccagaatcttctgagaagcagaaggaccctcaggtcccagtgggtcaggggcagttttcccttctctgaagcaggtcccagtagccccaggcagccgtgggaactcccagtgcccaggggacactaaccttcctggtccctggctatcaggatcatccacgaggatggctactccgaggaggaatgccggcagtaccgggcggttgtctacagcaacaccatccagtccatcatggccattgtcaaagccatgggcaacctgcagatcgactttgccgacccctccagagcggacgacgccaggcagctatttgcactgtcctgcaccgccgaggagcaaggcgtgctccctgatgacctgtccggcgtcatccggaggctctgggctgaccatggtgtgcaggcctgctttggccgctcaagggaataccagctcaacgactcagctgcctactacctgaacgacctggagcgtattgcacagagtgactacatccccacacagcaagatgtgctacggacccgcgtaaagaccacggggatcgtggagacacacttcaccttcaaggacctacacttcaagatgtttgatgtgggtggtcagcggtctgagcggaagaagtggatccactgctttgagggcgtcacagccatcatcttctgcgtagccttgagcgcctatgacttggtgctagctgaggacgaggagatgaaccgcatgcatgagagcatgaagctattcgatagcatctgcaacaacaagtggttcacagacacgtccatcatcctcttcctcaacaagaaggacctgtttgaggagaagatcacacacagtcccctgaccatctgcttccctgagtacacaggggccaacaaatatgatgaggcagccagctacatccagagtaagtttgaggacctgaataagcgcaaagacaccaaggagatctacacgcacttcacgtgcgccaccgacaccaagaacgtgcagttcgtgtttgacgccgtcaccgatgtcatcatcaagaacaacctgaaggactgcggcctcttctgaggggcagcggggcctggcgggatgggccaccgccgactttgtaccccccaacccctgaggaagatgggggcaagaagatcacgctccccgcctgttcccccgccgcttttctcctctttcctctctttgttctcagctccccctgtcccctcagctccagacgtaggggaggggttgccacaggcctccctgtttgaagcctgcccttgtctgagatgctggtaatggccatggtacccccttctgggcatctgttctggtttttaaccattgtcttgttctgtgatgaggggaggggggcacatgctgagtctcccaaggctgcgtctggaggggcccctgcttctccagcctggacccccagctttgcccaacaccagcccctgccccagcccaagtccaaatgtttacagggagcctcctgcccagtcccccaaccccagccgctcggaggccccaaaggaaaaagcacaagaagcgtgagacgccaccattcctggaaaccacagtccacctgctcattctcgtagctttttaaaaaaatgaaagtaaaggaaaaaaaaaaaactgc

SEQ ID NO: 2123 - protein, 274 aa, Homosapiens; identical to SEQ ID NO: 2111

SEQ ID NO: 2124 - DNA, 2909 bp, Homosapiens
cagtatgggcgtgtgtgggtgtgggtgtgtgagatacgccgcaggtctcccagattcatgagtcagtacgcgtgtgtgttacactgtaggtctcctagattctagccttctagcctccatctgctcagggcagacctgagcgcagtgagcagagggcggggcattgggccatgtccagaaagctgaagtgtgacgctgtgctcctgcttaggcccctggttgctaaggctcagtgtggggagaagaagggctgctaccctgttggatggagtatgcagggcatcttcctgccagctctgcccagggcaccatattggcatgcaccagctgcacaggttggcgagcctatgtatgtgagaacagggtggctccttcatggctggccaagtctccagccaagaccccccaggacagtggggagccatggtgggcagcagagcttgtgggaggcaaaggcctgcagagagtctgccatggggcacaggtgctctaggttaccttgaccactgtggccctgccagctgcattcctggtagctcaactgcccaccaggcccagctgcctccatctcacggtgcagctggtgggaaggttagttctgcctcctgggctacaggtgtctgggcatttgttctgtgcctgtggagcccctctgggcctgccccctgaccacctgtgccctctgttccaggtgctggggagtcagggaagagcaccatcgtcaagcagatgaagtaagtgctgtattccagaggcagtgctcaaactccagcttcccctcttcaccctctgggcctgcactgcccccgactacaggcccagccagtcttagccaggcccagaatcttctgagaagcagaaggaccctcaggtcccagtgggtcaggggcagttttcccttctctgaagcaggtcccagtagccccaggcagccgtgggaactcccagtgcccaggggacactaaccttcctggtccctggctatcaggatcatccacgaggatggctactccgaggaggaatgccggcagtaccgggcggttgtctacagcaacaccatccagtccatcatggccattgtcaaagccatgggcaacctgcagatcgactttgccgacccctccagagcggacgacgccaggcagctatttgcactgtcctgcaccgccgaggagcaaggcgtgctccctgatgacctgtccggcgtcatccggaggctctgggctgaccatggtgtgcaggcctgctttggccgctcaagggaataccagctcaacgactcagctgcctactacctgaacgacctggagcgtattgcacagagtgactacatccccacacagcaagatgtgctacggacccgcgtaaagaccacggggatcgtggagacacacttcaccttcaaggacctacacttcaagatgtttgatgtgggtggtcagcggtctgagcggaagaagtggatccactgctttgagggcgtcacagccatcatcttctgcgtagccttgagcgcctatgacttggtgctagctgaggacgaggagatgaaccgcatgcatgagagcatgaagctattcgatagcatctgcaacaacaagtggttcacagacacgtccatcatcctcttcctcaacaagaaggacctgtttgaggagaagatcacacacagtcccctgaccatctgcttccctgagtacacaggggccaacaaatatgatgaggcagccagctacatccagagtaagtttgaggacctgaataagcgcaaagacaccaaggagatctacacgcacttcacgtgcgccaccgacaccaagaacgtgcagttcgtgtttgacgccgtcaccgatgtcatcatcaagaacaacctgaaggactgcggcctcttctgaggggcagcggggcctggcgggatgggccaccgccgactttgtaccccccaacccctgaggaagatgggggcaagaagatcacgctccccgcctgttcccccgccgcttttctcctctttcctctctttgttctcagctccccctgtcccctcagctccagacgtaggggaggggttgccacaggcctccctgtttgaagcctgcccttgtctgagatgctggtaatggccatggtacccccttctgggcatctgttctggtttttaaccattgtcttgttctgtgatgaggggaggggggcacatgctgagtctcccaaggctgcgtctggaggggcccctgcttctccagcctggacccccagctttgcccaacaccagcccctgccccagcccaagtccaaatgtttacagggagcctcctgcccagtcccccaaccccagccgctcggaggccccaaaggaaaaagcacaagaagcgtgagacgccaccattcctggaaaccacagtccacctgctcattctcgtagctttttaaaaaaatgaaagtaaaggaaaaaaaaaaaactgcaaatctagaaaactttttagagaaaaactatttaaaactgtcagatcctgaccagcaagcccccccccagccccccttccaagtgactccgtgccttgagtgtgtctgcgtgtttacacccgtccctctgctggccgcccccgtgcgagcggcacccctgccctgccctccacagaattgggttccaagggctgttccagacaactgccaacgtcactgagggccctgccccagcggccctggccccaggctctattaacctaaaatgtagctccctagcgctaacctaggaaccgccgctgcctgctggggggccacgcccctcatgcccttgtcccaggcccggggccttcagcgttgaacacttccttgcttttttcacatgttttatggaattgttcacctggtttgaaataataaaatgtagaaagaaaaaaaatacc

SEQ ID NO: 2125 - protein, 274 aa, Homosapiens; identical to SEQ ID NO: 2111

SEQ ID NO: 2126 - DNA, 623 bp, Homosapiens
gccaacaaatatgatgaggcagccagctacatccagagtaagtttgaggacctgaataagcgcaaagacaccaaggagatctacacgcacttcacgtggccaccattcctggaaaccacagtccacctgctcattctcgtagctttttaaaaaaatgaaagtaaaggaaaaaaaaaaaactgcaaatctagaaaactttttagagaaaaactatttaaaactgtcagatcctgaccagcaagcccccccccagccccccttccaagtgactccgtgccttgagtgtgtctgcgtgtttacacccgtccctctgctggccgcccccgtgcgagcggcacccctgccctgccctccacagaattgggttccaagggctgttccagacaactgccaacgtcactgagggccctgccccagcggccctggccccaggctctattaacctaaaatgtagctccctagcgctaacctaggaaccgccgctgcctgctggggggccacgcccctcatgcccttgtcccaggcccggggccttcagcgttgaacacttccttgcttttttcacatgttttatggaattgttcacctggtttgaaataataaaatgtagaaagaaaaaaaat

SEQ ID NO: 2127 - protein, 82 aa, Homosapiens; identical to SEQ ID NO: 2117

SEQ ID NO: 2128 - DNA, 938 bp, Homosapiens
gggggaggggcaataggtgaccaggggacaagggaggagaaggcccagggtgtgaatcaggaggtcaagtgagtgaggtgcagggcatggaggaggtcatacaagcaggcctggcccagtggtccagacagaagggcctggccttgccctgggacagaaccagaggccatcctgatgttccctggagaaatctcacctcctcacccaccaggccattggcccagcctgccggaagctgcatgccagcggagcccagccctgctgcccactaccaccagctccatgtgcacctccagctcttgccctctgacttgtctgagcgtcccgggcttaggctggccccactggccctggtggaggtggggatgactctcccagtgccacagactcccctcccccacgtaacccagcaacagaaactggctcctgggcggcaactgtgtccctggtaacaaatgggtaggaaaaatagagaagggtcattgtctagggaggcgggagagaggcacgccctggctgcttcccgatccatgctctgctttcccccacctccagggccaccgccgactttgtaccccccaacccctgaggaagatgggggcaagaagatcacgctccccgcctgttcccccgccgcttttctcctctttcctccctgccctgccctccacagaattgggttccaagggctgttccagacaactgccaacgtcactgagggccctgccccagcggccctggccccaggctctattaacctaaaatgtagctccctagcgctaacctaggaaccgccgctgcctgctggggggccacgcccctcatgcccttgtcccaggcccggggccttcagcgttgaacacttccttgcttttttcacatgttttatggaattgttcacctggtttgaaataataaaatgtagaaagaaaaaaaat

SEQ ID NO: 2129 - protein, 110 aa, Homosapiens
MGRKNREGSLSREAGERHALAASRSMLCFPPPPGPPPTLYPPTPEEDGGKKITLPACSPAAFLLFPPCPALHRIGFQGLFQTTANVTEGPAPAALAPGSINLKCSSLALT

SEQ ID NO: 2130 - DNA, 358 bp, Homosapiens
gtaaaggaaaaaaaaaaaactgcaaatctagaaaactttttagagaaaaactatttaaaactgtcagatcctgaccagcaagcccccccccagcccccacagaattgggttccaagggctgttccagacaactgccaacgtcactgagggccctgccccagcggccctggccccaggctctattaacctaaaatgtagctccctagcgctaacctaggaaccgccgctgcctgctggggggccacgcccctcatgcccttgtcccaggcccggggccttcagcgttgaacacttccttgcttttttcacatgttttatggaattgttcacctggtttgaaataataaaatgtagaaag

SEQ ID NO: 2131 - protein, 52 aa, Homosapiens
NCQILTSKPPPSPHRIGFQGLFQTTANVTEGPAPAALAPGSINLKCSSLALT

SEQ ID NO: 2132 - DNA, 2628 bp, Homosapiens
ggccggggtcggcgccgcggaggcggggagggagggagggttggagggttgagccagagacccgggaccccgtccccgcacacctgccagtgccccgtagcttcggccgccggcactggcaggagatgaaaggctgctgccgcccggtcggaaggacatcggcgccccccaggcccggtccccgccccagttcctcgggcctttcctgctgcccctgcctgcgagggccgacgacacggagaacaggatcctgcgcccaacccaggtccccgccttctttcagaggcccaggcctggaccccgctgagccgcagatgtgcgagcaggagcgccagagccccgatgcccgcccagcaggaagcgggcgggagatggttccttccttctgtcctgagggggaaccctgcacagagggaccattgagggcctggcattgtctgcctaactcacccagtgcctccctccctgggtgggccatgcggggccttgacaggattgccctggtgccgtcttggcagtgggtctgggtgggatcctgggggcagggcttccctgagtgcagacagctaggcctccacctgccccggcctcccacccaggctcagatttccagggcataaggctccattgtcccagcactggtggaggcggcctgtcaattcagccttgtgtttggtggttgggaaattcccagccatggggggctgcaggcaggaaggggctgcccaggtgtcctgcaccccaactgaagggactccatgaggttggttcctgggcatcccctgctgcctggagctgtcccaggctggacctcaaccattcatcaaccctcaggagcagttgggtgaggagcaccagaaattcaatgctccctggcgctgcatccccagagccctcccagcctaagaagccccatctttctgtctccacgcatggagaactgcagctgtgaggcccaggacccttagcaggacatgcagagctgggcagggacccaggctcatgctcccagcgtggggtgagttgtctccagcctgtggagactgccatgaagttgatctgcctcccagagggcctggcccacttgaaataattgctccggctactgatgtggtgggaactttggtatttttaacccatttggggggtgggggagcagctaggaagagagaggcaagctttcagagtcagagaggcctgagagaggagagtagagggaaactcagtgaggaggagccaggcaggctgcctcggtagttccccaggcctagacaccccccctgtaccaccccctgtcccagcaggtaggtgcagacctagatgccaggtgcagaagggggaaagggccctctccagggttacagcagggatcaccgaggctgcaggggctgccaaggcctggaagaagtcccatgttccagggagccccatggcttctgatgtcaggaaaacttagtcctctcagttccccagaatcatttcaccccaccccacccaaactgagtggcaaaccagttgagtagagaatacaagccctgactccagctgcctggtcagtggcatagccagccaagtcctagcaaccctaggagtcagggagtcagggaggaggcaaggacaagactacagtattgtttggctgagttctgggtctggccccactccccaaaactgaccccaatctctgtgtctgctgccctaaaaagagaccctggggctgggtgtggtggctcacgcctgtaatcctagcactttgggaggccaaggtgggcggatcacttgagatcaggagttcaagaccagcctggccaacatggtgaaaccccgtctctactaaaatacaaaaattagctgggcatgatgacgggtgcctgtaatcccagctactcaggaggctgaaacaggagaatcacttgaacccaggagacggtggttgcagtgagccaagattgtgccactgcactctagcctaggtggctgagcgagactccatctcaaaaaaataaataaaaggagaccctgactggatgtagtggctcatgccttaatcccagcacttttggaggccaaggcaggaggatcacttgaggccaaaagtttgagaccagcctgggcaacatagcaagaccccgtctcttaaaaacaaaagatcctagcggtcctcatctctaccatggactaccagagggaaggcagcacctctcatcacccagggggatggcctccagtcagctgggtggggaacacagagccctgcccagaggcttgaacctggcaccacaggggtctggaattacacagaagacgggtgacagccaaggtggatcatgaacggtgagaagtccagcaggtgacaaggggaagggtctaaagggtggagggcacagcgcaagcaaagtcttggcaacaaaagagctaatgcatcccagaaatggggcaggtggagtactggaagctacaccaagcttcagagtggtcctgtggcctcggtgtggtagctcaggcctataattccaacactttgggaggctgaggcaggaggaggataacttgaacccaggagttcaagatcagcctgggcaacatagtgagacctccatttttacaaaaaatacaaaaattaactgt

SEQ ID NO: 2133 - protein, 37 aa, Homosapiens
MASSQLGGEHRALPRGLNLAPQGSGITQKTGDSQGGS

SEQ ID NO: 2134 - DNA, 424 bp, Homosapiens
ctggcaggagatgaaaggctgctgccgcccggtcggaaggacatcggcgccccccaggcccggtccccgccccagttcctcgggcctttcctgctgcccctgcctgcgagggccgacgacacggagaacaggatcctgcgcccaacccaggagcagttgggtgaggagcaccagaaattcaatgctccctggcgctgcatccccagagccctcccagcctaagaagccccatctttctgtctccacgcatggagaactgcagctgtgaggcccaggacccttagcaggacatgcagagctgggcagggacccaggctcatgctcccagcgtggggtgagttgtctccagcctgtggagactgccatgaagttgatctgcctcccagagggcctggcccacttgaaataattgctccggctactg

SEQ ID NO: 2135 - protein, 85 aa, Homosapiens
MKGCCRPVGRTSAPPRPGPRPSSSGLSCCPCLRGPTTRRTGSCAQPRSSWVRSTRNSMLPGAASPEPSQPKKPHLSVSTHGELQL

SEQ ID NO: 2136 - DNA, 327 bp, Homosapiens
catgcagagctgggcagggacccaggctcatgctcccagcgtgggtggggaacacagagccctgcccagaggcttgaacctggcaccacaggggtctggaattacacagaagacgggtgacagccaaggtggatcatgaacggtgagaagtccagcaggtgacaaggggaagggtctaaagggtggagggcacagcgcaagcaaagtcttggcaacaaaagagctaatgcatcccagaaatggggcaggtggagtactggaagctacaccaagcttcagagtggtcctgtggcctcggtgtggtagctcaggcctataattccaaca

SEQ ID NO: 2137 - protein, 45 aa, Homosapiens
MQSWAGTQAHAPSVGGEHRALPRGLNLAPQGSGITQKTGDSQGGS

SEQ ID NO: 2138 - DNA, 337 bp, Homosapiens
aaccccagctccaggggctcagcaggcaaagggaatcactgagtgggggcaccacccgtggactccaatatctcaacctctccctccacaggttggaggtgggaggaacaacccccaccaaacccagagccgaaaactgagggagttttacagacaggacggagctcctgcacctcggagcctcagttgggaatgacctggggtcttgtcctgaagctgagtctggtgaacgtgccccatttgtaacatgaggggtacttctctggagggactgtatgttgacagtggcagagtggagccctgaagtccacctgagtgaatataccagggcttgaga

SEQ ID NO: 2139 - protein, 64 aa, Homosapiens
TPAPGAQQAKGITEWGHHPWTPISQPLPPQVGGGRNNPHQTQSRKLREFYRQDGAPAPRSLSWE

SEQ ID NO: 2140 - DNA, 325 bp, Homosapiens
gagaaggcagccagtgttggcctggaagacctctagaacctgagaagaggcagcgatcctggggcagagtccagggcagctcaaggctcctccacacacacacccgctgaaccctgagcaccctgagctgctgagatggggcgggccgaggaggtgcctggagtgcccaccctgggagacagaccccacctccttgggtagtgagcagtgagcagaaagctgtgaacaggctgggctgctggaggtggggcgaggcaggccgactgtactaaagtaacgcaataaacgcattatcagccaaagctggaatggccccagcagaaaa

SEQ ID NO: 2141 - protein, 55 aa, Homosapiens
EEAAILGQSPGQLKAPPHTHPLNPEHPELLRWGGPRRCLECPPWETDPTSLGSEQ

SEQ ID NO: 2142 - DNA, 3051 bp, Homosapiens
tgtgagtgtgtatacaagagaggagattactgggaagggtgacgtggtgaggcgggcttgccagtgcagggtgaccctgagggtgtgcccagtggcgtgggtgtgtctgtgattgtggccaggcggggcaccctcggaggggagggttcggaagtggaatgcgaccccccagcctctttcccctaggggctgtaatctgatccctggggactccccccctagcctcccgccctcgccctcactgctgactcctcttccagatcctggggcagagtccagggcagctcaaggctcctccacacacacacccgctgaaccctgagcaccctgagctgctgagatggggcgggccggggctgccgccgtgatcccgggcctggccctgctctgggcagtggggctggggagtgccgcccccagcccccacgccttcggctctccttccaagagctccaggcctggcatggtctccagactttcagcctggagcgaacctgctgctaccaggccttgctggtggatgaggagcgtggacgcctgtttgtgggtgccgagaaccatgtggcctccctcaacctggacaacatcagcaagcgggccaagaagctggcctggccggcccctgtggaatggcgagaggagtgcaactgggcagggaaggacattggtactgagtgcatgaacttcgtgaagttgctgcatgcctacaaccgcacccatttgctggcctgtggcacgggagccttccacccaacctgtgcctttgtggaagtgggccaccgggcagaggagcccgtcctccggctggacccaggaaggatagaggatggcaaggggaagagtccttatgaccccaggcatcgggctgcctccgtgctggtgggggaggagctatactcaggggtggcagcagacctcatgggacgagactttaccatctttcgcagcctagggcaacgtccaagtctccgaacagagccacacgactcccgctggctcaatgagcccaagtttgtcaaggtattttggatcccggagagcgagaacccagacgacgacaaaatctacttcttctttcgtgagacggcggtagaggcggcgccggcactgggacgcctgtccgtgtcccgcgttggccagatctgccggaacgacgtgggcggccagcgcagcctggtcaacaagtggacgacgttcctgaaggcgcggctggtgtgctcggtgcccggcgtcgagggcgacacccacttcgatcagctccaggatgtgtttctgttgtcctcgcgggaccaccggaccccgctgctctatgccgtcttctccacgtccagcatcttccagggctctgcggtgtgcgtgtacagcatgaacgacgtgcgccgggccttcttgggaccctttgcacacaaggaggggcccatgcaccagtgggtgtcataccagggtcgcgtcccctacccgcggccaggcatgtgccccagcaagacctttggcaccttcagttccaccaaggacttcccagacgatgtcatccagtttgcgcggaaccaccccctcatgtacaactctgtcctgcccactggggggcgccctcttttcctacaagttggagccaattacaccttcactcaaattgccgcggaccgggttgcagccgctgacggacactatgacgtcctcttcattggcacagacgttggcacggtgctgaaggtgatctcggtccccaagggcagtaggcccagcgcagaggggctgctcctggaggagctgcacgtgtttgaggactcggccgctgtcaccagcatgcaaatttcttccaagaggcaccagctgtacgtagcctcgcggagcgcggtggcccagatcgcgttgcaccgctgcgctgcccacggccgcgtctgcaccgaatgctgtctggcgcgtgacccctactgcgcctgggacggggtcgcgtgcacgcgcttccagcccagtgccaagaggcggttccggcggcaagacgtaaggaatggcgaccccagcacgttgtgctccggagactcgtctcgtcccgcgctgctggaacacaaggtgttcggcgtggagggcagcagcgcctttctggagtgtgagccccgctcgctgcaggcgcgcgtggagtggactttccagcgcgcaggggtgacagcccacacccaggtgctggcagaggagcgcaccgagcgcaccgcccggggactactgctgcgcaggctgcggcgccgggactcgggcgtgtacttgtgcgccgccgtcgagcagggctttacgcaaccgctgcgtcgcctgtcgctgcacgtgttgagtgctacgcaggccgaacgactggcgcgggccgaggaggctgcgcccgccgcgccgccgggccccaaactctggtaccgggactttctgcagctggtggagccgggcggaggtggcagcgcgaactccctgcgcatgtgccgcccgcagcctgcgctgcagtcactgcccctggagtcgcggagaaagggccgtaaccggaggacccacgcccctgagcctcgcgctgagcgggggccgcgcagcgcaacgcactggtgaccagactgtccccacgccgggaaccaagcaggagacgacaggcgagagaggagccagacagaccctgaaaagaaggacgggttggggccgggcacattgggggtcaccggccgatggagacaccaaccgacaggccctggctgagggcagctgcgcgggcttatttattaacaggataacccttgaatgtagcagccccgggagggcggcacaggtcgggcgcaggattcagccggagggaagggacggggaagccgagctccagagcaacgaccagggccgaggaggtgcctggagtgcccaccctgggagacagaccccacctccttgggtagtgagcagtgagcagaaagctgtgaacaggctgggctgctggaggtggggcgaggcaggccgactgtactaaagtaacgcaataaacgcattatcagccaaagctggaatggccccagcagaaaaccccag

SEQ ID NO: 2143 - protein, 635 aa, Homosapiens
MNFVKLLHAYNRTHLLACGTGAFHPTCAFVEVGHRAEEPVLRLDPGRIEDGKGKSPYDPRHRAASVLVGEELYSGVAADLMGRDFTIFRSLGQRPSLRTEPHDSRWLNEPKFVKVFWIPESENPDDDKIYFFFRETAVEAAPALGRLSVSRVGQICRNDVGGQRSLVNKWTTFLKARLVCSVPGVEGDTHFDQLQDVFLLSSRDHRTPLLYAVFSTSSIFQGSAVCVYSMNDVRRAFLGPFAHKEGPMHQWVSYQGRVPYPRPGMCPSKTFGTFSSTKDFPDDVIQFARNHPLMYNSVLPTGGRPLFLQVGANYTFTQIAADRVAAADGHYDVLFIGTDVGTVLKVISVPKGSRPSAEGLLLEELHVFEDSAAVTSMQISSKRHQLYVASRSAVAQIALHRCAAHGRVCTECCLARDPYCAWDGVACTRFQPSAKRRFRRQDVRNGDPSTLCSGDSSRPALLEHKVFGVEGSSAFLECEPRSLQARVEWTFQRAGVTAHTQVLAEERTERTARGLLLRRLRRRDSGVYLCAAVEQGFTQPLRRLSLHVLSATQAERLARAEEAAPAAPPGPKLWYRDFLQLVEPGGGGSANSLRMCRPQPALQSLPLESRRKGRNRRTHAPEPRAERGPRSATHW

SEQ ID NO: 2144 - DNA, 2711 bp, Homosapiens
gctaaaacagaggcctgcctgttctggctgggatgagggcagggaggtcgaggtggctgaggtctgggggtggtgagtcagggtgggggctcgtgtaattcttctggggtgcctctgagtcatgggaggctttgcaggcctgtgcttccccagacacccaccctcgtgaggcctgggctggtcagcaagggcccccaggtccctgtagcccatgttagtacttgcctgggctgatgccgaagagagggaggggtgaggatgccactggtgagctgggacctcttaaggctacgtccctgggggaagcctcacacctccaaccctactagactgagtgcatgaacttcgtgaagttgctgcatgcctacaaccgcacccatttgctggcctgtggcacgggagccttccacccaacctgtgcctttgtggaagtgggccaccgggcagaggagcccgtcctccggctggacccaggaaggatagaggatggcaaggggaagagtccttatgaccccaggcatcgggctgcctccgtgctggtgggggaggagctatactcaggggtggcagcagacctcatgggacgagactttaccatctttcgcagcctagggcaacgtccaagtctccgaacagagccacacgactcccgctggctcaatgagcccaagtttgtcaaggtattttggatcccggagagcgagaacccagacgacgacaaaatctacttcttctttcgtgagacggcggtagaggcggcgccggcactgggacgcctgtccgtgtcccgcgttggccagatctgccggaacgacgtgggcggccagcgcagcctggtcaacaagtggacgacgttcctgaaggcgcggctggtgtgctcggtgcccggcgtcgagggcgacacccacttcgatcagctccaggatgtgtttctgttgtcctcgcgggaccaccggaccccgctgctctatgccgtcttctccacgtccagcatcttccagggctctgcggtgtgcgtgtacagcatgaacgacgtgcgccgggccttcttgggaccctttgcacacaaggaggggcccatgcaccagtgggtgtcataccagggtcgcgtcccctacccgcggccaggcatgtgccccagcaagacctttggcaccttcagttccaccaaggacttcccagacgatgtcatccagtttgcgcggaaccaccccctcatgtacaactctgtcctgcccactggggggcgccctcttttcctacaagttggagccaattacaccttcactcaaattgccgcggaccgggttgcagccgctgacggacactatgacgtcctcttcattggcacagacgttggcacggtgctgaaggtgatctcggtccccaagggcagtaggcccagcgcagaggggctgctcctggaggagctgcacgtgtttgaggactcggccgctgtcaccagcatgcaaatttcttccaagaggcaccagctgtacgtagcctcgcggagcgcggtggcccagatcgcgttgcaccgctgcgctgcccacggccgcgtctgcaccgaatgctgtctggcgcgtgacccctactgcgcctgggacggggtcgcgtgcacgcgcttccagcccagtgccaagaggcggttccggcggcaagacgtaaggaatggcgaccccagcacgttgtgctccggagactcgtctcgtcccgcgctgctggaacacaaggtgttcggcgtggagggcagcagcgcctttctggagtgtgagccccgctcgctgcaggcgcgcgtggagtggactttccagcgcgcaggggtgacagcccacacccaggtgctggcagaggagcgcaccgagcgcaccgcccggggactactgctgcgcaggctgcggcgccgggactcgggcgtgtacttgtgcgccgccgtcgagcagggctttacgcaaccgctgcgtcgcctgtcgctgcacgtgttgagtgctacgcaggccgaacgactggcgcgggccgaggaggctgcgcccgccgcgccgccgggccccaaactctggtaccgggactttctgcagctggtggagccgggcggaggtggcagcgcgaactccctgcgcatgtgccgcccgcagcctgcgctgcagtcactgcccctggagtcgcggagaaagggccgtaaccggaggacccacgcccctgagcctcgcgctgagcgggggccgcgcagcgcaacgcactggtgaccagactgtccccacgccgggaaccaagcaggagacgacaggcgagagaggagccagacagaccctgaaaagaaggacgggttggggccgggcacattgggggtcaccggccgatggagacaccaaccgacaggccctggctgagggcagctgcgcgggcttatttattaacaggataacccttgaatgtagcagccccgggagggcggcacaggtcgggcgcaggattcagccggagggaagggacggggaagccgagctccagagcaacgaccagggccgaggaggtgcctggagtgcccaccctgggagacagaccccacctccttgggtagtgagcagtgagcagaaagctgtgaacaggctgggctgctggaggtggggcgaggcaggccgactgtactaaagtaacgcaataaacgcattatcagccaaagctggaatggccccagcagaaaaccccag

SEQ ID NO: 2145 - protein, 635 aa, Homosapiens; identical to SEQ ID NO: 2143

SEQ ID NO: 2146 - DNA, 2189 bp, Homosapiens
gacatggtgctagaggttgggtggtcagacactgtgatcccgggtgctgtgcccgcactacgggaaggggaagcagcgcgtgggtctcgcatcaggaggcaaggccaggacccgctgacccatgcctcctgccgcggtcagagcccaagtttgtcaaggtattttggatcccggagagcgagaacccagacgacgacaaaatctacttcttctttcgtgagacggcggtagaggcggcgccggcactgggacgcctgtccgtgtcccgcgttggccagatctgccggaacgacgtgggcggccagcgcagcctggtcaacaagtggacgacgttcctgaaggcgcggctggtgtgctcggtgcccggcgtcgagggcgacacccacttcgatcagctccaggatgtgtttctgttgtcctcgcgggaccaccggaccccgctgctctatgccgtcttctccacgtccagcatcttccagggctctgcggtgtgcgtgtacagcatgaacgacgtgcgccgggccttcttgggaccctttgcacacaaggaggggcccatgcaccagtgggtgtcataccagggtcgcgtcccctacccgcggccaggcatgtgccccagcaagacctttggcaccttcagttccaccaaggacttcccagacgatgtcatccagtttgcgcggaaccaccccctcatgtacaactctgtcctgcccactggggggcgccctcttttcctacaagttggagccaattacaccttcactcaaattgccgcggaccgggttgcagccgctgacggacactatgacgtcctcttcattggcacagacgttggcacggtgctgaaggtgatctcggtccccaagggcagtaggcccagcgcagaggggctgctcctggaggagctgcacgtgtttgaggactcggccgctgtcaccagcatgcaaatttcttccaagaggcaccagctgtacgtagcctcgcggagcgcggtggcccagatcgcgttgcaccgctgcgctgcccacggccgcgtctgcaccgaatgctgtctggcgcgtgacccctactgcgcctgggacggggtcgcgtgcacgcgcttccagcccagtgccaagaggcggttccggcggcaagacgtaaggaatggcgaccccagcacgttgtgctccggagactcgtctcgtcccgcgctgctggaacacaaggtgttcggcgtggagggcagcagcgcctttctggagtgtgagccccgctcgctgcaggcgcgcgtggagtggactttccagcgcgcaggggtgacagcccacacccaggtgctggcagaggagcgcaccgagcgcaccgcccggggactactgctgcgcaggctgcggcgccgggactcgggcgtgtacttgtgcgccgccgtcgagcagggctttacgcaaccgctgcgtcgcctgtcgctgcacgtgttgagtgctacgcaggccgaacgactggcgcgggccgaggaggctgcgcccgccgcgccgccgggccccaaactctggtaccgggactttctgcagctggtggagccgggcggaggtggcagcgcgaactccctgcgcatgtgccgcccgcagcctgcgctgcagtcactgcccctggagtcgcggagaaagggccgtaaccggaggacccacgcccctgagcctcgcgctgagcgggggccgcgcagcgcaacgcactggtgaccagactgtccccacgccgggaaccaagcaggagacgacaggcgagagaggagccagacagaccctgaaaagaaggacgggttggggccgggcacattgggggtcaccggccgatggagacaccaaccgacaggccctggctgagggcagctgcgcgggcttatttattaacaggataacccttgaatgtagcagccccgggagggcggcacaggtcgggcgcaggattcagccggagggaagggacggggaagccgagctccagagcaacgaccagggccgaggaggtgcctggagtgcccaccctgggagacagaccccacctccttgggtagtgagcagtgagcagaaagctgtgaacaggctgggctgctggaggtggggcgaggcaggccgactgtactaaagtaacgcaataaacgcattatcagccaaagctggaatggccccagcagaaaaccccag

SEQ ID NO: 2147 - protein, 406 aa, Homosapiens
MNDVRRAFLGPFAHKEGPMHQWVSYQGRVPYPRPGMCPSKTFGTFSSTKDFPDDVIQFARNHPLMYNSVLPTGGRPLFLQVGANYTFTQIAADRVAAADGHYDVLFIGTDVGTVLKVISVPKGSRPSAEGLLLEELHVFEDSAAVTSMQISSKRHQLYVASRSAVAQIALHRCAAHGRVCTECCLARDPYCAWDGVACTRFQPSAKRRFRRQDVRNGDPSTLCSGDSSRPALLEHKVFGVEGSSAFLECEPRSLQARVEWTFQRAGVTAHTQVLAEERTERTARGLLLRRLRRRDSGVYLCAAVEQGFTQPLRRLSLHVLSATQAERLARAEEAAPAAPPGPKLWYRDFLQLVEPGGGGSANSLRMCRPQPALQSLPLESRRKGRNRRTHAPEPRAERGPRSATHW

SEQ ID NO: 2148 - DNA, 2065 bp, Homosapiens
gacatggtgctagaggttgggtggtcagacactgtgatcccgggtgctgtgcccgcactacgggaaggggaagcagcgcgtgggtctcgcatcaggaggcaaggccaggacccgctgacccatgcctcctgccgcggtcagagcccaagtttgtcaagaacgacgtgggcggccagcgcagcctggtcaacaagtggacgacgttcctgaaggcgcggctggtgtgctcggtgcccggcgtcgagggcgacacccacttcgatcagctcctgccccagcaagacctttggcaccttcagttccaccaaggacttcccagacgatgtcatccagtttgcgcggaaccaccccctcatgtacaactctgtcctgcccactggggggcgccctcttttcctacaagttggagccaattacaccttcactcaaattgccgcggaccgggttgcagccgctgacggacactatgacgtcctcttcattggcacagacgttggcacggtgctgaaggtgatctcggtccccaagggcagtaggcccagcgcagaggggctgctcctggaggagctgcacgtgtttgaggactcggccgctgtcaccagcatgcaaatttcttccaagagggcggttccggcggcaagacgtaaggaatggcgaccccagcacgttgtgctccggagactcgtctcgtcccgcgctgctggaacacaaggtgttcggcgtggagggcagcagcgcctttctggagtgtgagccccgctcgctgcaggcgcgcgtggagtggactttccagcgcgcaggggtgacagcccacacccaggtgctggcagaggagcgcaccgagcgcaccgcccggggactactgctgcgcaggctgcggcgccgggactcgggcgtgtacttgtgcgccgccgtcgagcagggctttacgcaaccgctgcgtcgcctgtcgctgcacgtgttgagtgctacgcaggccgaacgactggcgcgggccgaggaggctgcgcccgccgcgccgccgggccccaaactctggtaccgggactttctgcagctggtggagccgggcggaggtggcagcgcgaactccctgcgcatgtgccgcccgcagcctgcgctgcagtcactgcccctggagtcgcggagaaagggccgtaaccggaggacccacgcccctgagcctcgcgctgagcgggggccgcgcagcgcaacgcactggtgaccagactgtccccacgccgggaaccaagcaggagacgacaggcgagagaggagccagacagaccctgaaaagaaggacgggttggggccgggcacattgggggtcaccggccgatggagacaccaaccgacaggccctggctgagggcagctgcgcgggcttatttattaacaggataacccttgaatgtagcagccccgggagggcggcacaggtcgggcgcaggattcagccggagggaagggacggggaagccgagctccagagcaacgaccagggccgaggaggtgcctggagtgcccaccctgggagacagaccccacctccttgggtagtgagcagtgagcagaaagctgtgaacaggctgggctgctggaggtggggcgaggcaggccgactgtactaaagtaacgcaataaacgcattatcagccaaagctggaatggccccagcagaaaaccccagtcctcggccttgctatgtggtcttgggcaccttactagcggtgtcagggcccgagtttctcctgtccaaggttgcctggtgaggattaaaggtggttccggccaggcgcggtggctcacgcctgtaatcccaacactttcggaggcccaggcggacggatcacgaggtcaggagatggaaaccatcccggctaacacggtgaaaccccgtctgtactaaaaatacaaaaaattagtcgggcgtggtggcgggcgcctgtaatcctagctactcaggaggctgaggcaggagaattgcttgaacctgggaggtggaggttgcaatgagcctagatctcgccgctgcactccagcctgggcgacagagcgagactcc

SEQ ID NO: 2149 - protein, 132 aa, Homosapiens
MYNSVLPTGGRPLFLQVGANYTFTQIAADRVAAADGHYDVLFIGTDVGTVLKVISVPKGSRPSAEGLLLEELHVFEDSAAVTSMQISSKRAVPAARRKEWRPQHVVLRRLVSSRAAGTQGVRRGGQQRLSGV

SEQ ID NO: 2150 - DNA, 3476 bp, Homosapiens
atggtgctagaggttgggtggtcagacactgtgatcccgggtgctgtgcccgcactacgggaaggggaagcagcgcgtgggtctcgcatcaggaggcaaggccaggacccgctgacccatgcctcctgccgcggtcagagcccaagtttgtcaaggtattttggatcccggagagcgagaacccagacgacgacaaaatctacttcttctttcgtgagacggcggtagaggcggcgccggcactgggacgcctgtccgtgtcccgcgttggccagatctgccgggtgaggagtccctgggccacacccggcgaccctgcccctacccctttgcctgccctggtctcgccctcatcccctttgatcgtcccggcagaacgacgtgggcggccagcgcagcctggtcaacaagtggacgacgttcctgaaggcgcggctggtgtgctcggtgcccggcgtcgagggcgacacccacttcgatcagctccgtgagtgcgggagtgggtatggggttggggaggggggcagcggcgcagactccgggagcccccgccgcagcggggctgtgcgccctaccccagctaggccccttccccgcagaggatgtgtttctgttgtcctcgcgggaccaccggaccccgctgctctatgccgtcttctccacgtccagcatcttccagggctctgcggtgtgcgtgtacagcatgaacgacgtgcgccgggccttcttgggaccctttgcacacaaggaggggcccatgcaccagtgggtgtcataccagggtcgcgtcccctacccgcggccaggcatggttcgtagcccagggacttctgctacaacccacttcaaagcctcaagggtttgagaacttggcctggggtcttcttggtgaatgtggtttcttcctttagttatgggtgggaaaacgtttccatcataagacaaggcttgtttcccgcctctgacttcctagggcaaggctgatctcctctctaattctcagggcagggttctgtccccatccccctccatgttcccagaggctgggcatggagggctgcctatcaagcccccatatctatatccctgctgtgcctccctttcccccacccccagtgccccagcaagacctttggcaccttcagttccaccaaggacttcccagacgatgtcatccagtttgcgcggaaccaccccctcatgtacaactctgtcctgcccactggggggcgccctcttttcctacaagttggagccaattacaccttcactcaaattgccgcggaccgggttgcagccgctgacggacactatgacgtcctcttcattggcacagacgttggcacggtgctgaaggtgatctcggtccccaagggcagtaggcccagcgcagaggggctgctcctggaggagctgcacgtgtttgaggtgaggcctcacccccagtcgcccgggacccccccaccccactaagccctgaccccgtcgcccctcctccctctcaggactcggccgctgtcaccagcatgcaaatttcttccaagagggtgagtgaccaggatgggggtcggggtgggatggactgagcttgtgcctggcgcgtcccaagcctctggccccttttggtagtttgcagtcccgggtttgagtacaggctctggctttgttagactgtgtgacctgaggcgtaagacctcagtgttcccatctgtcgagtggaagaagggatccctgaccgatgggaggcaggcgtggggtcgccctcggtcagcccagagcccctcgtgccccctagcaccagctgtacgtagcctcgcggagcgcggtggcccagatcgcgttgcaccgctgcgctgcccacggccgcgtctgcaccgaatgctgtctggcgcgtgacccctactgcgcctgggacggggtcgcgtgcacgcgcttccagcccagtgccaagaggcggttccggcggcaagacgtaaggaatggcgaccccagcacgttgtgctccggagactcgtctcgtcccgcgctgctggaacacaaggtgttcggcgtggagggcagcagcgcctttctggagtgtgagccccgctcgctgcaggcgcgcgtggagtggactttccagcgcgcaggggtgacagcccacacccaggtgagccttactccgccctccccgccaggctcctgtcccaccccctgcatccaggagaggccccgccctacccaacgaagccccgtccaaccagacccactccccgccctgtccagtttggtccctcacctgcactccacaagctgctgaggccccattgcgtccaacggggctcccgacccgcctcccctgaatcaaggagaagacccgccctcgaccctcccattaaggtccctgaccaccccccaccaagttcatgtaaaccccgcctctttcggattctcccttgaagaccaccagctcccaaacactcagccttaaaatgtgcgcctgcgggcacccctttcccgctccacctcggctcccaatgactctttgcttcttccgtcgcgtgctagggcccggaagccctgttcccggcccgacacccccgcctcacgctgccctctgcccgcaggtgctggcagaggagcgcaccgagcgcaccgcccggggactactgctgcgcaggctgcggcgccgggactcgggcgtgtacttgtgcgccgccgtcgagcagggctttacgcaaccgctgcgtcgcctgtcgctgcacgtgttgagtgctacgcaggccgaacgactggcgcgggccgaggaggctgcgcccgccgcgccgccgggccccaaactctggtaccgggactttctgcagctggtggagccgggcggaggtggcagcgcgaactccctgcgcatgtgccgcccgcagcctgcgctgcagtcactgcccctggagtcgcggagaaagggccgtaaccggaggacccacgcccctgagcctcgcgctgagcgggggccgcgcagcgcaacgcactggtgaccagactgtccccacgccgggaaccaagcaggagacgacaggcgagagaggagccagacagaccctgaaaagaaggacgggttggggccgggcacattgggggtcaccggccgatggagacaccaaccgacaggccctggctgagggcagctgcgcgggcttatttattaacaggataacccttgaatgtagcagccccgggagggcggcacaggtcgggcgcaggattcagccggagggaagggacggggaagccgagctccagagcaacgaccagggccgaggaggtgcctggagtgcccaccctgggagacagaccccacctccttgggtagtgagcagtgagcagaaagctgtgaacaggctgggctgctggaggtggggcgaggcaggccgactgtactaaagtaacgcaataaacgcattatcagccaaagctggaatggccccagcagaaaaccccag

SEQ ID NO: 2151 - protein, 119 aa, Homosapiens
MGLGRGAAAQTPGAPAAAGLCALPQLGPFPAEDVFLLSSRDHRTPLLYAVFSTSSIFQGSAVCVYSMNDVRRAFLGPFAHKEGPMHQWVSYQGRVPYPRPGMVRSPGTSATTHFKASRV

SEQ ID NO: 2152 - DNA, 732 bp, Homosapiens
tgctgatggaagctctccctgttcagtcccatctccacatcctttcctgggctgtgtctccaccctgtggatgctgcccaacccacactcttccagtccacactcttcacaacccaaacatgctgagggtagacgcctcaaaggcgaggagacactagccccagctgtccgggagcaccaatggtcattaccccttctcatccctgcagacgttggcacggtgctgaaggtgatctcggtccccaagggcagtaggcccagcgcagaggggctgctcctggaggagctgcacgtgtttgaggactcggccgctgtcaccagcatgcaaatttcttccaagagggtgagtgaccaggatgggggtcggggtgggatggactgagcttgtgcctggcgcgtcccaagcctctggccccttttggtagtttgcagtcccgggtttgagtacaggctctggctttgttagactgtgtgacctgaggcgtaagacctcagtgttcccatctgtcgagtggaagaagggatccctgaccgatgggaggcaggcgtggggtcgccctcggtcagcccagagcccctcgtgccccctagcaccagctgtacgtagcctcgcggagcgcggtggcccagatcgcgttgcaccgctgcgctgcccacggccgcgtctgcaccgaatgctgtctggcgcgtgacccctactgcgcctgggacggggtcgcgtgcacgcgcttc

SEQ ID NO: 2153 - protein, 103 aa, Homosapiens
MLPNPHSSSPHSSQPKHAEGRRLKGEETLAPAVREHQWSLPLLIPADVGTVLKVISVPKGSRPSAEGLLLEELHVFEDSAAVTSMQISSKRVSDQDGGRGGMD

SEQ ID NO: 2154 - DNA, 1431 bp, Homosapiens
ttgtgcctggcgcgtcccaagcctctggccccttttggtagtttgcagtcccgggtttgagtacaggctctggctttgttagactgtgtgacctgaggcgtaagacctcagtgttcccatctgtcgagtggaagaagggatccctgaccgatgggaggcaggcgtggggtcgccctcggtcagcccagagcccctcgtgccccctagcaccagctgtacgtagcctcgcggagcgcggtggcccagatcgcgttgcaccgctgcgctgcccacggccgcgtctgcaccgaatgctgtctggcgcgtgacccctactgcgcctgggacggggtcgcgtgcacgcgcttccagcccagtgccaagaggcggttccggcggcaagacgtaaggaatggcgaccccagcacgttgtgctccggagactcgtctcgtcccgcgctgctggaacacaaggtgttcggcgtggagggcagcagcgcctttctggagtgtgagccccgctcgctgcaggcgcgcgtggagtggactttccagcgcgcaggggtgacagcccacacccaggtgctggcagaggagcgcaccgagcgcaccgcccggggactactgctgcgcaggctgcggcgccgggactcgggcgtgtacttgtgcgccgccgtcgagcagggctttacgcaaccgctgcgtcgcctgtcgctgcacgtgttgagtgctacgcaggccgaacgactggcgcgggccgaggaggctgcgcccgccgcgccgccgggccccaaactctggtaccgggactttctgcagctggtggagccgggcggaggtggcagcgcgaactccctgcgcatgtgccgcccgcagcctgcgctgcagtcactgcccctggagtcgcggagaaagggccgtaaccggaggacccacgcccctgagcctcgcgctgagcgggggccgcgcagcgcaacgcactggtgaccagactgtccccacgccgggaaccaagcaggagacgacaggcgagagaggagccagacagaccctgaaaagaaggacgggttggggccgggcacattgggggtcaccggccgatggagacaccaaccgacaggccctggctgagggcagctgcgcgggcttatttattaacaggataacccttgaatgtagcagccccgggagggcggcacaggtcgggcgcaggattcagccggagggaagggacggggaagccgagctccagagcaacgaccagggccgaggaggtgcctggagtgcccaccctgggagacagaccccacctccttgggtagtgagcagtgagcagaaagctgtgaacaggctgggctgctggaggtggggcgaggcaggccgactgtactaaagtaacgcaataaacgcattatcagccaaagctggaatggccccagcagaaaaccccag

SEQ ID NO: 2155 - protein, 51 aa, Homosapiens
MATPARCAPETRLVPRCWNTRCSAWRAAAPFWSVSPARCRRAWSGLSSAQG

SEQ ID NO: 2156 - DNA, 737 bp, Homosapiens
acctttttttttttttttttttttttttttggactggggccattccagctttggctgataatgcgtttattgcgttactttagtacagtcggcctgcctcgccccacctccagcagcccagcctgttcacagctttctgctcactgctcactacccaaggaggtggggtctgtctcccagggtgggcactccaggcacctcctcggccctggtcgttgctctggagctcggcttccccgtcccttccctccggctgaatcctgcgcccgacctgtgccgccctcccggggctgctacattcaagggttatcctgttaataaataagcccgcgcagctgccctcagccagggcctgtcggttggtgtctccatcggccggtgacccccaatgtgcccggccccaacccgtccttcttttcagggtctgtctggctcctctctcgcctgtcgtctcctgcttggttcccggcgtggggacagtctggtcaccagtgcgttgcgctgcgcggcccccgctcagcgcgaggctcaggggcgtgggtcctccggttacggccctttctccgcgactccaggggcagtgactgcagcgcaggctgcgggcggcacatgcgcagggagttcgcgctgccacctccgcccggctccaccagctgcagaaagtcccggtaccagagtttggggcccggcggcgcggcgggcgcagcctcctcggcccgcgccagtcgttcggcctg

SEQ ID NO: 2157 - protein, 115 aa, Homosapiens
MCPAPTRPSFQGLSGSSLACRLLLGSRRGDSLVTSALRCAAPAQREAQGRGSSGYGPFSATPGAVTAAQAAGGTCAGSSRCHLRPAPPAAESPGTRVWGPAARRAQPPRPAPVVR

SEQ ID NO: 2158 - DNA, 1433 bp, Homosapiens
gctgcatttgtccagtcctgctactggatgccatcattggcccccgactgcccactgcttgccatgcctgaggagacccaagaagactccgtggcgccaatgatgcccagccagaggagcagggggccattggcccccaaccacgtgcatgaggtatgcctgcaccaggtggagtccatcagcgacctacatagtggagcaggcacactgcgcccctatctaactgaagaggcacgaccgtgggatgagctgctgggcgttttgccgccgtcactgtgtgcccaggctggctgcagccctgtgtacagacgaggagggttcctgctgctgctcgcgctgctggtgctcacttgcctagtgctcgcactcctggctgtctacctgagcgtgctgcagagtgaatccctgcgcatcctggcacacacgctccgcacgcaggaggagacactactcaaactccgcttggccagcctcagccagcttcggaggctcaactccagtgaggcccaagcacccagctgagatgccatttggatctggggcctgggggtgtgtgttggtgggggaataaagtggctatgggcaggtctctccttccctactgctggctgccacatctacactatttccttggtgagatttttgtacaagaacctgttgttaacttaatggctgcctccctctcctgatctcttcaagccaggcctagccaagcctctggtgccaaagcctcgctttgggtggcccaaggtcaggggaaggggcaccagcctcctggctcctcctgtggcctgtcaacactctctggccaccccagatggcaggttctgaagtctagaaatagctgcccccatagcaatcacccaaactctgccagggctcccagtgagggtccagcctcagctcttaaagacaggctgggctctgagtagggggagaggcaccacctggggaagactgccttggagggcaaaggtgacatcgtggaagaccagttgggcccaagcctgggatagtagatggggagggagaacagaaaaatacccaggggttaagaccacagaaggctgaccgttctgtttaattatctgtaataatccttaaaaatcagcacacaaatccattccaggtagctttgccaccccacctgctgtggtggcatttgtccagatgccaccacccccctaagagtgggtcatcctgggggagcaaggcctgagaaaggaaaggaagggaaaggccccctagtgcctgccccacagccctgaggaaggcacatatttagcctggcctgagacaggacaggaaggggccacagggctgagtgcagggacaaaggggtcagggtcccaagtgtccgggcccccagctacccaccccatgtctgtttttggttttgtcattaaaaaaaataaagtgacaaatactggtgg

SEQ ID NO: 2159 - protein, 164 aa, Homosapiens; identical to SEQ ID NO: 193

SEQ ID NO: 2160 - DNA, 1586 bp, Homosapiens
gctgcatttgtccagtcctgctactggatgccatcattggcccccgactgcccactgcttgccatgcctgaggagacccaagaagactccgtggcgccaatgatgcccagccagaggagcagggggccattggcccccaaccacgtgcatgaggtatgcctgcaccaggtggagtccatcagcgacctacatagtggagcaggcacactgcgcccctatctaactgaagaggcacgaccgtgggatgagctgctgggcgttttgccgccgtcactgtgtgcccaggctggctgcagccctgtgtacagacgaggagggttcctgctgctgctcgcgctgctggtgctcacttgcctagtgctcgcactcctggctgtctacctgagcgtgctgcagagtgaatccctgcgcatcctggcacacacgctccgcacgcaggaggagacactactcaaactccgcttggccagcctcagccagcttcggaggctcaactccagtgaggcccaagcacccagctgagatgccatttggatctggggcctgggggtgtgtgttggtgggggaataaagtggctatgggcaggtctctccttccctactgctggctgccacatctacactatttccttggtgagatttttgtacaagaacctgttgttaacttaatggctgcctccctctcctgatctcttcaagccaggcctagccaagcctctggtgccaaagcctcgctttgggtggcccaaggtcaggggaaggggcaccagcctcctggctcctcctgtggcctgtcaacactctctggccaccccagatggcaggttctgaagtctagaaatagctgcccccatagcaatcacccaaactctgccagggctcccagtgagggtccagcctcagctcttaaagacaggctgggctctgagtagggggagaggcaccacctggggaagactgccttggagggcaaaggtgacatcgtggaagaccagttgggcccaagcctgggatagtagatggggagggagaacagaaaaatacccaggggttaagaccacagaaggctgaccgttctgtttaattatctgtaataatccttaaaaatcagcacacaaatccattccaggtagctttgccaccccacctgctgtggtggcatttgtccagatgccaccacccccctaagagtgggtcatcctgggggagcaaggcctgagaaaggaaaggaagggaaaggccccctagtgcctgccccacagccctgaggaaggcacatatttagcctggcctgagacaggacaggaaggggccacagggctgagtgcagggacaaaggggtcagggtcccaagtgtccgggcccccagctacccaccccatgtctgtttttggttttgtcattaaaaaaaataaagtgacaaatactggtggagaccagttgttgcactgtcttctgttaaaaatacggaccaagggcatagaaagtctcctcttcagcaggtcctgcttcacaggatgtctgcccgcttgtcccgcacacggcttcgagccttggtccgggctttgaaggcagcagcattgtac

SEQ ID NO: 2161 - protein, 164 aa, Homosapiens; identical to SEQ ID NO: 193

SEQ ID NO: 2162 - DNA, 1170 bp, Homosapiens
aaggaggggtcaaaggggccaggcagagaagagagggtctctcagtgaaaggaggggtttgggcagtgccctgttcagagccagcagagctcaagcatctaccacacaccctccaatgctcccattgcaggaggagtttgtttacgaggacatggaggccctctgcagtgtcctgcgcactctggccactgacagtaacaagtaccgtgccaaggctgatcgtcggcgccagcgctctactttccgcgccgtgctgcactccgtggagggcggtgaatgcgaagaagagatagtgcgcttcggctttgaggtgctctacatggacagctgggctcggcaccggatctacgctgccttcaaggaagtgctgggttcgggcatgcaccaccacctccagaacaatgagctactccgtgacatctttggcctgggccctgtgctgttgctggatgccactgccctgaaggcctgcaaggttccacgctttgagaaggtttgcacccttgggcacctttctcttccccctattcccatttcctggaggcctggaattctgtagaggccggaagaggacccccagccctttcccttcccagctccccagggtgtcactctctgtccccactctagcacctgtacaatgctgctgccttcaaagcccggaccaaggctcgaagccgtgtgcgggacaagcgggcagacatcctgtgaagcaggacctgctgaagaggagactttctatgcccttggtccgtatttttaacagaagacagtgcaacaactggtctccaccagtatttgtcactttattttttttaatgacaaaaccaaaaacagacatggggtgggtagctgggggcccggacacttgggaccctgacccctttgtccctgcactcagccctgtggccccttcctgtcctgtctcaggccaggctaaatatgtgccttcctcagggctgtggggcaggcactagggggcctttcccttcctttcctttctcaggccttgctcccccaggatgacccactcttaggggggtggtggcatctggacaaatgccaccacagcaggtggggtggcaaagctacctggaatggatttgtgtgctgatttttaaggattattacagataattaaacagaacggtcagccttctgtggtcttaa

SEQ ID NO: 2163 - protein, 147 aa, Homosapiens
MLPLQEEFVYEDMEALCSVLRTLATDSNKYRAKADRRRQRSTFRAVLHSVEGGECEEEIVRFGFEVLYMDSWARHRIYAAFKEVLGSGMHHHLQNNELLRDIFGLGPVLLLDATALKACKVPRFEKVCTLGHLSLPPIPISWRPGIL

SEQ ID NO: 2164 - DNA, 2286 bp, Homosapiens
atgggccccaaaaaatcttggcgaagtcacttttttccactgcctgaggtttggctgttgctcctgttatcccaagctctaagcccttcccatggtccccagacccaggcaggggtaggtctcgtctggagtgtcccgctgccaagtgccctgagaagccagtcctgccttggtgctccactgagggacgcttcggagttaaccaccgtgcacttgttcccgacgcggggctggggcgcgcgcagggcattgtgggtgcatagttcagccagcgcgtcgtcggctgctagccgccgtcgcctgcgcgctcaggcctctgggattagtagttttagcctcgtggatggcggggcgcctcgcgaagatggtggcgcgcgtggcgtgtggctcccgtcgtctggccaagtctcagcgcagcgcaccggccggcgtctcgttggcctggagcccacacccaccgggtccctgaccccgcgccccccgcgcccggttcccggcatgcctcgcgcccgtaagggcaacacgctccggaagggtggtcagcgccgtggaggaggtgcccggagcagtgcccaagctgactcgggttccagtgacgatgaggcagccagtgaggcccgcagcaccgccagtgaatgccccagccttctcagcaccactgcagaggacagccttgggggggatgtcgtggatgagcagggccagcaggaagaccttgaggaaaagctgaaggagtatgtggactgtctcacagacaagagtgccaagacccggcagggtgctcttgagagcctgcgcctggccctagcgtcccgcctactccccgacttcttgctggagcgccgcctcacgctagccgatgccctggaaaagtgcctcaagaaagggaagggcgaggaacaagccctggctgctgctgtgctaggcctgctctgcgtgcagctgggccctggacctaagggtgaggagctgtttcacagcctgcagcctctgctggtctctgtgctcagtgacagcacagctagccctgctgcccggctccactgtgcttctgcccttggcctgggctgctacgtggctgccgctgacatccaggacctggtctcttgccttgcctgcttagaaagtgttttcagccggttctatggcttggggggcagctccacaagtcctgtggttcctgccagcctgcacggcctgctctctgctgccctgcaggcctgggcattgctgctcaccatctgccctagcacccaaatcagccacatccttgacaggcagctgccccggctgccccagctcttgtccagtgaaagtgtgaacctgcggatcgctgccggtgaaaccattgcactgctctttgagcttgcccgggaccttgaggaggagtttgtttacgaggacatggaggccctctgcagtgtcctgcgcactctggccactgacagtaacaagtaccgtgccaaggctgatcgtcggcgccagcgctctactttccgcgccgtgctgcactccgtggagggcggtgaatgcgaagaagagatagtgcgcttcggctttgaggtgctctacatggacagctgggctcggcaccggatctacgctgccttcaaggaagtgctgggttcgggcatgcaccaccacctccagaacaatgagctactccgtgacatctttggcctgggccctgtgctgttgctggatgccactgccctgaaggcctgcaaggttccacgctttgagaagcacctgtacaatgctgctgccttcaaagcccggaccaaggctcgaagccgtgtgcgggacaagcgggcagacatcctgtgaagcaggacctgctgaagaggagactttctatgcccttggtccgtatttttaacagaagacagtgcaacaactggtctccaccagtatttgtcactttattttttttaatgacaaaaccaaaaacagacatggggtgggtagctgggggcccggacacttgggaccctgacccctttgtccctgcactcagccctgtggccccttcctgtcctgtctcaggccaggctaaatatgtgccttcctcagggctgtggggcaggcactagggggcctttcccttcctttcctttctcaggccttgctcccccaggatgacccactcttaggggggtggtggcatctggacaaatgccaccacagcaggtggggtggcaaagctacctggaatggatttgtgtgctgatttttaaggattattacagataattaaacagaacggtcagccttctgtggtcttaa

SEQ ID NO: 2165 - protein, 608 aa, Homosapiens
MGPKKSWRSHFFPLPEVWLLLLLSQALSPSHGPQTQAGVGLVWSVPLPSALRSQSCLGAPLRDASELTTVHLFPTRGWGARRALWVHSSASASSAASRRRLRAQASGISSFSLVDGGAPREDGGARGVWLPSSGQVSAQRTGRRLVGLEPTPTGSLTPRPPRPVPGMPRARKGNTLRKGGQRRGGGARSSAQADSGSSDDEAASEARSTASECPSLLSTTAEDSLGGDVVDEQGQQEDLEEKLKEYVDCLTDKSAKTRQGALESLRLALASRLLPDFLLERRLTLADALEKCLKKGKGEEQALAAAVLGLLCVQLGPGPKGEELFHSLQPLLVSVLSDSTASPAARLHCASALGLGCYVAAADIQDLVSCLACLESVFSRFYGLGGSSTSPVVPASLHGLLSAALQAWALLLTICPSTQISHILDRQLPRLPQLLSSESVNLRIAAGETIALLFELARDLEEEFVYEDMEALCSVLRTLATDSNKYRAKADRRRQRSTFRAVLHSVEGGECEEEIVRFGFEVLYMDSWARHRIYAAFKEVLGSGMHHHLQNNELLRDIFGLGPVLLLDATALKACKVPRFEKHLYNAAAFKARTKARSRVRDKRADIL

SEQ ID NO: 2166 - DNA, 627 bp, Homosapiens
ggtgacaccacctgcccatcacaggctggatgcagggggtgccacacaaaacagaacagctttaggtcattatgcagaggaggtggccccaaaacagatttatctcctagatgtcatgatgggtgccctcagcagtggtgtcctggcctgacagaggccaaggaggggtcaaaggggccaggcagagaagagagggtctctcagtgaaaggaggggtttgggcagtgccctgttcagagccagcagagctcaagcatctaccacacaccctccaatgctcccattgcaggaggagtttgtttacgaggacatggaggccctctgcagtgtcctgcgcactctggccactgacagtaacaagtaccgtgccaaggctgatcgtcggcgccagcgctctactttccgcgccgtgctgcactccgtggagggcggtgaatgcgaagaagagatagtgcgcttcggctttgaggtgctctacatggacagctgggctcggcaccggatctacgctgccttcaaggaagtgctgggttcgggcatgcaccaccacctccaggtgcggggacggacagggaggggacatctggtgtggttgcttcagtctggcctgagctcactgccctctgc

SEQ ID NO: 2167 - protein, 116 aa, Homosapiens
MLPLQEEFVYEDMEALCSVLRTLATDSNKYRAKADRRRQRSTFRAVLHSVEGGECEEEIVRFGFEVLYMDSWARHRIYAAFKEVLGSGMHHHLQVRGRTGRGHLVWLLQSGLSSLP

SEQ ID NO: 2168 - DNA, 695 bp, Homosapiens
aagccctggctgctgctgtgctaggcctgctctgcgtgcagctgggccctggacctaagggtgaggagctgtttcacagcctgcagcctctgctggtctctgtgctcagtgacagcacagctagccctgctgcccggctccacgtgagtgtgcctgtgccccatgaaacccttcctgcaccttatccctcagcagagtggtgggttccccctatcttcagcctcctttactctgaggggagtgagctccagggctgggaacccaggttcacccgctgaccgtggcattgcattgcccttctcccaacagtgtgcttctgcccttggcctgggctgctacgtggctgccgctgacatccaggacctggtctcttgccttgcctgcttagaaagtgttttcagccggttctatggcttggggggcagctccacaagtcctgtggttcctgccagcctgcacggcctgctctctgctgccctgcaggcctgggcattgctgctcaccatctgccctagcacccaaatcagccacatccttgacaggcagctgccccggctgccccagctcttgtccagtgaaagtgtgaacctgcggatcgctgccggtgaaaccattgcactgctctttgagcttgcccgggaccttgaggtgcgagggacaaggatggggggtgcttggtgacaccacctgcccat

SEQ ID NO: 2169 - protein, 172 aa, Homosapiens
MKPFLHLIPQQSGGFPLSSASFTLRGVSSRAGNPGSPADRGIALPFSQQCASALGLGCYVAAADIQDLVSCLACLESVFSRFYGLGGSSTSPVVPASLHGLLSAALQAWALLLTICPSTQISHILDRQLPRLPQLLSSESVNLRIAAGETIALLFELARDLEVRGTRMGGAW

SEQ ID NO: 2170 - DNA, 1010 bp, Homosapiens
ctcgccttcccggcgacctgtttggcagggcggggcgcctcgcgaagatggtggcgcgcgtggcgtgtggctcccgtcgtctggccaagtctcagcgcagcgcaccggccggcgtctcgttggcctggagcccacacccaccgggtccctgaccccgcgccccccgcgcccggttcccggcatgcctcgcgcccgtaagggcaacacgctccggaagggtggtcagcgccgtggaggaggtgcccggagcagtgcccaagctgactcgggttccagtgacgatgaggcagccagtgaggcccgcagcaccgccagtgaatgccccagccttctcagcaccactgcagaggacagccttgggggggatgtcgtggatgagcagggccagcaggaagaccttgaggaaaagctgaaggagtatgtggactgtctcacagacaagagtgccaagacccggcagggtgctcttgagagcctgcgcctggccctagcgtcccgcctactccccgacttcttgctggagcgccgcctcacgctagccgatgccctggaaaagtgcctcaagaaagggaagggcgaggaacaagccctggctgctgctgtgctaggcctgctctgcgtgcagctgggccctggacctaagggtgaggagctgtttcacagcctgcagcctctgctggtctctgtgctcagtgacagcacagctagccctgctgcccggctccactgtgcttctgcccttggcctgggctgctacgtggctgccgctgacatccaggtgaggggtctttgggcacaggtggtagagcatctagggctgtaactctgcctctgagctcccctgcctctctgtgctcctaggacctggtctcttgccttgcctgcttagaaagtgttttcagccggttctatggcttggggggcagctccacaagtcctgtggttcctgccagcctgcacggcctgctctctgctgccctgcaggcctgggcattgctgctcaccatctg

SEQ ID NO: 2171 - protein, 213 aa, Homosapiens
MPRARKGNTLRKGGQRRGGGARSSAQADSGSSDDEAASEARSTASECPSLLSTTAEDSLGGDVVDEQGQQEDLEEKLKEYVDCLTDKSAKTRQGALESLRLALASRLLPDFLLERRLTLADALEKCLKKGKGEEQALAAAVLGLLCVQLGPGPKGEELFHSLQPLLVSVLSDSTASPAARLHCASALGLGCYVAAADIQVRGLWAQVVEHLGL

SEQ ID NO: 2172 - DNA, 1034 bp, Homosapiens
ctcgcgaagatggtggcgcgcgtggcgtgtggctcccgtcgtctggccaagtctcagcgcagcgcaccggccggcgtctcgttggcctggagcccacacccaccgggtccctgaccccgcgccccccgcgcccggttcccggcatgcctcgcgcccgtaagggcaacacgctccggaagggtggtcagcgccgtggaggaggtgcccggagcagtgcccaagctgactcgggttccagtgacgatgaggcagccagtgaggcccgcagcaccgccagtgaatgccccagccttctcagcaccactgcagaggacagccttggtgagagcgggtggaagtttgacaggggcttggtgagggctccatgggctgaggacaagaagcggtgctgaccaggtggccttgcagggggggatgtcgtggatgagcagggccagcaggaagaccttgaggaaaagctgaaggagtatgtggactgtctcacagacaagaggtacccctggctgccagccaactcctacacccagctccaagtgtgatcaagggagggctggcccatatgaccccccttctcgacctcccccagtgccaagacccggcagggtgctcttgagagcctgcgcctggccctagcgtcccgcctactccccgacttcttgctggagcgccgcctcacgctagccgatgccctggaaaagtgcctcaagaaaggttggacctgggggtgtgtgggagacttaaactgggcagacactggcccttgctgcatgggctgactggaaagcatcccacagggaagggcgaggaacaagccctggctgctgctgtgctaggcctgctctgcgtgcagctgggccctggacctaagggtgaggagctgtttcacagcctgcagcctctgctggtctctgtgctcagtgacagcacagctagccctgctgcccggctccacgtgagtgtgcctgtgccccatgaaacccttcctgcaccttatccctcagcagagtggtgggttccccctatcttcagcctcc

SEQ ID NO: 2173 - protein, 82 aa, Homosapiens
MPRARKGNTLRKGGQRRGGGARSSAQADSGSSDDEAASEARSTASECPSLLSTTAEDSLGESGWKFDRGLVRAPWAEDKKRC

SEQ ID NO: 2174 - DNA, 1532 bp, Homosapiens
ggtgtgcacctgccactcaatgctctgggcatcatagccaaccgtggccagcattttcacggtcagaacatgaccattttctacaagaaccaactcggcctctatccctactttggacccaggggcacagctcacaatgggggcatcccccaggctttgccccttgaccgccacctggcactggctgcctaccagatccaccacagcctgagacctggctttgctggcccagcagtgctggattgggaggagtggtgtccactctgggctgggaactggggccgccgccgagcttatcaggcagcctcttgggcttgggcacagcaggtattccctgacctggaccctcaggagcagctctacaaggcctatactggctttgagcaggcggcccgtgcactgatggaggatacgctgcgggtggcccaggcactacggccccatggactctggggcttctatcactacccagcctgtggcaatggctggcatagtatggcttccaactataccggccgctgccatgcagccacccttgcccgcaacactcaactgcattggctctgggccgcctccagtgccctcttccccagcatctacctcccacccaggctgccacctgcccaccaccaggcctttgtccgacatcgcctggaggaggccttccgtgtggcccttgttgggcaccgacatcccctgcctgtcctggcctatgtccgcctcacacaccggagatctgggaggttcctgtcccaggatgaccttgtgcagtccattggtgtgagtgcagcactaggggcagccggcgtggtgctctggggggacctgagcctctccagctctgaggaggagtgctggcatctccatgactacctggtggacaccttgggcccctatgtgatcaatgtgaccagggcagcgatggcctgcagtcaccagcggtgccatggccacgggcgctgtgcccggcgagatccaggacagatggaagcctttctacacctgtggccagacggcagccttggagattggaagtccttcagctgccactgttactggggctgggctggccccacctgccaggagcccaggcctgggcctaaagaagcagtataaagccagggcccctgccactgcctcttcttttccctgctgccacttttccagtcctggaactactctgtcccactcttgctctattcagtttacagtcaaccctcccaagcacacaccccgcttcccttggaatccctgaggggtagaaggggccagaaaaaacgcttataaaaccagaggccctctgagatcatgtgagtcctccatggcaaggaagcagttccagggagagtcaggttccagctagttagggctgccagcctagggctttgtgcctacacctcactaagcccatggagaggtcacagatgggccgtgcacgggcagatgggccccaaaaaatcttggcgaaggtcggtaaagtgctaagctgttgtctgcactctttcatcataaagtcacttttttccactgcc

SEQ ID NO: 2175 - protein, 348 aa, Homosapiens
MTIFYKNQLGLYPYFGPRGTAHNGGIPQALPLDRHLALAAYQIHHSLRPGFAGPAVLDWEEWCPLWAGNWGRRRAYQAASWAWAQQVFPDLDPQEQLYKAYTGFEQAARALMEDTLRVAQALRPHGLWGFYHYPACGNGWHSMASNYTGRCHAATLARNTQLHWLWAASSALFPSIYLPPRLPPAHHQAFVRHRLEEAFRVALVGHRHPLPVLAYVRLTHRRSGRFLSQDDLVQSIGVSAALGAAGVVLWGDLSLSSSEEECWHLHDYLVDTLGPYVINVTRAAMACSHQRCHGHGRCARRDPGQMEAFLHLWPDGSLGDWKSFSCHCYWGWAGPTCQEPRPGPKEAV

SEQ ID NO: 2176 - DNA, 1943 bp, Homosapiens
agccagggtagagactgagtcggcgcctggcgggtgttgtgacgcgcaaaccaggggcgggttctaagcggcgacgcgcgggtgctgggaggccttagaacgccgtggcgtgccgcaggacgcgacggctgcagaacatccgccgcaccgctgggggccaacgttgtcggaccgaggagtccgaggtggcgactgagtgagatacccagctgtgcggagctaggacgcggaacatcccagaggccagcatcaacatgtttccatccttggggaatgaccacgcaactgggcccagccctggtgctgggggtggccctgtgcctgggttgtggccagcccctaccacaggtccctgaacgccccttctctgtgctgtggaatgtaccctcagcacactgtgaggcccgctttggtgtgcacctgccactcaatgctctgggcatcatagccaaccgtggccagcattttcacggtcagaacatgaccattttctacaagaaccaactcggcctctatccctactttggacccaggggcacagctcacaatgggggcatcccccaggctttgccccttgaccgccacctggcactggctgcctaccagatccaccacagcctgagacctggctttgctggcccagcagtgctggattgggaggagtggtgtccactctgggctgggaactggggccgccgccgagcttatcaggcagcctcttgggcttgggcacagcaggtattccctgacctggaccctcaggagcagctctacaaggcctatactggctttgagcaggcggcccgtgcactgatggaggatacgctgcgggtggcccaggcactacggccccatggactctggggcttctatcactacccagcctgtggcaatggctggcatagtatggcttccaactataccggccgctgccatgcagccacccttgcccgcaacactcaactgcattggctctgggccgcctccagtgccctcttccccagcatctacctcccacccaggctgccacctgcccaccaccaggcctttgtccgacatcgcctggaggaggccttccgtgtggcccttgttgggcaccgacatcccctgcctgtcctggcctatgtccgcctcacacaccggagatctgggaggttcctgtcccaggatgaccttgtgcagtccattggtgtgagtgcagcactaggggcagccggcgtggtgctctggggggacctgagcctctccagctctgaggaggagtgctggcatctccatgactacctggtggacaccttgggcccctatgtgatcaatgtgaccagggcagcgatggcctgcagtcaccagcggtgccatggccacgggcgctgtgcccggcgagatccaggacagatggaagcctttctacacctgtggccagacggcagccttggagattggaagtccttcagctgccactgttactggggctgggctggccccacctgccaggagcccaggcctgggcctaaagaagcagtataaagccagggcccctgccactgcctcttcttttccctgctgccacttttccagtcctggaactactctgtcccactcttgctctattcagtttacagtcaaccctcccaagcacacaccccgcttcccttggaatccctgaggggtagaaggggccagaaaaaacgcttataaaaccagaggccctctgagatcatgtgagtcctccatggcaaggaagcagttccagggagagtcaggttccagctagttagggctgccagcctagggctttgtgcctacacctcactaagcccatggagaggtcacagatgggccgtgcacgggcagatgggccccaaaaaatcttggcgaaggtcggtaaagtgctaagctgttgtctgcactctttcatcataaagtcacttttttccactgcc

SEQ ID NO: 2177 - protein, 417 aa, Homosapiens; identical to SEQ ID NO: 197

SEQ ID NO: 2178 - DNA, 2118 bp, Homosapiens
tgcggagctaggacgcggaacatcccagaggccagcatcaacatgtcagtaccgcacccttcccatttgctgcctgtaggtccaccccgcgcgtgcggtccccaagtggccatgccaccctgcacgccctccccgcgtcagtcgttcgtttccagaccatgccgagccacacctgcccacagagtcgagctctcgaagtcctcattcccaaaagctccacagcctgtgacccactaggagggagggggaaaccgaggcccgggagagacggagaagccactctctgaggaccccggagccccgcccacagtgggtggggtcggcactgaaggggttaaggccgcggggaagccccgggctcagccctaggggcggatcctggggcttcctccctctagaccaaagggtgcggctgctgcagaggtggctgatgcagtggtggactaggaggactactggaagacagaaggccagcaagtagattgggtcggctgttttatagacctggtggttacagaccccctgtgaggggaggtcctgaggaggacaaatttgtagccagagcaggctggggccaggactcctaggttctgccccagccttaagcagctcatccatcactcccagcctccctccaatgtggggtagacacctggatctatctgccctgctctataggggatgggtctcttccaggtcacctgtgctatcaggtgagtgtgggacaaagtgcagcccaccactccccagttccagtatgcatggtcccccctgcactctgtcagcccttccctgctccaaccccaccctccctcctggcacagcccagcatggctgttatctacaggaggagagccactgtggtctgaagagatgctactgcctggagactggggtcttaacctccagcctggcactgagccacctgcaacctagcagcaggtgaccttggctcccagcctgactcagctgaacctggatcctgtgcataggcaagagctgactctgagccctggcccagccaagctgacccctacactagaccctacacaccggatggagctgatcctgagtaccagcccagctgagctgactctggatcctgcgtgccagccaaagctgcccctggattccacatgccaaccagagatgaccttcaatcctggtccaactgagcttaccctggatcctgaacaccagccagaggagaccccagctcctagcctggctgagttgaccctggagcctgtgcaccgccgacccgagctcctggatgcttgtgctgacctcatcaatgatcagtggccccgcagccgcacctcccgcctgcactccctgggccagtcctcagatgccttccccctctgcctgatgctgctaagcccccaccccacacttgaagcagcacccgttgtggtgggccatgcccgcctgtcacgggtgctgaaccagccccagagcctcttagtggagacagtggtggtggcccgggccctgaggggccgtggctttggccgccgcctcatggagggcctggaggtctttgctcgggcccggggcttccgcaagctgcatctcaccacccatgaccaggtgcacttctatacccacctgggctaccagctgggtgagcctgtgcagggcctggtcttcaccagcagacggctgcctgccaccctgcttaatgccttccccacagccccctctccccggccacccaggaaggccccaaacctgactgcccaagctgccccaaggggtcccaagggacctccattgccaccaccccctcccctacctgagtgcctgaccatctcacccccagttccatcagggcccccttcaaaaagcctgctggagacacaatatcaaaatgtgagggggcgccccatattctggatggaaaaagacatctgaggccatccagggcaaggaactgtctttctggttcaatagactgccccgacagtctacaagcctcagcccactgaccatacctcagcccctagcccctggggggcagctttaacctgggcatgtttcctgggtaccagtggggccaggaggtggctctggctcagagccgtcagtgtggctgaataaaggctctcttgggta

SEQ ID NO: 2179 - protein, 286 aa, Homosapiens
MELILSTSPAELTLDPACQPKLPLDSTCQPEMTFNPGPTELTLDPEHQPEETPAPSLAELTLEPVHRRPELLDACADLINDQWPRSRTSRLHSLGQSSDAFPLCLMLLSPHPTLEAAPVVVGHARLSRVLNQPQSLLVETVVVARALRGRGFGRRLMEGLEVFARARGFRKLHLTTHDQVHFYTHLGYQLGEPVQGLVFTSRRLPATLLNAFPTAPSPRPPRKAPNLTAQAAPRGPKGPPLPPPPPLPECLTISPPVPSGPPSKSLLETQYQNVRGRPIFWMEKDI

SEQ ID NO: 2180 - DNA, 1562 bp, Homosapiens
tgcggagctaggacgcggaacatcccagaggccagcatcaacatgtcagtaccgcacccttcccatttgctgcctgtaggtccaccccgcgcgtgcggtccccaagtggccatgccaccctgcacgccctccccgcgtcagtcgttcgtttccagaccatgccgagccacacctgcccacagagtcgagctctcgaagtcctcattcccaaaagctccacagcctgtgacccactaggagggagggggaaaccgaggcccgggagagacggagaagccactctctgaggaccccggagccccgcccacagtgggtggggtcggcactgaaggggttaaggccgcggggaagccccgggctcagccctaggggcggatcctggggcttcctccctctagaccaaagggtgcggctgctgcagaggtggctgatgcaggcaagagctgactctgagccctggcccagccaagctgacccctacactagaccctacacaccggatggagctgatcctgagtaccagcccagctgagctgactctggatcctgcgtgccagccaaagctgcccctggattccacatgccaaccagagatgaccttcaatcctggtccaactgagcttaccctggatcctgaacaccagccagaggagaccccagctcctagcctggctgagttgaccctggagcctgtgcaccgccgacccgagctcctggatgcttgtgctgacctcatcaatgatcagtggccccgcagccgcacctcccgcctgcactccctgggccagtcctcagatgccttccccctctgcctgatgctgctaagcccccaccccacacttgaagcagcacccgttgtggtgggccatgcccgcctgtcacgggtgctgaaccagccccagagcctcttagtggagacagtggtggtggcccgggccctgaggggccgtggctttggccgccgcctcatggagggcctggaggtctttgctcgggcccggggcttccgcaagctgcatctcaccacccatgaccaggtgcacttctatacccacctgggctaccagctgggtgagcctgtgcagggcctggtcttcaccagcagacggctgcctgccaccctgcttaatgccttccccacagccccctctccccggccacccaggaaggccccaaacctgactgcccaagctgccccaaggggtcccaagggacctccattgccaccaccccctcccctacctgagtgcctgaccatctcacccccagttccatcagggcccccttcaaaaagcctgctggagacacaatatcaaaatgtgagggggcgccccatattctggatggaaaaagacatctgaggccatccagggcaaggaactgtctttctggttcaatagactgccccgacagtctacaagcctcagcccactgaccatacctcagcccctagcccctggggggcagctttaacctgggcatgtttcctgggtaccagtggggccaggaggtggctctggctcagagccgtcagtgtggctgaataaaggctctcttgggta

SEQ ID NO: 2181 - protein, 33 aa, Homosapiens
MQARADSEPWPSQADPYTRPYTPDGADPEYQPS

SEQ ID NO: 2182 - DNA, 1707 bp, Homosapiens
tgcggagctaggacgcggaacatcccagaggccagcatcaacatgtcagtaccgcacccttcccatttgctgcctgtaggtccaccccgcgcgtgcggtccccaagtggccatgccaccctgcacgccctccccgcgtcagtcgttcgtttccagaccatgccgagccacacctgcccacagagtcgagctctcgaagtcctcattcccaaaagctccacagcctgtgacccactaggagggagggggaaaccgaggcccgggagagacggagaagccactctctgaggaccccggagccccgcccacagtgggtggggtcggcactgaaggggttaaggccgcggggaagccccgggctcagccctaggggcggatcctggggcttcctccctctagaccaaagggtgcggctgctgcagaggtggctgatgcaggaggagagccactgtggtctgaagagatgctactgcctggagactggggtcttaacctccagcctggcactgagccacctgcaacctagcagcaggtgaccttggctcccagcctgactcagctgaacctggatcctgtgcataggcaagagctgactctgagccctggcccagccaagctgacccctacactagaccctacacaccggatggagctgatcctgagtaccagcccagctgagctgactctggatcctgcgtgccagccaaagctgcccctggattccacatgccaaccagagatgaccttcaatcctggtccaactgagcttaccctggatcctgaacaccagccagaggagaccccagctcctagcctggctgagttgaccctggagcctgtgcaccgccgacccgagctcctggatgcttgtgctgacctcatcaatgatcagtggccccgcagccgcacctcccgcctgcactccctgggccagtcctcagatgccttccccctctgcctgatgctgctaagcccccaccccacacttgaagcagcacccgttgtggtgggccatgcccgcctgtcacgggtgctgaaccagccccagagcctcttagtggagacagtggtggtggcccgggccctgaggggccgtggctttggccgccgcctcatggagggcctggaggtctttgctcgggcccggggcttccgcaagctgcatctcaccacccatgaccaggtgcacttctatacccacctgggctaccagctgggtgagcctgtgcagggcctggtcttcaccagcagacggctgcctgccaccctgcttaatgccttccccacagccccctctccccggccacccaggaaggccccaaacctgactgcccaagctgccccaaggggtcccaagggacctccattgccaccaccccctcccctacctgagtgcctgaccatctcacccccagttccatcagggcccccttcaaaaagcctgctggagacacaatatcaaaatgtgagggggcgccccatattctggatggaaaaagacatctgaggccatccagggcaaggaactgtctttctggttcaatagactgccccgacagtctacaagcctcagcccactgaccatacctcagcccctagcccctggggggcagctttaacctgggcatgtttcctgggtaccagtggggccaggaggtggctctggctcagagccgtcagtgtggctgaataaaggctctcttgggta

SEQ ID NO: 2183 - protein, 34 aa, Homosapiens
MQEESHCGLKRCYCLETGVLTSSLALSHLQPSSR

SEQ ID NO: 2184 - DNA, 1290 bp, Homosapiens
ccttagaacgccgtggcgtgccgcaggacgcgacggctgcagaacatccgccgcaccgctgggggccaacgttgtcggaccgaggagtccgaggtggcgactgagtgagatacccagctgtgcggagctaggacgcggaacatcccagaggccagcatcaacatgcaagagctgactctgagccctggcccagccaagctgacccctacactagaccctacacaccggatggagctgatcctgagtaccagcccagctgagctgactctggatcctgcgtgccagccaaagctgcccctggattccacatgccaaccagagatgaccttcaatcctggtccaactgagcttaccctggatcctgaacaccagccagaggagaccccagctcctagcctggctgagttgaccctggagcctgtgcaccgccgacccgagctcctggatgcttgtgctgacctcatcaatgatcagtggccccgcagccgcacctcccgcctgcactccctgggccagtcctcagatgccttccccctctgcctgatgctgctaagcccccaccccacacttgaagcagcacccgttgtggtgggccatgcccgcctgtcacgggtgctgaaccagccccagagcctcttagtggagacagtggtggtggcccgggccctgaggggccgtggctttggccgccgcctcatggagggcctggaggtctttgctcgggcccggggcttccgcaagctgcatctcaccacccatgaccaggtgcacttctatacccacctgggctaccagctgggtgagcctgtgcagggcctggtcttcaccagcagacggctgcctgccaccctgcttaatgccttccccacagccccctctccccggccacccaggaaggccccaaacctgactgcccaagctgccccaaggggtcccaagggacctccattgccaccaccccctcccctacctgagtgcctgaccatctcacccccagttccatcagggcccccttcaaaaagcctgctggagacacaatatcaaaatgtgagggggcgccccatattctggatggaaaaagacatctgaggccatccagggcaaggaactgtctttctggttcaatagactgccccgacagtctacaagcctcagcccactgaccatacctcagcccctagcccctggggggcagctttaacctgggcatgtttcctgggtaccagtggggccaggaggtggctctggctcagagccgtcagtgtggctgaataaaggctctcttgggta

SEQ ID NO: 2185 - protein, 308 aa, Homosapiens; identical to SEQ ID NO: 199

SEQ ID NO: 2186 - DNA, 1864 bp, Homosapiens
cgcgcgggtgctgggaggccttagaacgccgtggcgtgccgcaggacgcgacggctgcagaacatccgccgcaccgctgggggccaacgttgtcggaccgaggagtccgaggtggcgactgagtgagatacccagctgtgcggagctaggacgcggaacatcccagaggccagcatcaacattggtggactaggaggactactggaagacagaaggccagcaagtagattgggtcggctgttttatagacctggtggttacagaccccctgtgaggggaggtcctgaggaggacaaatttgtagccagagcaggctggggccaggactcctaggttctgccccagccttaagcagctcatccatcactcccagcctccctccaatgtggggtagacacctggatctatctgccctgctctataggggatgggtctcttccaggtcacctgtgctatcaggtgagtgtgggacaaagtgcagcccaccactccccagttccagtatgcatggtcccccctgcactctgtcagcccttccctgctccaaccccaccctccctcctggcacagcccagcatggctgttatctacaggaggagagccactgtggtctgaagagatgctactgcctggagactggggtcttaacctccagcctggcactgagccacctgcaacctagcagcaggtgaccttggctcccagcctgactcagctgaacctggatcctgtgcataggcaagagctgactctgagccctggcccagccaagctgacccctacactagaccctacacaccggatggagctgatcctgagtaccagcccagctgagctgactctggatcctgcgtgccagccaaagctgcccctggattccacatgccaaccagagatgaccttcaatcctggtccaactgagcttaccctggatcctgaacaccagccagaggagaccccagctcctagcctggctgagttgaccctggagcctgtgcaccgccgacccgagctcctggatgcttgtgctgacctcatcaatgatcagtggccccgcagccgcacctcccgcctgcactccctgggccagtcctcagatgccttccccctctgcctgatgctgctaagcccccaccccacacttgaagcagcacccgttgtggtgggccatgcccgcctgtcacgggtgctgaaccagccccagagcctcttagtggagacagtggtggtggcccgggccctgaggggccgtggctttggccgccgcctcatggagggcctggaggtctttgctcgggcccggggcttccgcaagctgcatctcaccacccatgaccaggtgcacttctatacccacctgggctaccagctgggtgagcctgtgcagggcctggtcttcaccagcagacggctgcctgccaccctgcttaatgccttccccacagccccctctccccggccacccaggaaggccccaaacctgactgcccaagctgccccaaggggtcccaagggacctccattgccaccaccccctcccctacctgagtgcctgaccatctcacccccagttccatcagggcccccttcaaaaagcctgctggagacacaatatcaaaatgtgagggggcgccccatattctggatggaaaaagacatctgaggccatccagggcaaggaactgtctttctggttcaatagactgccccgacagtctacaagcctcagcccactgaccatacctcagcccctagcccctggggggcagctttaacctgggcatgtttcctgggtaccagtggggccaggaggtggctctggctcagagccgtcagtgtggctgaataaaggctctcttgggta

SEQ ID NO: 2187 - protein, 286 aa, Homosapiens; identical to SEQ ID NO: 2179

SEQ ID NO: 2188 - DNA, 1467 bp, Homosapiens
gttctaagcggcgacgcgcgggtgctgggaggccttagaacgccgtggcgtgccgcaggacgcgacggctgcagaacatccgccgcaccgctgggggccaacgttgtcggaccgaggagtccgaggtggcgactgagtgagatacccagctgtgcggagctaggacgcggaacatcccagaggccagcatcaacatgaggagagccactgtggtctgaagagatgctactgcctggagactggggtcttaacctccagcctggcactgagccacctgcaacctagcagcaggtgaccttggctcccagcctgactcagctgaacctggatcctgtgcataggcaagagctgactctgagccctggcccagccaagctgacccctacactagaccctacacaccggatggagctgatcctgagtaccagcccagctgagctgactctggatcctgcgtgccagccaaagctgcccctggattccacatgccaaccagagatgaccttcaatcctggtccaactgagcttaccctggatcctgaacaccagccagaggagaccccagctcctagcctggctgagttgaccctggagcctgtgcaccgccgacccgagctcctggatgcttgtgctgacctcatcaatgatcagtggccccgcagccgcacctcccgcctgcactccctgggccagtcctcagatgccttccccctctgcctgatgctgctaagcccccaccccacacttgaagcagcacccgttgtggtgggccatgcccgcctgtcacgggtgctgaaccagccccagagcctcttagtggagacagtggtggtggcccgggccctgaggggccgtggctttggccgccgcctcatggagggcctggaggtctttgctcgggcccggggcttccgcaagctgcatctcaccacccatgaccaggtgcacttctatacccacctgggctaccagctgggtgagcctgtgcagggcctggtcttcaccagcagacggctgcctgccaccctgcttaatgccttccccacagccccctctccccggccacccaggaaggccccaaacctgactgcccaagctgccccaaggggtcccaagggacctccattgccaccaccccctcccctacctgagtgcctgaccatctcacccccagttccatcagggcccccttcaaaaagcctgctggagacacaatatcaaaatgtgagggggcgccccatattctggatggaaaaagacatctgaggccatccagggcaaggaactgtctttctggttcaatagactgccccgacagtctacaagcctcagcccactgaccatacctcagcccctagcccctggggggcagctttaacctgggcatgtttcctgggtaccagtggggccaggaggtggctctggctcagagccgtcagtgtggctgaataaaggctctcttgggta

SEQ ID NO: 2189 - protein, 286 aa, Homosapiens; identical to SEQ ID NO: 2179

SEQ ID NO: 2190 - DNA, 1136 bp, Homosapiens
cagagccgtgccctctatcccagcatctacatgcccgcagtgctggagggcacagggaagtcacagatgtatgtgcaacaccgtgtggccgaggcattccgtgtggctgtggctgctggtgaccccaatctgccggtgctgccctatgtccagatcttctatgacacgacaaaccactttctgcccctggatgagctggagcacagcctgggggagagtgcggcccagggggcagctggagtggtgctctgggtgagactacactggggcccttcatcctgaacgtgaccagtggggcccttctctgcagtcaagccctgtgctccggccatggccgctgtgtccgccgcaccagccaccccaaagccctcctcctccttaaccctgccagtttctccatccagctcacgcctggtggtgggcccctgagcctgcggggtgccctctcacttgaagatcaggcacagatggctgtggagttcaaatgtcgatgctaccctggctggcaggcaccgtggtgtgagcggaagagcatgtggtgattggccacacactgagttgcacatattgagaacctaatgcactctgggtctggccagggcttcctcaaatacatgcacagtcatacaagtcatggtcacagtaaagagtacactcagccactgtcacaggcatattccctgcacacacatgcatacttacagactggaatagtggcataaggagttagaaccacagcagacaccattcattccatgtccatatgcatctacttggcaaggtcatagacaattcctccagagacactgagccagtctttgaactgcagcaatcacaaaggctgacattcactgagtgcctactctttgccaatccccgtgctaagcgttttatgtggacttattcattcctcacaatgaggctatgaggaaactgagtcactcacattgagagtaagcacgttgcccaaggttgcacagcaagaaaagggagaagttgagattcaaacccaggctgtctagctccgggggtacagcccttgcactcctactgagtttgtggtaaccagccctgcacgacccctgaatctgctgagaggcaccagtccagcaaataaagcagtcatgatttactta

SEQ ID NO: 2191 - protein, 83 aa, Homosapiens
MPAVLEGTGKSQMYVQHRVAEAFRVAVAAGDPNLPVLPYVQIFYDTTNHFLPLDELEHSLGESAAQGAAGVVLWVRLHWGPSS

SEQ ID NO: 2192 - DNA, 1591 bp, Homosapiens
ctatagctcccagctgggcacctacccctactacacgcccactggggagcctgtgtttggtggtctgccccagaatgccagcctgattgcccacctggcccgcacattccaggacatcctggctgccatacctgctcctgacttctcagggctggcagtcatcgactgggaggcatggcgcccacgctgggccttcaactgggacaccaaggacatttaccggcagcgctcacgggcactggtacaggcacagcaccctgattggccagctcctcaggtggaggcagtagcccaggaccagttccagggagctgcacgggcctggatggcaggcaccctccagctggggcgggcactgcgtcctcgcggcctctggggcttctatggcttccctgactgctacaactatgactttctaagccccaactacaccggccagtgcccatcaggcatccgtgcccaaaatgaccagctagggtggctgtggggccagagccgtgccctctatcccagcatctacatgcccgcagtgctggagggcacagggaagtcacagatgtatgtgcaacaccgtgtggccgaggcattccgtgtggctgtggctgctggtgaccccaatctgccggtgctgccctatgtccagatcttctatgacacgacaaaccactttctgcccctggaatcatgtcaggccatcaaggagtatatggacactacactggggcccttcatcctgaacgtgaccagtggggcccttctctgcagtcaagccctgtgctccggccatggccgctgtgtccgccgcaccagccaccccaaagccctcctcctccttaaccctgccagtttctccatccagctcacgcctggtggtgggcccctgagcctgcggggtgccctctcacttgaagatcaggcacagatggctgtggagttcaaatgtcgatgctaccctggctggcaggcaccgtggtgtgagcggaagagcatgtggtgattggccacacactgagttgcacatattgagaacctaatgcactctgggtctggccagggcttcctcaaatacatgcacagtcatacaagtcatggtcacagtaaagagtacactcagccactgtcacaggcatattccctgcacacacatgcatacttacagactggaatagtggcataaggagttagaaccacagcagacaccattcattccatgtccatatgcatctacttggcaaggtcatagacaattcctccagagacactgagccagtctttgaactgcagcaatcacaaaggctgacattcactgagtgcctactctttgccaatccccgtgctaagcgttttatgtggacttattcattcctcacaatgaggctatgaggaaactgagtcactcacattgagagtaagcacgttgcccaaggttgcacagcaagaaaagggagaagttgagattcaaacccaggctgtctagctccgggggtacagcccttgcactcctactgagtttgtggtaaccagccctgcacgacccctgaatctgctgagaggcaccagtccagcaaataaagcagtcatgatttactta

SEQ ID NO: 2193 - protein, 223 aa, Homosapiens
MAGTLQLGRALRPRGLWGFYGFPDCYNYDFLSPNYTGQCPSGIRAQNDQLGWLWGQSRALYPSIYMPAVLEGTGKSQMYVQHRVAEAFRVAVAAGDPNLPVLPYVQIFYDTTNHFLPLESCQAIKEYMDTTLGPFILNVTSGALLCSQALCSGHGRCVRRTSHPKALLLLNPASFSIQLTPGGGPLSLRGALSLEDQAQMAVEFKCRCYPGWQAPWCERKSMW

SEQ ID NO: 2194 - DNA, 1677 bp, Homosapiens
cttcctccaggagtctctggtgcagctggggtggaatctggccaggccctgcttaggcccccatcctggggtcaggaaatttggaggataaggcccttcagccccaaggacatcctggctgccatacctgctcctgacttctcagggctggcagtcatcgactgggaggcatggcgcccacgctgggccttcaactgggacaccaaggacatttaccggcagcgctcacgggcactggtacaggcacagcaccctgattggccagctcctcaggtggaggcagtagcccaggaccagttccagggagctgcacgggcctggatggcaggcaccctccagctggggcgggcactgcgtcctcgcggcctctggggcttctatggcttccctgactgctacaactatgactttctaagccccaactacaccggccagtgcccatcaggcatccgtgcccaaaatgaccagctagggtggctgtggggccagagccgtgccctctatcccagcatctacatgcccgcagtgctggagggcacagggaagtcacagatgtatgtgcaacaccgtgtggccgaggcattccgtgtggctgtggctgctggtgaccccaatctgccggtgctgccctatgtccagatcttctatgacacgacaaaccactttctgcccctggatgagctggagcacagcctgggggagagtgcggcccagggggcagctggagtggtgctctgggtgagctgggaaaatacaagaaccaaggaatcatgtcaggccatcaaggagtatatggacactacactggggcccttcatcctgaacgtgaccagtggggcccttctctgcagtcaagccctgtgctccggccatggccgctgtgtccgccgcaccagccaccccaaagccctcctcctccttaaccctgccagtttctccatccagctcacgcctggtggtgggcccctgagcctgcggggtgccctctcacttgaagatcaggcacagatggctgtggagttcaaatgtcgatgctaccctggctggcaggcaccgtggtgtgagcggaagagcatgtggtgattggccacacactgagttgcacatattgagaacctaatgcactctgggtctggccagggcttcctcaaatacatgcacagtcatacaagtcatggtcacagtaaagagtacactcagccactgtcacaggcatattccctgcacacacatgcatacttacagactggaatagtggcataaggagttagaaccacagcagacaccattcattccatgtccatatgcatctacttggcaaggtcatagacaattcctccagagacactgagccagtctttgaactgcagcaatcacaaaggctgacattcactgagtgcctactctttgccaatccccgtgctaagcgttttatgtggacttattcattcctcacaatgaggctatgaggaaactgagtcactcacattgagagtaagcacgttgcccaaggttgcacagcaagaaaagggagaagttgagattcaaacccaggctgtctagctccgggggtacagcccttgcactcctactgagtttgtggtaaccagccctgcacgacccctgaatctgctgagaggcaccagtccagcaaataaagcagtcatgatttactta

SEQ ID NO: 2195 - protein, 253 aa, Homosapiens; identical to SEQ ID NO: 209

SEQ ID NO: 2196 - DNA, 1110 bp, Homosapiens
cttcctccaggagtctctggtgcagctggggtggaatctggccaggccctgcttaggcccccatcctggggtcaggaaatttggaggataaggcccttcagccccaaggatgagctggagcacagcctgggggagagtgcggcccagggggcagctggagtggtgctctgggtgagctgggaaaatacaagaaccaaggaatcatgtcaggccatcaaggagtatatggacactacactggggcccttcatcctgaacgtgaccagtggggcccttctctgcagtcaagccctgtgctccggccatggccgctgtgtccgccgcaccagccaccccaaagccctcctcctccttaaccctgccagtttctccatccagctcacgcctggtggtgggcccctgagcctgcggggtgccctctcacttgaagatcaggcacagatggctgtggagttcaaatgtcgatgctaccctggctggcaggcaccgtggtgtgagcggaagagcatgtggtgattggccacacactgagttgcacatattgagaacctaatgcactctgggtctggccagggcttcctcaaatacatgcacagtcatacaagtcatggtcacagtaaagagtacactcagccactgtcacaggcatattccctgcacacacatgcatacttacagactggaatagtggcataaggagttagaaccacagcagacaccattcattccatgtccatatgcatctacttggcaaggtcatagacaattcctccagagacactgagccagtctttgaactgcagcaatcacaaaggctgacattcactgagtgcctactctttgccaatccccgtgctaagcgttttatgtggacttattcattcctcacaatgaggctatgaggaaactgagtcactcacattgagagtaagcacgttgcccaaggttgcacagcaagaaaagggagaagttgagattcaaacccaggctgtctagctccgggggtacagcccttgcactcctactgagtttgtggtaaccagccctgcacgacccctgaatctgctgagaggcaccagtccagcaaataaagcagtcatgatttactta

SEQ ID NO: 2197 - protein, 96 aa, Homosapiens; identical to SEQ ID NO: 215

SEQ ID NO: 2198 - DNA, 2519 bp, Homosapiens
cttcctccaggagtctctggtgcagctggggtggaatctggccaggccctgcttaggcccccatcctggggtcaggaaatttggaggataaggcccttcagccccaaggtcagcagggacgagcgggcagactggcgggtgtacaggagggctgggttgacctgtccttggtcactgaggccattggatcttcctccagtggctgccaggatttctggtggaagagacaggaaggcctcccccccttggtcgggtcagcctgggggctgagggcctggctgtcagccactcttcccagaacatatgtcatggcctcagtggctcatggggaagcaggggtgggcgagcttaggctagagcaagtcctgtgggagatggcagaggcctggtctgagaggcaactcggatgtgccctccagtggccatgctcccctccatgcgtctcccctgccctcctggagccctgcaggtcaatgtttaacagaaaccagagcagcggtggattaatgcgcaagggctcagccccccagccctgagcagtgggggaatcggagactttgcaacctgttctcagctctgcctcccctggccaggttgtcctcgaccagtcccgtgccatggcagcccacctgcttcccatctgcgccctcttcctgaccttactcgatatggcccaaggctttaggggccccttgctacccaaccggcccttcaccaccgtctggaatgcaaacacccagtggtgcctggagaggcacggtgtggacgtggatgtcagtgtcttcgatgtggtagccaacccagggcagaccttccgcggccctgacatgacaattttctatagctcccagctgggcacctacccctactacacgcccactggggagcctgtgtttggtggtctgccccagaatgccagcctgattgcccacctggcccgcacattccaggacatcctggctgccatacctgctcctgacttctcagggctggcagtcatcgactgggaggcatggcgcccacgctgggccttcaactgggacaccaaggacatttaccggcagcgctcacgggcactggtacaggcacagcaccctgattggccagctcctcaggtggaggcagtagcccaggaccagttccagggagctgcacgggcctggatggcaggcaccctccagctggggcgggcactgcgtcctcgcggcctctggggcttctatggcttccctgactgctacaactatgactttctaagccccaactacaccggccagtgcccatcaggcatccgtgcccaaaatgaccagctagggtggctgtggggccagagccgtgccctctatcccagcatctacatgcccgcagtgctggagggcacagggaagtcacagatgtatgtgcaacaccgtgtggccgaggcattccgtgtggctgtggctgctggtgaccccaatctgccggtgctgccctatgtccagatcttctatgacacgacaaaccactttctgcccctggatgagctggagcacagcctgggggagagtgcggcccagggggcagctggagtggtgctctgggtgagctgggaaaatacaagaaccaaggaatcatgtcaggccatcaaggagtatatggacactacactggggcccttcatcctgaacgtgaccagtggggcccttctctgcagtcaagccctgtgctccggccatggccgctgtgtccgccgcaccagccaccccaaagccctcctcctccttaaccctgccagtttctccatccagctcacgcctggtggtgggcccctgagcctgcggggtgccctctcacttgaagatcaggcacagatggctgtggagttcaaatgtcgatgctaccctggctggcaggcaccgtggtgtgagcggaagagcatgtggtgattggccacacactgagttgcacatattgagaacctaatgcactctgggtctggccagggcttcctcaaatacatgcacagtcatacaagtcatggtcacagtaaagagtacactcagccactgtcacaggcatattccctgcacacacatgcatacttacagactggaatagtggcataaggagttagaaccacagcagacaccattcattccatgtccatatgcatctacttggcaaggtcatagacaattcctccagagacactgagccagtctttgaactgcagcaatcacaaaggctgacattcactgagtgcctactctttgccaatccccgtgctaagcgttttatgtggacttattcattcctcacaatgaggctatgaggaaactgagtcactcacattgagagtaagcacgttgcccaaggttgcacagcaagaaaagggagaagttgagattcaaacccaggctgtctagctccgggggtacagcccttgcactcctactgagtttgtggtaaccagccctgcacgacccctgaatctgctgagaggcaccagtccagcaaataaagcagtcatgatttactta

SEQ ID NO: 2199 - protein, 435 aa, Homosapiens; identical to SEQ ID NO: 201

SEQ ID NO: 2200 - DNA, 1259 bp, Homosapiens
cttcctccaggagtctctggtgcagctggggtggaatctggccaggccctgcttaggcccccatcctggggtcaggaaatttggaggataaggcccttcagccccaagtgctggagggcacagggaagtcacagatgtatgtgcaacaccgtgtggccgaggcattccgtgtggctgtggctgctggtgaccccaatctgccggtgctgccctatgtccagatcttctatgacacgacaaaccactttctgcccctggatgagctggagcacagcctgggggagagtgcggcccagggggcagctggagtggtgctctgggtgagctgggaaaatacaagaaccaaggaatcatgtcaggccatcaaggagtatatggacactacactggggcccttcatcctgaacgtgaccagtggggcccttctctgcagtcaagccctgtgctccggccatggccgctgtgtccgccgcaccagccaccccaaagccctcctcctccttaaccctgccagtttctccatccagctcacgcctggtggtgggcccctgagcctgcggggtgccctctcacttgaagatcaggcacagatggctgtggagttcaaatgtcgatgctaccctggctggcaggcaccgtggtgtgagcggaagagcatgtggtgattggccacacactgagttgcacatattgagaacctaatgcactctgggtctggccagggcttcctcaaatacatgcacagtcatacaagtcatggtcacagtaaagagtacactcagccactgtcacaggcatattccctgcacacacatgcatacttacagactggaatagtggcataaggagttagaaccacagcagacaccattcattccatgtccatatgcatctacttggcaaggtcatagacaattcctccagagacactgagccagtctttgaactgcagcaatcacaaaggctgacattcactgagtgcctactctttgccaatccccgtgctaagcgttttatgtggacttattcattcctcacaatgaggctatgaggaaactgagtcactcacattgagagtaagcacgttgcccaaggttgcacagcaagaaaagggagaagttgagattcaaacccaggctgtctagctccgggggtacagcccttgcactcctactgagtttgtggtaaccagccctgcacgacccctgaatctgctgagaggcaccagtccagcaaataaagcagtcatgatttactta

SEQ ID NO: 2201 - protein, 176 aa, Homosapiens; identical to SEQ ID NO: 213

SEQ ID NO: 2202 - DNA, 1703 bp, Homosapiens
tccttcctccaggagtctctggtgcagctggggtggaatctggccaggccctgcttaggcccccatcctggggtcaggaaatttggaggataaggcccttcagccccaaggttgtcctcgaccagtcccgtgccatggcagcccacctgcttcccatctgcgccctcttcctgaccttactcgatatggcccaaggctttaggggccccttgctacccaaccggcccttcaccaccgtctggaatgcaaacacccagtggtgcctggagaggcacggtgtggacgtggatgtcagtgtcttcgatgtggtagccaacccagggcagaccttccgcggccctgacatgacaattttctatagctcccagctgggcacctacccctactacacgcccactggggagcctgtgtttggtggtctgccccagaatgccagcctgattgcccacctggcccgcacattccaggacatcctggctgccatacctgctcctgacttctcagggctggcagtcatcgactgggaggcatggcgcccacgctgggccttcaactgggacaccaaggacatttaccggcagcgctcacgggcactggtacaggcacagcaccctgattggccagctcctcaggtggaggcagtagcccaggaccagttccagggagctgcacgggcctggatggcaggcaccctccagctggggcgggcactgcgtcctcgcggcctctggggcttctatggcttccctgacttggtgctctgggtgagctgggaaaatacaagaaccaaggaatcatgtcaggccatcaaggagtatatggacactacactggggcccttcatcctgaacgtgaccagtggggcccttctctgcagtcaagccctgtgctccggccatggccgctgtgtccgccgcaccagccaccccaaagccctcctcctccttaaccctgccagtttctccatccagctcacgcctggtggtgggcccctgagcctgcggggtgccctctcacttgaagatcaggcacagatggctgtggagttcaaatgtcgatgctaccctggctggcaggcaccgtggtgtgagcggaagagcatgtggtgattggccacacactgagttgcacatattgagaacctaatgcactctgggtctggccagggcttcctcaaatacatgcacagtcatacaagtcatggtcacagtaaagagtacactcagccactgtcacaggcatattccctgcacacacatgcatacttacagactggaatagtggcataaggagttagaaccacagcagacaccattcattccatgtccatatgcatctacttggcaaggtcatagacaattcctccagagacactgagccagtctttgaactgcagcaatcacaaaggctgacattcactgagtgcctactctttgccaatccccgtgctaagcgttttatgtggacttattcattcctcacaatgaggctatgaggaaactgagtcactcacattgagagtaagcacgttgcccaaggttgcacagcaagaaaagggagaagttgagattcaaacccaggctgtctagctccgggggtacagcccttgcactcctactgagtttgtggtaaccagccctgcacgacccctgaatctgctgagaggcaccagtccagcaaataaagcagtcatgatttactta

SEQ ID NO: 2203 - protein, 324 aa, Homosapiens [sequence omitted]

SEQ ID NO: 2204 - DNA, 2228 bp, Homosapiens
gcggctccttcctccaggagtctctggtgcagctggggtggaatctggccaggccctgcttaggcccccatcctggggtcaggaaatttggaggataaggcccttcagccccaaggttgtcctcgaccagtcccgtgccatggcagcccacctgcttcccatctgcgccctcttcctgaccttactcgatatggcccaaggctttaggggccccttgctacccaaccggcccttcaccaccgtctggaatgcaaacacccagtggtgcctggagaggcacggtgtggacgtggatgtcagtgtcttcgatgtggtagccaacccagggcagaccttccgcggccctgacatgacaattttctatagctcccagctgggcacctacccctactacacgcccactggggagcctgtgtttggtggtctgccccagaatgccagcctgattgcccacctggcccgcacattccaggacatcctggctgccatacctgctcctgacttctcagggctggcagtcatcgactgggaggcatggcgcccacgctgggccttcaactgggacaccaaggacatttaccggcagcgctcacgggcactggtacaggcacagcaccctgattggccagctcctcaggtggaggcagtagcccaggaccagttccagggagctgcacgggcctggatggcaggcaccctccagctggggcgggcactgcgtcctcgcggcctctggggcttctatggcttccctgactgctacaactatgactttctaagccccaactacaccggccagtgcccatcaggcatccgtgcccaaaatgaccagctagggtggctgtggggccagagccgtgccctctatcccagcatctacatgcccgcagtgctggagggcacagggaagtcacagatgtatgtgcaacaccgtgtggccgaggcattccgtgtggctgtggctgctggtgaccccaatctgccggtgctgccctatgtccagatcttctatgacacgacaaaccactttctgcccctggatgagctggagcacagcctgggggagagtgcggcccagggggcagctggagtggtgctctgggtgagctgggaaaatacaagaaccaaggtgagcttaggcctggcatgagggtgggggtgggggaggggtggggccattaagctgacggggtagaccctgacttaccctttctacctgcaaagtcctggctgaccagcaggtgagtgcctcagtgccctgggtgggtccatacatggccatggtgtccctgacgctatcctcccttcccacctaggaatcatgtcaggccatcaaggagtatatggacactacactggggcccttcatcctgaacgtgaccagtggggcccttctctgcagtcaagccctgtgctccggccatggccgctgtgtccgccgcaccagccaccccaaagccctcctcctccttaaccctgccagtttctccatccagctcacgcctggtggtgggcccctgagcctgcggggtgccctctcacttgaagatcaggcacagatggctgtggagttcaaatgtcgatgctaccctggctggcaggcaccgtggtgtgagcggaagagcatgtggtgattggccacacactgagttgcacatattgagaacctaatgcactctgggtctggccagggcttcctcaaatacatgcacagtcatacaagtcatggtcacagtaaagagtacactcagccactgtcacaggcatattccctgcacacacatgcatacttacagactggaatagtggcataaggagttagaaccacagcagacaccattcattccatgtccatatgcatctacttggcaaggtcatagacaattcctccagagacactgagccagtctttgaactgcagcaatcacaaaggctgacattcactgagtgcctactctttgccaatccccgtgctaagcgttttatgtggacttattcattcctcacaatgaggctatgaggaaactgagtcactcacattgagagtaagcacgttgcccaaggttgcacagcaagaaaagggagaagttgagattcaaacccaggctgtctagctccgggggtacagcccttgcactcctactgagtttgtggtaaccagccctgcacgacccctgaatctgctgagaggcaccagtccagcaaataaagcagtcatgatttactta

SEQ ID NO: 2205 - protein, 336 aa, Homosapiens
MAAHLLPICALFLTLLDMAQGFRGPLLPNRPFTTVWNANTQWCLERHGVDVDVSVFDVVANPGQTFRGPDMTIFYSSQLGTYPYYTPTGEPVFGGLPQNASLIAHLARTFQDILAAIPAPDFSGLAVIDWEAWRPRWAFNWDTKDIYRQRSRALVQAQHPDWPAPQVEAVAQDQFQGAARAWMAGTLQLGRALRPRGLWGFYGFPDCYNYDFLSPNYTGQCPSGIRAQNDQLGWLWGQSRALYPSIYMPAVLEGTGKSQMYVQHRVAEAFRVAVAAGDPNLPVLPYVQIFYDTTNHFLPLDELEHSLGESAAQGAAGVVLWVSWENTRTKVSLGLA

SEQ ID NO: 2206 - DNA, 1951 bp, Homosapiens
gcggctccttcctccaggagtctctggtgcagctggggtggaatctggccaggccctgcttaggcccccatcctggggtcaggaaatttggaggataaggcccttcagccccaaggttgtcctcgaccagtcccgtgccatggcagcccacctgcttcccatctgcgccctcttcctgaccttactcgatatggcccaaggctttaggggccccttgctacccaaccggcccttcaccaccgtctggaatgcaaacacccagtggtgcctggagaggcacggtgtggacgtggatgtcagtgtcttcgatgtggtagccaacccagggcagaccttccgcggccctgacatgacaattttctatagctcccagctgggcacctacccctactacacgcccactggggagcctgtgtttggtggtctgccccagaatgccagcctgattgcccacctggcccgcacattccaggacatcctggctgccatacctgctcctgacttctcagggctggcagtcatcgactgggaggcatggcgcccacgctgggccttcaactgggacaccaaggacatttaccggcagcgctcacgggcactggtacaggcacagcaccctgattggccagctcctcaggtggaggcagtagcccaggaccagttccagggagctgcacgggcctggatggcaggcaccctccagctggggcgggcactgcgtcctcgcggcctctggggcttctatggcttccctgactgctacaactatgactttctaagccccaactacaccggccagtgcccatcaggcatccgtgcccaaaatgaccagctagggtggctgtggggccagagccgtgccctctatcccagcatctacatgcccgcagtgctggagggcacagggaagtcacagatgtatgtgcaacaccgtgtggccgaggcattccgtgtggctgtggctgctggtgaccccaatctgccggtgctgccctatgtccagatcttctatgacacgacaaaccactttctgcccctggaatcatgtcaggccatcaaggagtatatggacactacactggggcccttcatcctgaacgtgaccagtggggcccttctctgcagtcaagccctgtgctccggccatggccgctgtgtccgccgcaccagccaccccaaagccctcctcctccttaaccctgccagtttctccatccagctcacgcctggtggtgggcccctgagcctgcggggtgccctctcacttgaagatcaggcacagatggctgtggagttcaaatgtcgatgctaccctggctggcaggcaccgtggtgtgagcggaagagcatgtggtgattggccacacactgagttgcacatattgagaacctaatgcactctgggtctggccagggcttcctcaaatacatgcacagtcatacaagtcatggtcacagtaaagagtacactcagccactgtcacaggcatattccctgcacacacatgcatacttacagactggaatagtggcataaggagttagaaccacagcagacaccattcattccatgtccatatgcatctacttggcaaggtcatagacaattcctccagagacactgagccagtctttgaactgcagcaatcacaaaggctgacattcactgagtgcctactctttgccaatccccgtgctaagcgttttatgtggacttattcattcctcacaatgaggctatgaggaaactgagtcactcacattgagagtaagcacgttgcccaaggttgcacagcaagaaaagggagaagttgagattcaaacccaggctgtctagctccgggggtacagcccttgcactcctactgagtttgtggtaaccagccctgcacgacccctgaatctgctgagaggcaccagtccagcaaataaagcagtcatgatttactta

SEQ ID NO: 2207 - protein, 405 aa, Homosapiens; identical to SEQ ID NO: 207

SEQ ID NO: 2208 - DNA, 2041 bp, Homosapiens
gcggctccttcctccaggagtctctggtgcagctggggtggaatctggccaggccctgcttaggcccccatcctggggtcaggaaatttggaggataaggcccttcagccccaaggttgtcctcgaccagtcccgtgccatggcagcccacctgcttcccatctgcgccctcttcctgaccttactcgatatggcccaaggctttaggggccccttgctacccaaccggcccttcaccaccgtctggaatgcaaacacccagtggtgcctggagaggcacggtgtggacgtggatgtcagtgtcttcgatgtggtagccaacccagggcagaccttccgcggccctgacatgacaattttctatagctcccagctgggcacctacccctactacacgcccactggggagcctgtgtttggtggtctgccccagaatgccagcctgattgcccacctggcccgcacattccaggacatcctggctgccatacctgctcctgacttctcagggctggcagtcatcgactgggaggcatggcgcccacgctgggccttcaactgggacaccaaggacatttaccggcagcgctcacgggcactggtacaggcacagcaccctgattggccagctcctcaggtggaggcagtagcccaggaccagttccagggagctgcacgggcctggatggcaggcaccctccagctggggcgggcactgcgtcctcgcggcctctggggcttctatggcttccctgactgctacaactatgactttctaagccccaactacaccggccagtgcccatcaggcatccgtgcccaaaatgaccagctagggtggctgtggggccagagccgtgccctctatcccagcatctacatgcccgcagtgctggagggcacagggaagtcacagatgtatgtgcaacaccgtgtggccgaggcattccgtgtggctgtggctgctggtgaccccaatctgccggtgctgccctatgtccagatcttctatgacacgacaaaccactttctgcccctggatgagctggagcacagcctgggggagagtgcggcccagggggcagctggagtggtgctctgggtgagctgggaaaatacaagaaccaaggaatcatgtcaggccatcaaggagtatatggacactacactggggcccttcatcctgaacgtgaccagtggggcccttctctgcagtcaagccctgtgctccggccatggccgctgtgtccgccgcaccagccaccccaaagccctcctcctccttaaccctgccagtttctccatccagctcacgcctggtggtgggcccctgagcctgcggggtgccctctcacttgaagatcaggcacagatggctgtggagttcaaatgtcgatgctaccctggctggcaggcaccgtggtgtgagcggaagagcatgtggtgattggccacacactgagttgcacatattgagaacctaatgcactctgggtctggccagggcttcctcaaatacatgcacagtcatacaagtcatggtcacagtaaagagtacactcagccactgtcacaggcatattccctgcacacacatgcatacttacagactggaatagtggcataaggagttagaaccacagcagacaccattcattccatgtccatatgcatctacttggcaaggtcatagacaattcctccagagacactgagccagtctttgaactgcagcaatcacaaaggctgacattcactgagtgcctactctttgccaatccccgtgctaagcgttttatgtggacttattcattcctcacaatgaggctatgaggaaactgagtcactcacattgagagtaagcacgttgcccaaggttgcacagcaagaaaagggagaagttgagattcaaacccaggctgtctagctccgggggtacagcccttgcactcctactgagtttgtggtaaccagccctgcacgacccctgaatctgctgagaggcaccagtccagcaaataaagcagtcatgatttactta

SEQ ID NO: 2209 - protein, 435 aa, Homosapiens; identical to SEQ ID NO: 201

SEQ ID NO: 2210 - DNA, 2329 bp, Homosapiens
agatgtggggagcgcctctgccctgtcgccccgtccgggatgtgaggagcgtctctccctggccgccccgtctgagaagtgaggagcccctccgcccagcagccgccctgtctgagaagctagtcttgaattcctgacctcaggtgatcctcccgcgttggcctcccaaagtgctgggattacaggcatgagccaccactcctggccccagaaagtgacattctttacttaccacaggaggaaaagatccacgaaagtaaagtgcctagggcccatcaatgtcagatgcagccacgtggacaaagaacactccctgagcacaagacacgaaagaacccggtctccagtgtcacaaacaggcctgcccagcagggtctgcccctgcccacctcctccagcctaggttgtcctcgaccagtcccgtgccatggcagcccacctgcttcccatctgcgccctcttcctgaccttactcgatatggcccaaggctttaggggccccttgctacccaaccggcccttcaccaccgtctggaatgcaaacacccagtggtgcctggagaggcacggtgtggacgtggatgtcagtgtcttcgatgtggtagccaacccagggcagaccttccgcggccctgacatgacaattttctatagctcccagctgggcacctacccctactacacgcccactggggagcctgtgtttggtggtctgccccagaatgccagcctgattgcccacctggcccgcacattccaggacatcctggctgccatacctgctcctgacttctcagggctggcagtcatcgactgggaggcatggcgcccacgctgggccttcaactgggacaccaaggacatttaccggcagcgctcacgggcactggtacaggcacagcaccctgattggccagctcctcaggtggaggcagtagcccaggaccagttccagggagctgcacgggcctggatggcaggcaccctccagctggggcgggcactgcgtcctcgcggcctctggggcttctatggcttccctgactgctacaactatgactttctaagccccaactacaccggccagtgcccatcaggcatccgtgcccaaaatgaccagctagggtggctgtggggccagagccgtgccctctatcccagcatctacatgcccgcagtgctggagggcacagggaagtcacagatgtatgtgcaacaccgtgtggccgaggcattccgtgtggctgtggctgctggtgaccccaatctgccggtgctgccctatgtccagatcttctatgacacgacaaaccactttctgcccctggatgagctggagcacagcctgggggagagtgcggcccagggggcagctggagtggtgctctgggtgagctgggaaaatacaagaaccaaggaatcatgtcaggccatcaaggagtatatggacactacactggggcccttcatcctgaacgtgaccagtggggcccttctctgcagtcaagccctgtgctccggccatggccgctgtgtccgccgcaccagccaccccaaagccctcctcctccttaaccctgccagtttctccatccagctcacgcctggtggtgggcccctgagcctgcggggtgccctctcacttgaagatcaggcacagatggctgtggagttcaaatgtcgatgctaccctggctggcaggcaccgtggtgtgagcggaagagcatgtggtgattggccacacactgagttgcacatattgagaacctaatgcactctgggtctggccagggcttcctcaaatacatgcacagtcatacaagtcatggtcacagtaaagagtacactcagccactgtcacaggcatattccctgcacacacatgcatacttacagactggaatagtggcataaggagttagaaccacagcagacaccattcattccatgtccatatgcatctacttggcaaggtcatagacaattcctccagagacactgagccagtctttgaactgcagcaatcacaaaggctgacattcactgagtgcctactctttgccaatccccgtgctaagcgttttatgtggacttattcattcctcacaatgaggctatgaggaaactgagtcactcacattgagagtaagcacgttgcccaaggttgcacagcaagaaaagggagaagttgagattcaaacccaggctgtctagctccgggggtacagcccttgcactcctactgagtttgtggtaaccagccctgcacgacccctgaatctgctgagaggcaccagtccagcaaataaagcagtcatgatttactta

SEQ ID NO: 2211 - protein, 435 aa, Homosapiens; identical to SEQ ID NO: 201

SEQ ID NO: 2212 - DNA, 4054 bp, Homosapiens
gaatggggtttatcaagtcctcggcgagctgcccaacgggcagcagctggcgcaagtagcctagctggagaggctcaccccaggaaggagggaggccaccgacctactgggccgacggactcccacacaggtgagcccagagcagacggctggtctgcacccccacagatgcgctcgcagttgcactccctccctctcctggcgcccgggagggttaggggctggtggtgcagacgcgggcccttttgggagttgagtctcgcacaagggagcggacctaggaagagccgaggtggtttcgcacggggctcgccagggtctaagcctgccccccaccgggagaggcctgtggagcgtagggggcgctggatacgggatggaggccctgggagacccctcttgctggctttctcggaggtccagccagaaactgctgcaaggaatggaggcctcctcggggttgagagggagccgggctcccaaaggacctcagagactgggcagaaaaggacgggatctcagggatgactgtcccgccctgatgcgagtcagggagaggggcggccaacctcctagacccctctgagcttccctgaccccaaccctgcggccacgccgcgacccagagccgggctgccaggataacgactgcctcggcccttcctgggccggctaagaagcggtgcttggccccttccctcagtctggcagggggcggggcctccctttagacggcggaccagagaagggggcccctgattcgtgggaggcggggcactactctccaggagaccagaggtcgcctcaggtcaaagtccctttttccacacaaaggggacccacggctggcgtctacgttagggggtgcagagccagatctggtgctgccccctgccaacctcggagtaccacagcacctcctgatggccgaacggggcaacgcctcctcctattcccccccccccccttcccgtccccctgccttgtccctcacactgtctctttaaagggctggcggcgccgcggagctgggaggactgaaccaccggcctcgggctgcaggggaaacatttcaggctgactggcgctcgtggctgagactcccatagaaagcccggctcagaggggcattagggtcctaaatgggcggccacgtccctctgcagaggacctggggctcttcgagcccgaaacgaggcaccggcaccgagaaaggtggaccacaccttcccgccccgtccgcaagtccaatcccgggcccacctccgcactggagtcttaaagggccagcgtgcctgggggcggagccagcagaggcgctgagccgggccgcgcctgggcgaacggccggagcgggctgggctgggcccgggatggcggtggccctggcgccggtcccggtggcgccccgcgcgaggtgagggcgggcggtgcaaacctggcggctctctccccttgggctggggtctgaatccccgggggtgctcgcggagaggcgtcccagaaaccccacccccacccgaccgggcgcaggccccacgtgtggggcgggggcggggtcccgcacaaagacccggcggagcgcgctctagccctgagcggccgggcgggggaggcgagcgcgcgcattcccggtggcggtggagggaagggccgggcggccggcgccgccgtgggaggtccgctgcccctttgtccctacggggcctcctccaagccgggagagtgtcagcgctcgagagaaagtccggagagcctcactcttctgccgggcgagtgttacacggatagaagcctcccggcagcgttccttccagtttcgtagcctcttgacgagctgttccctgctttacccaaatgctgtcgtttctctggatcaagggttcttcacggtgtacagggtgggcatcagctgttcagggttctctgaaaccatgtactggatggtatgcaggcatatatgtgactctggtgagcccaaattatctagttcttagaagggtcacagacctaatagagatttgtgccgagccacaggctacctgctccagaaaagagccctgtgcttctggcagtgagttcccagggtgccttgtctgccctgcagtggcctgtggtctctcaaacctattacagccatgagcacagtgcccccacacagcatgggctttgggagcatagatgggcttgaggtgggcacttccagtattccctagactgacttgttctccccaacccttcttccagttcctgagctggtgccaggcaggtgacacctcctgcagcccccagcatgcgggcaggcccaggccccaccgttacattggccctggtgctggcggtgtcatgggccatggagctcaagcccacagcaccacccatcttcactggccggccctttgtggtagcgtgggacgtgcccacacaggactgtggcccacgcctcaaggtgccactggacctgaatgcctttgatgtgcaggcctcacctaatgagggttttgtgaaccagaatattaccatcttctaccgcgaccgtctaggcctgtatccacgcttcgattctgccggaaggtctgtgcatggtggtgtgccacagaatgtcagcctttgggcacaccggaagatgctgcagaaacgtgtggagcactacattcggacacaggagtctgcggggctggcggtcatcgactgggaggactggcgacctgtgtgggtgcgcaactggcaggacaaagatgtgtatcgccggttatcacgccagctagtggccagtcgtcaccctgactggcctccagaccgcatagtcaaacaggcacaatatgagtttgagttcgcagcacagcagttcatgctggagacactgcgttatgtcaaggcagtgcggccccggcacctctggggcttctacctctttcctgactgctacaatcatgattatgtgcagaactgggagagctacacaggccgctgccctgatgttgaggtggcccgcaatgaccagctggcctggctgtgggctgagagcacggccctcttcccgtctgtctacctggacgagacacttgcttcctcccgccatggccgcaactttgtgagcttccgtgttcaggaggcccttcgtgtggctcgcacccaccatgccaaccatgcactcccagtctacgtcttcacacgacccacctacagccgcaggctcacggggcttagtgagatggacctcatctctaccattggcgagagtgcggccctgggcgcagctggtgtcatcctctggggtgacgcggggtacaccacaagcacggagacctgccagtacctcaaagattacctgacacggctgctggtcccctacgtggtcaatgtgtcctgggccacccaatattgcagccgggcccagtgccatggccatgggcgctgtgtgcgccgcaaccccagtgccagtaccttcctgcatctcagcaccaacagtttccgcctagtgcctggccatgcacctggtgaaccccagctgcgacctgtgggggagctcagttgggccgacattgaccacctgcagacacacttccgctgccagtgctacttgggctggagtggtgagcaatgccagtgggaccataggcaggcagctggaggtgccagcgaggcctgggctgggtcccacctcaccagtctgctggctctggcagccctggcctttacctggaccttgtaggggtctcctgcctagctgcctagcaagctggcctctaccacaagggctctcttaggcatgtaggaccctgcagggggtggacaaactggagtctggagtgggcagagcccccaggaagcccaggagggcatccataccagctcgcacccccctgttctaagggggaggggaagtccctgggaggccccttctctccctgccagaggggaaggagggtacagctgggctggggaggacctgaccctactcccttgccctagatagtttattattattattattttggggtctcttttgtaaattaaacataaaacaattgcttctctgcttggattttgt

SEQ ID NO: 2213 - protein, 473 aa, Homosapiens; identical to SEQ ID NO: 217

SEQ ID NO: 2214 - DNA, 1148 bp, Homosapiens
ccagcatgcgggcaggcccaggccccaccgttacattggccctggtgctggcggtgtcatgggccatggagctcaagcccacagcaccacccatcttcactggccggccctttgtggtagcgtgggacgtgcccacacaggactgtggcccacgcctcaaggtgccactggacctgaatgcctttgatgtgcaggcctcacctaatgagggttttgtgaaccagaatattaccatcttctaccgcgaccgtctaggcctgtatccacgcttcgattctgccggaaggtctgtgcatggtggtgtgccacagaatgtcagcctttgggcacaccggaagatgctgcagaaacgtgtggagcactacattcggacacaggagtctgcggggctggcggtcatcgactgggaggactggcgacctgtgtgggtgcgcaactggcaggacaaagatgtgtatcgccggttatcacgccagctagtggccagtcgtcaccctgactggcctccagaccgcatagtcaaacaggcacaatatgagtttgagttcgcagcacagcagttcatgctggagacactgcgttatgtcaaggcagtgcggccccggcacctctggggcttctacctctttcctgactgctacaatcatgattatgtgcagaactgggagagctacacaggccgctgccctgatgttgaggtggcccgcaatgaccagctggcctggctgtgggctgagagcacggccctcttcccgtctgtctacctggacgagacacttgcttcctcccgccatggccgcaactggaccttgtaggggtctcctgcctagctgcctagcaagctggcctctaccacaagggctctcttaggcatgtaggaccctgcagggggtggacaaactggagtctggagtgggcagagcccccaggaagcccaggagggcatccataccagctcgcacccccctgttctaagggggaggggaagtccctgggaggccccttctctccctgccagaggggaaggagggtacagctgggctggggaggacctgaccctactcccttgccctagatagtttattattattattattttggggtctcttttgtaaattaaacataaaacaattgcttctctgcttgga

SEQ ID NO: 2215 - protein, 269 aa, Homosapiens
MRAGPGPTVTLALVLAVSWAMELKPTAPPIFTGRPFVVAWDVPTQDCGPRLKVPLDLNAFDVQASPNEGFVNQNITIFYRDRLGLYPRFDSAGRSVHGGVPQNVSLWAHRKMLQKRVEHYIRTQESAGLAVIDWEDWRPVWVRNWQDKDVYRRLSRQLVASRHPDWPPDRIVKQAQYEFEFAAQQFMLETLRYVKAVRPRHLWGFYLFPDCYNHDYVQNWESYTGRCPDVEVARNDQLAWLWAESTALFPSVYLDETLASSRHGRNWTL

SEQ ID NO: 2216 - DNA, 1528 bp, Homosapiens
agttcctgagctggtgccaggcaggtgacacctcctgcagcccccagcatgcgggcaggcccaggccccaccgttacattggccctggtgctggcggtgtcatgggccatggagctcaagcccacagcaccacccatcttcactggccggccctttgtggtagcgtgggacgtgcccacacaggactgtggcccacgcctcaaggtgccactggacctgaatgcctttgatgtgcaggcctcacctaatgagggttttgtgaaccagaatattaccatcttctaccgcgaccgtctaggcctgtatccacgcttcgattctgccggaaggtctgtgcatggtggtgtgccacagaatgtcagcctttgggcacaccggaagatgctgcagaaacgtgtggagcactacattcggacacaggagtctgcggggctggcggtcatcgactgggaggactggcgacctgtgtgggtgcgcaactggcaggacaaagatgtgtatcgccggttatcacgccagctagtggccagtcgtcaccctgactggcctccagaccgcatagtcaaacaggcacaatatgagtttgagttcgcagcacagcagttcatgctggagacactgcgttatgtcaaggcagtgcggccccggcacctctggggcttctacctctttcctgactgctacaatcatgattatgtgcagaactgggagagctacacaggccgctgccctgatgttgaggtggcccgcaatgaccagctggcctggctgtgggctgagagcacggccctgccagtacctcaaagattacctgacacggctgctggtcccctacgtggtcaatgtgtcctgggccacccaatattgcagccgggcccagtgccatggccatgggcgctgtgtgcgccgcaaccccagtgccagtaccttcctgcatctcagcaccaacagtttccgcctagtgcctggccatgcacctggtgaaccccagctgcgacctgtgggggagctcagttgggccgacattgaccacctgcagacacacttccgctgccagtgctacttgggctggagtggtgagcaatgccagtgggaccataggcaggcagctggaggtgccagcgaggcctgggctgggtcccacctcaccagtctgctggctctggcagccctggcctttacctggaccttgtaggggtctcctgcctagctgcctagcaagctggcctctaccacaagggctctcttaggcatgtaggaccctgcagggggtggacaaactggagtctggagtgggcagagcccccaggaagcccaggagggcatccataccagctcgcacccccctgttctaagggggaggggaagtccctgggaggccccttctctccctgccagaggggaaggagggtacagctgggctggggaggacctgaccctactcccttgccctagatagtttattattattattattttggggtctcttttgtaaattaaacataaaacaattgcttctctgcttgga

SEQ ID NO: 2217 - protein, 311 aa, Homosapiens
MRAGPGPTVTLALVLAVSWAMELKPTAPPIFTGRPFVVAWDVPTQDCGPRLKVPLDLNAFDVQASPNEGFVNQNITIFYRDRLGLYPRFDSAGRSVHGGVPQNVSLWAHRKMLQKRVEHYIRTQESAGLAVIDWEDWRPVWVRNWQDKDVYRRLSRQLVASRHPDWPPDRIVKQAQYEFEFAAQQFMLETLRYVKAVRPRHLWGFYLFPDCYNHDYVQNWESYTGRCPDVEVARNDQLAWLWAESTALPVPQRLPDTAAGPLRGQCVLGHPILQPGPVPWPWALCAPQPQCQYLPASQHQQFPPSAWPCTW

SEQ ID NO: 2218 - DNA, 1924 bp, Homosapiens
gtttatcaagtcctcggcgagctgcccaacgggcagcagctggcgcaagtagcctagctggagaggctcaccccaggaaggagggaggccaccgacctactgggccgacggactcccacacagttcctgagctggtgccaggcaggtgacacctcctgcagcccccagcatgcgggcaggcccaggccccaccgttacattggccctggtgctggcggtgtcatgggccatggagctcaagcccacagcaccacccatcttcactggccggccctttgtggtagcgtgggacgtgcccacacaggactgtggcccacgcctcaaggtgccactggacctgaatgcctttgatgtgcaggcctcacctaatgagggttttgtgaaccagaatattaccatcttctaccgcgaccgtctaggcctgtatccacgcttcgattctgccggaaggtctgtgcatggtggtgtgccacagaatgtcagcctttgggcacaccggaagatgctgcagaaacgtgtggagcactacattcggacacaggagtctgcggggctggcggtcatcgactgggaggactggcgacctgtgtgggtgcgcaactggcaggacaaagatgtgtatcgccggttatcacgccagctagtggccagtcgtcaccctgactggcctccagaccgcatagtcaaacaggcacaatatgagtttgagttcgcagcacagcagttcatgctggagacactgcgttatgtcaaggcagtgcggccccggcacctctggggcttctacctctttcctgactgctacaatcatgattatgtgcagaactgggagagctacacaggccgctgccctgatgttgaggtggcccgcaatgaccagctggcctggctgtgggctgagagcacggccctcttcccgtctgtctacctggacgagacacttgcttcctcccgccatggccgcaactttgtgagcttccgtgttcaggaggcccttcgtgtggctcgcacccaccatgccaaccatgcactcccagtctacgtcttcacacgacccacctacagccgcaggctcacggggcttagtgagatggacctcatctctaccattggcgagagtgcggccctgggcgcagctggtgtcatcctctggggtgacgcggggtacaccacaagcacggagacctgccagtacctcaaagattacctgacacggctgctggtcccctacgtggtcaatgtgtcctgggccacccaatattgcagccgggcccagtgccatggccatgggcgctgtgtgcgccgcaaccccagtgccagtaccttcctgcatctcagcaccaacagtttccgcctagtgcctggccatgcacctggtgaaccccagctgcgacctgtgggggagctcagttgggccgacattgaccacctgcagacacacttccgctgccagtgctacttgggctggagtggtgagcaatgccagtgggaccataggcaggcagctggaggtgccagcgaggcctgggctgggtcccacctcaccagtctgctggctctggcagccctggcctttacctggaccttgtaggggtctcctgcctagctgcctagcaagctggcctctaccacaagggctctcttaggcatgtaggaccctgcagggggtggacaaactggagtctggagtgggcagagcccccaggaagcccaggagggcatccataccagctcgcacccccctgttctaagggggaggggaagtccctgggaggccccttctctccctgccagaggggaaggagggtacagctgggctggggaggacctgaccctactcccttgccctagatagtttattattattattattttggggtctcttttgtaaattaaacataaaacaattgcttctctgcttgga

SEQ ID NO: 2219 - protein, 473 aa, Homosapiens; identical to SEQ ID NO: 217

SEQ ID NO: 2220 - DNA, 2334 bp, Homosapiens
gggtttatcaagtcctcggcgagctgcccaacgggcagcagctggcgcaagtagcctagctggagaggctcaccccaggaaggagggaggccaccgacctactgggccgacggactcccacacagggctggcggcgccgcggagctgggaggactgaaccaccggcctcgggctgcaggggaaacatttcaggctgactggcgctcgtggctgagactcccatagaaagcccggctcagaggggcattagggtcctaaatgggcggccacgtccctctgcagaggacctggggctcttcgagcccgaaacgaggcaccggcaccgagaaaggtggaccacaccttcccgccccgtccgcaagtccaatcccgggcccacctccgcactggagtcttaaagggccagcgtgcctgggggcggagccagcagaggcgctgagccgggccgcgcctgggcgaacggccggagcgggctgggctgggcccgggatggcggtggccctggcgccggtcccggtggcgccccgcgcgagttcctgagctggtgccaggcaggtgacacctcctgcagcccccagcatgcgggcaggcccaggccccaccgttacattggccctggtgctggcggtgtcatgggccatggagctcaagcccacagcaccacccatcttcactggccggccctttgtggtagcgtgggacgtgcccacacaggactgtggcccacgcctcaaggtgccactggacctgaatgcctttgatgtgcaggcctcacctaatgagggttttgtgaaccagaatattaccatcttctaccgcgaccgtctaggcctgtatccacgcttcgattctgccggaaggtctgtgcatggtggtgtgccacagaatgtcagcctttgggcacaccggaagatgctgcagaaacgtgtggagcactacattcggacacaggagtctgcggggctggcggtcatcgactgggaggactggcgacctgtgtgggtgcgcaactggcaggacaaagatgtgtatcgccggttatcacgccagctagtggccagtcgtcaccctgactggcctccagaccgcatagtcaaacaggcacaatatgagtttgagttcgcagcacagcagttcatgctggagacactgcgttatgtcaaggcagtgcggccccggcacctctggggcttctacctctttcctgactgctacaatcatgattatgtgcagaactgggagagctacacaggccgctgccctgatgttgaggtggcccgcaatgaccagctggcctggctgtgggctgagagcacggccctcttcccgtctgtctacctggacgagacacttgcttcctcccgccatggccgcaactttgtgagcttccgtgttcaggaggcccttcgtgtggctcgcacccaccatgccaaccatgcactcccagtctacgtcttcacacgacccacctacagccgcaggctcacggggcttagtgagatggacctcatctctaccattggcgagagtgcggccctgggcgcagctggtgtcatcctctggggtgacgcggggtacaccacaagcacggagacctgccagtacctcaaagattacctgacacggctgctggtcccctacgtggtcaatgtgtcctgggccacccaatattgcagccgggcccagtgccatggccatgggcgctgtgtgcgccgcaaccccagtgccagtaccttcctgcatctcagcaccaacagtttccgcctagtgcctggccatgcacctggtgaaccccagctgcgacctgtgggggagctcagttgggccgacattgaccacctgcagacacacttccgctgccagtgctacttgggctggagtggtgagcaatgccagtgggaccataggcaggcagctggaggtgccagcgaggcctgggctgggtcccacctcaccagtctgctggctctggcagccctggcctttacctggaccttgtaggggtctcctgcctagctgcctagcaagctggcctctaccacaagggctctcttaggcatgtaggaccctgcagggggtggacaaactggagtctggagtgggcagagcccccaggaagcccaggagggcatccataccagctcgcacccccctgttctaagggggaggggaagtccctgggaggccccttctctccctgccagaggggaaggagggtacagctgggctggggaggacctgaccctactcccttgccctagatagtttattattattattattttggggtctcttttgtaaattaaacataaaacaattgcttctctgcttgga

SEQ ID NO: 2221 - protein, 473 aa, Homosapiens; identical to SEQ ID NO: 217

SEQ ID NO: 2222 - DNA, 404 bp, Homosapiens
ggtggcagacagaagcaccccctgccccggcaagaaactcccaggctcaatcaaggtgtggcttccattgaggagcccaggctggggccacaaccctgaataaactctgttggcccataaccttcagctgatcagtcaagggaaagcactagaacccctgggtagggaaagaaaggagggaaaaaccataaaaggaatacttataatgtgaaggtttgtaaatagtccatgatgatgtcgtggcagagtctgatttctatatagaggtgactttttttttaagtactgtgcaagctctgtgcttctataatgtgggaaatggcttggggaggatggcccctagcttaggaagactgttgtgttatttgttcaatttcaataaaatgatttgtagatcctgcaca

SEQ ID NO: 2223 - protein, 33 aa, Homosapiens
VADRSTPCPGKKLPGSIKVWLPLRSPGWGHNPE

SEQ ID NO: 2224 - DNA, 1513 bp, Homosapiens
agacagccgagcctgcggaaggcggcggcggcggcacctgcgatcagcggctggggcaggttatggtagtgcggactgcggtgtgagcagagcggccacggggcccgccatgcgccggcggccctgacatgggcgccagcgggtccaaagctcggggcctgtggcccttcgcctcggcggccggaggcggcggctcagaggcagcaggagctgagcaagctttggtgcggcctcggggccgagctgtgccccccttcgtattcacgcgccgcggctctatgttctatgatgaggtgtgaccctgggaggtggcagacagaagcaccccctgccccggcaagaaactcccaggctcaatcaaggtgtggcttccattgaggagcccaggctggggccacaaccctgaataaactctgttggcccataaccttcagctgtgagcgggtcggtcccacagtattggttgggtgttggtttgtgtgtggacaagaggtggttggtgggtggtgaaggctaatggcagagttagcaccccactctcccaagccacccctgcaagcagcacagcagggcatataccagtcaggaatgcccgttacctggttccttgcctggtctgctttcttccaagtttgcctggggcctagccctgctagaggctacagcactttacaagcaaggtatgctttcttccagcccctaggctgtgggcactgtatacaagtaggaacttcctttccttcacttcccttttaacccctagtcagagcatttcagccgtttgctacctcgattcctcctgtgttggacagaggctgggggcagtgccagcctgattcttccgacctacctgccatttgttcccgccttcagatggatggacagtttgctggctattgataggagtggggactgggtgggggcttctccctctacccagggctgggctgatccccctactgcaactaactgttgccccccaaccccgaacccccagttgaggagttgagagagtgcaggctggggtcaggacaggctgcggatgcttgtgcctatggggagttactccaacccacctattctgtctaatctccatggctttgcaccaaatcctccacccctccaattgggaggggactgttcaccaccttgtggtaagggacaacaccctaaggctggtgccagtagttatgagtagcctaccaccccctcccttacagtaacccccaccccttcaggatcagtcaagggaaagcactagaacccctgggtagggaaagaaaggagggaaaaaccataaaaggaatacttataatgtgaaggtttgtaaatagtccatgatgatgtcgtggcagagtctgatttctatatagaggtgactttttttttaagtactgtgcaagctctgtgcttctataatgtgggaaatggcttggggaggatggcccctagcttaggaagactgttgtgttatttgttcaatttcaataaaatgatttgtagatcctgcaca

SEQ ID NO: 2225 - protein, 56 aa, Homosapiens [sequence omitted]

SEQ ID NO: 2226 - DNA, 1857 bp, Homosapiens
agacagccgagcctgcggaaggcggcggcggcggcacctgcgatcagcggctggggcaggttatggtagtgcggactgcggtgtgagcagagcggccacggggcccgccatgcgccggcggccctgacatgggcgccagcgggtccaaagctcggggcctgtggcccttcgcctcggcggccggaggcggcggctcagaggcagcaggagctgagcaagctttggtgcggcctcggggccgagctgtgccccccttcgtattcacgcgccgcgggcttctgctatttcagtctttgacactgggccagcagcatcttctggagtgagaccaacatgcccaggccaccaccctgcccactctagaagtcctgggtgaaggcaaagtcctgatattagaatggctgcccttgctgaacaaatcaaggatgagaactggccttggtggctgcctggatgctctatgttctatgatgaggatggggatctggctcacgagttctatgaggagacaatcgtcaccaagaacgggcagaagcgggccaagctgaggcgagtgcataagaatctgattcctcagggcatcgtgaagctggatcacccccgcatccacgtggatttccctgtgatcctctatgaggtgtgaccctgggaggtggcagacagaagcaccccctgccccggcaagaaactcccaggctcaatcaaggtgtggcttccattgaggagcccaggctggggccacaaccctgaataaactctgttggcccataaccttcagctgtgagcgggtcggtcccacagtattggttgggtgttggtttgtgtgtggacaagaggtggttggtgggtggtgaaggctaatggcagagttagcaccccactctcccaagccacccctgcaagcagcacagcagggcatataccagtcaggaatgcccgttacctggttccttgcctggtctgctttcttccaagtttgcctggggcctagccctgctagaggctacagcactttacaagcaaggtatgctttcttccagcccctaggctgtgggcactgtatacaagtaggaacttcctttccttcacttcccttttaacccctagtcagagcatttcagccgtttgctacctcgattcctcctgtgttggacagaggctgggggcagtgccagcctgattcttccgacctacctgccatttgttcccgccttcagatggatggacagtttgctggctattgataggagtggggactgggtgggggcttctccctctacccagggctgggctgatccccctactgcaactaactgttgccccccaaccccgaacccccagttgaggagttgagagagtgcaggctggggtcaggacaggctgcggatgcttgtgcctatggggagttactccaacccacctattctgtctaatctccatggctttgcaccaaatcctccacccctccaattgggaggggactgttcaccaccttgtggtaagggacaacaccctaaggctggtgccagtagttatgagtagcctaccaccccctcccttacagtaacccccaccccttcaggatcagtcaagggaaagcactagaacccctgggtagggaaagaaaggagggaaaaaccataaaaggaatacttataatgtgaaggtttgtaaatagtccatgatgatgtcgtggcagagtctgatttctatatagaggtgactttttttttaagtactgtgcaagctctgtgcttctataatgtgggaaatggcttggggaggatggcccctagcttaggaagactgttgtgttatttgttcaatttcaataaaatgatttgtagatcctgcaca

SEQ ID NO: 2227 - protein, 81 aa, Homosapiens [sequence omitted]

SEQ ID NO: 2228 - DNA, 1697 bp, Homosapiens
agcggaagtgaggtttccgtggagacagccgagcctgcggaaggcggcggcggcggcacctgcgatcagcggctggggcaggttatggtagtgcggactgcggtgtgagcagagcggccacggggcccgccatgcgccggcggccctgacatgggcgccagcgggtccaaagctcggggcctgtggcccttcgcctcggcggccggaggcggcggctcagaggcagcaggagctgagcaagctttggtgcggcctcggggccgagctgtgccccccttcgtattcacgcgccgcggctctatgttctatgatgaggatggggatctggctcacgagttctatgaggagacaatcgtcaccaagaacgggcagaagcgggccaagctgaggcgagtgcataagaatctgattcctcagggcatcgtgaagctggatcacccccgcatccacgtggatttccctgtgatcctctatgaggtgtgaccctgggaggtggcagacagaagcaccccctgccccggcaagaaactcccaggctcaatcaaggtgtggcttccattgaggagcccaggctggggccacaaccctgaataaactctgttggcccataaccttcagctgtgagcgggtcggtcccacagtattggttgggtgttggtttgtgtgtggacaagaggtggttggtgggtggtgaaggctaatggcagagttagcaccccactctcccaagccacccctgcaagcagcacagcagggcatataccagtcaggaatgcccgttacctggttccttgcctggtctgctttcttccaagtttgcctggggcctagccctgctagaggctacagcactttacaagcaaggtatgctttcttccagcccctaggctgtgggcactgtatacaagtaggaacttcctttccttcacttcccttttaacccctagtcagagcatttcagccgtttgctacctcgattcctcctgtgttggacagaggctgggggcagtgccagcctgattcttccgacctacctgccatttgttcccgccttcagatggatggacagtttgctggctattgataggagtggggactgggtgggggcttctccctctacccagggctgggctgatccccctactgcaactaactgttgccccccaaccccgaacccccagttgaggagttgagagagtgcaggctggggtcaggacaggctgcggatgcttgtgcctatggggagttactccaacccacctattctgtctaatctccatggctttgcaccaaatcctccacccctccaattgggaggggactgttcaccaccttgtggtaagggacaacaccctaaggctggtgccagtagttatgagtagcctaccaccccctcccttacagtaacccccaccccttcaggatcagtcaagggaaagcactagaacccctgggtagggaaagaaaggagggaaaaaccataaaaggaatacttataatgtgaaggtttgtaaatagtccatgatgatgtcgtggcagagtctgatttctatatagaggtgactttttttttaagtactgtgcaagctctgtgcttctataatgtgggaaatggcttggggaggatggcccctagcttaggaagactgttgtgttatttgttcaatttcaataaaatgatttgtagatcctgcaca

SEQ ID NO: 2229 - protein, 110 aa, Homosapiens; identical to SEQ ID NO: 221

SEQ ID NO: 2230 - DNA, 769 bp, Homosapiens
agacagccgagcctgcggaaggcggcggcggcggcacctgcgatcagcggctggggcaggttatggtagtgcggactgcggtgtgagcagagcggccacggggcccgccatgcgccggcggccctgacatgggcgccagcgggtccaaagctcggggcctgtggcccttcgcctcggcggccggaggcggcggctcagaggcagcaggagctgagcaagctttggtgcggcctcggggccgagctgtgccccccttcgtattcacgcgccgcgggcttctgctatttcagtctttgacactgggccagcagcatcttctggagtgagaccaacatgcccaggccaccaccctgcccactctagaagtcctgggtgaaggcaaagtcctgatattagaatggctgcccttgctgaacaaatcaaggatgagaactggccttggtggctgcctggatgctctatgttctatgatgaggatggggatctggctcacgagttctatgaggagacaatcgtcaccaagaacgggcagaagcgggccaagctgaggcgagtgcataagaatctgattcctcagggcatcgtgaagctggatcacccccgcatccacgtggatttccctgtgatcctctatgaggtgtgaccctgggaggtggcagacagaagcaccccctgccccggcaagaaactcccaggctcaatcaaggtgtggcttccattgaggagcccaggctggggccacaaccctgaataaactctgttggcccat

SEQ ID NO: 2231 - protein, 81 aa, Homosapiens [sequence omitted]

SEQ ID NO: 2232 - DNA, 598 bp, Homosapiens
ggtttccgtggagacagccgagcctgcggaaggcggcggcggcggcacctgcgatcagcggctggggcaggttatggtagtgcggactgcggtgtgagcagagcggccacggggcccgccatgcgccggcggccctgacatgggcgccagcgggtccaaagctcggggcctgtggcccttcgcctcggcggccggaggcggcggctcagaggcagcaggagctgagcaagctttggtgcggcctcggggccgagctgtgccccccttcgtattcacgcgccgcggctctatgttctatgatgaggatggggatctggctcacgagttctatgaggagacaatcgtcaccaagaacgggcagaagcgggccaagctgaggcgagtgcataagaatctgattcctcagggcatcgtgaagctggatcacccccgcatccacgtggatttccctgtgatcctctatgaggtgtgaccctgggaggtggcagacagaagcaccccctgccccggcaagaaactcccaggctcaatcaaggtgtggcttccattgaggagcccaggctggggccacaaccctgaataaactctgttggcccat

SEQ ID NO: 2233 - protein, 110 aa, Homosapiens; identical to SEQ ID NO: 221

SEQ ID NO: 2234 - DNA, 1350 bp, Homosapiens
cggtcgctggagctccgccctccccggtccgttgccgcgtcctgggtcggtgggcagccccaccctcctggctacgtggctccccgcgggtcctggccggggacctgcccgcggaaccgtgcgtaagaccccgattccaccgcctagatgctgggtgccggggcccccttggtttctgtcacagacaggttgaacacggaaaaagcagctgtatggcttgtggtagacctgagccgggcattatccagctatgactaaagccgaccgagcagtttggactagcacctcgatttccgcgttcgaatgctcctgctccctccttggggagactaggggaggatgtggagagggaagagtcctcgccaggaattgagaagtatgtttaggaaaacttgagaggcagagagagatcctgctcctccatctgcactcctgtatggagccagctgagccctcacctcttccctgttctggcctgtcaccagctgctggaatgtggaagattctgttcccttcctctagggtggatctggagaaagatttgggaatagataggaaagaagtcttgttttggaccataagcattcaggagcactttacccacaggaagggggaaagctagattataaaatgcctaaagaggtggaaaaagagatccaggttactaacccaggactgtaaggtgtctcggaacctcctaggtatccccattatcggagaactgtgtgccagatgccattggtgtgaccaccaggctcagagaaccaggcctaggcaccaggaaaaagaaacagggactgtgaagctcagtatgcctggcagaaatggggcggaaatccttatttaagtaaagaaagtggagttgtgagtgatgcttcagataaaattttacaaaattccttacaaaatgggtggtgctcagcacgccaaaatcttagcccagagcttgggtgcaagggttgagttgagtgtagacccctgggcttgtcttcatgtcagtcagtcctgagccattttccactgtggaaaggtgggaaaaccacaagacactaaccaattgaaaaggagggctagccacggaggtgcacacctgtaatcccagctacttgggagggtgaggcagaaggatcacttgaacctgggaggcagaggttgcagtgagccaagatcgtgccactgcactccagcctgagtgacagagtgagactctgtctcaaaaatagaaaaggaagccaagtacggtggctcacacctgtaatcccaacactttggttgggctaggtgggcagatcacttgaggccaggagttcgaggccagcctggccagcatggcgaaaccccatctctacc

SEQ ID NO: 2235 - protein, 61 aa, Homosapiens
MEPAEPSPLPCSGLSPAAGMWKILFPSSRVDLEKDLGIDRKEVLFWTISIQEHFTHRKGES

SEQ ID NO: 2236 - DNA, 1768 bp, Homosapiens
gctagatcccggcgatctacgtttcagtcttaacggttgcggcgcggctctggcccgggcgcacgcgcacactgacacgcgtacacgcacgcacgcgaccggggcggtggttggcggctacggacgcgcaggactgggggacgggcgggtacggctatgggcgaggcggaggcgccttctttcgaaatgacctggagcagcacgacgagcagtggctactgcagccaagaggactcggactcggagctcgagcagtacttcaccgcgcgaacctcgctagctcgcaggccgcgccgggaccaggacgagcctgtggagtgggagacacctgacctttctcaagctgagattgagcagaagatcaaggagtacaatgcccagatcaacagcaacctcttcatgagcttgaacaaggacggttcttacacaggcttcatcaaggttcagctgaagctggtgcgccctgtctctgtgccctccagcaagaagccaccctccttgcaggatgcccggcggggcccaggacggggcacaagtgtcaggcgccgcacttccttttacctgcccaaggatgctgtcaagcacctgcatgtgctgtcacgcacaagggcacgtgaagtcattgaggccctgctgcgaaagttcttggtggtggatgacccccgcaagtttgcactctttgagcgcgctgagcgtcacggccaagtgtacttgcggaagctgttggatgatgagcagcccctgcggctgcggctcctggcagggcccagtgacaaggccctgagctttgtcctgaaggaaaatgactctggggaggtgaactgggacgccttcagcatgcctgaactacataacttcctacgtatcctgcagcgggaggaggaggagcacctccgccagatcctgcagaagtactcctattgccgccagaagatccaagaggccctgcacgcctgcccccttgggtgacctcttgtacccccaggtggaaggcagacagcaggcagcgccaagtgcgtgccgtgtgagtgtgacagggccagtggggcctgtggaatgagtgtgcatggaggccctcctgtgctgggggaatgagcccagagaacagcgaagtagcttgctccctgtgtccacctgtgggtgtagccaggtatggctctgcacccctctgccctcattactgggccttagtgggccagggctgccctgagaagctgctccaggcctgcagcaggagtggtgcagacagaagtctcctcaatttttgtctcagaagtgaaaatcttggagaccctgcaaacagaacagggtcatgtttgcaggggtgacggccctcatctatgaggaaaggttttggatcttgaatgtggtctcaggatatccttatcagagctaagggtgggtgctcagaataaggcaggcattgaggaagagtcttggtttctctctacagtgccaactcctcacacaccctgaggtcagggagtgctggctcacagtacagcatgtgccttaatgcttcatatgaggaggatgtccctgggccagggtctgtgtgaatgtgggcactggcccaggttcataccttatttgctaatcaaagccagggtctctccctcaggtgttttttatgaagtgcgtgaatgtatgtaatgtgtggtggcctcagctgaatgcctcctgtggggaaaggggttggggtgacagtcatcatcagggcctggggcctgagagaattggctcaataaagatttcaagatcctcctgc

SEQ ID NO: 2237 - protein, 270 aa, Homosapiens; identical to SEQ ID NO: 227

SEQ ID NO: 2238 - DNA, 1665 bp, Homosapiens
tccaactgttgagcaggcctctctgcctgtggccttccggccggtttccagacgcccaggtggccaacattagagtccgcgtagcagtgtgagattgcaagttcacctgccactaccgctgccgcgcgctcgtctgcctggactgttgcgggccccgggacctgggctgggaacccgcggtggagcgggacacgaacgtggacgagcctgtggagtgggagacacctgacctttctcaagctgagattgagcagaagatcaaggagtacaatgcccagatcaacagcaacctcttcatgagcttgaacaaggacggttcttacacaggcttcatcaaggttcagctgaagctggtgcgccctgtctctgtgccctccagcaagaagccaccctccttgcaggatgcccggcggggcccaggacggggcacaagtgtcaggcgccgcacttccttttacctgcccaaggatgctgtcaagcacctgcatgtgctgtcacgcacaagggcacgtgaagtcattgaggccctgctgcgaaagttcttggtggtggatgacccccgcaagtttgcactctttgagcgcgctgagcgtcacggccaagtgtacttgcggaagctgttggatgatgagcagcccctgcggctgcggctcctggcagggcccagtgacaaggccctgagctttgtcctgaaggaaaatgactctggggaggtgaactgggacgccttcagcatgcctgaactacataacttcctacgtatcctgcagcgggaggaggaggagcacctccgccagatcctgcagaagtactcctattgccgccagaagatccaagaggccctgcacgcctgcccccttgggtgacctcttgtacccccaggtggaaggcagacagcaggcagcgccaagtgcgtgccgtgtgagtgtgacagggccagtggggcctgtggaatgagtgtgcatggaggccctcctgtgctgggggaatgagcccagagaacagcgaagtagcttgctccctgtgtccacctgtgggtgtagccaggtatggctctgcacccctctgccctcattactgggccttagtgggccagggctgccctgagaagctgctccaggcctgcagcaggagtggtgcagacagaagtctcctcaatttttgtctcagaagtgaaaatcttggagaccctgcaaacagaacagggtcatgtttgcaggggtgacggccctcatctatgaggaaaggttttggatcttgaatgtggtctcaggatatccttatcagagctaagggtgggtgctcagaataaggcaggcattgaggaagagtcttggtttctctctacagtgccaactcctcacacaccctgaggtcagggagtgctggctcacagtacagcatgtgccttaatgcttcatatgaggaggatgtccctgggccagggtctgtgtgaatgtgggcactggcccaggttcataccttatttgctaatcaaagccagggtctctccctcaggtgttttttatgaagtgcgtgaatgtatgtaatgtgtggtggcctcagctgaatgcctcctgtggggaaaggggttggggtgacagtcatcatcagggcctggggcctgagagaattggctcaataaagatttcaagatcctcctgc

SEQ ID NO: 2239 - protein, 189 aa, Homosapiens; identical to SEQ ID NO: 225

SEQ ID NO: 2240 - DNA, 1960 bp, Homosapiens
gcgcggctctcctcagctccttcccgccgcccagtctggatcctgggggaggcgctgaagtcggggcccgccctgtggccccgcccggcccgcgcttgctagcgcccaaagccagcgaagcacgggcccaaccgggccatgtcgggggagcctgagctcattgagctgcgggagctggcacccgctgggcgcgctgggaagggccgcacccggctggagcgtgccaacgcgctgcgcatcgcgcggggcaccgcgtgcaaccccacacggcagctggtccctggccgtggccaccgcttccagcccgcggggcccgccacgcacacgtggtgcgacctctgtggcgacttcatctggggcgtcgtgcgcaaaggcctgcagtgcgcgcattgcaagttcacctgccactaccgctgccgcgcgctcgtctgcctggactgttgcgggccccgggacctgggctgggaacccgcggtggagcgggacacgaacgtggacgagcctgtggagtgggagacacctgacctttctcaagctgagattgagcagaagatcaaggagtacaatgcccagatcaacagcaacctcttcatgagcttgaacaaggacggttcttacacaggcttcatcaaggttcagctgaagctggtgcgccctgtctctgtgccctccagcaagaagccaccctccttgcaggatgcccggcggggcccaggacggggcacaagtgtcaggcgccgcacttccttttacctgcccaaggatgctgtcaagcacctgcatgtgctgtcacgcacaagggcacgtgaagtcattgaggccctgctgcgaaagttcttggtggtggatgacccccgcaagtttgcactctttgagcgcgctgagcgtcacggccaagtgtacttgcggaagctgttggatgatgagcagcccctgcggctgcggctcctggcagggcccagtgacaaggccctgagctttgtcctgaaggaaaatgactctggggaggtgaactgggacgccttcagcatgcctgaactacataacttcctacgtatcctgcagcgggaggaggaggagcacctccgccagatcctgcagaagtactcctattgccgccagaagatccaagaggccctgcacgcctgcccccttgggtgacctcttgtacccccaggtggaaggcagacagcaggcagcgccaagtgcgtgccgtgtgagtgtgacagggccagtggggcctgtggaatgagtgtgcatggaggccctcctgtgctgggggaatgagcccagagaacagcgaagtagcttgctccctgtgtccacctgtgggtgtagccaggtatggctctgcacccctctgccctcattactgggccttagtgggccagggctgccctgagaagctgctccaggcctgcagcaggagtggtgcagacagaagtctcctcaatttttgtctcagaagtgaaaatcttggagaccctgcaaacagaacagggtcatgtttgcaggggtgacggccctcatctatgaggaaaggttttggatcttgaatgtggtctcaggatatccttatcagagctaagggtgggtgctcagaataaggcaggcattgaggaagagtcttggtttctctctacagtgccaactcctcacacaccctgaggtcagggagtgctggctcacagtacagcatgtgccttaatgcttcatatgaggaggatgtccctgggccagggtctgtgtgaatgtgggcactggcccaggttcataccttatttgctaatcaaagccagggtctctccctcaggtgttttttatgaagtgcgtgaatgtatgtaatgtgtggtggcctcagctgaatgcctcctgtggggaaaggggttggggtgacagtcatcatcagggcctggggcctgagagaattggctcaataaagatttcaagatcctcctgc

SEQ ID NO: 2241 - protein, 340 aa, Homosapiens; identical to SEQ ID NO: 223

SEQ ID NO: 2242 - DNA, 1853 bp, Homosapiens
gcgcggctctcctcagctccttcccgccgcccagtctggatcctgggggaggcgctgaagtcggggcccgccctgtggccccgcccggcccgcgcttgctagcgcccaaagccagcgaagcacgggcccaaccgggccatgtcgggggagcctgagctcattgagctgcgggagctggcacccgctgggcgcgctgggaagggccgcacccggctggagcgtgccaacgcgctgcgcatcgcgcggggcaccgcgtgcaaccccacacggcagctggtccctggccgtggccaccgcttccagcccgcggggcccgccacgcacacgtggtgcgacctctgtggcgacttcatctggggcgtcgtgcgcaaaggcctgcagtgcgcgcgacgagcctgtggagtgggagacacctgacctttctcaagctgagattgagcagaagatcaaggagtacaatgcccagatcaacagcaacctcttcatgagcttgaacaaggacggttcttacacaggcttcatcaaggttcagctgaagctggtgcgccctgtctctgtgccctccagcaagaagccaccctccttgcaggatgcccggcggggcccaggacggggcacaagtgtcaggcgccgcacttccttttacctgcccaaggatgctgtcaagcacctgcatgtgctgtcacgcacaagggcacgtgaagtcattgaggccctgctgcgaaagttcttggtggtggatgacccccgcaagtttgcactctttgagcgcgctgagcgtcacggccaagtgtacttgcggaagctgttggatgatgagcagcccctgcggctgcggctcctggcagggcccagtgacaaggccctgagctttgtcctgaaggaaaatgactctggggaggtgaactgggacgccttcagcatgcctgaactacataacttcctacgtatcctgcagcgggaggaggaggagcacctccgccagatcctgcagaagtactcctattgccgccagaagatccaagaggccctgcacgcctgcccccttgggtgacctcttgtacccccaggtggaaggcagacagcaggcagcgccaagtgcgtgccgtgtgagtgtgacagggccagtggggcctgtggaatgagtgtgcatggaggccctcctgtgctgggggaatgagcccagagaacagcgaagtagcttgctccctgtgtccacctgtgggtgtagccaggtatggctctgcacccctctgccctcattactgggccttagtgggccagggctgccctgagaagctgctccaggcctgcagcaggagtggtgcagacagaagtctcctcaatttttgtctcagaagtgaaaatcttggagaccctgcaaacagaacagggtcatgtttgcaggggtgacggccctcatctatgaggaaaggttttggatcttgaatgtggtctcaggatatccttatcagagctaagggtgggtgctcagaataaggcaggcattgaggaagagtcttggtttctctctacagtgccaactcctcacacaccctgaggtcagggagtgctggctcacagtacagcatgtgccttaatgcttcatatgaggaggatgtccctgggccagggtctgtgtgaatgtgggcactggcccaggttcataccttatttgctaatcaaagccagggtctctccctcaggtgttttttatgaagtgcgtgaatgtatgtaatgtgtggtggcctcagctgaatgcctcctgtggggaaaggggttggggtgacagtcatcatcagggcctggggcctgagagaattggctcaataaagatttcaagatcctcctgc

SEQ ID NO: 2243 - protein, 189 aa, Homosapiens; identical to SEQ ID NO: 225

SEQ ID NO: 2244 - DNA, 1748 bp, Homosapiens
gcgcggctctcctcagctccttcccgccgcccagtctggatcctgggggaggcgctgaagtcggggcccgccctgtggccccgcccggcccgcgcttgctagcgcccaaagccagcgaagcacgggcccaaccgggccatgtcgggggagcctgagctcattgagctgcgggagctggcacccgctgggcgcgctgggaagggccgcacccggctggagcgtgccaacgcgctgcgcatcgcgcggggcaccgcgtgcaaccccacacggcagctggtccctggccgtggccaccgcttccagcccgcggggcccgccacgcacacgtggtgcgacctctgtggcgacttcatctggggcgtcgtgcgcaaaggcctgcagtgcgcgcaacaaggacggttcttacacaggcttcatcaaggttcagctgaagctggtgcgccctgtctctgtgccctccagcaagaagccaccctccttgcaggatgcccggcggggcccaggacggggcacaagtgtcaggcgccgcacttccttttacctgcccaaggatgctgtcaagcacctgcatgtgctgtcacgcacaagggcacgtgaagtcattgaggccctgctgcgaaagttcttggtggtggatgacccccgcaagtttgcactctttgagcgcgctgagcgtcacggccaagtgtacttgcggaagctgttggatgatgagcagcccctgcggctgcggctcctggcagggcccagtgacaaggccctgagctttgtcctgaaggaaaatgactctggggaggtgaactgggacgccttcagcatgcctgaactacataacttcctacgtatcctgcagcgggaggaggaggagcacctccgccagatcctgcagaagtactcctattgccgccagaagatccaagaggccctgcacgcctgcccccttgggtgacctcttgtacccccaggtggaaggcagacagcaggcagcgccaagtgcgtgccgtgtgagtgtgacagggccagtggggcctgtggaatgagtgtgcatggaggccctcctgtgctgggggaatgagcccagagaacagcgaagtagcttgctccctgtgtccacctgtgggtgtagccaggtatggctctgcacccctctgccctcattactgggccttagtgggccagggctgccctgagaagctgctccaggcctgcagcaggagtggtgcagacagaagtctcctcaatttttgtctcagaagtgaaaatcttggagaccctgcaaacagaacagggtcatgtttgcaggggtgacggccctcatctatgaggaaaggttttggatcttgaatgtggtctcaggatatccttatcagagctaagggtgggtgctcagaataaggcaggcattgaggaagagtcttggtttctctctacagtgccaactcctcacacaccctgaggtcagggagtgctggctcacagtacagcatgtgccttaatgcttcatatgaggaggatgtccctgggccagggtctgtgtgaatgtgggcactggcccaggttcataccttatttgctaatcaaagccagggtctctccctcaggtgttttttatgaagtgcgtgaatgtatgtaatgtgtggtggcctcagctgaatgcctcctgtggggaaaggggttggggtgacagtcatcatcagggcctggggcctgagagaattggctcaataaagatttcaagatcctcctgc

SEQ ID NO: 2245 - protein, 152 aa, Homosapiens; identical to SEQ ID NO: 235

SEQ ID NO: 2246 - DNA, 611 bp, Homosapiens
gcgcggctctcctcagctccttcccgccgcccagtctggatcctgggggaggcgctgaagtcggggcccgccctgtggccccgcccggcccgcgcttgctagcgcccaaagccagcgaagcacgggcccaaccgggccatgtcgggggagcctgagctcattgagctgcgggagctggcacccgctgggcgcgctgggaagggccgcacccggctggagcgtgccaacgcgctgcgcatcgcgcggggcaccgcgtgcaaccccacacggcagctggtccctggccgtggccaccgcttccagcccgcggggcccgccacgcacacgtggtgcgacctctgtggcgacttcatctggggcgtcgtgcgcaaaggcctgcagtgcgcgcattgcaagttcacctgccactaccgctgccgcgcgctcgtctgcctggactgttgcgggccccgggacctgggctgggaacccgcggtggagcgggacacgaacgtggtgagcgcggggccgagggcgtatgggaagggcgaggatgggcaggccacagtgcaggcattctcgagggctgcctgggtgccgcgcgcaaggagcgttctaattgccgatttccc

SEQ ID NO: 2247 - protein, 156 aa, Homosapiens
MSGEPELIELRELAPAGRAGKGRTRLERANALRIARGTACNPTRQLVPGRGHRFQPAGPATHTWCDLCGDFIWGVVRKGLQCAHCKFTCHYRCRALVCLDCCGPRDLGWEPAVERDTNVVSAGPRAYGKGEDGQATVQAFSRAAWVPRARSVLIAD

SEQ ID NO: 2248 - DNA, 250 bp, Homosapiens
caaccgtcccgcaactgtcctgtcccagactttggcaccgtcggggtccgtcgtccccgaatgtgacagcatccccaccccggctgctgcccaggatccgccggaccccggcctcgatatgggagacttcctgccccacccagtgggtaggccaagtgtgttgcttcagcaaaccggaccaggagggccagggccggatgtggggaccctcttcctctagcacagtaaagctggcctccagaaacacggg

SEQ ID NO: 2249 - protein, 33 aa, Homosapiens
MGDFLPHPVGRPSVLLQQTGPGGPGPDVGTLFL

SEQ ID NO: 2250 - DNA, 2900 bp, Homosapiens
aaaaagatgtgatcaagagtgagttgggttggaggcagggactgctctggattaaatggccaagaaaggccatgctgaggtgtaaactgagccctgaaggaaaagtattccaggcaaagtgcaaaactctgaggcaaaaacctctttggaatgtatgagggaggttcagggaagcaaggaggagaggaaagaatccaagtcccgaggtacaggagaggacaagaagtagatcttgcagagctgctagtaagcggcatcccacctaacattttgagggccagaagtagccacagagcccctctcacgcaagggagtaatgtctatatgctttttttttttttttgagacggtctccctttgttgtccaggctggagtgcggtggtgcaatcttgcctcactgcaaactccacctcctgtgctcaagcgattctcctgcctcagtctcccatgtagctgggactacaggtgtgtgctaccacacctgtctaatttttgtacttttagtagagacagggtttcaccatgttgcccaggctggtctcaaactcctgacctcaagtgatccgcctgcctcggcctcccaaagtgctgagattacaggtgtcagccaccgcgcccggcctgatatacacttttaaggctccgggctgtccatgaggatcaagcgtggaagtaggtctacagaaaaggctgccgcagttcacccatgacaggtgatgacagtctggacatagggaggatggagagaagtcgtgcgccctggcagtatttcaggagccaactagtggagccgggacgcgagaaatagaggaaccaagaagccataaggaggaggaagagcagcgggtaggtcaagatgccacagccgcaggaggggctgttggggtcggggttacccccatccctgtgcaggcggacttggcgtctgaggacagagtccagaccacaaggatctggagctcaggagagactcgtgggccacagcccgagaaagcgctgggaatccaaatactatggcgattggcagtcgcgtaggcgaggcgggctagagacccgcccggatttaggcgcgagccacctccaggggcggggcccaggccgcactgcgcaggcgcggctaacccgtttccatggctgcgagaactgacgctccccaaccgtcccgcaactgtcctgtcccagactttggcaccgtcggggtccgtcgtccccgaatgtgacagcatccccaccccggctgctgcccaggatccgccggaccccggcctcgatatgggagacctggaactgctgctgcccggggaagctgaagtgctggtgcggggtctgcgcagcttcccgctacgcgagatgggctccgaagggtggaaccagcagcatgagaacctggagaagctgaacatgcaagccatcctcgatgccacagtcagccagggcgagcccattcaggagctgctggtcacccatgggaaggtcccaacactggtggaggagctgatcgcagtggagatgtggaagcagaaggtgttccctgtgttctgcagggtggaggacttcaagccccagaacaccttccccatctacatggtggtgcaccacgaggcctccatcatcaacctcttggagacagtgttcttccacaaggaggtgtgtgagtcagcagaagacactgtcttggacttggtagactattgccaccgcaaactgaccctgctggtggcccagagtggctgtggtggcccccctgagggggagggatcccaggacagcaaccccatgcaggagctgcagaagcaggcagagctgatggaatttgagattgcactgaaggccctctcagtactacgctacatcacagactgtgtggacagcctctctctcagcaccttgagccgtatgcttagcacacacaacctgccctgcctcctggtggaactgctggagcatagtccctggagccggcgggaaggaggcaagctgcagcagttcgagggcagccgttggcatactgtggccccctcagagcagcaaaagctgagcaagttggacgggcaagtgtggatcgccctgtacaacctgctgctaagccctgaggctcaggcgcgctactgcctcacaagttttgccaagggacggctactcaagcttcgggccttcctcacagacacactgctggaccagctgcccaacctggcccacttgcagagtttcctggcccatctgaccctaactgaaacccagcctcctaagaaggacctggtgttggaacagatcccagaaatctgggagcggctggagcgagaaaacagaggcaagtggcaggcaattgccaagcaccagctccagcatgtgttcagcccctcagagcaggacctgcggctgcaggcgcgaaggtgggctgagacctacaggctggatgtgctagaggcagtggctccagagcggccccgctgtgcttactgcagtgcagaggcttctaagcgctgctcacgatgccagaatgagtggtattgctgcagggagtgccaagtcaagcactgggaaaagcatggaaagacttgtgtcctggcagcccagggtgacagagccaaatgagggctgcagttgctgagggccgaccacccatgccaagggaatccacccagaatgcacccctgaacctcaagatcacggtccagcctctgccggagccccagtctccgcagtggagagcagagcgggcggtaaagctgctgaccgatctccctcctcctcaccccaagtgaaggctcgagacttcctgccccacccagtgggtaggccaagtgtgttgcttcagcaaaccggaccaggagggccagggccggatgtggggaccctcttcctctagcacagtaaagctggcctccagaaacacggg

SEQ ID NO: 2251 - protein, 440 aa, Homosapiens; identical to SEQ ID NO: 237

SEQ ID NO: 2252 - DNA, 1778 bp, Homosapiens
tgcactgaaggccctctcagtactacgctacatcacagactgtgtggacaggtgagcagtccgactgggcctgggcctactgtggagggctggaagaccgggcctgtagcctgcctctactcacctccttcacaacgtccctgcccctagcctctctctcagcaccttgagccgtatgcttagcacacacaacctgccctgcctcctggtggaactgctggagcatagtccctggagccggcgggaaggaggtagggtcctcccccaccagcctaagccccaggctactgcttcagggtatctttttgatagaggggggcagcttgcacacacgaagacaaaccctgtccccaagcccactgaggataccaggatgcctcagccaaggttggcctagacctgagctctgcagcaggccaggcccatgtgtccactactgaggctcaccctgctctggggtcagcagccctatagcctgggcaagtcctgcagcccaggttctcccattcccaggcagtggtcagtctcccagcccccacagctggctcacttgaagagaattcaacgtctgcacccagtgtgctggttcctctccccaggcaagctgcagcagttcgagggcagccgttggcatactgtggccccctcagagcagcaaaagctgagcaagttggacgggcaagtgtggatcgccctgtacaacctgctgctaagccctgaggctcaggcgcgctactgcctcacaagttttgccaagggacggctactcaaggtcagactccctccgcaccagcccccacagccccagtaccgccctccccatcctaccccgactgcgtccctgctgtttatctttgcccacccacctcaaccccagtgctcttttcagtccttgggcctcaggtgacacaccagctagtgggacatgggcccccacaggcattctcagcccaacccagccccttccttttccttggccccctggccagcacctgcatcacactggcctccactggacacccttgcagcttcgggccttcctcacagacacactgctggaccagctgcccaacctggcccacttgcagagtttcctggcccatctgaccctaactgaaacccagcctcctaagaaggacctggtgttggaacagatcccagaaatctgggagcggctggagcgagaaaacagaggcaagtggcaggcaattgccaagcaccagctccagcatgtgttcagcccctcagagcaggacctgcggctgcaggcgcgaaggtgggctgagacctacaggctggatgtgctagaggcagtggctccagagcggccccgctgtgcttactgcagtgcagaggcttctaagcgctgctcacgatgccagaatgagtggtattgctgcagggagtgccaagtcaagcactgggaaaagcatggaaagacttgtgtcctggcagcccagggtgacagagccaaatgagggctgcagttgctgagggccgaccacccatgccaagggaatccacccagaatgcacccctgaacctcaagatcacggtccagcctctgccggagccccagtctccgcagtggagagcagagcgggcggtaaagctgctgaccgatctccctcctcctcaccccaagtgaaggctcgagacttcctgccccacccagtgggtaggccaagtgtgttgcttcagcaaaccggaccaggagggccagggccggatgtggggaccctcttcctctagcacagtaaagctggcctccagaaaca

SEQ ID NO: 2253 - protein, 36 aa, Homosapiens
MSGIAAGSAKSSTGKSMERLVSWQPRVTEPNEGCSC

SEQ ID NO: 2254 - DNA, 1757 bp, Homosapiens
cgtttccatggctgcgagaactgacgctccccaaccgtcccgcaactgtcctgtcccagactttggcaccgtcggggtccgtcgtccccgaatgtgacagcatccccaccccggctgctgcccaggatccgccggaccccggcctcgatatgggagacctggaactgctgctgcccggggaagctgaagtgctggtgcggggtctgcgcagcttcccgctacgcgagatgggctccgaagggtggaaccagcagcatgagaacctggagaagctgaacatgcaagccatcctcgatgccacagtcagccagggcgagcccattcaggagctgctggtcacccatgggaaggtcccaacactggtggaggagctgatcgcagtggagatgtggaagcagaaggtgttccctgtgttctgcagggtggaggacttcaagccccagaacaccttccccatctacatggtggtgcaccacgaggcctccatcatcaacctcttggagacagtgttcttccacaaggaggtgtgtgagtcagcagaagacactgtcttggacttggtagactattgccaccgcaaactgaccctgctggtggcccagagtggctgtggtggcccccctgagggggagggatcccaggacagcaaccccatgcaggagctgcagaagcaggcagagctgatggaatttgagattgcactgaaggccctctcagtactacgctacatcacagactgtgtggacaggcagtggtcagtctcccagcccccacagctggctcacttgaagagaattcaacgtctgcacccagtgtgctggttcctctccccaggcaagctgcagcagttcgagggcagccgttggcatactgtggccccctcagagcagcaaaagctgagcaagttggacgggcaagtgtggatcgccctgtacaacctgctgctaagccctgaggctcaggcgcgctactgcctcacaagttttgccaagggacggctactcaagcttcgggccttcctcacagacacactgctggaccagctgcccaacctggcccacttgcagagtttcctggcccatctgaccctaactgaaacccagcctcctaagaaggacctggtgttggaacagatcccagaaatctgggagcggctggagcgagaaaacagaggcaagtggcaggcaattgccaagcaccagctccagcatgtgttcagcccctcagagcaggacctgcggctgcaggcgcgaaggtgggctgagacctacaggctggatgtgctagaggcagtggctccagagcggccccgctgtgcttactgcagtgcagaggcttctaagcgctgctcacgatgccagaatgagtggtattgctgcagggagtgccaagtcaagcactgggaaaagcatggaaagacttgtgtcctggcagcccagggtgacagagccaaatgagggctgcagttgctgagggccgaccacccatgccaagggaatccacccagaatgcacccctgaacctcaagatcacggtccagcctctgccggagccccagtctccgcagtggagagcagagcgggcggtaaagctgctgaccgatctccctcctcctcaccccaagtgaaggctcgagacttcctgccccacccagtgggtaggccaagtgtgttgcttcagcaaaccggaccaggagggccagggccggatgtggggaccctcttcctctagcacagtaaagctggcctccagaaaca

SEQ ID NO: 2255 - protein, 435 aa, Homosapiens
MGDLELLLPGEAEVLVRGLRSFPLREMGSEGWNQQHENLEKLNMQAILDATVSQGEPIQELLVTHGKVPTLVEELIAVEMWKQKVFPVFCRVEDFKPQNTFPIYMVVHHEASIINLLETVFFHKEVCESAEDTVLDLVDYCHRKLTLLVAQSGCGGPPEGEGSQDSNPMQELQKQAELMEFEIALKALSVLRYITDCVDRQWSVSQPPQLAHLKRIQRLHPVCWFLSPGKLQQFEGSRWHTVAPSEQQKLSKLDGQVWIALYNLLLSPEAQARYCLTSFAKGRLLKLRAFLTDTLLDQLPNLAHLQSFLAHLTLTETQPPKKDLVLEQIPEIWERLERENRGKWQAIAKHQLQHVFSPSEQDLRLQARRWAETYRLDVLEAVAPERPRCAYCSAEASKRCSRCQNEWYCCRECQVKHWEKHGKTCVLAAQGDRAK

SEQ ID NO: 2256 - DNA, 596 bp, Homosapiens
ggtaatgaaggtccaaggtgcaagagagaagtcaggaaggatactcatgggtctggaatagtttaggggcccagcagtgtttggggatatcagggttgagctgagccggggatgggagggttgccaggcaaaggtaggcccatctcatccctgtcctttaccctacccttcaaaggtcccaacactggtggaggagctgatcgcagtggagatgtggaagcagaaggtgttccctgtgttctgcagggtggaggacttcaagccccagaacaccttccccatctacatggtggtgcaccacgaggcctccatcatcaacctcttggagacagtgttcttccacaaggaggtgtgtgagtcagcagaagacactgtcttggacttggtagactattgccaccgcaaactgaccctgctggtggcccagagtggctgtggtggcccccctgagggggagggatcccaggacagcaaccccatgcaggtgggttgaggttacctagggttgtgaaagcctaggtctgggttccccaaggcctgcgcaggtgagggtggcccagcgtgaacactgtgtgacctcccaggagctgcagaag

SEQ ID NO: 2257 - protein, 93 aa, Homosapiens
MWKQKVFPVFCRVEDFKPQNTFPIYMVVHHEASIINLLETVFFHKEVCESAEDTVLDLVDYCHRKLTLLVAQSGCGGPPEGEGSQDSNPMQVG

SEQ ID NO: 2258 - DNA, 465 bp, Homosapiens
atcctgccctacattgatgggttccgccacatccagaagatttcagcagaggcagatgtggagctcaacctggtgcgcattgctatccagaacctgctgtactacggcgttgtgacactggtgtccatcctccaggaagctgatccagttcgggcttatgaagaacctcatcaggcgactacagaagtatcctgtgcgggtgactcgggaagagcagagccaccctgcccggctttatacaggctgccacagctatgacgagatctgctgcaagacaggcatgagctaccatgagctggatgagcggcttgaaaatgaccccaacatcatcatctgctggaagtgaggctggtagtgactggatggacacattgctgtgggtagtccctcctactaggaggcttgtcatactgtctagaggttgactcttagttctgtaaataaagacatccatttcaaacagcc

SEQ ID NO: 2259 - protein, 62 aa, Homosapiens [sequence omitted]

SEQ ID NO: 2260 - DNA, 2314 bp, Homosapiens
agttacagcgtgaatcccttagcgcaccgcctccccaagtgctgccagcatgctgcccctccacgctagggacttgcctgcctctgccgcagcgcagatctgatgcggtggtttcctccaaagaaagcgggatactccgggccctgccgcgcgcaccgccgctccgtcacggagccgctttacttccgggtgcgacgtctacccacccaggacttcctgggacgagccgtcccccgccccagccacgcctctgagtcgcgctgcgcaggcgccattgggcagagggattggcaagcttgcgtgccccagcgacacaggcctcgaggctgtctctgacaagtgttcacaggaggtggggacgcctctgcgcgaggaacgaggagctacgggcctgggcccggttattgccatgggcagcggctgccgcatcgaatgcatattcttcagcgagttccaccccacgctgggacccaagatcacctatcaggtgccacccgggctcgcgggactgggcgggaagagggacgttctcgagagctcaactggctgcctgaaggcagtagtttcccgtgctgcacgcaggcatgctgcttcattcgcagacaactgtgaggctagaggatagtcagacccaggcccccggctcccaatgtggcagggaagacatacgtcacattggcagtgtttgtaggatatcgggctgtagggatccggttggggggttccaggtcccacagaaggtgagttgggtgacccatgagtatccctgaactgagtgaagagtaaatgatgcataggaagtttaggtaaggcaggagaaagtgttccaggtagagggaacagcatatgcagaagccaggaaggaggtgagatcatagcgtatgtttggaaacagaaagaagtaataggcctgagtggatgggagagaggggaacgctggagaagaggacttgggcttggggggcatgaggaggtcaccatttgtactacacccagtacagatgtccactgaggggcccattgccactcccctccccaggtccctgaagacttcatctcccgagagctgtttgacacagtccaagtgtacatcatcaccaagccagagctgcagaacaagcttatcactgtcacagctatggaaaagaagctgatcggctgtcctgtgtgcatcgaacacaagaagtacagccgcaatgctctcctcttcaacctgggcttcgtgtgtgatgcccaggccaagacctgcgccctcgagcccattgttaaaaagctggctggctatctgaccacactagagctagagagcagcttcgtgtccatggaggagagcaagcagaagttggtgcccatcatgaccatcttgctggaggagctaaatgcctcaggccggtgcactctgcccattgatgagtccaacaccatccacttgaaggtgattgagcagcggccagaccctccggtggcccaggagtatgatgtacctgtctttaccaaagacaaggaggatttcttcaactcacagtgggacctcactacacaacaagtatgccatccctccctgggtatcatcacctggggctggccacagccctggcctcatcctgtttcttctgaccttgtcccactctgcccagatcctgccctacattgatgggttccgccacatccagaagatttcagcagaggcagatgtggagctcaacctggtgcgcattgctatccagaacctgctgtactacggcgttgtgacactggtgtccatcctccagtactccaatgtatactgcccaacgcccaaggtccaggacctggtagatgacaagtccctgcaagaggcatgtctatcctacgtgaccaagcaagggcacaagagggccagtctccgggatgtgttccagctatactgcagcctgagccctggcactaccgtgcgagacctcattggccgccacccccagcagctgcagcatgttgatgaacggaagctgatccagttcgggcttatgaagaacctcatcaggcgactacagaagtatcctgtgcgggtgactcgggaagagcagagccaccctgcccggctttatacaggctgccacagctatgacgagatctgctgcaagacaggcatgagctaccatgagctggatgagcggcttgaaaatgaccccaacatcatcatctgctggaagtgaggctggtagtgactggatggacacattgctgtgggtagtccctcctactaggaggcttgtcatactgtctagaggttgactcttagttctgtaaataaagacatccatttcaaacagcc

SEQ ID NO: 2261 - protein, 239 aa, Homosapiens
MMYLSLPKTRRISSTHSGTSLHNKYAIPPWVSSPGAGHSPGLILFLLTLSHSAQILPYIDGFRHIQKISAEADVELNLVRIAIQNLLYYGVVTLVSILQYSNVYCPTPKVQDLVDDKSLQEACLSYVTKQGHKRASLRDVFQLYCSLSPGTTVRDLIGRHPQQLQHVDERKLIQFGLMKNLIRRLQKYPVRVTREEQSHPARLYTGCHSYDEICCKTGMSYHELDERLENDPNIIICWK

SEQ ID NO: 2262 - DNA, 2514 bp, Homosapiens
agttacagcgtgaatcccttagcgcaccgcctccccaagtgctgccagcatgctgcccctccacgctagggacttgcctgcctctgccgcagcgcagatctgatgcggtggtttcctccaaagaaagcgggatactccgggccctgccgcgcgcaccgccgctccgtcacggagccgctttacttccgggtgcgacgtctacccacccaggacttcctgggacgagccgtcccccgccccagccacgcctctgagtcgcgctgcgcaggcgccattgggcagagggattggcaagcttgcgtgccccagcgacacaggcctcgaggctgtctctgacaagtgttcacaggaggtggggacgcctctgcgcgaggaacgaggagctacgggcctgggcccggttattgccatgggcagcggctgccgcatcgaatgcatattcttcagcgagttccaccccacgctgggacccaagatcacctatcaggtgccacccgggctcgcgggactgggcgggaagagggacgttctcgagagctcaactggctgcctgaaggcagtagtttcccgtgctgcacgcaggcatgctgcttcattcgcagacaactgtgaggctagaggatagtcagacccaggcccccggctcccaatgtggcagggaagacatacgtcacattggcagtgtttgtaggatatcgggctgtagggatccggttggggggttccaggtcccacagaaggtgagttgggtgacccatgagtatccctgaactgagtgaagagtaaatgatgcataggaagtttaggtaaggcaggagaaagtgttccaggtagagggaacagcatatgcagaagccaggaaggaggtgagatcatagcgtatgtttggaaacagaaagaagtaataggcctgagtggatgggagagaggggaacgctggagaagaggacttgggcttggggggcatgaggaggtcaccatttgtactacacccagtacagatgtccactgaggggcccattgccactcccctccccaggtccctgaagacttcatctcccgagagctgtttgacacagtccaagtgtacatcatcaccaagccagagctgcagaacaagcttatcactgtcacagctatggaaaagaagctgatcggctgtcctgtgtgcatcgaacacaagaagtacagccgcaatgctctcctcttcaacctgggcttcgtgtgtgatgcccaggccaagacctgcgccctcgagcccattgttaaaaagctggctggctatctgaccacactagaggtctgcaatgagatgggcttgggtttaccgacaggcagagttggggaaggtgttcccatgtctccaaagtcccccaaacctgggaccctgcaaaccagctcaggactcagggcagccaaccagccaggggtcctgggatgtgcccaccatgctttccatgctctgtctagctagagagcagcttcgtgtccatggaggagagcaagcagaagttggtgcccatcatgaccatcttgctggaggagctaaatgcctcaggccggtgcactctgcccattgatgagtccaacaccatccacttgaaggtgattgagcagcggccagaccctccggtggcccaggagtatgatgtacctgtctttaccaaagacaaggaggatttcttcaactcacagtgggacctcactacacaacaaatcctgccctacattgatgggttccgccacatccagaagatttcagcagaggcagatgtggagctcaacctggtgcgcattgctatccagaacctgctgtgagtgggcctacagtcatacctgggacaaggtcaccagccagggaagacctcaggggccctgggtgtgagggttgggaaggcatggtcctcagaagctgagcacagctctctctctcaggtactacggcgttgtgacactggtgtccatcctccagtactccaatgtatactgcccaacgcccaaggtccaggacctggtagatgacaagtccctgcaagaggcatgtctatcctacgtgaccaagcaagggcacaagagggccagtctccgggatgtgttccagctatactgcagcctgagccctggcactaccgtgcgagacctcattggccgccacccccagcagctgcagcatgttgatgaacggaagctgatccagttcgggcttatgaagaacctcatcaggcgactacagaagtatcctgtgcgggtgactcgggaagagcagagccaccctgcccggctttatacaggctgccacagctatgacgagatctgctgcaagacaggcatgagctaccatgagctggatgagcggcttgaaaatgaccccaacatcatcatctgctggaagtgaggctggtagtgactggatggacacattgctgtgggtagtccctcctactaggaggcttgtcatactgtctagaggttgactcttagttctgtaaataaagacatccatttcaaacagcc

SEQ ID NO: 2263 - protein, 108 aa, Homosapiens
MEESKQKLVPIMTILLEELNASGRCTLPIDESNTIHLKVIEQRPDPPVAQEYDVPVFTKDKEDFFNSQWDLTTQQILPYIDGFRHIQKISAEADVELNLVRIAIQNLL

SEQ ID NO: 2264 - DNA, 1741 bp, Homosapiens
gtcgccggcagtagagccagctgggagggcgcggagcactatggaaattgtagttccctgctgcggtcccagttacagcgtgaatcccttagcgcaccgcctccccaagtgctgccagcatgctgcccctccacgctagggacttgcctgcctctgccgcagcgcagatctgatgcggtggtttcctccaaagaaagcgggatactccgggccctgccgcgcgcaccgccgctccgtcacggagccgctttacttccgggtgcgacgtctacccacccaggacttcctgggacgagccgtcccccgccccagccacgcctctgagtcgcgctgcgcaggcgccattgggcagagggattggcaagcttgcgtgccccagcgacacaggcctcgaggctgtctctgacaagtgttcacaggaggtggggacgcctctgcgcgaggaacgaggagctacgggcctgggcccggttattgccatgggcagcggctgccgcatcgaatgcatattcttcagcgagttccaccccacgctgggacccaagatcacctatcaggtccctgaagacttcatctcccgagagctgtttgacacagtccaagtgtacatcatcaccaagccagagctgcagaacaagcttatcactgtcacagctatggaaaagaagctgatcggctgtcctgtgtgcatcgaacacaagaagtacagccgcaatgctctcctcttcaacctgggcttcgtgtgtgatgcccaggccaagacctgcgccctcgagcccattgttaaaaagctggctggctatctgaccacactagagctagagagcagcttcgtgtccatggaggagagcaagcagaagttggtgcccatcatgaccatcttgctggaggagctaaatgcctcaggccggtgcactctgcccattgatgagtccaacaccatccacttgaaggtgattgagcagcggccagaccctccggtggcccaggagtatgatgtacctgtctttaccaaagacaaggaggatttcttcaactcacagtgggacctcactacacaacaaatcctgccctacattgatgggttccgccacatccagaagatttcagcagaggcagatgtggagctcaacctggtgcgcattgctatccagaacctgctgtactacggcgttgtgacactggtgtccatcctccagtactccaatgtatactgcccaacgcccaaggtccaggacctggtagatgacaagtccctgcaagaggcatgtctatcctacgtgaccaagcaagggcacaagagggccagtctccgggatgtgttccagctatactgcagcctgagccctggcactaccgtgcgagacctcattggccgccacccccagcagctgcagcatgttgatgaacggaagctgatccagttcgggcttatgaagaacctcatcaggcgactacagaagtatcctgtgcgggtgactcgggaagagcagagccaccctgcccggctttatacaggctgccacagctatgacgagatctgctgcaagacaggcatgagctaccatgagctggatgagcggcttgaaaatgaccccaacatcatcatctgctggaagtgaggctggtagtgactggatggacacattgctgtgggtagtccctcctactaggaggcttgtcatactgtctagaggttgactcttagttctgtaaataaagacatccatttcaaacagcc

SEQ ID NO: 2265 - protein, 380 aa, Homosapiens; identical to SEQ ID NO: 239

SEQ ID NO: 2266 - DNA, 1443 bp, Homosapiens
agagggattggcaagcttgcgtgccccagcgacacaggcctcgaggctgtctctgacaagtgttcacaggaggtggggacgcctctgcgcgaggaacgaggagctacgggcctgggcccggttattgccatgggcagcggctgccgcatcgaatgcatattcttcagcgagttccaccccacgctgggacccaagatcacctatcaggtccctgaagacttcatctcccgagagctgtttgacacagtccaagtgtacatcatcaccaagccagagctgcagaacaagcttatcactgtctagagagcagcttcgtgtccatggaggagagcaagcagaagttggtgcccatcatgaccatcttgctggaggagctaaatgcctcaggccggtgcactctgcccattgatgagtccaacaccatccacttgaaggtgattgagcagcggccagaccctccggtggcccaggagtatgatgtacctgtctttaccaaagacaaggaggatttcttcaactcacagtgggacctcactacacaacaaatcctgccctacattgatgggttccgccacatccagaagatttcagcagaggcagatgtggagctcaacctggtgcgcattgctatccagaacctgctgtactacggcgttgtgacactggtgtccatcctccagtactccaatgtatactgcccaacgcccaaggtccaggacctggtagatgacaagtccctgcaagaggcatgtctatcctacgtgaccaagcaagggcacaagagggccagtctccgggatgtgttccagctatactgcagcctgagccctggcactaccgtgcgagacctcattggccgccacccccagcagctgcagcatgttgatgaacggtcagaggagaatttgctggggcatttgggagttacctgagggaagctagaccctttatgtctctcaggagccctggatcatggggcactgccaatccaagcaggcttcctggagatgatgggctacagagacaaaattgaagggagactacaggaaagggttggcctgcctgaaagaaggcctggccagggcgtcaccccgtcctctgatcctcaccctaggaagctgatccagttcgggcttatgaagaacctcatcaggcgactacagaagtatcctgtgcgggtgactcgggaagagcagagccaccctgcccggctttatacaggctgccacagctatgacgagatctgctgcaagacaggcatgagctaccatgagctggatgagcggcttgaaaatgaccccaacatcatcatctgctggaagtgaggctggtagtgactggatggacacattgctgtgggtagtccctcctactaggaggcttgtcatactgtctagaggttgactcttagttctgtaaataaagacatccatttcaaacagc

SEQ ID NO: 2267 - protein, 203 aa, Homosapiens
MEESKQKLVPIMTILLEELNASGRCTLPIDESNTIHLKVIEQRPDPPVAQEYDVPVFTKDKEDFFNSQWDLTTQQILPYIDGFRHIQKISAEADVELNLVRIAIQNLLYYGVVTLVSILQYSNVYCPTPKVQDLVDDKSLQEACLSYVTKQGHKRASLRDVFQLYCSLSPGTTVRDLIGRHPQQLQHVDERSEENLLGHLGVT

SEQ ID NO: 2268 - DNA, 2928 bp, Homosapiens
cagagggattggcaagcttgcgtgccccagcgacacaggcctcgaggctgtctctgacaagtgttcacaggaggtggggacgcctctgcgcgaggaacgaggagctacgggcctgggcccggttattgccatgggcagcggctgccgcatcgaatgcatattcttcagcgagttccaccccacgctgggacccaagatcacctatcaggtgccacccgggctcgcgggactgggcgggaagagggacgttctcgagagctcaactggctgcctgaaggcagtagtttcccgtgctgcacgcaggcatgctgcttcattcgcagacaactgtgaggctagaggatagtcagacccaggcccccggctcccaatgtggcagggaagacatacgtcacattggcagtgtttgtaggatatcgggctgtagggatccggttggggggttccaggtcccacagaaggtgagttgggtgacccatgagtatccctgaactgagtgaagagtaaatgatgcataggaagtttaggtaaggcaggagaaagtgttccaggtagagggaacagcatatgcagaagccaggaaggaggtgagatcatagcgtatgtttggaaacagaaagaagtaataggcctgagtggatgggagagaggggaacgctggagaagaggacttgggcttggggggcatgaggaggtcaccatttgtactacacccagtacagatgtccactgaggggcccattgccactcccctccccaggtccctgaagacttcatctcccgagagctgtttgacacagtccaagtgtacatcatcaccaagccagagctgcagaacaagcttatcactgtgtgagaccctagctcggggtgagcggtgggtggcaggggttgtcccaggaggaggaagggacaggcttgggggcctgactgtgttccaattatccagcacagctatggaaaagaagctgatcggctgtcctgtgtgcatcgaacacaagaagtacagccgcaatgctctcctcttcaacctgggcttcgtgtgtgatgcccaggccaagacctgcgccctcgagcccattgttaaaaagctggctggctatctgaccacactagaggtctgcaatgagatgggcttgggtttaccgacaggcagagttggggaaggtgttcccatgtctccaaagtcccccaaacctgggaccctgcaaaccagctcaggactcagggcagccaaccagccaggggtcctgggatgtgcccaccatgctttccatgctctgtctagctagagagcagcttcgtgtccatggaggagagcaagcagaagttggtgcccatcatgaccatcttgctggaggagctaaatgcctcaggccggtgcactctgcccattggtatggccagcctctgcaaggacagcagaggggtagaggagagatgggaaagtgaacccagctagtcagggagaagggcaagactcatgaacacattggtgggcaggaaatagccatgggctgaggtgcccatgtccagggtccaatgcatgatggagctgggactgggggtagggggaaagcagagctctccagctctgccccttgggcaattccttcccctttgtgggcctccgtttctcactccataaaaagagaaagattagccctacccagaggcacctgcttgccccaagggatgctgggaggcctggatggtaattgaggacctcttggaagaagtggcactgaggatatggatggggccccctgcagatgagtccaacaccatccacttgaaggtgattgagcagcggccagaccctccggtggcccaggagtatgatgtacctgtctttaccaaagacaaggaggatttcttcaactcacagtgggacctcactacacaacaaatcctgccctacattgatgggttccgccacatccagaagatttcagcagaggcagatgtggagctcaacctggtgcgcattgctatccagaacctgctgtgagtgggcctacagtcatacctgggacaaggtcaccagccagggaagacctcaggggccctgggtgtgagggttgggaaggcatggtcctcagaagctgagcacagctctctctctcaggtactacggcgttgtgacactggtgtccatcctccagtactccaatgtatactgcccaacgcccaaggtccaggacctggtagatgacaagtccctgcaagaggcatgtctatcctacgtgaccaagcaagggcacaagagggccagtctccgggatgtgttccagctatactgcagcctgagccctggcactaccgtgcgagacctcattggccgccacccccagcagctgcagcatgttgatgaacggtcagaggagaatttgctggggcatttgggagttacctgagggaagctagaccctttatgtctctcaggagccctggatcatggggcactgccaatccaagcaggcttcctggagatgatgggctacagagacaaaattgaagggagactacaggaaagggttggcctgcctgaaagaaggcctggccagggcgtcaccccgtcctctgatcctcaccctaggaagctgatccagttcgggcttatgaagaacctcatcaggcgactacagaagtatcctgtgcgggtgactcgggaagagcagagccaccctgcccggctttatacaggctgccacagctatgacgagatctgctgcaagacaggcatgagctaccatgagctggatgagcggcttgaaaatgaccccaacatcatcatctgctggaagtgaggctggtagtgactggatggacacattgctgtgggtagtccctcctactaggaggcttgtcatactgtctagaggttgactcttagttctgtaaataaagacatccatttcaaacagc

SEQ ID NO: 2269 - protein, 105 aa, Homosapiens [sequence omitted]

SEQ ID NO: 2270 - DNA, 3392 bp, Homosapiens
agttacagcgtgaatcccttagcgcaccgcctccccaagtgctgccagcatgctgcccctccacgctagggacttgcctgcctctgccgcagcgcagatctgatgcggtggtttcctccaaagaaagcgggatactccgggccctgccgcgcgcaccgccgctccgtcacggagccgctttacttccgggtgcgacgtctacccacccaggacttcctgggacgagccgtcccccgccccagccacgcctctgagtcgcgctgcgcaggcgccattgggcagagggattggcaagcttgcgtgccccagcgacacaggcctcgaggctgtctctgacaagtgttcacaggaggtggggacgcctctgcgcgaggaacgaggagctacgggcctgggcccggttattgccatgggcagcggctgccgcatcgaatgcatattcttcagcgagttccaccccacgctgggacccaagatcacctatcaggtgccacccgggctcgcgggactgggcgggaagagggacgttctcgagagctcaactggctgcctgaaggcagtagtttcccgtgctgcacgcaggcatgctgcttcattcgcagacaactgtgaggctagaggatagtcagacccaggcccccggctcccaatgtggcagggaagacatacgtcacattggcagtgtttgtaggatatcgggctgtagggatccggttggggggttccaggtcccacagaaggtgagttgggtgacccatgagtatccctgaactgagtgaagagtaaatgatgcataggaagtttaggtaaggcaggagaaagtgttccaggtagagggaacagcatatgcagaagccaggaaggaggtgagatcatagcgtatgtttggaaacagaaagaagtaataggcctgagtggatgggagagaggggaacgctggagaagaggacttgggcttggggggcatgaggaggtcaccatttgtactacacccagtacagatgtccactgaggggcccattgccactcccctccccaggtccctgaagacttcatctcccgagagctgtttgacacagtccaagtgtacatcatcaccaagccagagctgcagaacaagcttatcactgtcacagctatggaaaagaagctgatcggctgtcctgtgtgcatcgaacacaagaagtacagccgcaatgctctcctcttcaacctgggcttcgtgtgtgatgcccaggccaagacctgcgccctcgagcccattgttaaaaagctggctggctatctgaccacactagaggtctgcaatgagatgggcttgggtttaccgacaggcagagttggggaaggtgttcccatgtctccaaagtcccccaaacctgggaccctgcaaaccagctcaggactcagggcagccaaccagccaggggtcctgggatgtgcccaccatgctttccatgctctgtctagctagagagcagcttcgtgtccatggaggagagcaagcagaagttggtgcccatcatgaccatcttgctggaggagctaaatgcctcaggccggtgcactctgcccattggtatggccagcctctgcaaggacagcagaggggtagaggagagatgggaaagtgaacccagctagtcagggagaagggcaagactcatgaacacattggtgggcaggaaatagccatgggctgaggtgcccatgtccagggtccaatgcatgatggagctgggactgggggtagggggaaagcagagctctccagctctgccccttgggcaattccttcccctttgtgggcctccgtttctcactccataaaaagagaaagattagccctacccagaggcacctgcttgccccaagggatgctgggaggcctggatggtaattgaggacctcttggaagaagtggcactgaggatatggatggggccccctgcagatgagtccaacaccatccacttgaaggtgattgagcagcggccagaccctccggtggcccaggagtatgatgtacctgtctttaccaaagacaaggaggatttcttcaactcacagtgggacctcactacacaacaagtatgccatccctccctgggtatcatcacctggggctggccacagccctggcctcatcctgtttcttctgaccttgtcccactctgcccagatcctgccctacattgatgggttccgccacatccagaagatttcagcagaggcagatgtggagctcaacctggtgcgcattgctatccagaacctgctgtgagtgggcctacagtcatacctgggacaaggtcaccagccagggaagacctcaggggccctgggtgtgagggttgggaaggcatggtcctcagaagctgagcacagctctctctctcaggtactacggcgttgtgacactggtgtccatcctccaggtaggtgagttgggtttggttaagtggagagtggatcatgtggctggaccagaccagggctgtgtcagcttcccaagcccctcactcaggcccctatgccttctgctaccctctagtactccaatgtatactgcccaacgcccaaggtccaggacctggtagatgacaagtccctgcaagaggcatgtctatcctacgtgaccaagcaaggtagtggtgggttctgggggaagccatcttggggagggcagggccacatgatgagctgatccctggcacccacagggcacaagagggccagtctccgggatgtgttccagctatactgcagcctgagccctggcactaccgtgcgagacctcattggccgccacccccagcagctgcagcatgttgatgaacggtcagaggagaatttgctggggcatttgggagttacctgagggaagctagaccctttatgtctctcaggagccctggatcatggggcactgccaatccaagcaggcttcctggagatgatgggctacagagacaaaattgaagggagactacaggaaagggttggcctgcctgaaagaaggcctggccagggcgtcaccccgtcctctgatcctcaccctaggaagctgatccagttcgggcttatgaagaacctcatcaggcgactacagaagtatcctgtgcgggtgactcgggaagagcagagccaccctgcccggctttatacaggctgccacagctatgacgagatctgctgcaagacaggcatgagctaccatgagctggatgagcggcttgaaaatgaccccaacatcatcatctgctggaagtgaggctggtagtgactggatggacacattgctgtgggtagtccctcctactaggaggcttgtcatactgtctagaggttgactcttagttctgtaaataaagacatccatttcaaacagc

SEQ ID NO: 2271 - protein, 105 aa, Homosapiens [sequence omitted]

SEQ ID NO: 2272 - DNA, 845 bp, Homosapiens
cagggagaagggcaagactcatgaacacattggtgggcaggaaatagccatgggctgaggtgcccatgtccagggtccaatgcatgatggagctgggactgggggtagggggaaagcagagctctccagctctgccccttgggcaattccttcccctttgtgggcctccgtttctcactccataaaaagagaaagattagccctacccagaggcacctgcttgccccaagggatgctgggaggcctggatggtaattgaggacctcttggaagaagtggcactgaggatatggatggggccccctgcagatgagtccaacaccatccacttgaaggtgattgagcagcggccagaccctccggtggcccaggagtatgatgtacctgtctttaccaaagacaaggaggatttcttcaactcacagtgggacctcactacacaacaaatcctgccctacattgatgggttccgccacatccagaagatttcagcagaggcagatgtggagctcaacctggtgcgcattgctatccagaacctgctgtgagtgggcctacagtcatacctgggacaaggtcaccagccagggaagacctcaggggccctgggtgtgagggttgggaaggcatggtcctcagaagctgagcacagctctctctctcaggtactacggcgttgtgacactggtgtccatcctccaggtaggtgagttgggtttggttaagtggagagtggatcatgtggctggaccagaccagggctgtgtcagcttcccaagcccctcactcaggcccctatgccttctgctaccctctagtactccaatgtatactgcccaacgccc

SEQ ID NO: 2273 - protein, 99 aa, Homosapiens
MVIEDLLEEVALRIWMGPPADESNTIHLKVIEQRPDPPVAQEYDVPVFTKDKEDFFNSQWDLTTQQILPYIDGFRHIQKISAEADVELNLVRIAIQNLL

SEQ ID NO: 2274 - DNA, 968 bp, Homosapiens
ccgcctccccaagtgctgccagcatgctgcccctccacgctagggacttgcctgcctctgccgcagcgcagatctgatgcggtggtttcctccaaagaaagcgggatactccgggccctgccgcgcgcaccgccgctccgtcacggagccgctttacttccgggtgcgacgtctacccacccaggacttcctgggacgagccgtcccccgccccagccacgcctctgagtcgcgctgcgcaggcgccattgggcagagggattggcaagcttgcgtgccccagcgacacaggcctcgaggctgtctctgacaagtgttcacaggaggtggggacgcctctgcgcgaggaacgaggagctacgggcctgggcccggttattgccatgggcagcggctgccgcatcgaatgcatattcttcagcgagttccaccccacgctgggacccaagatcacctatcaggtccctgaagacttcatctcccgagagctgtttgacacagtccaagtgtacatcatcaccaagccagagctgcagaacaagcttatcactgtcacagctatggaaaagaagctgatcggctgtcctgtgtgcatcgaacacaagaagtacagccgcaatgctctcctcttcaacctgggcttcgtgtgtgatgcccaggccaagacctgcgccctcgagcccattgttaaaaagctggctggctatctgaccacactagagctagagagcagcttcgtgtccatggaggagagcaagcagaagttggtgcccatcatgaccatcttgctggaggagctaaatgcctcaggccggtgcactctgcccattgatgagtccaacaccatccacttgaaggtgattgagcagcggccagaccctccggtggcccaggagtatgatgtacctgtctttaccaaagacaaggaggatttcttcaactcacagtgggacctcactacacaacaa

SEQ ID NO: 2275 - protein, 194 aa, Homosapiens
MGSGCRIECIFFSEFHPTLGPKITYQVPEDFISRELFDTVQVYIITKPELQNKLITVTAMEKKLIGCPVCIEHKKYSRNALLFNLGFVCDAQAKTCALEPIVKKLAGYLTTLELESSFVSMEESKQKLVPIMTILLEELNASGRCTLPIDESNTIHLKVIEQRPDPPVAQEYDVPVFTKDKEDFFNSQWDLTTQ

SEQ ID NO: 2276 - DNA, 1511 bp, Homosapiens
ccgcctccccaagtgctgccagcatgctgcccctccacgctagggacttgcctgcctctgccgcagcgcagatctgatgcggtggtttcctccaaagaaagcgggatactccgggccctgccgcgcgcaccgccgctccgtcacggagccgctttacttccgggtgcgacgtctacccacccaggacttcctgggacgagccgtcccccgccccagccacgcctctgagtcgcgctgcgcaggcgccattgggcagagggattggcaagcttgcgtgccccagcgacacaggcctcgaggctgtctctgacaagtgttcacaggaggtggggacgcctctgcgcgaggaacgaggagctacgggcctgggcccggttattgccatgggcagcggctgccgcatcgaatgcatattcttcagcgagttccaccccacgctgggacccaagatcacctatcaggtccctgaagacttcatctcccgagagctgtttgacacagtccaagtgtacatcatcaccaagccagagctgcagaacaagcttatcactgtcacagctatggaaaagaagctgatcggctgtcctgtgtgcatcgaacacaagaagtacagccgcaatgctctcctcttcaacctgggcttcgtgtgtgatgcccaggccaagacctgcgccctcgagcccattgttaaaaagctggctggctatctgaccacactagaggtctgcaatgagatgggcttgggtttaccgacaggcagagttggggaaggtgttcccatgtctccaaagtcccccaaacctgggaccctgcaaaccagctcaggactcagggcagccaaccagccaggggtcctgggatgtgcccaccatgctttccatgctctgtctagctagagagcagcttcgtgtccatggaggagagcaagcagaagttggtgcccatcatgaccatcttgctggaggagctaaatgcctcaggccggtgcactctgcccattggtatggccagcctctgcaaggacagcagaggggtagaggagagatgggaaagtgaacccagctagtcagggagaagggcaagactcatgaacacattggtgggcaggaaatagccatgggctgaggtgcccatgtccagggtccaatgcatgatggagctgggactgggggtagggggaaagcagagctctccagctctgccccttgggcaattccttcccctttgtgggcctccgtttctcactccataaaaagagaaagattagccctacccagaggcacctgcttgccccaagggatgctgggaggcctggatggtaattgaggacctcttggaagaagtggcactgaggatatggatggggccccctgcagatgagtccaacaccatccacttgaaggtgattgagcagcggccagaccctccggtggcccaggagtatgatgtacctgtctttaccaaagacaaggaggatttcttcaactcacagtgggacctcactacacaac

SEQ ID NO: 2277 - protein, 170 aa, Homosapiens
MGSGCRIECIFFSEFHPTLGPKITYQVPEDFISRELFDTVQVYIITKPELQNKLITVTAMEKKLIGCPVCIEHKKYSRNALLFNLGFVCDAQAKTCALEPIVKKLAGYLTTLEVCNEMGLGLPTGRVGEGVPMSPKSPKPGTLQTSSGLRAANQPGVLGCAHHAFHALSS

SEQ ID NO: 2278 - DNA, 882 bp, Homosapiens
ccgcctccccaagtgctgccagcatgctgcccctccacgctagggacttgcctgcctctgccgcagcgcagatctgatgcggtggtttcctccaaagaaagcgggatactccgggccctgccgcgcgcaccgccgctccgtcacggagccgctttacttccgggtgcgacgtctacccacccaggacttcctgggacgagccgtcccccgccccagccacgcctctgagtcgcgctgcgcaggcgccattgggcagagggattggcaagcttgcgtgccccagcgacacaggcctcgaggctgtctctgacaagtgttcacaggaggtggggacgcctctgcgcgaggaacgaggagctacgggcctgggcccggttattgccatgggcagcggctgccgcatcgaatgcatattcttcagcgagttccaccccacgctgggacccaagatcacctatcaggtccctgaagacttcatctcccgagagctgtttgacacagtccaagtgtacatcatcaccaagccagagctgcagaacaagcttatcactgtcacagctatggaaaagaagctgatcggctgtcctgtgtgcatcgaacacaagaagtacagccgcaatgctctcctcttcaacctgggcttcgtgtgtgatatgggcttgggtttaccgacaggcagagttggggaaggtgttcccatgtctccaaagtcccccaaacctgggaccctgcaaaccagctcaggactcagggcagccaaccagccaggggtcctgggatgtgcccaccatgctttccatgctctgtctagctagagagcagcttcgtgtccatggaggagagcaagcagaagttggtgcccatcatgaccatcttgctgga

SEQ ID NO: 2279 - protein, 143 aa, Homosapiens
MGSGCRIECIFFSEFHPTLGPKITYQVPEDFISRELFDTVQVYIITKPELQNKLITVTAMEKKLIGCPVCIEHKKYSRNALLFNLGFVCDMGLGLPTGRVGEGVPMSPKSPKPGTLQTSSGLRAANQPGVLGCAHHAFHALSS

SEQ ID NO: 2280 - DNA, 1049 bp, Homosapiens
ccgcctccccaagtgctgccagcatgctgcccctccacgctagggacttgcctgcctctgccgcagcgcagatctgatgcggtggtttcctccaaagaaagcgggatactccgggccctgccgcgcgcaccgccgctccgtcacggagccgctttacttccgggtgcgacgtctacccacccaggacttcctgggacgagccgtcccccgccccagccacgcctctgagtcgcgctgcgcaggcgccattgggcagagggattggcaagcttgcgtgccccagcgacacaggcctcgaggctgtctctgacaagtgttcacaggaggtggggacgcctctgcgcgaggaacgaggagctacgggcctgggcccggttattgccatgggcagcggctgccgcatcgaatgcatattcttcagcgagttccaccccacgctgggacccaagatcacctatcaggtccctgaagacttcatctcccgagagctgtttgacacagtccaagtgtacatcatcaccaagccagagctgcagaacaagcttatcactgtgtgagaccctagctcggggtgagcggtgggtggcaggggttgtcccaggaggaggaagggacaggcttgggggcctgactgtgttccaattatccagcacagctatggaaaagaagctgatcggctgtcctgtgtgcatcgaacacaagaagtacagccgcaatgctctcctcttcaacctgggcttcgtgtgtgatgcccaggccaagacctgcgccctcgagcccattgttaaaaagctggctggctatctgaccacactagaggtctgcaatgagatgggcttgggtttaccgacaggcagagttggggaaggtgttcccatgtctccaaagtcccccaaacctgggaccctgcaaaccagctcaggactcagggcagccaaccagccaggggtcctgggatgtgcccaccatgctttccatgctctgtctagctagagagcagcttcgtgtccatggaggagagcaagcagaagttggtgcccatcatgacc

SEQ ID NO: 2281 - protein, 57 aa, Homosapiens
MGSGCRIECIFFSEFHPTLGPKITYQVPEDFISRELFDTVQVYIITKPELQNKLITV

SEQ ID NO: 2282 - DNA, 1778 bp, Homosapiens
ctggaacactttctcctgccttacctaaacttcctatgcatcatttactcttcactcagttcagggatactcatgggtcacccaactcaccttctgtgggacctggaaccccccaaccggatccctacagcccgatatcctacaaacactgccaatgtgacgtatgtcttccctgccacattgggagccgggggcctgggtctgactatcctctagcctcacagttgtctgcgaatgaagcagcatgcctgcgtgcagcacgggaaactactgccttcaggcagccagttgagctctcgagaacgtccctcttcccgcccagtcccgcgagcccgggtggcacctgataggtgatcttgggtcccagcgtggggtggaactcgctgaagaatatgcattcgatgcggcagccgctgcccatggcaataaccgggcccaggcccgtagctcctcgttcctcgcgcagaggcgtccccacctcctgtgaacacttgtcagagacagcctcgaggcctgtgtcgctggggcacgcaagcttgccaatccctctgcccaatggcgcctgcgcagcgcgactcagaggcgtggctggggcgggggacggctcgtcccaggaagtcctgggtgggtagacgtcgcacccggaagtaaagcggctccgtgacggagcggcggtgcgcgcggcagggcccggagtatcccgctttctttggaggaaaccaccgcatcagatctgcgctgcggcagaggcaggctacaaccactagcacggctgacgatggccctttctgcggagaccgagtcacacatctaccgagctctgcgtactgcttctggcgctgccgcccaccttgtggccctgggctttaccatctttgtggctgtgcttgccaggcctggctccagcctgttctcctggcacccggtgcttatgtctttggctttctccttcctgatgaccgaggcactactggtgttttctcctgagagttcgctgctgcactccctctcacggaaaggccgagcacgctgccactgggtgctgcagctgctggccctgctgtgtgcactgctgggcctcggccttgtcatcctccacaaagagcagcttggcaaagcccacctggttacgcggcatgggcaggcagggctgctggctgtgctgtgggcagggctgcagtgctcaggtggggtggggctgctctaccccaagctgctgccccgatggcccctggcgaagctcaagctataccatgctacttctgggctggtgggctacctgctgggtagtgccagcctcttgctgggcatgtgctcactctggttcactgcctctgtcactggtgcagcctggtacctggctgtattatgccctgtcctcaccagcttggtcattatgaaccaggtgagcaatgcctacctataccgcaagaggatccaaccatgagctcttcccagcctaggggaagcctggatttgcccctccatgtaggagctgggcctagggacctgttgaactctctcagctgagtcaggggacacctcaggcactgggacagttgggcatttggaggcccgtgtgtgaattcctgctcctcatgctggagtgcctcccatttccttcccctttctctgtcatcccagaggaacataggcatcatgtgtctggatgaagctggggctgcaagactgcctctcctgcaaggcagctcatacttgtactgtatgttcagaaattttaggagagaaaaaagtaaaaaatttgtaaaaaatgactg

SEQ ID NO: 2283 - protein, 222 aa, Homosapiens; identical to SEQ ID NO: 241

SEQ ID NO: 2284 - DNA, 1347 bp, Homosapiens
cgcgcagaggcgtccccacctcctgtgaacacttgtcagagacagcctcgaggcctgtgtcgctggggcacgcaagcttgccaatccctctgcccaatggcgcctgcgcagcgcgactcagaggcgtggctggggcgggggacggctcgtcccaggaagtcctgggtgggtagacgtcgcacccggaagtaaagcggctccgtgacggagcggcggtgcgcgcggcagggcccggagtatcccgctttctttggaggaaaccaccgcatcagatctgcgctgcggcagaggcagccttttctccagtgaggagtgaacagtgggcacctgagatcctggcccacgctactatgctttcaggctacaaccactagcacggctgacgatggccctttctgcggagaccgagtcacacatctaccgagctctgcgtactgcttctggcgctgccgcccaccttgtggccctgggctttaccatctttgtggctgtgcttgccaggcctggctccattctccttcctgatgaccgaggcactactggtgttttctcctgagagttcgctgctgcactccctctcacggaaaggccgagcacgctgccactgggtgctgcagctgctggccctgctgtgtgcactgctgggcctcggccttgtcatcctccacaaagagcagcttggcaaagcccacctggttacgcggcatgggcaggcagggctgctggctgtgctgtgggcagggctgcagtgctcaggtggggtggggctgctctaccccaagctgctgccccgatggcccctggcgaagctcaagctataccatgctacttctgggctggtgggctacctgctgggtagtgccagcctcttgctgggcatgtgctcactctggttcactgcctctgtcactggtgcagcctggtacctggctgtattatgccctgtcctcaccagcttggtcattatgaaccaggtgagcaatgcctacctataccgcaagaggatccaaccatgagctcttcccagcctaggggaagcctggatttgcccctccatgtaggagctgggcctagggacctgttgaactctctcagctgagtcaggggacacctcaggcactgggacagttgggcatttggaggcccgtgtgtgaattcctgctcctcatgctggagtgcctcccatttccttcccctttctctgtcatcccagaggaacataggcatcatgtgtctggatgaagctggggctgcaagactgcctctcctgcaaggcagctcatacttgtactgtatgttcagaaattttaggagagaaaaaagtaaaaaatttgtaaaaaatgactg

SEQ ID NO: 2285 - protein, 56 aa, Homosapiens
MALSAETESHIYRALRTASGAAAHLVALGFTIFVAVLARPGSILLPDDRGTTGVFS

SEQ ID NO: 2286 - DNA, 1743 bp, Homosapiens
cgcgcagaggcgtccccacctcctgtgaacacttgtcagagacagcctcgaggcctgtgtcgctggggcacgcaagcttgccaatccctctgcccaatggcgcctgcgcagcgcgactcagaggcgtggctggggcgggggacggctcgtcccaggaagtcctgggtgggtagacgtcgcacccggaagtaaagcggctccgtgacggagcggcggtgcgcgcggcagggcccggagtatcccgctttctttggaggaaaccaccgcatcagatctgcgctgcggcagaggcaggcaagtccctagcgtggaggggcagcatgctggcagcacttggggaggcggtgcgctaagggattcacgctgtaactgggaccgcagcagggaactacaatttccatagtgctccgcgccctcccagctggctctactgccggcgacggcgtggtacacgctgggatttgtagtcttacatggctttgcgcctcctacctggaaggcgggccagcgattggtaccagttcagacatgggtacacgttgacaggccgccggccgtcgactggcatgttgtgaccattcctggtgctggtcttggtactgttctttcctaccataacttattggaagagggtggcattcctgccttgcagccttttctccagtgaggagtgaacagtgggcacctgagatcctggcccacgctactatgctttcaggctacaaccactagcacggctgacgatggccctttctgcggagaccgagtcacacatctaccgagctctgcgtactgcttctggcgctgccgcccaccttgtggccctgggctttaccatctttgtggctgtgcttgccaggcctggctccagcctgttctcctggcacccggtgcttatgtctttggctttctccttcctgatgaccgaggcactactggtgttttctcctgagagttcgctgctgcactccctctcacggaaaggccgagcacgctgccactgggtgctgcagctgctggccctgctgtgtgcactgctgggcctcggccttgtcatcctccacaaagagcagcttggcaaagcccacctggttacgcggcatgggcaggcagggctgctggctgtgctgtgggcagggctgcagtgctcaggtggggtggggctgctctaccccaagctgctgccccgatggcccctggcgaagctcaagctataccatgctacttctgggctggtgggctacctgctgggtagtgccagcctcttgctgggcatgtgctcactctggttcactgcctctgtcactggtgcagcctggtacctggctgtattatgccctgtcctcaccagcttggtcattatgaaccaggtgagcaatgcctacctataccgcaagaggatccaaccatgagctcttcccagcctaggggaagcctggatttgcccctccatgtaggagctgggcctagggacctgttgaactctctcagctgagtcaggggacacctcaggcactgggacagttgggcatttggaggcccgtgtgtgaattcctgctcctcatgctggagtgcctcccatttccttcccctttctctgtcatcccagaggaacataggcatcatgtgtctggatgaagctggggctgcaagactgcctctcctgcaaggcagctcatacttgtactgtatgttcagaaattttaggagagaaaaaagtaaaaaatttgtaaaaaatgactg

SEQ ID NO: 2287 - protein, 222 aa, Homosapiens; identical to SEQ ID NO: 241

SEQ ID NO: 2288 - DNA, 1385 bp, Homosapiens
cgcgcagaggcgtccccacctcctgtgaacacttgtcagagacagcctcgaggcctgtgtcgctggggcacgcaagcttgccaatccctctgcccaatggcgcctgcgcagcgcgactcagaggcgtggctggggcgggggacggctcgtcccaggaagtcctgggtgggtagacgtcgcacccggaagtaaagcggctccgtgacggagcggcggtgcgcgcggcagggcccggagtatcccgctttctttggaggaaaccaccgcatcagatctgcgctgcggcagaggcagccttttctccagtgaggagtgaacagtgggcacctgagatcctggcccacgctactatgctttcaggctacaaccactagcacggctgacgatggccctttctgcggagaccgagtcacacatctaccgagctctgcgtactgcttctggcgctgccgcccaccttgtggccctgggctttaccatctttgtggctgtgcttgccaggcctggctccagcctgttctcctggcacccggtgcttatgtctttggctttctccttcctgatgaccgaggcactactggtgttttctcctgagagttcgctgctgcactccctctcacggaaaggccgagcacgctgccactgggtgctgcagctgctggccctgctgtgtgcactgctgggcctcggccttgtcatcctccacaaagagcagcttggcaaagcccacctggttacgcggcatgggcaggcagggctgctggctgtgctgtgggcagggctgcagtgctcaggtggggtggggctgctctaccccaagctgctgccccgatggcccctggcgaagctcaagctataccatgctacttctgggctggtgggctacctgctgggtagtgccagcctcttgctgggcatgtgctcactctggttcactgcctctgtcactggtgcagcctggtacctggctgtattatgccctgtcctcaccagcttggtcattatgaaccaggtgagcaatgcctacctataccgcaagaggatccaaccatgagctcttcccagcctaggggaagcctggatttgcccctccatgtaggagctgggcctagggacctgttgaactctctcagctgagtcaggggacacctcaggcactgggacagttgggcatttggaggcccgtgtgtgaattcctgctcctcatgctggagtgcctcccatttccttcccctttctctgtcatcccagaggaacataggcatcatgtgtctggatgaagctggggctgcaagactgcctctcctgcaaggcagctcatacttgtactgtatgttcagaaattttaggagagaaaaaagtaaaaaatttgtaaaaaatgactg

SEQ ID NO: 2289 - protein, 222 aa, Homosapiens; identical to SEQ ID NO: 241

SEQ ID NO: 2290 - DNA, 1705 bp, Homosapiens
cgcgcagaggcgtccccacctcctgtgaacacttgtcagagacagcctcgaggcctgtgtcgctggggcacgcaagcttgccaatccctctgcccaatggcgcctgcgcagcgcgactcagaggcgtggctggggcgggggacggctcgtcccaggaagtcctgggtgggtagacgtcgcacccggaagtaaagcggctccgtgacggagcggcggtgcgcgcggcagggcccggagtatcccgctttctttggaggaaaccaccgcatcagatctgcgctgcggcagaggcaggcaagtccctagcgtggaggggcagcatgctggcagcacttggggaggcggtgcgctaagggattcacgctgtaactgggaccgcagcagggaactacaatttccatagtgctccgcgccctcccagctggctctactgccggcgacggcgtggtacacgctgggatttgtagtcttacatggctttgcgcctcctacctggaaggcgggccagcgattggtaccagttcagacatgggtacacgttgacaggccgccggccgtcgactggcatgttgtgaccattcctggtgctggtcttggtactgttctttcctaccataacttattggaagagggtggcattcctgccttgcagccttttctccagtgaggagtgaacagtgggcacctgagatcctggcccacgctactatgctttcaggctacaaccactagcacggctgacgatggccctttctgcggagaccgagtcacacatctaccgagctctgcgtactgcttctggcgctgccgcccaccttgtggccctgggctttaccatctttgtggctgtgcttgccaggcctggctccattctccttcctgatgaccgaggcactactggtgttttctcctgagagttcgctgctgcactccctctcacggaaaggccgagcacgctgccactgggtgctgcagctgctggccctgctgtgtgcactgctgggcctcggccttgtcatcctccacaaagagcagcttggcaaagcccacctggttacgcggcatgggcaggcagggctgctggctgtgctgtgggcagggctgcagtgctcaggtggggtggggctgctctaccccaagctgctgccccgatggcccctggcgaagctcaagctataccatgctacttctgggctggtgggctacctgctgggtagtgccagcctcttgctgggcatgtgctcactctggttcactgcctctgtcactggtgcagcctggtacctggctgtattatgccctgtcctcaccagcttggtcattatgaaccaggtgagcaatgcctacctataccgcaagaggatccaaccatgagctcttcccagcctaggggaagcctggatttgcccctccatgtaggagctgggcctagggacctgttgaactctctcagctgagtcaggggacacctcaggcactgggacagttgggcatttggaggcccgtgtgtgaattcctgctcctcatgctggagtgcctcccatttccttcccctttctctgtcatcccagaggaacataggcatcatgtgtctggatgaagctggggctgcaagactgcctctcctgcaaggcagctcatacttgtactgtatgttcagaaattttaggagagaaaaaagtaaaaaatttgtaaaaaatgactg

SEQ ID NO: 2291 - protein, 56 aa, Homosapiens; identical to SEQ ID NO: 2285

SEQ ID NO: 2292 - DNA, 1263 bp, Homosapiens
aagcggctccgtgacggagcggcggtgcgcgcggcagggcccggagtatcccgctttctttggaggaaaccaccgcatcagatctgcgctgcggcagaggcaggcaagtccctagcgtggaggggcagcatgctggcagcacttggggaggcggtgcgctaagggattcacgctgtaactgggaccgcagcagggaactacaatttccatagtgctccgcgccctcccagctggctctactgccggcgacggcgtggtacacgctgggatttgtagtcttacatggctttgcgcctcctacctggaaggcgggccagcgattggtaccagttcagacatgggtacacgttgacaggccgccggccgtcgactggcatgttgtgaccattcctggtgctggtcttggtactgttctttcctaccataacttattggaagagggtggcattcctgccttgcagccttttctccagtgaggagtgaacagtgggcacctgagatcctggcccacgctactatgctttcaggctacaaccactagcacggctgacgatggccctttctgcggagaccgagtcacacatctaccgagctctgcgtactgcttctggcgctgccgcccaccttgtggccctgggctttaccatctttgtggctgtgcttgccaggcctggctccagtctccacctatgtacagcgaacacctcaacagatggcatgtgactcgaccagtatgctcctagcttgacaagattttggaaaatttcacagtaccttctccgctcggcgtcttgagggtctgtgcctggcaggctgatggtgatggaggatggggcacccacatcgtagcgcttcaccgtcttctggcatatctttaccttcaccaggaggctgtgcaccaagttcgccagcaaacccaccacaggctgcaggatctcagggaagaaagtggcgaaagcaaagtggtcagccatgtcccctcggccccggctatggcgctggtagaagcgaagatatacccaactggagagcagcccgaagccataggaagccagcgccgggctctggagcagcgtggcgagccgcagcaggagcagcagcgccagcagcagcatgggcatcacactgacgcgcacctggggcactcgcaggaccacacagtcccccatggtttgcttgagtgccaccaggacgccacctaggaagcccaaggcgccgtggatacggacagtgaacaggtagaccaggttgaaggaagccatg

SEQ ID NO: 2293 - protein, 56 aa, Homosapiens
MALSAETESHIYRALRTASGAAAHLVALGFTIFVAVLARPGSSLHLCTANTSTDGM

SEQ ID NO: 2294 - DNA, 1154 bp, Homosapiens
aagcggctccgtgacggagcggcggtgcgcgcggcagggcccggagtatcccgctttctttggaggaaaccaccgcatcagatctgcgctgcggcagaggcaggcaagtccctagcgtggaggggcagcatgctggcagcacttggggaggcggtgcgctaagggattcacgctgtaactgggaccgcagcagggaactacaatttccatagtgctccgcgccctcccagctggctctactgccggcgacggcgtggtacacgctgggatttgtagtcttacatggctttgcgcctcctacctggaaggcgggccagcgattggtaccagttcagacatgggtacacgttgacaggccgccggccgtcgactggcatgttgtgaccattcctggtgctggtcttggtactgttctttcctaccataacttattggaagagggtggcattcctgccttgcagccttttctccagtgaggagtgaacagtgggcacctgagatcctggcccacgctactatgctttcaggctacaaccactagcacggctgacgatggccctttctgcggagaccgagtcacacatctaccgagctctgcgtactgcttctggcgctgccgcccaccttgtggccctgggctttaccatctttgtggctgtgcttgccaggcctggctccagcctgttctcctggcacccggtgcttatgtctttggctcaccaggaatcctccatcatcaatgaggacacagagctgggtgatgcctacgtgttgagatcctggtccctccacacacgctctaccagctgctgcgtgatgcccgtgtccaagatcaggttgtgcagaaggaagttgttgcctggaacaggaggggaggggtgggggtgggggcatcttcttgcagctccttgcccaccctcacccccacccttaaggctccaccaggagcctcctccatgacctggccctggcccaggcccagcccttagcttgtgcctgcttatttccacacctgcccggcctctgggttcctctgggctggccccatgctgcctgggcactgcccagagccagctgccctgccaggcactcacactgcttggagtctggagtcactttctccatgagctcaataaagtttttcaggaactcgg

SEQ ID NO: 2295 - protein, 135 aa, Homosapiens
MALSAETESHIYRALRTASGAAAHLVALGFTIFVAVLARPGSSLFSWHPVLMSLAHQESSIINEDTELGDAYVLRSWSLHTRSTSCCVMPVSKIRLCRRKLLPGTGGEGWGWGHLLAAPCPPSPPPLRLHQEPPP

SEQ ID NO: 2296 - DNA, 654 bp, Homosapiens
tcctgatgaccgaggcactactggtgttttctcctgagagttcgctgctgcactccctctcacggaaaggccgagcacgctgccactgggtgctgcagctgctggccctgctgtgtgcactgctgggcctcggccttgtcatcctccacaaagagcagcttggcaaagcccacctggttacgcggcatgggcaggcagggctgctggctgtgctgtgggcagggctgcagtgctcaggtggggtggggctgctctaccccaagctgctgccccgatggcccctggcgaagctcaagctataccgcaagaggatccaaccatgagctcttcccagcctaggggaagcctggatttgcccctccatgtaggagctgggcctagggacctgttgaactctctcagctgagtcaggggacacctcaggcactgggacagttgggcatttggaggcccgtgtgtgaattcctgctcctcatgctggagtgcctcccatttccttcccctttctctgtcatcccagaggaacataggcatcatgtgtctggatgaagctggggctgcaagactgcctctcctgcaaggcagctcatacttgtactgtatgttcagaaattttaggagagaaaaaagtaaaaaatttgtaaaaaatgactg

SEQ ID NO: 2297 - protein, 105 aa, Homosapiens
MTEALLVFSPESSLLHSLSRKGRARCHWVLQLLALLCALLGLGLVILHKEQLGKAHLVTRHGQAGLLAVLWAGLQCSGGVGLLYPKLLPRWPLAKLKLYRKRIQP

SEQ ID NO: 2298 - DNA, 1546 bp, Homosapiens
gccataggccagtgactaggccgggcctgggcctcccatcggggccggactaggacgaggccccggggaggcccctggcctaccagacccttttctcaggccgacagccgccaggaagatgcaacgtgccctgccaggcgcccgccagcacttgggggccattctggccagcgccagcgtggtggtgaaggctctgtgtgcggcggtactattcctctacctgctctccttcgccgtggacacaggctgcctggcggtcaccccgggctacctctttcctcccaacttctggatctggaccctggccacccatgggctgatggagcagcatgtgtgggacgtggccatcagcctgacaacggtggtggtggccgggcgtttgctggagcccctctggggggccttggagctgctcatcttcttctcagtggtgaatgtgtctgtagggctgctgggggccttcgcctacctcctcacctacatggcttccttcaacctggtctacctgttcactgtccgtatccacggcgccttgggcttcctaggtggcgtcctggtggcactcaagcaaaccatgggggactgtgtggtcctgcgagtgccccaggtgcgcgtcagtgtgatgcccatgctgctgctggcgctgctgctcctgctgcggctcgccacgctgctccagagcccggcgctggcttcctatggcttcgggctgctctccagttgggtatatcttcgcttctaccagcgccatagccggggccgaggggacatggctgaccactttgctttcgccactttcttccctgagatcctgcagcctgtggtgggtttgctggcgaacttggtgcacagcctcctggtgaaggtaaagatatgccagaagacggtgaagcgctacgatgtgggtgccccatcctccatcaccatcagcctgccaggcacagaccctcaagacgccgagcggagaaggcaactggccctgaaggcactcaatgagcggctgaagagagtggaagaccagtccatctggcccagcatggatgatgatgaagaggagtctggggccaaggtggacagccccctgccctcagacaaagctcccacacccccagggaagggggctgccccagaatccagtctaatcaccttcgaggcagctcccccgacgctgtaatccaggccctcatctgaggtaagaatgtacatcagctggcagccccaagcaagtggctgcagggacactgatgccacagctcctgggccggccctcacatctgaaactggttgccgagagccctgagccaaggcaaggatttgccaaaaatgttctgggggcccagcaaatgcaggagccgacctggggctgcacatccctgcccatccccagaaagactgttcctgtcaggatttgtttccctctgctgtggcggtgactgcttctggaccagaacagctccagctcccaggtattttctacaggaccacttgagtgggcagccaagcccaggctcgcagtatcaataaagcagttctctgaggaatgact

SEQ ID NO: 2299 - protein, 351 aa, Homosapiens; identical to SEQ ID NO: 243

SEQ ID NO: 2300 - DNA, 1891 bp, Homosapiens
ggccccccgagagaagaggtacggtcgaagccaggagccaggccgagcgggagctgaccaggcttgactcgggtacagaacgaggcaccagtccccttgcgaaccgaagggcctcgcagtggatggaggaggcccagccctgaggtcaacgccaaccaggctagcctggcacggggcctacagggtgggtaggcgggcgtgccgcagccgtccagggccttccctcaggtcccgggcgaggggcctacgctgcggcccggcaacaaggcccgactcggcccctcgggaccagagccccacccgatcggaagcggatcctttaccagggccataggccagtgactaggccgggcctgggcctcccatcggggccggactaggacgaggccccggggaggcccctggcctaccagacccttttctcaggccgacagccgccaggaagatgcaacgtgccctgccaggcgcccgccagcacttgggggccattctggccagcgccagcgtggtggtgaaggctctgtgtgcggcggtactattcctctacctgctctccttcgccgtggacacaggctgcctggcggtcaccccgggctacctctttcctcccaacttctggatctggaccctggccacccatgggctgatggagcagcatgtgtgggacgtggccatcagcctgacaacggtggtggtggccgggcgtttgctggagcccctctggggggccttggagctgctcatcttcttctcagtggtgaatgtgtctgtagggctgctgggggccttcgcctacctcctcacctacatggcttccttcaacctggtctactgctctccagttgggtatatcttcgcttctaccagcgccatagccggggccgaggggacatggctgaccactttgctttcgccactttcttccctgagatcctgcagcctgtggtgggtttgctggcgaacttggtgcacagcctcctggtgaaggtaaagatatgccagaagacggtgaagcgctacgatgtgggtgccccatcctccatcaccatcagcctgccaggcacagaccctcaagacgccgagcggagaaggcaactggccctgaaggcactcaatgagcggctgaagagagtggaagaccagtccatctggcccagcatggatgatgatgaagaggagtctggggccaaggtggacagccccctgccctcagacaaagctcccacacccccagggaagggggctgccccagaatccagtctaatcaccttcgaggcagctcccccgacgctgtaactccagaccaccttgagtgtggcacctcccctcccaagccccccttgacatcctctcagctactccagggcacctgactgctctgaggagagggaagaaggcctgctggggctttccatggccttctgctgtttctcgccaacactacccaggactcttgctacctggttccaactccagacaaccactatgccaggcccggagcctctgaggcatcggccagtccaggccctcatctgaggtaagaatgtacatcagctggcagccccaagcaagtggctgcagggacactgatgccacagctcctgggccggccctcacatctgaaactggttgccgagagccctgagccaaggcaaggatttgccaaaaatgttctgggggcccagcaaatgcaggagccgacctggggctgcacatccctgcccatccccagaaagactgttcctgtcaggatttgtttccctctgctgtggcggtgactgcttctggaccagaacagctccagctcccaggtattttctacaggaccacttgagtgggcagccaagcccaggctcgcagtatcaataaagcagttctctgaggaatgact

SEQ ID NO: 2301 - protein, 179 aa, Homosapiens
MQRALPGARQHLGAILASASVVVKALCAAVLFLYLLSFAVDTGCLAVTPGYLFPPNFWIWTLATHGLMEQHVWDVAISLTTVVVAGRLLEPLWGALELLIFFSVVNVSVGLLGAFAYLLTYMASFNLVYCSPVGYIFASTSAIAGAEGTWLTTLLSPLSSLRSCSLWWVCWRTWCTASW

SEQ ID NO: 2302 - DNA, 2162 bp, Homosapiens
aagacaggcgcttagaggacagcccgctgccgccggggacgcgcaggcgcagcacccctgtttgtcggccccccgagagaagaggtacggtcgaagccaggagccaggccgagcgggagctgaccaggcttgactcgggtacagaacgaggcaccagtccccttgcgaaccgaagggcctcgcagtggatggaggaggcccagccctgaggtcaacgccaaccaggctagcctggcacggggcctacagggtgggtaggcgggcgtgccgcagccgtccagggccttccctcaggtcccgggcgaggggcctacgctgcggcccggcaacaaggcccgactcggcccctcgggaccagagccccacccgatcggaagcggatcctttaccagggccataggccagtgactaggccgggcctgggcctcccatcggggccggactaggacgaggccccggggaggcccctggcctaccagacccttttctcaggccgacagccgccaggaagatgcaacgtgccctgccaggcgcccgccagcacttgggggccattctggccagcgccagcgtggtggtgaaggctctgtgtgcggcggtactattcctctacctgctctccttcgccgtggacacaggctgcctggcggtcaccccgggctacctctttcctcccaacttctggatctggaccctggccacccatgggctgatggagcagcatgtgtgggacgtggccatcagcctgacaacggtggtggtggccgggcgtttgctggagcccctctggggggccttggagctgctcatcttcttctcagtggtgaatgtgtctgtagggctgctgggggccttcgcctacctcctcacctacatggcttccttcaacctggtctacctgttcactgtccgtatccacggcgccttgggcttcctaggtggcgtcctggtggcactcaagcaaaccatgggggactgtgtggtcctgcgagtgccccaggtgcgcgtcagtgtgatgcccatgctgctgctggcgctgctgctcctgctgcggctcgccacgctgctccagagcccggcgctggcttcctatggcttcgggctgctctccagttgggtatatcttcgcttctaccagcgccatagccggggccgaggggacatggctgaccactttgctttcgccactttcttccctgagatcctgcagcctgtggtgggtttgctggcgaacttggtgcacagcctcctggtgaaggtaaagatatgccagaagacggtgaagcgctacgatgtgggtgccccatcctccatcaccatcagcctgccaggcacagaccctcaagacgccgagcggagaaggcaactggccctgaaggcactcaatgagcggctgaagagagtggaagaccagtccatctggcccagcatggatgatgatgaagaggagtctggggccaaggtggacagccccctgccctcagacaaagctcccacacccccagggaagggggctgccccagaatccagtctaatcaccttcgaggcagctcccccgacgctgtaactccagaccaccttgagtgtggcacctcccctcccaagccccccttgacatcctctcagctactccagggcacctgactgctctgaggagagggaagaaggcctgctggggctttccatggccttctgctgtttctcgccaacactacccaggactcttgctacctggttccaactccagacaaccactatgccaggcccggagcctctgaggcatcggccagtccaggccctcatctgaggtaagaatgtacatcagctggcagccccaagcaagtggctgcagggacactgatgccacagctcctgggccggccctcacatctgaaactggttgccgagagccctgagccaaggcaaggatttgccaaaaatgttctgggggcccagcaaatgcaggagccgacctggggctgcacatccctgcccatccccagaaagactgttcctgtcaggatttgtttccctctgctgtggcggtgactgcttctggaccagaacagctccagctcccaggtattttctacaggaccacttgagtgggcagccaagcccaggctcgcagtatcaataaagcagttctctgaggaatgact

SEQ ID NO: 2303 - protein, 351 aa, Homosapiens; identical to SEQ ID NO: 243

SEQ ID NO: 2304 - DNA, 598 bp, Homosapiens
agagagtggaagaccagtccatctggcccagcatggatgatgatgaagaggagtctggggccaaggtggacagccccctgccctcagacaaagctcccacacccccagggaagggggctgccccagaatccagtctaatcaccttcgaggcagctcccccgacgctgtaactccagaccaccttgagtgtggcacctcccctcccaagccccccttgacatcctctcagctactccagggcacctgactgctctgaggagagggaagaaggcctgctggggctttccatggccttctgctgtttctcgccaacactacccaggactcttgctacctggttccaactccagacaaccactatgccaggcccggagcctctgaggcatcggccagtccaggccctcatctgaggtaagaatgtacatccctgcccatccccagaaagactgttcctgtcaggatttgtttccctctgctgtggcggtgactgcttctggaccagaacagctccagctcccaggtattttctacaggaccacttgagtgggcagccaagcccaggctcgcagtatcaataaagcagttctctgaggaatga

SEQ ID NO: 2305 - protein, 41 aa, Homosapiens [sequence omitted]

SEQ ID NO: 2306 - DNA, 1527 bp, Homosapiens
tctggtctgcgccttgggatggggagtcccaaagcgggacgccgcaggtgtttggcacccaaatcacatctcacctccgaactgttcaagtgtccccagacccttcttgcctgctgggctccccccagtgggatgggacagggaggccacacgcactggtgccaaaaccaggcctctgctgccgcccttcctggaggctgcctatgttgggggggaccctgcctcagctgacccggcctctctgccccacccaagcccaaacttggtttctgtgagaatagtggaggaaggtgagatggccagtttgaagcctgtgcctcccagcttaaatcctagcaggagagaggctctggggcagcccccatgggctcctgcccctttcaggcctacagccacatccccaagcccaccaggtgtcaggatagtcacagtgataccagttcagacactaccccatatacacctggaacattgaggatggaaactggactcacattcgacataccccactgggcacacgcacaaacacacacactatggggtggggtgggtgtaggggcttacaaagccttacacagggcgaggggttggtgggagggttggcacctgcacactccatctcctgctcaccacctgcctctaatctgagctgcagcctggctggtcctcccatttctaaagctgaatgtcaaacagtgccaaatgctggggcagggggtgaagaaccctctgtcccacccctagccaccagtgtcctccaagtgccccctcacctctccaggtgctcattgtaaccatttctcactagtgtcaggcccccagtgggaccacatgccactgcctgcacctttcggcagaggaacccccaccagacatcaccctttgccttagcaggggtgactttgtctctcctggctgggccatccttccgccagtggggaactgagggcaaggggatatagtgatggggctcagatggactgggaggagggggagggtgatgcattaattaatggcttcgttaattaatgtcatgttgcttgtcgctttctcagtgtgtgtgtgtggtccatgcccactgctggtgccagggtgggtgtccatgtgcacccggcctggatgccagctgtgtccttcgggggcgtgcgtgtaactgtagtgtagtcaggtgctcaatggagaatataaacatatacagaaaaatatatattttaagtttaaaaaacagaaaaacagacaaaacaatccccatcaggtagctgtctaacccccagctgggtctaatccttctcattacccacccgacctggctgcccctcaccttgggctgggggactggggggccatttccttttctctgccctttttttgttgttctattttgtacagacaagttggaaaaacaacagcgacaaaaaagtcaagaaactttgtaaaatatcgtgtgtgtgattccttgtaaaatattttcaaatggtttattacagaagatcagttattaaataatgttcatattttcacttcaaa

SEQ ID NO: 2307 - protein, 94 aa, Homosapiens
MGSCPFQAYSHIPKPTRCQDSHSDTSSDTTPYTPGTLRMETGLTFDIPHWAHAQTHTLWGGVGVGAYKALHRARGWWEGWHLHTPSPAHHLPLI

SEQ ID NO: 2308 - DNA, 2582 bp, Homosapiens
gaaggtgctccctggccgggagggctcagaagagaagtagggcatggcatcgtcctctgctgaccacctgcactcggctccccgtgcgctgcaggtccctgttccagcagcttctctacggcctcatctaccacagctggttccaagcagaccccgcggaggccgaggggagccccgagacgcgcgagagcagctgcgtcatgaaacagacccagtactacttcggctcggtaaacgcctcctacaacgccatcatcgactgcggaaactgctccaggctgttccacgcgcagagactgaccaacaccaatcttctctttgtggtggccgagaagccgctgtgcagccagtgcgaggctggccggctgctgcagaaggagacgcactgtatcctgcccccgccctccccgccgcccgctccccctctgccccgcgcgccccctccgtgccgccgccgccgtccgcctccttgactccccacccatgcccagcggacggcccggagcagtgtgagctagtgcagagaccgcgataccggagaggcccgcacatctgcttcgactacaacgcgacagaagatacctcagactgtggccgcggggcctccttcccgccgtcgctgggcgtcctggtctccctgcaactgctgctcctcctgggcctgccgccccggccgcagcctcaagtcctcgtccacgcctctcgccgcctctgagcaccctgccccaccccacctccactcccacctcacccggcctcttcgcctttcccaccctcctgccccacactccccgccttagagcctcgtccctccctcactgaaggacctgagctggccaggccctgagagtctggtctgcgccttgggatggggagtcccaaagcgggacgccgcaggtgtttggcacccaaatcacatctcacctccgaactgttcaagtgtccccagacccttcttgcctgctgggctccccccagtgggatgggacagggaggccacacgcactggtgccaaaaccaggcctctgctgccgcccttcctggaggctgcctatgttgggggggaccctgcctcagctgacccggcctctctgccccacccaagcccaaacttggtttctgtgagaatagtggaggaaggtgagatggccagtttgaagcctgtgcctcccagcttaaatcctagcaggagagaggctctggggcagcccccatgggctcctgcccctttcaggcctacagccacatccccaagcccaccaggtgtcaggatagtcacagtgataccagttcagacactaccccatatacacctggaacattgaggatggaaactggactcacattcgacataccccactgggcacacgcacaaacacacacactatggggtggggtgggtgtaggggcttacaaagccttacacagggcgaggggttggtgggagggttggcacctgcacactccatctcctgctcaccacctgcctctaatctgagctgcagcctggctggtcctcccatttctaaagctgaatgtcaaacagtgccaaatgctggggcagggggtgaagaaccctctgtcccacccctagccaccagtgtcctccaagtgccccctcacctctccaggtgctcattgtaaccatttctcactagtgtcaggcccccagtgggaccacatgccactgcctgcacctttcggcagaggaacccccaccagacatcaccctttgccttagcaggggtgactttgtctctcctggctgggccatccttccgccaatctggcccttacacactcaggcctgtgcccactccctatctccttcccacccctacacacacactccctgcttgcaggaggccaaactgtccctcccttgctgaacacacacacacacacacacacacaggtggggactgggcacagctcttcacaccattcattctggtcatttcccccaaaggcatcccagcctgggggccagtggggaactgagggcaaggggatatagtgatggggctcagatggactgggaggagggggagggtgatgcattaattaatggcttcgttaattaatgtcatgttgcttgtcgctttctcagtgtgtgtgtgtggtccatgcccactgctggtgccagggtgggtgtccatgtgcacccggcctggatgccagctgtgtccttcgggggcgtgcgtgtaactgtagtgtagtcaggtgctcaatggagaatataaacatatacagaaaaatatatattttaagtttaaaaaacagaaaaacagacaaaacaatccccatcaggtagctgtctaacccccagctgggtctaatccttctcattacccacccgacctggctgcccctcaccttgggctgggggactggggggccatttccttttctctgccctttttttgttgttctattttgtacagacaagttggaaaaacaacagcgacaaaaaagtcaagaaactttgtaaaatatcgtgtgtgtgattccttgtaaaatattttcaaatggtttattacagaagatcagttattaaataatgttcatattttcacttcaaa

SEQ ID NO: 2309 - protein, 223 aa, Homosapiens
MASSSADHLHSAPRALQVPVPAASLRPHLPQLVPSRPRGGRGEPRDAREQLRHETDPVLLRLGKRLLQRHHRLRKLLQAVPRAETDQHQSSLCGGREAAVQPVRGWPAAAEGDALYPAPALPAARSPSAPRAPSVPPPPSASLTPHPCPADGPEQCELVQRPRYRRGPHICFDYNATEDTSDCGRGASFPPSLGVLVSLQLLLLLGLPPRPQPQVLVHASRRL

SEQ ID NO: 2310 - DNA, 5498 bp, Homosapiens
gccagcgctgcagggagatagcagcgcgcagcccgcagaggcgctgcggcccgtgcagccccggaggcccctcgcggagaaggcggcggcggaggagaggccgagttaccgcccgccgcccgcgcccccccaaccccgccgccgccgccgccgccgccactgccccccctccccgcggcgccgcatcttgaatggaaacatggcggtgccggctcggacctgcggcgcctctcggcccggcccagcgcggactgcgcgcccctggcccggctgcggcccccaccctggccccggcacccggcgcccgacgtccgggcccccgcgcccgctgtggctgctgctgccgcttctaccgctgctcgccgcccccggcgcctctgcctacagcttcccccagcagcacacgatgcagcactgggcccggcgtctggagcaggaggtcgacggcgtgatgcggatttttggaggcgtccagcagctccgtgagatttacaaggacaaccggaacctgttcgaggtacaggagaatgagcctcagaagttggtggagaaggtggcaggggacattgagagccttctggacaggaaggtgcaggccctgaagagactggctgatgctgcagagaacttccagaaagcacaccgctggcaggacaacatcaaggaggaagacatcgtgtactatgacgccaaggctgacgctgagctggacgaccctgagagtgaggatgtggaaagggggtctaaggccagcaccctaaggctggacttcatcgaggacccaaacttcaagaacaaggtcaactattcatacgcggctgtacagatccctacggacatctacaaaggctccactgtcatcctcaatgagctcaactggacagaggccctggagaatgtgttcatggaaaaccgcagacaagaccccacactgctgtggcaggtcttcggcagcgccacaggagtcactcgctactacccggccaccccgtggcgagcccccaagaagatcgacctgtacgatgtccgaaggagaccctggtatatccagggggcctcgtcacccaaagacatggtcatcatcgtggatgtgagtggcagtgtgagcggcctgaccctgaagctgatgaagacatctgtctgcgagatgctggacacgctgtctgatgatgactatgtgaatgtggcctcgttcaacgagaaggcacagcctgtgtcatgcttcacacacctggtgcaggccaatgtgcgcaacaagaaggtgttcaaggaagctgtgcagggcatggtggccaagggcaccacaggctacaaggccggctttgagtatgcctttgaccagctgcagaactccaacatcactcgggccaactgcaacaagatgatcatgatgttcacggatggtggtgaggaccgcgtgcaggacgtctttgagaagtacaattggccaaaccggacggtgcgcgtgtttactttctccgtggggcagcataactatgacgtcacaccgctgcagtggatggcctgtgccaacaaaggctactattttgagatcccttccatcggagccatccgcatcaacacacaggaatatctagatgtgttgggcaggcccatggtgctggcaggcaaggaggccaagcaggtgcagtggaccaacgtgtatgaggatgcactgggactggggttggtggtaacagggaccctccctgttttcaacctgacacaggatggccctggggaaaagaagaaccagctgatcctgggcgtgatgggcattgacgtggctctgaatgacatcaagaggctgacccccaactacacgcttggagccaacggctatgtgtttgccattgacctgaacggctacgtgttgctgcaccccaatctcaagccccagaccaccaacttccgggagcctgtgactctggacttcctggatgcggagctagaggatgagaacaaggaagagatccgtcggagcatgattgatggcaacaagggccacaagcagatcagaacgttggtcaagtccctggatgagaggtacatagatgaggtgacacggaactacacctgggtgcctataaggagcactaactacagcctggggctggtgctcccaccctacagcaccttctacctccaagccaatctcagtgaccagatcctgcaggtcaagtattttgagttcctgctccccagcagctttgagtctgaaggacacgttttcattgctcccagagagtactgcaaggacctgaatgcctcagacaacaacaccgagttcctgaaaaactttattgagctcatggagaaagtgactccagactccaagcagtgcaacaacttccttctgcacaacctgatcttggacacgggcatcacgcagcagctggtagagcgtgtgtggagggaccaggatctcaacacgtacagcctactggccgtgttcgctgccacagacggtggcatcacccgagtcttccccaacaaggcagctgaggactggacagagaaccctgagcccttcaatgccagcttctaccgccgcagcctggataaccacggttatgtcttcaagcccccacaccaggatgccctgttaaggccgctggagctggagaatgacactgtgggcatcctcgtcagcacagctgtggagctcagcctaggcaggcgcacactgaggccagcagtggtgggcgtcaagctggacctagaggcttgggctgagaagttcaaggtgctagccagcaaccgtacccaccaagaccagcctcagaagtgcggccccaacagccactgtgagatggactgcgaggttaacaatgaggacttactctgtgtcctcattgatgatggaggattcctggtgctgtcaaaccagaaccatcagtgggaccaggtgggcaggttcttcagtgaggtggatgccaacctgatgctggcactctacaataactccttctacacccgcaaggagtcctatgactatcaggcagcctgtgcccctcagccccctggcaacctgggtgctgcaccccggggtgtctttgtgcccaccgttgcagatttccttaacctggcctggtggacctctgctgccgcctggtccctgttccagcagcttctctacggcctcatctaccacagctggttccaagcagaccccgcggaggccgaggggagccccgagacgcgcgagagcagctgcgtcatgaaacagacccagtactacttcggctcggtaaacgcctcctacaacgccatcatcgactgcggaaactgctccaggctgttccacgcgcagagactgaccaacaccaatcttctctttgtggtggccgagaagccgctgtgcagccagtgcgaggctggccggctgctgcagaaggagacgcactcggacggcccggagcagtgtgagctagtgcagagaccgcgataccggagaggcccgcacatctgcttcgactacaacgcgacagaagatacctcagactgtggccgcggggcctccttcccgccgtcgctgggcgtcctggtctccctgcaactgctgctcctcctgggcctgccgccccggccgcagcctcaagtcctcgtccacgcctctcgccgcctctgagcaccctgccccaccccacctccactcccacctcacccggcctcttcgcctttcccaccctcctgccccacactccccgccttagagcctcgtccctccctcactgaaggacctgagctggccaggccctgagagtctggtctgcgccttgggatggggagtcccaaagcgggacgccgcaggtgtttggcacccaaatcacatctcacctccgaactgttcaagtgtccccagacccttcttgcctgctgggctccccccagtgggatgggacagggaggccacacgcactggtgccaaaaccaggcctctgctgccgcccttcctggaggctgcctatgttgggggggaccctgcctcagctgacccggcctctctgccccacccaagcccaaacttggtttctgtgagaatagtggaggaaggtgagatggccagtttgaagcctgtgcctcccagcttaaatcctagcaggagagaggctctggggcagcccccatgggctcctgcccctttcaggcctacagccacatccccaagcccaccaggtgtcaggatagtcacagtgataccagttcagacactaccccatatacacctggaacattgaggatggaaactggactcacattcgacataccccactgggcacacgcacaaacacacacactatggggtggggtgggtgtaggggcttacaaagccttacacagggcgaggggttggtgggagggttggcacctgcacactccatctcctgctcaccacctgcctctaatctgagctgcagcctggctggtcctcccatttctaaagctgaatgtcaaacagtgccaaatgctggggcagggggtgaagaaccctctgtcccacccctagccaccagtgtcctccaagtgccccctcacctctccaggtgctcattgtaaccatttctcactagtgtcaggcccccagtgggaccacatgccactgcctgcacctttcggcagaggaacccccaccagacatcaccctttgccttagcaggggtgactttgtctctcctggctgggccatccttccgccaatctggcccttacacactcaggcctgtgcccactccctatctccttcccacccctacacacacactccctgcttgcaggaggccaaactgtccctcccttgctgaacacacacacacacacacacacacaggtggggactgggcacagctcttcacaccattcattctggtcatttcccccaaaggcatcccagcctgggggccagtggggaactgagggcaaggggatatagtgatggggctcagatggactgggaggagggggagggtgatgcattaattaatggcttcgttaattaatgtcatgttgcttgtcgctttctcagtgtgtgtgtgtggtccatgcccactgctggtgccagggtgggtgtccatgtgcacccggcctggatgccagctgtgtccttcgggggcgtgcgtgtaactgtagtgtagtcaggtgctcaatggagaatataaacatatacagaaaaatatatattttaagtttaaaaaacagaaaaacagacaaaacaatccccatcaggtagctgtctaacccccagctgggtctaatccttctcattacccacccgacctggctgcccctcaccttgggctgggggactggggggccatttccttttctctgccctttttttgttgttctattttgtacagacaagttggaaaaacaacagcgacaaaaaagtcaagaaactttgtaaaatatcgtgtgtgtgattccttgtaaaatattttcaaatggtttattacagaagatcagttattaaataatgttcatattttcacttcaaa

SEQ ID NO: 2311 - protein, 1143 aa, Homosapiens; identical to SEQ ID NO: 247

SEQ ID NO: 2312 - DNA, 5269 bp, Homosapiens
gcgaagcgagtggctgcagagggctgcatcctgccgtccccagccccccacaaccgtacagccgtgcccaggtttccgcttagggaaccaggaggtccaggccctttctgccagcagccgggcgtgcaagcccccgacagagagaaatcttaaagatagctagagccacgggggctgatgcagcactgggcccggcgtctggagcaggaggtcgacggcgtgatgcggatttttggaggcgtccagcagctccgtgagatttacaaggacaaccggaacctgttcgaggtacaggagaatgagcctcagaagttggtggagaaggtggcaggggacattgagagccttctggacaggaaggtgcaggccctgaagagactggctgatgctgcagagaacttccagaaagcacaccgctggcaggacaacatcaaggaggaagacatcgtgtactatgacgccaaggctgacgctgagctggacgaccctgagagtgaggatgtggaaagggggtctaaggccagcaccctaaggctggacttcatcgaggacccaaacttcaagaacaaggtcaactattcatacgcggctgtacagatccctacggacatctacaaaggctccactgtcatcctcaatgagctcaactggacagaggccctggagaatgtgttcatggaaaaccgcagacaagaccccacactgctgtggcaggtcttcggcagcgccacaggagtcactcgctactacccggccaccccgtggcgagcccccaagaagatcgacctgtacgatgtccgaaggagaccctggtatatccagggggcctcgtcacccaaagacatggtcatcatcgtggatgtgagtggcagtgtgagcggcctgaccctgaagctgatgaagacatctgtctgcgagatgctggacacgctgtctgatgatgactatgtgaatgtggcctcgttcaacgagaaggcacagcctgtgtcatgcttcacacacctggtgcaggccaatgtgcgcaacaagaaggtgttcaaggaagctgtgcagggcatggtggccaagggcaccacaggctacaaggccggctttgagtatgcctttgaccagctgcagaactccaacatcactcgggccaactgcaacaagatgatcatgatgttcacggatggtggtgaggaccgcgtgcaggacgtctttgagaagtacaattggccaaaccggacggtgcgcgtgtttactttctccgtggggcagcataactatgacgtcacaccgctgcagtggatggcctgtgccaacaaaggctactattttgagatcccttccatcggagccatccgcatcaacacacaggaatatctagatgtgttgggcaggcccatggtgctggcaggcaaggaggccaagcaggtgcagtggaccaacgtgtatgaggatgcactgggactggggttggtggtaacagggaccctccctgttttcaacctgacacaggatggccctggggaaaagaagaaccagctgatcctgggcgtgatgggcattgacgtggctctgaatgacatcaagaggctgacccccaactacacgcttggagccaacggctatgtgtttgccattgacctgaacggctacgtgttgctgcaccccaatctcaagccccagaccaccaacttccgggagcctgtgactctggacttcctggatgcggagctagaggatgagaacaaggaagagatccgtcggagcatgattgatggcaacaagggccacaagcagatcagaacgttggtcaagtccctggatgagaggtacatagatgaggtgacacggaactacacctgggtgcctataaggagcactaactacagcctggggctggtgctcccaccctacagcaccttctacctccaagccaatctcagtgaccagatcctgcaggtcaagtattttgagttcctgctccccagcagctttgagtctgaaggacacgttttcattgctcccagagagtactgcaaggacctgaatgcctcagacaacaacaccgagttcctgaaaaactttattgagctcatggagaaagtgactccagactccaagcagtgcaacaacttccttctgcacaacctgatcttggacacgggcatcacgcagcagctggtagagcgtgtgtggagggaccaggatctcaacacgtacagcctactggccgtgttcgctgccacagacggtggcatcacccgagtcttccccaacaaggcagctgaggactggacagagaaccctgagcccttcaatgccagcttctaccgccgcagcctggataaccacggttatgtcttcaagcccccacaccaggatgccctgttaaggccgctggagctggagaatgacactgtgggcatcctcgtcagcacagctgtggagctcagcctaggcaggcgcacactgaggccagcagtggtgggcgtcaagctggacctagaggcttgggctgagaagttcaaggtgctagccagcaaccgtacccaccaagaccagcctcagaagtgcggccccaacagccactgtgagatggactgcgaggttaacaatgaggacttactctgtgtcctcattgatgatggaggattcctggtgctgtcaaaccagaaccatcagtgggaccaggtgggcaggttcttcagtgaggtggatgccaacctgatgctggcactctacaataactccttctacacccgcaaggagtcctatgactatcaggcagcctgtgcccctcagccccctggcaacctgggtgctgcaccccggggtgtctttgtgcccaccgttgcagatttccttaacctggcctggtggacctctgctgccgcctggtccctgttccagcagcttctctacggcctcatctaccacagctggttccaagcagaccccgcggaggccgaggggagccccgagacgcgcgagagcagctgcgtcatgaaacagacccagtactacttcggctcggtaaacgcctcctacaacgccatcatcgactgcggaaactgctccaggctgttccacgcgcagagactgaccaacaccaatcttctctttgtggtggccgagaagccgctgtgcagccagtgcgaggctggccggctgctgcagaaggagacgcactcggacggcccggagcagtgtgagctagtgcagagaccgcgataccggagaggcccgcacatctgcttcgactacaacgcgacagaagatacctcagactgtggccgcggggcctccttcccgccgtcgctgggcgtcctggtctccctgcaactgctgctcctcctgggcctgccgccccggccgcagcctcaagtcctcgtccacgcctctcgccgcctctgagcaccctgccccaccccacctccactcccacctcacccggcctcttcgcctttcccaccctcctgccccacactccccgccttagagcctcgtccctccctcactgaaggacctgagctggccaggccctgagagtctggtctgcgccttgggatggggagtcccaaagcgggacgccgcaggtgtttggcacccaaatcacatctcacctccgaactgttcaagtgtccccagacccttcttgcctgctgggctccccccagtgggatgggacagggaggccacacgcactggtgccaaaaccaggcctctgctgccgcccttcctggaggctgcctatgttgggggggaccctgcctcagctgacccggcctctctgccccacccaagcccaaacttggtttctgtgagaatagtggaggaaggtgagatggccagtttgaagcctgtgcctcccagcttaaatcctagcaggagagaggctctggggcagcccccatgggctcctgcccctttcaggcctacagccacatccccaagcccaccaggtgtcaggatagtcacagtgataccagttcagacactaccccatatacacctggaacattgaggatggaaactggactcacattcgacataccccactgggcacacgcacaaacacacacactatggggtggggtgggtgtaggggcttacaaagccttacacagggcgaggggttggtgggagggttggcacctgcacactccatctcctgctcaccacctgcctctaatctgagctgcagcctggctggtcctcccatttctaaagctgaatgtcaaacagtgccaaatgctggggcagggggtgaagaaccctctgtcccacccctagccaccagtgtcctccaagtgccccctcacctctccaggtgctcattgtaaccatttctcactagtgtcaggcccccagtgggaccacatgccactgcctgcacctttcggcagaggaacccccaccagacatcaccctttgccttagcaggggtgactttgtctctcctggctgggccatccttccgccaatctggcccttacacactcaggcctgtgcccactccctatctccttcccacccctacacacacactccctgcttgcaggaggccaaactgtccctcccttgctgaacacacacacacacacacacacacaggtggggactgggcacagctcttcacaccattcattctggtcatttcccccaaaggcatcccagcctgggggccagtggggaactgagggcaaggggatatagtgatggggctcagatggactgggaggagggggagggtgatgcattaattaatggcttcgttaattaatgtcatgttgcttgtcgctttctcagtgtgtgtgtgtggtccatgcccactgctggtgccagggtgggtgtccatgtgcacccggcctggatgccagctgtgtccttcgggggcgtgcgtgtaactgtagtgtagtcaggtgctcaatggagaatataaacatatacagaaaaatatatattttaagtttaaaaaacagaaaaacagacaaaacaatccccatcaggtagctgtctaacccccagctgggtctaatccttctcattacccacccgacctggctgcccctcaccttgggctgggggactggggggccatttccttttctctgccctttttttgttgttctattttgtacagacaagttggaaaaacaacagcgacaaaaaagtcaagaaactttgtaaaatatcgtgtgtgtgattccttgtaaaatattttcaaatggtttattacagaagatcagttattaaataatgttcatattttcacttcaaa

SEQ ID NO: 2313 - protein, 1074 aa, Homosapiens
MQHWARRLEQEVDGVMRIFGGVQQLREIYKDNRNLFEVQENEPQKLVEKVAGDIESLLDRKVQALKRLADAAENFQKAHRWQDNIKEEDIVYYDAKADAELDDPESEDVERGSKASTLRLDFIEDPNFKNKVNYSYAAVQIPTDIYKGSTVILNELNWTEALENVFMENRRQDPTLLWQVFGSATGVTRYYPATPWRAPKKIDLYDVRRRPWYIQGASSPKDMVIIVDVSGSVSGLTLKLMKTSVCEMLDTLSDDDYVNVASFNEKAQPVSCFTHLVQANVRNKKVFKEAVQGMVAKGTTGYKAGFEYAFDQLQNSNITRANCNKMIMMFTDGGEDRVQDVFEKYNWPNRTVRVFTFSVGQHNYDVTPLQWMACANKGYYFEIPSIGAIRINTQEYLDVLGRPMVLAGKEAKQVQWTNVYEDALGLGLVVTGTLPVFNLTQDGPGEKKNQLILGVMGIDVALNDIKRLTPNYTLGANGYVFAIDLNGYVLLHPNLKPQTTNFREPVTLDFLDAELEDENKEEIRRSMIDGNKGHKQIRTLVKSLDERYIDEVTRNYTWVPIRSTNYSLGLVLPPYSTFYLQANLSDQILQVKYFEFLLPSSFESEGHVFIAPREYCKDLNASDNNTEFLKNFIELMEKVTPDSKQCNNFLLHNLILDTGITQQLVERVWRDQDLNTYSLLAVFAATDGGITRVFPNKAAEDWTENPEPFNASFYRRSLDNHGYVFKPPHQDALLRPLELENDTVGILVSTAVELSLGRRTLRPAVVGVKLDLEAWAEKFKVLASNRTHQDQPQKCGPNSHCEMDCEVNNEDLLCVLIDDGGFLVLSNQNHQWDQVGRFFSEVDANLMLALYNNSFYTRKESYDYQAACAPQPPGNLGAAPRGVFVPTVADFLNLAWWTSAAAWSLFQQLLYGLIYHSWFQADPAEAEGSPETRESSCVMKQTQYYFGSVNASYNAIIDCGNCSRLFHAQRLTNTNLLFVVAEKPLCSQCEAGRLLQKETHSDGPEQCELVQRPRYRRGPHICFDYNATEDTSDCGRGASFPPSLGVLVSLQLLLLLGLPPRPQPQVLVHASRRL

SEQ ID NO: 2314 - DNA, 1434 bp, Homosapiens
tctggtctgcgccttgggatggggagtcccaaagcgggacgccgcaggtgtttggcacccaaatcacatctcacctccgaactgttcaagtgtccccagacccttcttgcctgctgggctccccccagtgggatgggacagggaggccacacgcactggtgccaaaaccaggcctctgctgccgcccttcctggaggctgcctatgttgggggggaccctgcctcagctgacccggcctctctgccccacccaagcccaaacttggtttctgtgagaatagtggaggaaggtgagatggccagtttgaagcctgtgcctcccagcttaaatcctagcaggagagaggctctggggcagcccccatgggctcctgcccctttcaggcctacagccacatccccaagcccaccaggtgtcaggatagtcacagtgataccagttcagacactaccccatatacacctggaacattgaggatggaaactggactcacattcgacataccccactgggcacacgcacaaacacacacactatggggtggggtgggtgtaggggcttacaaagccttacacagggcgaggggttggtgggagggttggcacctgcacactccatctcctgctcaccacctgcctctaatctgagctgcagcctggctggtcctcccatttctaaagctgaatgtcaaacagtgccaaatgctggggcagggggtgaagaaccctctgtcccacccctagccaccagtgtcctccaagtgccccctcacctctccaggtgctcattgtaaccatttctcactagtgtcaggcccccagtgggaccacatgccactgcctgcacctttcggcagaggaacccccaccagacatcaccctttgccttagcaggggtgactttgtctctcctggctgggccatccttccgccagtggggaactgagggcaaggggatatagtgatggggctcagatggactgggaggagggggagggtgatgcattaattaatggcttcgttaattaatgtcatgttgcttgtcgctttctcagtgtgtgtgtgtggtccatgcccactgctggtgccagggtgggtgtccatgtgcacccggcctggatgccagctgtgtccttcgggggcgtgcgtgtaactgtagtgtagtcaggtgctcaatggagaatataaacatatacagaaaaatatatattttaagtttaaaaaacagaaaaacagacaaaacaatccccatcaggtagctgtctaacccccagctgggtctaatccttctcattacccacccgacctggctgcccctcaccttgggctgggggactggggggccatttccttttctctgccctttttttgttgttctattttgtacagacaagttggaaaaacaacagcgacaaaaaagtcaagaaactttgt

SEQ ID NO: 2315 - protein, 94 aa, Homosapiens; identical to SEQ ID NO: 2307

SEQ ID NO: 2316 - DNA, 2489 bp, Homosapiens
gaaggtgctccctggccgggagggctcagaagagaagtagggcatggcatcgtcctctgctgaccacctgcactcggctccccgtgcgctgcaggtccctgttccagcagcttctctacggcctcatctaccacagctggttccaagcagaccccgcggaggccgaggggagccccgagacgcgcgagagcagctgcgtcatgaaacagacccagtactacttcggctcggtaaacgcctcctacaacgccatcatcgactgcggaaactgctccaggctgttccacgcgcagagactgaccaacaccaatcttctctttgtggtggccgagaagccgctgtgcagccagtgcgaggctggccggctgctgcagaaggagacgcactgtatcctgcccccgccctccccgccgcccgctccccctctgccccgcgcgccccctccgtgccgccgccgccgtccgcctccttgactccccacccatgcccagcggacggcccggagcagtgtgagctagtgcagagaccgcgataccggagaggcccgcacatctgcttcgactacaacgcgacagaagatacctcagactgtggccgcggggcctccttcccgccgtcgctgggcgtcctggtctccctgcaactgctgctcctcctgggcctgccgccccggccgcagcctcaagtcctcgtccacgcctctcgccgcctctgagcaccctgccccaccccacctccactcccacctcacccggcctcttcgcctttcccaccctcctgccccacactccccgccttagagcctcgtccctccctcactgaaggacctgagctggccaggccctgagagtctggtctgcgccttgggatggggagtcccaaagcgggacgccgcaggtgtttggcacccaaatcacatctcacctccgaactgttcaagtgtccccagacccttcttgcctgctgggctccccccagtgggatgggacagggaggccacacgcactggtgccaaaaccaggcctctgctgccgcccttcctggaggctgcctatgttgggggggaccctgcctcagctgacccggcctctctgccccacccaagcccaaacttggtttctgtgagaatagtggaggaaggtgagatggccagtttgaagcctgtgcctcccagcttaaatcctagcaggagagaggctctggggcagcccccatgggctcctgcccctttcaggcctacagccacatccccaagcccaccaggtgtcaggatagtcacagtgataccagttcagacactaccccatatacacctggaacattgaggatggaaactggactcacattcgacataccccactgggcacacgcacaaacacacacactatggggtggggtgggtgtaggggcttacaaagccttacacagggcgaggggttggtgggagggttggcacctgcacactccatctcctgctcaccacctgcctctaatctgagctgcagcctggctggtcctcccatttctaaagctgaatgtcaaacagtgccaaatgctggggcagggggtgaagaaccctctgtcccacccctagccaccagtgtcctccaagtgccccctcacctctccaggtgctcattgtaaccatttctcactagtgtcaggcccccagtgggaccacatgccactgcctgcacctttcggcagaggaacccccaccagacatcaccctttgccttagcaggggtgactttgtctctcctggctgggccatccttccgccaatctggcccttacacactcaggcctgtgcccactccctatctccttcccacccctacacacacactccctgcttgcaggaggccaaactgtccctcccttgctgaacacacacacacacacacacacacaggtggggactgggcacagctcttcacaccattcattctggtcatttcccccaaaggcatcccagcctgggggccagtggggaactgagggcaaggggatatagtgatggggctcagatggactgggaggagggggagggtgatgcattaattaatggcttcgttaattaatgtcatgttgcttgtcgctttctcagtgtgtgtgtgtggtccatgcccactgctggtgccagggtgggtgtccatgtgcacccggcctggatgccagctgtgtccttcgggggcgtgcgtgtaactgtagtgtagtcaggtgctcaatggagaatataaacatatacagaaaaatatatattttaagtttaaaaaacagaaaaacagacaaaacaatccccatcaggtagctgtctaacccccagctgggtctaatccttctcattacccacccgacctggctgcccctcaccttgggctgggggactggggggccatttccttttctctgccctttttttgttgttctattttgtacagacaagttggaaaaacaacagcgacaaaaaagtcaagaaactttgt

SEQ ID NO: 2317 - protein, 223 aa, Homosapiens; identical to SEQ ID NO: 2309

SEQ ID NO: 2318 - DNA, 5206 bp, Homosapiens
atggcggtgccggctcggacctgcggcgcctctcggcccggcccagcgcggactgcgcgcccctggcccggctgcggcccccaccctggccccggcacccggcgcccgacgtccgggcccccgcgcccgctgtggctgctgctgccgcttctaccgctgctcgccgcccccggcgcctctgcctacagcttcccccagcagcacacgatgcagcactgggcccggcgtctggagcaggaggtcgacggcgtgatgcggatttttggaggcgtccagcagctccgtgagatttacaaggacaaccggaacctgttcgaggtacaggagaatgagcctcagaagttggtggagaaggtggcaggggacattgagagccttctggacaggaaggtgcaggccctgaagagactggctgatgctgcagagaacttccagaaagcacaccgctggcaggacaacatcaaggaggaagacatcgtgtactatgacgccaaggctgacgctgagctggacgaccctgagagtgaggatgtggaaagggggtctaaggccagcaccctaaggctggacttcatcgaggacccaaacttcaagaacaaggtcaactattcatacgcggctgtacagatccctacggacatctacaaaggctccactgtcatcctcaatgagctcaactggacagaggccctggagaatgtgttcatggaaaaccgcagacaagaccccacactgctgtggcaggtcttcggcagcgccacaggagtcactcgctactacccggccaccccgtggcgagcccccaagaagatcgacctgtacgatgtccgaaggagaccctggtatatccagggggcctcgtcacccaaagacatggtcatcatcgtggatgtgagtggcagtgtgagcggcctgaccctgaagctgatgaagacatctgtctgcgagatgctggacacgctgtctgatgatgactatgtgaatgtggcctcgttcaacgagaaggcacagcctgtgtcatgcttcacacacctggtgcaggccaatgtgcgcaacaagaaggtgttcaaggaagctgtgcagggcatggtggccaagggcaccacaggctacaaggccggctttgagtatgcctttgaccagctgcagaactccaacatcactcgggccaactgcaacaagatgatcatgatgttcacggatggtggtgaggaccgcgtgcaggacgtctttgagaagtacaattggccaaaccggacggtgcgcgtgtttactttctccgtggggcagcataactatgacgtcacaccgctgcagtggatggcctgtgccaacaaaggctactattttgagatcccttccatcggagccatccgcatcaacacacaggaatatctagatgtgttgggcaggcccatggtgctggcaggcaaggaggccaagcaggtgcagtggaccaacgtgtatgaggatgcactgggactggggttggtggtaacagggaccctccctgttttcaacctgacacaggatggccctggggaaaagaagaaccagctgatcctgggcgtgatgggcattgacgtggctctgaatgacatcaagaggctgacccccaactacacgcttggagccaacggctatgtgtttgccattgacctgaacggctacgtgttgctgcaccccaatctcaagccccagaccaccaacttccgggagcctgtgactctggacttcctggatgcggagctagaggatgagaacaaggaagagatccgtcggagcatgattgatggcaacaagggccacaagcagatcagaacgttggtcaagtccctggatgagaggtacatagatgaggtgacacggaactacacctgggtgcctataaggagcactaactacagcctggggctggtgctcccaccctacagcaccttctacctccaagccaatctcagtgaccagatcctgcaggtcaagtattttgagttcctgctccccagcagctttgagtctgaaggacacgttttcattgctcccagagagtactgcaaggacctgaatgcctcagacaacaacaccgagttcctgaaaaactttattgagctcatggagaaagtgactccagactccaagcagtgcaacaacttccttctgcacaacctgatcttggacacgggcatcacgcagcagctggtagagcgtgtgtggagggaccaggatctcaacacgtacagcctactggccgtgttcgctgccacagacggtggcatcacccgagtcttccccaacaaggcagctgaggactggacagagaaccctgagcccttcaatgccagcttctaccgccgcagcctggataaccacggttatgtcttcaagcccccacaccaggatgccctgttaaggccgctggagctggagaatgacactgtgggcatcctcgtcagcacagctgtggagctcagcctaggcaggcgcacactgaggccagcagtggtgggcgtcaagctggacctagaggcttgggctgagaagttcaaggtgctagccagcaaccgtacccaccaagaccagcctcagaagtgcggccccaacagccactgtgagatggactgcgaggttaacaatgaggacttactctgtgtcctcattgatgatggaggattcctggtgctgtcaaaccagaaccatcagtgggaccaggtgggcaggttcttcagtgaggtggatgccaacctgatgctggcactctacaataactccttctacacccgcaaggagtcctatgactatcaggcagcctgtgcccctcagccccctggcaacctgggtgctgcaccccggggtgtctttgtgcccaccgttgcagatttccttaacctggcctggtggacctctgctgccgcctggtccctgttccagcagcttctctacggcctcatctaccacagctggttccaagcagaccccgcggaggccgaggggagccccgagacgcgcgagagcagctgcgtcatgaaacagacccagtactacttcggctcggtaaacgcctcctacaacgccatcatcgactgcggaaactgctccaggctgttccacgcgcagagactgaccaacaccaatcttctctttgtggtggccgagaagccgctgtgcagccagtgcgaggctggccggctgctgcagaaggagacgcactcggacggcccggagcagtgtgagctagtgcagagaccgcgataccggagaggcccgcacatctgcttcgactacaacgcgacagaagatacctcagactgtggccgcggggcctccttcccgccgtcgctgggcgtcctggtctccctgcaactgctgctcctcctgggcctgccgccccggccgcagcctcaagtcctcgtccacgcctctcgccgcctctgagcaccctgccccaccccacctccactcccacctcacccggcctcttcgcctttcccaccctcctgccccacactccccgccttagagcctcgtccctccctcactgaaggacctgagctggccaggccctgagagtctggtctgcgccttgggatggggagtcccaaagcgggacgccgcaggtgtttggcacccaaatcacatctcacctccgaactgttcaagtgtccccagacccttcttgcctgctgggctccccccagtgggatgggacagggaggccacacgcactggtgccaaaaccaggcctctgctgccgcccttcctggaggctgcctatgttgggggggaccctgcctcagctgacccggcctctctgccccacccaagcccaaacttggtttctgtgagaatagtggaggaaggtgagatggccagtttgaagcctgtgcctcccagcttaaatcctagcaggagagaggctctggggcagcccccatgggctcctgcccctttcaggcctacagccacatccccaagcccaccaggtgtcaggatagtcacagtgataccagttcagacactaccccatatacacctggaacattgaggatggaaactggactcacattcgacataccccactgggcacacgcacaaacacacacactatggggtggggtgggtgtaggggcttacaaagccttacacagggcgaggggttggtgggagggttggcacctgcacactccatctcctgctcaccacctgcctctaatctgagctgcagcctggctggtcctcccatttctaaagctgaatgtcaaacagtgccaaatgctggggcagggggtgaagaaccctctgtcccacccctagccaccagtgtcctccaagtgccccctcacctctccaggtgctcattgtaaccatttctcactagtgtcaggcccccagtgggaccacatgccactgcctgcacctttcggcagaggaacccccaccagacatcaccctttgccttagcaggggtgactttgtctctcctggctgggccatccttccgccaatctggcccttacacactcaggcctgtgcccactccctatctccttcccacccctacacacacactccctgcttgcaggaggccaaactgtccctcccttgctgaacacacacacacacacacacacacaggtggggactgggcacagctcttcacaccattcattctggtcatttcccccaaaggcatcccagcctgggggccagtggggaactgagggcaaggggatatagtgatggggctcagatggactgggaggagggggagggtgatgcattaattaatggcttcgttaattaatgtcatgttgcttgtcgctttctcagtgtgtgtgtgtggtccatgcccactgctggtgccagggtgggtgtccatgtgcacccggcctggatgccagctgtgtccttcgggggcgtgcgtgtaactgtagtgtagtcaggtgctcaatggagaatataaacatatacagaaaaatatatattttaagtttaaaaaacagaaaaacagacaaaacaatccccatcaggtagctgtctaacccccagctgggtctaatccttctcattacccacccgacctggctgcccctcaccttgggctgggggactggggggccatttccttttctctgccctttttttgttgttctattttgtacagacaagttggaaaaacaacagcgacaaaaaagtcaagaaactttgt

SEQ ID NO: 2319 - protein, 1143 aa, Homosapiens; identical to SEQ ID NO: 247

SEQ ID NO: 2320 - DNA, 1085 bp, Homosapiens
cgagcgtctcgccccgctcacaggttccgcccttggcctctggtcccgccccactgccagcacctggagcagtttccgcagtcgatgatggcgttgtaggaggcgtttaccgagccgaagtagtactgggtctgtttcatgacgcagctgctctcgcgcgtctcggggctcccctcggcctccgcggggtctgcgagggcccagagcgcctcagctccgcccacagaccctggcaaggtctccggcctccctcagtcgtagaccccaccctccccatggagtcgtcttagctcagattggggacccggacttgaggaggcgcctccaaagccctacctacctgcttggaaccagctgtggtagatgaggccgtagagaagctgctggaacagggacctgcagcgcacggggagccgagtgcaggtggtcagcagaggacgatgccatgccctacttctcttctgagccctcccggccagggagcaccttctctacccacctcccgctcaggactcaccaggcggcagcagaggtccaccaggccaggttaaggaaatctgcaacggtgggctgcagtggagagaggggcgtggactgccactgctgcccctcgccctaggtcacccccagctttatcaaatgtcagagcaccaggaatcctccatcatcaatgaggacacagagctgggtgatgcctacgtgttgagatcctggtccctccacacacgctctaccagctgctgcgtgatgcccgtgtccaagatcaggttgtgcagaaggaagttgttgcctggaacaggaggggaggggtgggggtgggggcatcttcttgcagctccttgcccaccctcacccccacccttaaggctccaccaggagcctcctccatgacctggccctggcccaggcccagcccttagcttgtgcctgcttatttccacacctgcccggcctctgggttcctctgggctggccccatgctgcctgggcactgcccagagccagctgccctgccaggcactcacactgcttggagtctggagtcactttctccatgagctcaataaagtttttcaggaactcgg

SEQ ID NO: 2321 - protein, 83 aa, Homosapiens
MSEHQESSIINEDTELGDAYVLRSWSLHTRSTSCCVMPVSKIRLCRRKLLPGTGGEGWGWGHLLAAPCPPSPPPLRLHQEPPP

SEQ ID NO: 2322 - DNA, 983 bp, Homosapiens
cgagcgtctcgccccgctcacaggttccgcccttggcctctggtcccgccccactgccagcacctggagcagtttccgcagtcgatgatggcgttgtaggaggcgtttaccgagccgaagtagtactgggtctgtttcatgacgcagctgctctcgcgcgtctcggggctcccctcggcctccgcggggtctgcgagggcccagagcgcctcagctccgcccacagaccctggcaaggtctccggcctccctcagtcgtagaccccaccctccccatggagtcgtcttagctcagattggggacccggacttgaggaggcgcctccaaagccctacctacctgcttggaaccagctgtggtagatgaggccgtagagaagctgctggaacagggacctgcagcgcacggggagccgagtgcaggtggtcagcagaggacgatgccatgccctacttctcttctgagccctcccggccagggagcaccttctctacccacctcccgctcaggactcaccaggcggcagcagaggtccaccaggccagcaccaggaatcctccatcatcaatgaggacacagagctgggtgatgcctacgtgttgagatcctggtccctccacacacgctctaccagctgctgcgtgatgcccgtgtccaagatcaggttgtgcagaaggaagttgttgcctggaacaggaggggaggggtgggggtgggggcatcttcttgcagctccttgcccaccctcacccccacccttaaggctccaccaggagcctcctccatgacctggccctggcccaggcccagcccttagcttgtgcctgcttatttccacacctgcccggcctctgggttcctctgggctggccccatgctgcctgggcactgcccagagccagctgccctgccaggcactcacactgcttggagtctggagtcactttctccatgagctcaataaagtttttcaggaactcgg

SEQ ID NO: 2323 - protein, 52 aa, Homosapiens
MPYFSSEPSRPGSTFSTHLPLRTHQAAAEVHQASTRNPPSSMRTQSWVMPTC

SEQ ID NO: 2324 - DNA, 461 bp, Homosapiens
agggctcagggttctctgtccagtcctcagctgccctggagcacccaagaggcagactggctgggtgatgcctacgtgttgagatcctggtccctccacacacgctctaccagctgctgcgtgatgcccgtgtccaagatcaggttgtgcagaaggaagttgttgcctggaacaggaggggaggggtgggggtgggggcatcttcttgcagctccttgcccaccctcacccccacccttaaggctccaccaggagcctcctccatgacctggccctggcccaggcccagcccttagcttgtgcctgcttatttccacacctgcccggcctctgggttcctctgggctggccccatgctgcctgggcactgcccagagccagctgccctgccaggcactcacactgcttggagtctggagtcactttctccatgagctcaataaagtttttcaggaactcgg

SEQ ID NO: 2325 - protein, 47 aa, Homosapiens
MPVSKIRLCRRKLLPGTGGEGWGWGHLLAAPCPPSPPPLRLHQEPPP

SEQ ID NO: 2326 - DNA, 2799 bp, Homosapiens
tattcagcgatggcatttgcatggtggccctgtctcatcttggctctgctctccagcttggcagcctctggcttcccgagaagcccctttcggctgcttgggaaacggagcctcccggaaggggtggccaatggcatcgaggtctacagtaccaaaatcaactccaaggtgacctcccgttttgctcacaatgttgtcaccatgagagccgtcaaccgtgcagacacggccaaggaggtttcctttgatgtggagctgcccaagacggccttcatcaccaacttcaccttgaccatcgacggtgttacctaccctgggaatgtcaaggagaaggaagttgccaagaagcagtatgaaaaggctgtgtcccagggcaagacggccggcttggtcaaggcctctgggaggaagttggagaagttcacagtctcggtcaacgtggctgcaggcagcaaagtcaccttcgagctaacctacgaggagctgctgaagaggcacaagggcaagtacgagatgtacctcaaggtccagcctaagcaactggtcaaacactttgagatcgaggtagacatcttcgagcctcagggaatcagcatgctggatgctgaggcctctttcatcaccaacgacctcctgggaagcgccctcaccaagtccttctcagggaaaaagggccatgtgtccttcaagcccagcttagaccaacagcgttcatgcccaacctgtacagactccctcctcaatggagatttcactatcacctatgacgtgaacagagaatctcctggcaacgtgcagatagtcaatggctacttcgtgcacttctttgcacctcaaggccttccagtggtgcctaagaacgtggcctttgtgattgacatcagcggctccatggctggtcggaaattagagcagacaaaggaggcccttctcagaatcctggaagatatgcaagaggaagactatctgaatttcatcctgttcagtggagatgtgtccacatggaaagagcacttagtccaggccacgcccgagaacctccaggaggccaggacgtttgtgaagagcatggaggataaaggaatgaccaacatcaatgacgggctgctgaggggcatcagtatgctgaacaaggcccgagaggagcacagaatcccagagaggagcacctccattgtcatcatgctgactgatggggatgccaatgttggtgagagcagacccgaaaaaatccaagagaatgtgcggaatgccatcgggggcaagttccccttgtataacctgggctttggcaacaatctgaattataacttcctggagaacatggccctggagaaccatgggtttgcccggcgcatttatgaggactctgatgccgatttgcagttgcagggcttctatgaggaggtggccaacccactgctgacgggtgtggagatggagtaccccgagaacgctatcctggacctcacccagaacacttaccagcacttctacgatggctctgagatcgtggtggccgggcgcctggtggacgaggacatgaacagctttaaggcagatgtgaagggccatggggccaccaacgacctgaccttcacagaggaggtggacatgaaggagatggagaaggccctgcaggagcgggactacatcttcgggaattacattgagcggctctgggcctacctcaccattgagcagctgctggagaagcgcaagaacgcccatggcgaggagaaggagaacctcacggcccgggccctggacctgtccctcaagtatcactttgtgactccactgacctcaatggtggtgaccaagcctgaggacaacgaggatgagagggccattgccgacaagcctggggaagatgcagaagccacaccggtgagccccgccatgtcctacctgaccagctaccagcctcctcaaaacccctactactatgtggacggggatccccacttcatcatccaaattccggagaaagacgatgccctctgcttcaacatcgatgaagccccaggcacagtgctgcgccttattcaggatgcagtcacaggcctcacagttaatgggcagatcactggcgacaagagaggcagccctgactccaagaccagaaagacttactttggaaaactgggcatcgccaatgctcagatggacttccaggtggaggtgacaacggagaagatcaccctgtggaacagggccgtgccgagcactttcagctggctggacacagtcacagtcacgcaggatgggctgtccatgatgatcaacaggaagaacatggtggtctcctttggagatggggttaccttcgtggtcgtcctacaccaggtgtggaagaaacatcctgtccaccgtgactttctaggcttctacgtggtggacagtcaccggatgtcagcacagacgcatgggctgctggggcaattcttccaaccctttgactttaaagtgtctgacatccggccaggctctgaccccacaaagccagatgccacattggtggtgaagaaccatcagctgattgtcaccaggggctcccagaaagactacagaaaggatgccagcatcggcacgaaggttgtctgctggttcgtccacaacaacggagaagggctgattgatggtgtccacactgactacattgtccccaacctgttttgagtagacacaccagctcctgttgggatggatggcccggattttatggcatctggaacatgggcacagagaggggcctgtgggaggggctgggaaaataaagtccaaggtcgagaccag

SEQ ID NO: 2327 - protein, 890 aa, Homosapiens
MAFAWWPCLILALLSSLAASGFPRSPFRLLGKRSLPEGVANGIEVYSTKINSKVTSRFAHNVVTMRAVNRADTAKEVSFDVELPKTAFITNFTLTIDGVTYPGNVKEKEVAKKQYEKAVSQGKTAGLVKASGRKLEKFTVSVNVAAGSKVTFELTYEELLKRHKGKYEMYLKVQPKQLVKHFEIEVDIFEPQGISMLDAEASFITNDLLGSALTKSFSGKKGHVSFKPSLDQQRSCPTCTDSLLNGDFTITYDVNRESPGNVQIVNGYFVHFFAPQGLPVVPKNVAFVIDISGSMAGRKLEQTKEALLRILEDMQEEDYLNFILFSGDVSTWKEHLVQATPENLQEARTFVKSMEDKGMTNINDGLLRGISMLNKAREEHRIPERSTSIVIMLTDGDANVGESRPEKIQENVRNAIGGKFPLYNLGFGNNLNYNFLENMALENHGFARRIYEDSDADLQLQGFYEEVANPLLTGVEMEYPENAILDLTQNTYQHFYDGSEIVVAGRLVDEDMNSFKADVKGHGATNDLTFTEEVDMKEMEKALQERDYIFGNYIERLWAYLTIEQLLEKRKNAHGEEKENLTARALDLSLKYHFVTPLTSMVVTKPEDNEDERAIADKPGEDAEATPVSPAMSYLTSYQPPQNPYYYVDGDPHFIIQIPEKDDALCFNIDEAPGTVLRLIQDAVTGLTVNGQITGDKRGSPDSKTRKTYFGKLGIANAQMDFQVEVTTEKITLWNRAVPSTFSWLDTVTVTQDGLSMMINRKNMVVSFGDGVTFVVVLHQVWKKHPVHRDFLGFYVVDSHRMSAQTHGLLGQFFQPFDFKVSDIRPGSDPTKPDATLVVKNHQLIVTRGSQKDYRKDASIGTKVVCWFVHNNGEGLIDGVHTDYIVPNLF

SEQ ID NO: 2328 - DNA, 2181 bp, Homosapiens
aagcaagataggacccccagccatgggggcacacttgggacacctgggctcaggcccagccctattgccaaatcatgaacgtgcccctctctgagcctgaggatccctgtgagttaattgggggtggcttcccttgcccagggagacacaatcagtatgacagtatctatgacctgcaaaaatgagcaatttagcatgtcagtcatttatacttcattagtcccatagcaaccctccaagagggcccttttatgatccccattttacaatggggaaattgaggcacggggggttaatttgctcagtctgtttgctcacagactcagcagatggccaagctggtacttaggccaaggcagtctggccccaatgcccatgctgggaattgctggggatcacagtcctctgtgcctctctcaccacaaaactggaacctcacaaactccctgccactaggcagggcctccccagcccctactggcctgccccacctccatttggactggcacatttggactgggccatcacattcccctcagaacagccctgataaatgtaccggtgcatgtgagtacatatatgcatgtgcacgcatatgtgtgcgcctgtgtgcacgtgtgggtgggtgtttactatcaagaagcaacagacagccgtgagcctcactcaccccaactagggggtgggaagcccaggggtggggcagatgtttgctgtgagcattactcaagagagagaagatgacttaatggcttgcatttcagccacatcaaaaagccctgcgccaacgttaaaatcacatcccattgccaccagccccataaagggcttccctggacgtgcccgatttccaaagcctaatctttgtagtcacatctccacctctatctgccagtgttggggcccctctggggcccagcagcgctaagacaggaggaaggcacggggctgggggagaaggaacccctagaccctgctcaccactgcccttcggcttttcagccacaccggtgagccccgccatgtcctacctgagtgagtacatgctggcagctgccactcctcccactgcttagagcctgcccctgccacatgtccctccaccgtggctactcactcagctctccgggatgggcagatggacaatgtgccctgaggagattgcggggtgggagggcaatggcattagcgagcgggaaggggaggggaggggcataagctgaactcctatgggggtcgtcgggcgcctcccagggccacttgcttagctcagccctctctccctttgtatctgcagccagctaccagcctcctcaaaacccctactactatgtggacggggatccccacttcatcatccaaattccggagaaagacgatgccctctgcttcaacatcgatgaagccccaggcacagtgctgcgccttattcaggatgcagtcacaggcctcacagttaatgggcagatcactggcgacaagagaggcagccctgactccaagaccagaaagacttactttggaaaactgggcatcgccaatgctcagatggacttccaggtggaggtgacaacggagaagatcaccctgtggaacagggccgtgccgagcactttcagctggctggacacagtcacagtcacgcaggatgggctgtccatgatgatcaacaggaagaacatggtggtctcctttggagatggggttaccttcgtggtcgtcctacaccaggtgtggaagaaacatcctgtccaccgtgactttctaggcttctacgtggtggacagtcaccggatgtcagcacagacgcatgggctgctggggcaattcttccaaccctttgactttaaagtgtctgacatccggccaggctctgaccccacaaagccagatgccacattggtggtgaagaaccatcagctgattgtcaccaggggctcccagaaagactacagaaaggatgccagcatcggcacgaaggttgtctgctggttcgtccacaacaacggagaagggctgattgatggtgtccacactgactacattgtccccaacctgttttgagtagacacaccagctcctgttgggatggatggcccggattttatggcatctggaacatgggcacagagaggggcctgtgggaggggctgggaaaataaagtccaaggtcgagaccag

SEQ ID NO: 2329 - protein, 171 aa, Homosapiens
MDFQVEVTTEKITLWNRAVPSTFSWLDTVTVTQDGLSMMINRKNMVVSFGDGVTFVVVLHQVWKKHPVHRDFLGFYVVDSHRMSAQTHGLLGQFFQPFDFKVSDIRPGSDPTKPDATLVVKNHQLIVTRGSQKDYRKDASIGTKVVCWFVHNNGEGLIDGVHTDYIVPNLF

SEQ ID NO: 2330 - DNA, 2392 bp, Homosapiens
aagcaagataggacccccagccatgggggcacacttgggacacctgggctcaggcccagccctattgccaaatcatgaacgtgcccctctctgagcctgaggatccctgtgagttaattgggggtggcttcccttgcccagggagacacaatcagtatgacagtatctatgacctgcaaaaatgagcaatttagcatgtcagtcatttatacttcattagtcccatagcaaccctccaagagggcccttttatgatccccattttacaatggggaaattgaggcacggggggttaatttgctcagtctgtttgctcacagactcagcagatggccaagctggtacttaggccaaggcagtctggccccaatgcccatgctgggaattgctggggatcacagtcctctgtgcctctctcaccacaaaactggaacctcacaaactccctgccactaggcagggcctccccagcccctactggcctgccccacctccatttggactggcacatttggactgggccatcacattcccctcagaacagccctgataaatgtaccggtgcatgtgagtacatatatgcatgtgcacgcatatgtgtgcgcctgtgtgcacgtgtgggtgggtgtttactatcaagaagcaacagacagccgtgagcctcactcaccccaactagggggtgggaagcccaggggtggggcagatgtttgctgtgagcattactcaagagagagaagatgacttaatggcttgcatttcagccacatcaaaaagccctgcgccaacgttaaaatcacatcccattgccaccagccccataaagggcttccctggacgtgcccgatttccaaagcctaatctttgtagtcacatctccacctctatctgccagtgttggggcccctctggggcccagcagcgctaagacaggaggaaggcacggggctgggggagaaggaacccctagaccctgctcaccactgcccttcggcttttcagccacaccggtgagccccgccatgtcctacctgagtgagtacatgctggcagctgccactcctcccactgcttagagcctgcccctgccacatgtccctccaccgtggctactcactcagctctccgggatgggcagatggacaatgtgccctgaggagattgcggggtgggagggcaatggcattagcgagcgggaaggggaggggaggggcataagctgaactcctatgggggtcgtcgggcgcctcccagggccacttgcttagctcagccctctctccctttgtatctgcagccagctaccagcctcctcaaaacccctactactatgtggacggggatccccacttcatcatccaaattccggagaaagacgatgccctctgcttcaacatcgatgaagccccaggcacagtgctgcgccttattcaggatgcagtcacaggcctcacagttaatgggcagatcactggcgacaagagaggcagccctgactccaagaccagaaagacttactttggaaaactgggcatcgccaatgctcagatggacttccaggtggaggtgacaacggagaagatcaccctgtggaacagggccgtgccgagcactttcagctggctggacacagtcacagtcacgcaggatgggctgtccatgatgatcaacaggaagaacatggtggtctcctttggagatggggttaccttcgtggtcgtcctacaccaggtgtggaagaaacatcctgtccaccgtgactttctaggcttctacgtggtggacagtcaccggatgtcagcacagacgcatgggctgctggggcaattcttccaaccctttgactttaaagtgtctgacatccggccaggctctgaccccacaaagccagatgccacattggtggtgaagaaccatcagctgattgtcaccaggggctcccagaaagactacagaaaggatgccagcatcggcacgaaggttgtctgctggttcgtccacaacaacggagaagggctgattgatggtgtccacactgactacattgtccccaacctgttttgagtagacacaccagctcctgttgggatggatggcccggattttatggcatctggaacatgggcacagagaggggcctgtgggaggggctgggaaaataaagtccaaggtcgagaccagacagctgccagcctctacatgccttcatgagcctctgctccagggaacaggcaactgggacccacagcagctcaaaagaggggatggctagcaggaaggcaacttcttgggcctctccactgacacagctgagagacagagttggttggactagaactttagggattcaaatgtatgacagcttgggggaaaaaataaagaactgactctg

SEQ ID NO: 2331 - protein, 171 aa, Homosapiens; identical to SEQ ID NO: 2329

SEQ ID NO: 2332 - DNA, 739 bp, Homosapiens
cttggtactgagcccattaccggggcccaggccttcctcagaaaccagctgtgcttgggaacaggcagcgcccctcccctgcgtgtgtctcccaggcttcctctgtctctgacccttactgatccaccctttgtatctcaggccagttttaccaggaggtgctctggggatctccagcagcatcagatgacggcagacgcacgctgagggttcagggcaatgaccactctgccaccagagagcgcaggctggattaccaggaggggcccccgggagtggagatttcctgctggtctgtggagctgtagttctgatggaaggagctgtgcccaccctgtacacttggcttccccctgcaactgcagggccgcttctggggcctggaccaccatggggaggaagagtcccactcattacaaataaagaaaggtggtgtgagcctgggaagtgggtgtctccagttccatgtggccaaatcctagggcctcaacctcgcatcctgaaccttagcatcgtggaacacagaagcttccactgtcagctctcaagagcccatggccaggaaggcccatgctgagctttcagtccagccccttcattttacaaacaaggaaactgagctcgaaccacccatttgagatgtcactgtggcccccagctagaggcccagggctgggagcattctccaggagcagaggttcagtctgcttcatggtctcttggaccagttttgactaca

SEQ ID NO: 2333 - protein, 67 aa, Homosapiens
MTTLPPESAGWITRRGPREWRFPAGLWSCSSDGRSCAHPVHLASPCNCRAASGAWTTMGRKSPTHYK

SEQ ID NO: 2334 - DNA, 4052 bp, Homosapiens
ccaggtagccagacacgccagtgtgaggctgcagcagccactgctcccaagagctcccaggctataggggaaaggcacatgggcaagtcagaccaagacagctgggagacctgcagcaggtggagtatagttgggaaggctttctctggaagaggagtagagccttgaataggcttgggtttaatgagcagagaagaggggtcttggccaaggcacagaggtaggtgtgcctttctaccgaggcttcaggtagtaagatgaggctcttggatctccaaggctggtgctcaggaagcccctatcaagaagaagcgcccccctgtgaaggacgaggacctgaagggggcccgaggaaacctgaccaagaaccaggaaatcaagtccaagacctaccaggtcatgcgagagtgtgagcaagctggctcggccgccccgtcggtgttcagccgcacccgcacaggtaccgagactgtctttgagaagcccaaagccggacccaccaagagtgtcttcggctgagaagtgtgcgccactccccttgctgcccgaatgctcggaaacaggagcctttcccaggaactcttttttatgccagaacgcttcctctcccctgctgtctctggggctgccaccctcccccacagtccaggcccttcagccaagggctctgcaccagcaccttggaagcaccaataaagaggatgcccacgtggccccagcaatcagaagcgattcctgggctccctctgctccaccaaatgactccccagtcacccctcaggagctgctggcactgtcagaagcctcctggcagacactggagccacgatgaagcccccaaggcctgtccgtacctgcagcaaagttctcgtcctgctttcactgctggccatccaccagactactactgccgaaaagaatggcatcgacatctacagcctcaccgtggactccagggtctcatcccgatttgcccacacggtcgtcaccagccgagtggtcaatagggccaatactgtgcaggaggccaccttccagatggagctgcccaagaaagccttcatcaccaacttctccatgatcatcgatggcatgacctacccagggatcatcaaggagaaggctgaagcccaggcacagtacagcgcagcagtggccaagggaaagagcgctggcctcgtcaaggccaccgggagaaacatggagcagttccaggtgtcggtcagtgtggctcccaatgccaagatcacctttgagctggtctatgaggagctgctcaagcggcgtttgggggtgtacgagctgctgctgaaagtgcggccccagcagctggtcaagcacctgcagatggacattcacatcttcgagccccagggcatcagctttctggagacagagagcaccttcatgaccaaccagctggtagacgccctcaccacctggcagaataagaccaaggctcacatccggttcaagccaacactttcccagcagcaaaagtccccagagcagcaagaaacagtcctggacggcaacctcattatccgctatgatgtggaccgggccatctccgggggctccattcagatcgagaacggctactttgtacactactttgcccccgagggcctaaccacaatgcccaagaatgtggtctttgtcattgacaagagcggctccatgagtggcaggaaaatccagcagacccgggaagccctaatcaagatcctggatgacctcagccccagagaccagttcaacctcatcgtcttcagtacagaagcaactcagtggaggccatcactggtgccagcctcagccgagaacgtgaacaaggccaggagctttgctgcgggcatccaggccctgggagggaccaacatcaatgatgcaatgctgatggctgtgcagttgctggacagcagcaaccaggaggagcggctgcccgaagggagtgtctcactcatcatcctgctcaccgatggcgaccccactgtgggggagactaaccccaggagcatccagaataacgtgcgggaagctgtaagtggccggtacagcctcttctgcctgggcttcggtttcgacgtcagctatgccttcctggagaagctggcactggacaatggcggcctggcccggcgcatccatgaggactcagactctgccctgcagctccaggacttctaccaggaagtggccaacccactgctgacagcagtgaccttcgagtacccaagcaatgccgtggaggaggtcactcagaacaacttccggctcctcttcaagggctcagagatggtggtggctgggaagctccaggaccgggggcctgatgtgctcacagccacagtcagtgggaagctgcctacacagaacatcactttccaaacggagtccagtgtggcagagcaggaggcggagttccagagccccaagtatatcttccacaacttcatggagaggctctgggcatacctgactatccagcagctgctggagcaaactgtctccgcatccgatgctgatcagcaggccctccggaaccaagcgctgaatttatcacttgcctacagctttgtcacgcctctcacatctatggtagtcaccaaacccgatgaccaagagcagtctcaagttgctgagaagcccatggaaggcgaaagtagaaacaggaatgtccactcaggttccactttcttcaaatattatctccagggagcaaaaataccaaaaccagaggcttccttttctccaagaagaggatggaatagacaagctggagctgctggctcccggatgaatttcagacctggggttctcagctccaggcaacttggactcccaggacctcctgatgttcctgaccatgctgcttaccaccccttccgccgtctggccatcttgcctgcttcagcaccaccagccacctcaaatcctgatccagctgtgtctcgtgtcatgaatatgaaaatcgaagaaacaaccatgacaacccaaaccccagcccccatacaggctccctctgccatcctgccactgcctgggcagagtgtggagcggctctgtgtggaccccagacaccgccaggggccagtgaacctgctctcagaccctgagcaaggggttgaggtgactggccagtatgagagggagaaggctgggttctcatggatcgaagtgaccttcaagaaccccctggtatgggttcacgcatcccctgaacacgtggtggtgactcggaaccgaagaagctctgcgtacaagtggaaggagacgctattctcagtgatgcccggcctgaagatgaccatggacaagacgggtctcctgctgctcagtgacccagacaaagtgaccatcggcctgttgttctgggatggccgtggggaggggctccggctccttctgcgtgacactgaccgcttctccagccacgttggagggacccttggccagttttaccaggaggtgctctggggatctccagcagcatcagatgacggcagacgcacgctgagggttcagggcaatgaccactctgccaccagagagcgcaggctggattaccaggaggggcccccgggagtggagatttcctgctggtctgtggagctgtagttctgatggaaggagctgtgcccaccctgtacacttggcttccccctgcaactgcagggccgcttctggggcctggaccaccatggggaggaagagtcccactcattacaaataaagaaaggtggtgtgagcctgggaagtgggtgtctccagttccatgtggccaaatcctagggcctcaacctcgcatcctgaaccttagcatcgtggaacacagaagcttccactgtcagctctcaagagcccatggccaggaaggcccatgctgagctttcagtccagccccttcattttacaaacaaggaaactgagctcgaaccacccatttgagatgtcactgtggcccccagctagaggcccagggctgggagcattctccaggagcagaggttcagtctgcttcatggtctcttggaccagttttgactaca

SEQ ID NO: 2335 - protein, 930 aa, Homosapiens; identical to SEQ ID NO: 251

SEQ ID NO: 2336 - DNA, 3945 bp, Homosapiens
gttgatgccagagggagtggaggtggagtcctggacactttcggctctggcagctgtgtcttgatctgagccccaagcatgaactggaggctctgcagcccttgggagatgggggctcagggaggaccccctgaagaacccctcttctatgtggctttggtggtattccacggctggtgctcaggaagcccctatcaagaagaagcgcccccctgtgaaggacgaggacctgaagggggcccgaggaaacctgaccaagaaccaggaaatcaagtccaagacctaccaggtcatgcgagagtgtgagcaagctggctcggccgccccgtcggtgttcagccgcacccgcacaggtaccgagactgtctttgagaagcccaaagccggacccaccaagagtgtcttcggctgagaagtgtgcgccactccccttgctgcccgaatgctcggaaacaggagcctttcccaggaactcttttttatgccagaacgcttcctctcccctgctgtctctggggctgccaccctcccccacagtccaggcccttcagccaagggctctgcaccagcaccttggaagcaccaataaagaggatgcccacgtggccccagcaatcagaagcgattcctgggctccctctgctccaccaaatgactccccagtcacccctcaggagctgctggcactgtcagaagcctcctggcagacactggagccacgatgaagcccccaaggcctgtccgtacctgcagcaaagttctcgtcctgctttcactgctggccatccaccagactactactgccgaaaagaatggcatcgacatctacagcctcaccgtggactccagggtctcatcccgatttgcccacacggtcgtcaccagccgagtggtcaatagggccaatactgtgcaggaggccaccttccagatggagctgcccaagaaagccttcatcaccaacttctccatgatcatcgatggcatgacctacccagggatcatcaaggagaaggctgaagcccaggcacagtacagcgcagcagtggccaagggaaagagcgctggcctcgtcaaggccaccgggagaaacatggagcagttccaggtgtcggtcagtgtggctcccaatgccaagatcacctttgagctggtctatgaggagctgctcaagcggcgtttgggggtgtacgagctgctgctgaaagtgcggccccagcagctggtcaagcacctgcagatggacattcacatcttcgagccccagggcatcagctttctggagacagagagcaccttcatgaccaaccagctggtagacgccctcaccacctggcagaataagaccaaggctcacatccggttcaagccaacactttcccagcagcaaaagtccccagagcagcaagaaacagtcctggacggcaacctcattatccgctatgatgtggaccgggccatctccgggggctccattcagatcgagaacggctactttgtacactactttgcccccgagggcctaaccacaatgcccaagaatgtggtctttgtcattgacaagagcggctccatgagtggcaggaaaatccagcagacccgggaagccctaatcaagatcctggatgacctcagccccagagaccagttcaacctcatcgtcttcagtacagaagcaactcagtggaggccatcactggtgccagcctcagccgagaacgtgaacaaggccaggagctttgctgcgggcatccaggccctgggagggaccaacatcaatgatgcaatgctgatggctgtgcagttgctggacagcagcaaccaggaggagcggctgcccgaagggagtgtctcactcatcatcctgctcaccgatggcgaccccactgtgggggagactaaccccaggagcatccagaataacgtgcgggaagctgtaagtggccggtacagcctcttctgcctgggcttcggtttcgacgtcagctatgccttcctggagaagctggcactggacaatggcggcctggcccggcgcatccatgaggactcagactctgccctgcagctccaggacttctaccaggaagtggccaacccactgctgacagcagtgaccttcgagtacccaagcaatgccgtggaggaggtcactcagaacaacttccggctcctcttcaagggctcagagatggtggtggctgggaagctccaggaccgggggcctgatgtgctcacagccacagtcagtgggaagctgcctacacagaacatcactttccaaacggagtccagtgtggcagagcaggaggcggagttccagagccccaagtatatcttccacaacttcatggagaggctctgggcatacctgactatccagcagctgctggagcaaactgtctccgcatccgatgctgatcagcaggccctccggaaccaagcgctgaatttatcacttgcctacagctttgtcacgcctctcacatctatggtagtcaccaaacccgatgaccaagagcagtctcaagttgctgagaagcccatggaaggcgaaagtagaaacaggaatgtccactcaggttccactttcttcaaatattatctccagggagcaaaaataccaaaaccagaggcttccttttctccaagaagaggatggaatagacaagctggagctgctggctcccggatgaatttcagacctggggttctcagctccaggcaacttggactcccaggacctcctgatgttcctgaccatgctgcttaccaccccttccgccgtctggccatcttgcctgcttcagcaccaccagccacctcaaatcctgatccagctgtgtctcgtgtcatgaatatgaaaatcgaagaaacaaccatgacaacccaaaccccagcccccatacaggctccctctgccatcctgccactgcctgggcagagtgtggagcggctctgtgtggaccccagacaccgccaggggccagtgaacctgctctcagaccctgagcaaggggttgaggtgactggccagtatgagagggagaaggctgggttctcatggatcgaagtgaccttcaagaaccccctggtatgggttcacgcatcccctgaacacgtggtggtgactcggaaccgaagaagctctgcgtacaagtggaaggagacgctattctcagtgatgcccggcctgaagatgaccatggacaagacgggtctcctgctgctcagtgacccagacaaagtgaccatcggcctgttgttctgggatggccgtggggaggggctccggctccttctgcgtgacactgaccgcttctccagccacgttggagggacccttggccagttttaccaggaggtgctctggggatctccagcagcatcagatgacggcagacgcacgctgagggttcagggcaatgaccactctgccaccagagagcgcaggctggattaccaggaggggcccccgggagtggagatttcctgctggtctgtggagctgtagttctgatggaaggagctgtgcccaccctgtacacttggcttccccctgcaactgcagggccgcttctggggcctggaccaccatggggaggaagagtcccactcattacaaataaagaaaggtggtgtgagcctgggaagtgggtgtctccagttccatgtggccaaatcctagggcctcaacctcgcatcctgaaccttagcatcgtggaacacagaagcttccactgtcagctctcaagagcccatggccaggaaggcccatgctgagctttcagtccagccccttcattttacaaacaaggaaactgagctcgaaccacccatttgagatgtcactgtggcccccagctagaggcccagggctgggagcattctccaggagcagaggttcagtctgcttcatggtctcttggaccagttttgactaca

SEQ ID NO: 2337 - protein, 930 aa, Homosapiens; identical to SEQ ID NO: 251

SEQ ID NO: 2338 - DNA, 3914 bp, Homosapiens
gggtctctgcagccatctgctttcatcagggctgcagcccccaggcagcagtactgggagcccctctcatctccgagaataaactctgaagccagcgaccctgcggacctgaatcatcagggagcctgtcagaggaggggcagtgactctgcgggacaagcaagcaggctatataagtttcagaaggctgggctccactcagatcttttccagcagctgctgcctgccagagaggcgccttcagagacccagcgcttacacaatacccaccatgtcccaggctggtgctcaggaagcccctatcaagaagaagcgcccccctgtgaaggacgaggacctgaagggggcccgaggaaacctgaccaagaaccaggaaatcaagtccaagacctaccaggtcatgcgagagtgtgagcaagctggctcggccgccccgtcggtgttcagccgcacccgcacaggtaccgagactgtctttgagaagcccaaagccggacccaccaagagtgtcttcggctgagaagtgtgcgccactccccttgctgcccgaatgctcggaaacaggagcctttcccaggaactcttttttatgccagaacgcttcctctcccctgctgtctctggggctgccaccctcccccacagtccaggcccttcagccaagggctctgcaccagcaccttggaagcaccaataaagaggatgcccacgtggccccagcaatcagaagcgattcctgggctccctctgctccaccaaatgactccccagtcacccctcaggagctgctggcactgtcagaagcctcctggcagacactggagccacgatgaagcccccaaggcctgtccgtacctgcagcaaagttctcgtcctgctttcactgctggccatccaccagactactactgccgaaaagaatggcatcgacatctacagcctcaccgtggactccagggtctcatcccgatttgcccacacggtcgtcaccagccgagtggtcaatagggccaatactgtgcaggaggccaccttccagatggagctgcccaagaaagccttcatcaccaacttctccatgatcatcgatggcatgacctacccagggatcatcaaggagaaggctgaagcccaggcacagtacagcgcagcagtggccaagggaaagagcgctggcctcgtcaaggccaccgggagaaacatggagcagttccaggtgtcggtcagtgtggctcccaatgccaagatcacctttgagctggtctatgaggagctgctcaagcggcgtttgggggtgtacgagctgctgctgaaagtgcggccccagcagctggtcaagcacctgcagatggacattcacatcttcgagccccagggcatcagctttctggagacagagagcaccttcatgaccaaccagctggtagacgccctcaccacctggcagaataagaccaaggctcacatccggttcaagccaacactttcccagcagcaaaagtccccagagcagcaagaaacagtcctggacggcaacctcattatccgctatgatgtggaccgggccatctccgggggctccattcagatcgagaacggctactttgtacactactttgcccccgagggcctaaccacaatgcccaagaatgtggtctttgtcattgacaagagcggctccatgagtggcaggaaaatccagcagacccgggaagccctaatcaagatcctggatgacctcagccccagagaccagttcaacctcatcgtcttcagtacagaagcaactcagtggaggccatcactggtgccagcctcagccgagaacgtgaacaaggccaggagctttgctgcgggcatccaggccctgggagggaccaacatcaatgatgcaatgctgatggctgtgcagttgctggacagcagcaaccaggaggagcggctgcccgaagggagtgtctcactcatcatcctgctcaccgatggcgaccccactgtgggggagactaaccccaggagcatccagaataacgtgcgggaagctgtaagtggccggtacagcctcttctgcctgggcttcggtttcgacgtcagctatgccttcctggagaagctggcactggacaatggcggcctggcccggcgcatccatgaggactcagactctgccctgcagctccaggacttctaccaggaagtggccaacccactgctgacagcagtgaccttcgagtacccaagcaatgccgtggaggaggtcactcagaacaacttccggctcctcttcaagggctcagagatggtggtggctgggaagctccaggaccgggggcctgatgtgctcacagccacagtcagtgggaagctgcctacacagaacatcactttccaaacggagtccagtgtggcagagcaggaggcggagttccagagccccaagtatatcttccacaacttcatggagaggctctgggcatacctgactatccagcagctgctggagcaaactgtctccgcatccgatgctgatcagcaggccctccggaaccaagcgctgaatttatcacttgcctacagctttgtcacgcctctcacatctatggtagtcaccaaacccgatgaccaagagcagtctcaagttgctgagaagcccatggaaggcgaaagtagaaacaggaatgtccactcagctggagctgctggctcccggatgaatttcagacctggggttctcagctccaggcaacttggactcccaggacctcctgatgttcctgaccatgctgcttaccaccccttccgccgtctggccatcttgcctgcttcagcaccaccagccacctcaaatcctgatccagctgtgtctcgtgtcatgaatatgctccctctgccatcctgccactgcctgggcagagtgtggagcggctctgtgtggaccccagacaccgccaggggccagtgaacctgctctcagaccctgagcaaggggttgaggtgactggccagtatgagagggagaaggctgggttctcatggatcgaagtgaccttcaagaaccccctggtatgggttcacgcatcccctgaacacgtggtggtgactcggaaccgaagaagctctgcgtacaagtggaaggagacgctattctcagtgatgcccggcctgaagatgaccatggacaagacgggtctcctgctgctcagtgacccagacaaagtgaccatcggcctgttgttctgggatggccgtggggaggggctccggctccttctgcgtgacactgaccgcttctccagccacgttggagggacccttggccagttttaccaggaggtgctctggggatctccagcagcatcagatgacggcagacgcacgctgagggttcagggcaatgaccactctgccaccagagagcgcaggctggattaccaggaggggcccccgggagtggagatttcctgctggtctgtggagctgtagttctgatggaaggagctgtgcccaccctgtacacttggcttccccctgcaactgcagggccgcttctggggcctggaccaccatggggaggaagagtcccactcattacaaataaagaaaggtggtgtgagcctgggaagtgggtgtctccagttccatgtggccaaatcctagggcctcaacctcgcatcctgaaccttagcatcgtggaacacagaagcttccactgtcagctctcaagagcccatggccaggaaggcccatgctgagctttcagtccagccccttcattttacaaacaaggaaactgagctcgaaccacccatttgagatgtcactgtggcccccagctagaggcccagggctgggagcattctccaggagcagaggttcagtctgcttcatggtctcttggaccagttttgactaca

SEQ ID NO: 2339 - protein, 710 aa, Homosapiens
MKPPRPVRTCSKVLVLLSLLAIHQTTTAEKNGIDIYSLTVDSRVSSRFAHTVVTSRVVNRANTVQEATFQMELPKKAFITNFSMIIDGMTYPGIIKEKAEAQAQYSAAVAKGKSAGLVKATGRNMEQFQVSVSVAPNAKITFELVYEELLKRRLGVYELLLKVRPQQLVKHLQMDIHIFEPQGISFLETESTFMTNQLVDALTTWQNKTKAHIRFKPTLSQQQKSPEQQETVLDGNLIIRYDVDRAISGGSIQIENGYFVHYFAPEGLTTMPKNVVFVIDKSGSMSGRKIQQTREALIKILDDLSPRDQFNLIVFSTEATQWRPSLVPASAENVNKARSFAAGIQALGGTNINDAMLMAVQLLDSSNQEERLPEGSVSLIILLTDGDPTVGETNPRSIQNNVREAVSGRYSLFCLGFGFDVSYAFLEKLALDNGGLARRIHEDSDSALQLQDFYQEVANPLLTAVTFEYPSNAVEEVTQNNFRLLFKGSEMVVAGKLQDRGPDVLTATVSGKLPTQNITFQTESSVAEQEAEFQSPKYIFHNFMERLWAYLTIQQLLEQTVSASDADQQALRNQALNLSLAYSFVTPLTSMVVTKPDDQEQSQVAEKPMEGESRNRNVHSAGAAGSRMNFRPGVLSSRQLGLPGPPDVPDHAAYHPFRRLAILPASAPPATSNPDPAVSRVMNMLPLPSCHCLGRVWSGSVWTPDTARGQ

SEQ ID NO: 2340 - DNA, 4288 bp, Homosapiens
gggtctctgcagccatctgctttcatcagggctgcagcccccaggcagcagtactgggagcccctctcatctccgagaataaactctgaagccagcgaccctgcggacctgaatcatcagggagcctgtcagaggaggggcagtgactctgcgggacaagcaagcaggctatataagtttcagaaggctgggctccactcagatcttttccagcagctgctgcctgccagagaggcgccttcagagacccagcgcttacacaatacccaccatgtcccaggctggtgctcaggaagcccctatcaagaagaagcgcccccctgtgaaggacgaggacctgaagggggcccgaggaaacctgaccaagaaccaggaaatcaagtccaagacctaccaggtcatgcgagagtgtgagcaagctggctcggccgccccgtcggtgttcagccgcacccgcacaggtaccgagactgtctttgagaagcccaaagccggacccaccaagagtgtcttcggctgagaagtgtgcgccactccccttgctgcccgaatgctcggaaacaggagcctttcccaggaactcttttttatgccagaacgcttcctctcccctgctgtctctggggctgccaccctcccccacagtccaggcccttcagccaagggctctgcaccagcaccttggaagcaccaataaagaggatgcccacgtggccccagcaatcagaagcgattcctgggctccctctgctccaccaaatgactccccagtcacccctcaggagctgctggcactgtcagaagcctcctggcagacactggagccacgatgaagcccccaaggcctgtccgtacctgcagcaaagttctcgtcctgctttcactgctggccatccaccagactactactgccgaaaagaatggcatcgacatctacagcctcaccgtggactccagggtctcatcccgatttgcccacacggtcgtcaccagccgagtggtcaatagggccaatactgtgcaggaggccaccttccagatggagctgcccaagaaagccttcatcaccaacttctccatgatcatcgatggcatgacctacccagggatcatcaaggagaaggctgaagcccaggcacagtacagcgcagcagtggccaagggaaagagcgctggcctcgtcaaggccaccgggagaaacatggagcagttccaggtgtcggtcagtgtggctcccaatgccaagatcacctttgagctggtctatgaggagctgctcaagcggcgtttgggggtgtacgagctgctgctgaaagtgcggccccagcagctggtcaagcacctgcagatggacattcacatcttcgagccccagggcatcagctttctggagacagagagcaccttcatgaccaaccagctggtagacgccctcaccacctggcagaataagaccaaggctcacatccggttcaagccaacactttcccagcagcaaaagtccccagagcagcaagaaacagtcctggacggcaacctcattatccgctatgatgtggaccgggccatctccgggggctccattcagatcgagaacggctactttgtacactactttgcccccgagggcctaaccacaatgcccaagaatgtggtctttgtcattgacaagagcggctccatgagtggcaggaaaatccagcagacccgggaagccctaatcaagatcctggatgacctcagccccagagaccagttcaacctcatcgtcttcagtacagaagcaactcagtggaggccatcactggtgccagcctcagccgagaacgtgaacaaggccaggagctttgctgcgggcatccaggccctgggagggaccaacatcaatgatgcaatgctgatggctgtgcagttgctggacagcagcaaccaggaggagcggctgcccgaagggagtgtctcactcatcatcctgctcaccgatggcgaccccactgtgggggagactaaccccaggagcatccagaataacgtgcgggaagctgtaagtggccggtacagcctcttctgcctgggcttcggtttcgacgtcagctatgccttcctggagaagctggcactggacaatggcggcctggcccggcgcatccatgaggactcagactctgccctgcagctccaggacttctaccaggaagtggccaacccactgctgacagcagtgaccttcgagtacccaagcaatgccgtggaggaggtcactcagaacaacttccggctcctcttcaagggctcagagatggtggtggctgggaagctccaggaccgggggcctgatgtgctcacagccacagtcagtgggaagctgcctacacagaacatcactttccaaacggagtccagtgtggcagagcaggaggcggagttccagagccccaagtatatcttccacaacttcatggagaggctctgggcatacctgactatccagcagctgctggagcaaactgtctccgcatccgatgctgatcagcaggccctccggaaccaagcgctgaatttatcacttgcctacagctttgtcacgcctctcacatctatggtagtcaccaaacccgatgaccaagagcagtctcaagttgctgagaagcccatggaaggcgaaagtagaaacaggaatgtccactcaggttccactttcttcaaatattatctccagggagcaaaaataccaaaaccaggtgacaaagtaggaggtggggggaggggagattgacagattgggctcagtcctggctgtggagggtagtgccttgcccagctcctctggctggtgacagccctcgggcctcagttcagttgtatctgatcaggacttgaccacacagaggcttccttttctccaagaagaggatggaatagacaagctggagctgctggctcccggatgaatttcagacctggggttctcagctccaggcaacttggactcccaggacctcctgatgttcctgaccatgctgcttaccaccccttccgccgtctggccatcttgcctgcttcagcaccaccagccacctcaaatcctgatccagctgtgtctcgtgtcatgaatatgaaaatcgaagaaacaaccatgacaacccaaaccccaggtaagttcccagcccccttggcccctttccacatccttgcccccagcctgcccttcctgctccaggagccgtgccccggctgtcccagcccccatacaggctccctctgccatcctgccactgcctgggcagagtgtggagcggctctgtgtggaccccagacaccgccaggggccagtgaacctgctctcagaccctgagcaaggggttgaggtgactggccagtatgagagggagaaggctgggttctcatggatcgaagtgaccttcaagaaccccctggtatgggttcacgcatcccctgaacacgtggtggtgactcggaaccgaagaagctctgcgtacaagtggaaggagacgctattctcagtgatgcccggcctgaagatgaccatggacaagacgggtctcctgctgctcagtgacccagacaaagtgaccatcggcctgttgttctgggatggccgtggggaggggctccggctccttctgcgtgacactgaccgcttctccagccacgttggagggacccttggccagttttaccaggaggtgctctggggatctccagcagcatcagatgacggcagacgcacgctgagggttcagggcaatgaccactctgccaccagagagcgcaggctggattaccaggaggggcccccgggagtggagatttcctgctggtctgtggagctgtagttctgatggaaggagctgtgcccaccctgtacacttggcttccccctgcaactgcagggccgcttctggggcctggaccaccatggggaggaagagtcccactcattacaaataaagaaaggtggtgtgagcctgggaagtgggtgtctccagttccatgtggccaaatcctagggcctcaacctcgcatcctgaaccttagcatcgtggaacacagaagcttccactgtcagctctcaagagcccatggccaggaaggcccatgctgagctttcagtccagccccttcattttacaaacaaggaaactgagctcgaaccacccatttgagatgtcactgtggcccccagctagaggcccagggctgggagcattctccaggagcagaggttcagtctgcttcatggtctcttggaccagttttgactaca

SEQ ID NO: 2341 - protein, 648 aa, Homosapiens
MKPPRPVRTCSKVLVLLSLLAIHQTTTAEKNGIDIYSLTVDSRVSSRFAHTVVTSRVVNRANTVQEATFQMELPKKAFITNFSMIIDGMTYPGIIKEKAEAQAQYSAAVAKGKSAGLVKATGRNMEQFQVSVSVAPNAKITFELVYEELLKRRLGVYELLLKVRPQQLVKHLQMDIHIFEPQGISFLETESTFMTNQLVDALTTWQNKTKAHIRFKPTLSQQQKSPEQQETVLDGNLIIRYDVDRAISGGSIQIENGYFVHYFAPEGLTTMPKNVVFVIDKSGSMSGRKIQQTREALIKILDDLSPRDQFNLIVFSTEATQWRPSLVPASAENVNKARSFAAGIQALGGTNINDAMLMAVQLLDSSNQEERLPEGSVSLIILLTDGDPTVGETNPRSIQNNVREAVSGRYSLFCLGFGFDVSYAFLEKLALDNGGLARRIHEDSDSALQLQDFYQEVANPLLTAVTFEYPSNAVEEVTQNNFRLLFKGSEMVVAGKLQDRGPDVLTATVSGKLPTQNITFQTESSVAEQEAEFQSPKYIFHNFMERLWAYLTIQQLLEQTVSASDADQQALRNQALNLSLAYSFVTPLTSMVVTKPDDQEQSQVAEKPMEGESRNRNVHSGSTFFKYYLQGAKIPKPGDKVGGGGRGD

SEQ ID NO: 2342 - DNA, 4047 bp, Homosapiens
gggtctctgcagccatctgctttcatcagggctgcagcccccaggcagcagtactgggagcccctctcatctccgagaataaactctgaagccagcgaccctgcggacctgaatcatcagggagcctgtcagaggaggggcagtgactctgcgggacaagcaagcaggctatataagtttcagaaggctgggctccactcagatcttttccagcagctgctgcctgccagagaggcgccttcagagacccagcgcttacacaatacccaccatgtcccaggctggtgctcaggaagcccctatcaagaagaagcgcccccctgtgaaggacgaggacctgaagggggcccgaggaaacctgaccaagaaccaggaaatcaagtccaagacctaccaggtcatgcgagagtgtgagcaagctggctcggccgccccgtcggtgttcagccgcacccgcacaggtaccgagactgtctttgagaagcccaaagccggacccaccaagagtgtcttcggctgagaagtgtgcgccactccccttgctgcccgaatgctcggaaacaggagcctttcccaggaactcttttttatgccagaacgcttcctctcccctgctgtctctggggctgccaccctcccccacagtccaggcccttcagccaagggctctgcaccagcaccttggaagcaccaataaagaggatgcccacgtggccccagcaatcagaagcgattcctgggctccctctgctccaccaaatgactccccagtcacccctcaggagctgctggcactgtcagaagcctcctggcagacactggagccacgatgaagcccccaaggcctgtccgtacctgcagcaaagttctcgtcctgctttcactgctggccatccaccagactactactgccgaaaagaatggcatcgacatctacagcctcaccgtggactccagggtctcatcccgatttgcccacacggtcgtcaccagccgagtggtcaatagggccaatactgtgcaggaggccaccttccagatggagctgcccaagaaagccttcatcaccaacttctccatgatcatcgatggcatgacctacccagggatcatcaaggagaaggctgaagcccaggcacagtacagcgcagcagtggccaagggaaagagcgctggcctcgtcaaggccaccgggagaaacatggagcagttccaggtgtcggtcagtgtggctcccaatgccaagatcacctttgagctggtctatgaggagctgctcaagcggcgtttgggggtgtacgagctgctgctgaaagtgcggccccagcagctggtcaagcacctgcagatggacattcacatcttcgagccccagggcatcagctttctggagacagagagcaccttcatgaccaaccagctggtagacgccctcaccacctggcagaataagaccaaggctcacatccggttcaagccaacactttcccagcagcaaaagtccccagagcagcaagaaacagtcctggacggcaacctcattatccgctatgatgtggaccgggccatctccgggggctccattcagatcgagaacggctactttgtacactactttgcccccgagggcctaaccacaatgcccaagaatgtggtctttgtcattgacaagagcggctccatgagtggcaggaaaatccagcagacccgggaagccctaatcaagatcctggatgacctcagccccagagaccagttcaacctcatcgtcttcagtacagaagcaactcagtggaggccatcactggtgccagcctcagccgagaacgtgaacaaggccaggagctttgctgcgggcatccaggccctgggagggaccaacatcaatgatgcaatgctgatggctgtgcagttgctggacagcagcaaccaggaggagcggctgcccgaagggagtgtctcactcatcatcctgctcaccgatggcgaccccactgtgggggagactaaccccaggagcatccagaataacgtgcgggaagctgtaagtggccggtacagcctcttctgcctgggcttcggtttcgacgtcagctatgccttcctggagaagctggcactggacaatggcggcctggcccggcgcatccatgaggactcagactctgccctgcagctccaggacttctaccaggaagtggccaacccactgctgacagcagtgaccttcgagtacccaagcaatgccgtggaggaggtcactcagaacaacttccggctcctcttcaagggctcagagatggtggtggctgggaagctccaggaccgggggcctgatgtgctcacagccacagtcagtgggaagctgcctacacagaacatcactttccaaacggagtccagtgtggcagagcaggaggcggagttccagagccccaagtatatcttccacaacttcatggagaggctctgggcatacctgactatccagcagctgctggagcaaactgtctccgcatccgatgctgatcagcaggccctccggaaccaagcgctgaatttatcacttgcctacagctttgtcacgcctctcacatctatggtagtcaccaaacccgatgaccaagagcagtctcaagttgctgagaagcccatggaaggcgaaagtagaaacaggaatgtccactcagctggagctgctggctcccggatgaatttcagacctggggttctcagctccaggcaacttggactcccaggacctcctgatgttcctgaccatgctgcttaccaccccttccgccgtctggccatctctgcacagccaggctggacctatccctgacagcatgctcttctgtttgaaaatctcctgtgacaaaggccattctaggtggagttgcctgcttcagcaccaccagccacctcaaatcctgatccagctgtgtctcgtgtcatgaatatgaaaatcgaagaaacaaccatgacaacccaaaccccagcccccatacaggctccctctgccatcctgccactgcctgggcagagtgtggagcggctctgtgtggaccccagacaccgccaggggccagtgaacctgctctcagaccctgagcaaggggttgaggtgactggccagtatgagagggagaaggctgggttctcatggatcgaagtgaccttcaagaaccccctggtatgggttcacgcatcccctgaacacgtggtggtgactcggaaccgaagaagctctgcgtacaagtggaaggagacgctattctcagtgatgcccggcctgaagatgaccatggacaagacgggtctcctgctgctcagtgacccagacaaagtgaccatcggcctgttgttctgggatggccgtggggaggggctccggctccttctgcgtgacactgaccgcttctccagccacgttggagggacccttggccagttttaccaggaggtgctctggggatctccagcagcatcagatgacggcagacgcacgctgagggttcagggcaatgaccactctgccaccagagagcgcaggctggattaccaggaggggcccccgggagtggagatttcctgctggtctgtggagctgtagttctgatggaaggagctgtgcccaccctgtacacttggcttccccctgcaactgcagggccgcttctggggcctggaccaccatggggaggaagagtcccactcattacaaataaagaaaggtggtgtgagcctgggaagtgggtgtctccagttccatgtggccaaatcctagggcctcaacctcgcatcctgaaccttagcatcgtggaacacagaagcttccactgtcagctctcaagagcccatggccaggaaggcccatgctgagctttcagtccagccccttcattttacaaacaaggaaactgagctcgaaccacccatttgagatgtcactgtggcccccagctagaggcccagggctgggagcattctccaggagcagaggttcagtctgcttcatggtctcttggaccagttttgactaca

SEQ ID NO: 2343 - protein, 671 aa, Homosapiens
MKPPRPVRTCSKVLVLLSLLAIHQTTTAEKNGIDIYSLTVDSRVSSRFAHTVVTSRVVNRANTVQEATFQMELPKKAFITNFSMIIDGMTYPGIIKEKAEAQAQYSAAVAKGKSAGLVKATGRNMEQFQVSVSVAPNAKITFELVYEELLKRRLGVYELLLKVRPQQLVKHLQMDIHIFEPQGISFLETESTFMTNQLVDALTTWQNKTKAHIRFKPTLSQQQKSPEQQETVLDGNLIIRYDVDRAISGGSIQIENGYFVHYFAPEGLTTMPKNVVFVIDKSGSMSGRKIQQTREALIKILDDLSPRDQFNLIVFSTEATQWRPSLVPASAENVNKARSFAAGIQALGGTNINDAMLMAVQLLDSSNQEERLPEGSVSLIILLTDGDPTVGETNPRSIQNNVREAVSGRYSLFCLGFGFDVSYAFLEKLALDNGGLARRIHEDSDSALQLQDFYQEVANPLLTAVTFEYPSNAVEEVTQNNFRLLFKGSEMVVAGKLQDRGPDVLTATVSGKLPTQNITFQTESSVAEQEAEFQSPKYIFHNFMERLWAYLTIQQLLEQTVSASDADQQALRNQALNLSLAYSFVTPLTSMVVTKPDDQEQSQVAEKPMEGESRNRNVHSAGAAGSRMNFRPGVLSSRQLGLPGPPDVPDHAAYHPFRRLAISAQPGWTYP

SEQ ID NO: 2344 - DNA, 4137 bp, Homosapiens
gggtctctgcagccatctgctttcatcagggctgcagcccccaggcagcagtactgggagcccctctcatctccgagaataaactctgaagccagcgaccctgcggacctgaatcatcagggagcctgtcagaggaggggcagtgactctgcgggacaagcaagcaggctatataagtttcagaaggctgggctccactcagatcttttccagcagctgctgcctgccagagaggcgccttcagagacccagcgcttacacaatacccaccatgtcccaggctggtgctcaggaagcccctatcaagaagaagcgcccccctgtgaaggacgaggacctgaagggggcccgaggaaacctgaccaagaaccaggaaatcaagtccaagacctaccaggtcatgcgagagtgtgagcaagctggctcggccgccccgtcggtgttcagccgcacccgcacaggtaccgagactgtctttgagaagcccaaagccggacccaccaagagtgtcttcggctgagaagtgtgcgccactccccttgctgcccgaatgctcggaaacaggagcctttcccaggaactcttttttatgccagaacgcttcctctcccctgctgtctctggggctgccaccctcccccacagtccaggcccttcagccaagggctctgcaccagcaccttggaagcaccaataaagaggatgcccacgtggccccagcaatcagaagcgattcctgggctccctctgctccaccaaatgactccccagtcacccctcaggagctgctggcactgtcagaagcctcctggcagacactggagccacgatgaagcccccaaggcctgtccgtacctgcagcaaagttctcgtcctgctttcactgctggccatccaccagactactactgccgaaaagaatggcatcgacatctacagcctcaccgtggactccagggtctcatcccgatttgcccacacggtcgtcaccagccgagtggtcaatagggccaatactgtgcaggaggccaccttccagatggagctgcccaagaaagccttcatcaccaacttctccatgatcatcgatggcatgacctacccagggatcatcaaggagaaggctgaagcccaggcacagtacagcgcagcagtggccaagggaaagagcgctggcctcgtcaaggccaccgggagaaacatggagcagttccaggtgtcggtcagtgtggctcccaatgccaagatcacctttgagctggtctatgaggagctgctcaagcggcgtttgggggtgtacgagctgctgctgaaagtgcggccccagcagctggtcaagcacctgcagatggacattcacatcttcgagccccagggcatcagctttctggagacagagagcaccttcatgaccaaccagctggtagacgccctcaccacctggcagaataagaccaaggctcacatccggttcaagccaacactttcccagcagcaaaagtccccagagcagcaagaaacagtcctggacggcaacctcattatccgctatgatgtggaccgggccatctccgggggctccattcagatcgagaacggctactttgtacactactttgcccccgagggcctaaccacaatgcccaagaatgtggtctttgtcattgacaagagcggctccatgagtggcaggaaaatccagcagacccgggaagccctaatcaagatcctggatgacctcagccccagagaccagttcaacctcatcgtcttcagtacagaagcaactcagtggaggccatcactggtgccagcctcagccgagaacgtgaacaaggccaggagctttgctgcgggcatccaggccctgggagggaccaacatcaatgatgcaatgctgatggctgtgcagttgctggacagcagcaaccaggaggagcggctgcccgaagggagtgtctcactcatcatcctgctcaccgatggcgaccccactgtgggggagactaaccccaggagcatccagaataacgtgcgggaagctgtaagtggccggtacagcctcttctgcctgggcttcggtttcgacgtcagctatgccttcctggagaagctggcactggacaatggcggcctggcccggcgcatccatgaggactcagactctgccctgcagctccaggacttctaccaggaagtggccaacccactgctgacagcagtgaccttcgagtacccaagcaatgccgtggaggaggtcactcagaacaacttccggctcctcttcaagggctcagagatggtggtggctgggaagctccaggaccgggggcctgatgtgctcacagccacagtcagtgggaagctgcctacacagaacatcactttccaaacggagtccagtgtggcagagcaggaggcggagttccagagccccaagtatatcttccacaacttcatggagaggctctgggcatacctgactatccagcagctgctggagcaaactgtctccgcatccgatgctgatcagcaggccctccggaaccaagcgctgaatttatcacttgcctacagctttgtcacgcctctcacatctatggtagtcaccaaacccgatgaccaagagcagtctcaagttgctgagaagcccatggaaggcgaaagtagaaacaggaatgtccactcaggttccactttcttcaaatattatctccagggagcaaaaataccaaaaccagaggcttccttttctccaagaagaggatggaatagacaagctggagctgctggctcccggatgaatttcagacctggggttctcagctccaggcaacttggactcccaggacctcctgatgttcctgaccatgctgcttaccaccccttccgccgtctggccatctctgcacagccaggctggacctatccctgacagcatgctcttctgtttgaaaatctcctgtgacaaaggccattctaggtggagttgcctgcttcagcaccaccagccacctcaaatcctgatccagctgtgtctcgtgtcatgaatatgaaaatcgaagaaacaaccatgacaacccaaaccccagcccccatacaggctccctctgccatcctgccactgcctgggcagagtgtggagcggctctgtgtggaccccagacaccgccaggggccagtgaacctgctctcagaccctgagcaaggggttgaggtgactggccagtatgagagggagaaggctgggttctcatggatcgaagtgaccttcaagaaccccctggtatgggttcacgcatcccctgaacacgtggtggtgactcggaaccgaagaagctctgcgtacaagtggaaggagacgctattctcagtgatgcccggcctgaagatgaccatggacaagacgggtctcctgctgctcagtgacccagacaaagtgaccatcggcctgttgttctgggatggccgtggggaggggctccggctccttctgcgtgacactgaccgcttctccagccacgttggagggacccttggccagttttaccaggaggtgctctggggatctccagcagcatcagatgacggcagacgcacgctgagggttcagggcaatgaccactctgccaccagagagcgcaggctggattaccaggaggggcccccgggagtggagatttcctgctggtctgtggagctgtagttctgatggaaggagctgtgcccaccctgtacacttggcttccccctgcaactgcagggccgcttctggggcctggaccaccatggggaggaagagtcccactcattacaaataaagaaaggtggtgtgagcctgggaagtgggtgtctccagttccatgtggccaaatcctagggcctcaacctcgcatcctgaaccttagcatcgtggaacacagaagcttccactgtcagctctcaagagcccatggccaggaaggcccatgctgagctttcagtccagccccttcattttacaaacaaggaaactgagctcgaaccacccatttgagatgtcactgtggcccccagctagaggcccagggctgggagcattctccaggagcagaggttcagtctgcttcatggtctcttggaccagttttgactaca

SEQ ID NO: 2345 - protein, 701 aa, Homosapiens
MKPPRPVRTCSKVLVLLSLLAIHQTTTAEKNGIDIYSLTVDSRVSSRFAHTVVTSRVVNRANTVQEATFQMELPKKAFITNFSMIIDGMTYPGIIKEKAEAQAQYSAAVAKGKSAGLVKATGRNMEQFQVSVSVAPNAKITFELVYEELLKRRLGVYELLLKVRPQQLVKHLQMDIHIFEPQGISFLETESTFMTNQLVDALTTWQNKTKAHIRFKPTLSQQQKSPEQQETVLDGNLIIRYDVDRAISGGSIQIENGYFVHYFAPEGLTTMPKNVVFVIDKSGSMSGRKIQQTREALIKILDDLSPRDQFNLIVFSTEATQWRPSLVPASAENVNKARSFAAGIQALGGTNINDAMLMAVQLLDSSNQEERLPEGSVSLIILLTDGDPTVGETNPRSIQNNVREAVSGRYSLFCLGFGFDVSYAFLEKLALDNGGLARRIHEDSDSALQLQDFYQEVANPLLTAVTFEYPSNAVEEVTQNNFRLLFKGSEMVVAGKLQDRGPDVLTATVSGKLPTQNITFQTESSVAEQEAEFQSPKYIFHNFMERLWAYLTIQQLLEQTVSASDADQQALRNQALNLSLAYSFVTPLTSMVVTKPDDQEQSQVAEKPMEGESRNRNVHSGSTFFKYYLQGAKIPKPEASFSPRRGWNRQAGAAGSRMNFRPGVLSSRQLGLPGPPDVPDHAAYHPFRRLAISAQPGWTYP

SEQ ID NO: 2346 - DNA, 3792 bp, Homosapiens
gggtctctgcagccatctgctttcatcagggctgcagcccccaggcagcagtactgggagcccctctcatctccgagaataaactctgaagccagcgaccctgcggacctgaatcatcagggagcctgtcagaggaggggcagtgactctgcgggacaagcaagcaggctatataagtttcagaaggctgggctccactcagatcttttccagcagctgctgcctgccagagaggcgccttcagagacccagcgcttacacaatacccaccatgtcccaggctggtgctcaggaagcccctatcaagaagaagcgcccccctgtgaaggacgaggacctgaagggggcccgaggaaacctgaccaagaaccaggaaatcaagtccaagacctaccaggtcatgcgagagtgtgagcaagctggctcggccgccccgtcggtgttcagccgcacccgcacaggtaccgagactgtctttgagaagcccaaagccggacccaccaagagtgtcttcggctgagaagtgtgcgccactccccttgctgcccgaatgctcggaaacaggagcctttcccaggaactcttttttatgccagaacgcttcctctcccctgctgtctctggggctgccaccctcccccacagtccaggcccttcagccaagggctctgcaccagcaccttggaagcaccaataaagaggatgcccacgtggccccagcaatcagaagcgattcctgggctccctctgctccaccaaatgactccccagtcacccctcaggagctgctggcactgtcagaagcctcctggcagacactggagccacgatgaagcccccaaggcctgtccgtacctgcagcaaagttctcgtcctgctttcactgctggccatccaccagactactactgccgaaaagaatggcatcgacatctacagcctcaccgtggactccagggtctcatcccgatttgcccacacggtcgtcaccagccgagtggtcaatagggccaatactgtgcaggaggccaccttccagatggagctgcccaagaaagccttcatcaccaacttctccatgatcatcgatggcatgacctacccagggatcatcaaggagaaggctgaagcccaggcacagtacagcgcagcagtggccaagggaaagagcgctggcctcgtcaaggccaccgggagaaacatggagcagttccaggtgtcggtcagtgtggctcccaatgccaagatcacctttgagctggtctatgaggagctgctcaagcggcgtttgggggtgtacgagctgctgctgaaagtgcggccccagcagctggtcaagcacctgcagatggacattcacatcttcgagccccagggcatcagctttctggagacagagagcaccttcatgaccaaccagctggtagacgccctcaccacctggcagaataagaccaaggctcacatccggttcaagccaacactttcccagcagcaaaagtccccagagcagcaagaaacagtcctggacggcaacctcattatccgctatgatgtggaccgggccatctccgggggctccattcagatcgagaacggctactttgtacactactttgcccccgagggcctaaccacaatgcccaagaatgtggtctttgtcattgacaagagcggctccatgagtggcaggaaaatccagcagacccgggaagccctaatcaagatcctggatgacctcagccccagagaccagttcaacctcatcgtcttcagtacagaagcaactcagtggaggccatcactggtgccagcctcagccgagaacgtgaacaaggccaggagctttgctgcgggcatccaggccctgggagggaccaacatcaatgatgcaatgctgatggctgtgcagttgctggacagcagcaaccaggaggagcggctgcccgaagggagtgtctcactcatcatcctgctcaccgatggcgaccccactgtgggggagactaaccccaggagcatccagaataacgtgcgggaagctgtaagtggccggtacagcctcttctgcctgggcttcggtttcgacgtcagctatgccttcctggagaagctggcactggacaatggcggcctggcccggcgcatccatgaggactcagactctgccctgcagctccaggacttctaccaggaagtggccaacccactgctgacagcagtgaccttcgagtacccaagcaatgccgtggaggaggtcactcagaacaacttccggctcctcttcaagggctcagagatggtggtggctgggaagctccaggaccgggggcctgatgtgctcacagccacagtcagtgggaagctgcctacacagaacatcactttccaaacggagtccagtgtggcagagcaggaggcggagttccagagccccaagtatatcttccacaacttcatggagaggctctgggcatacctgactatccagcagctgctggagcaaactgtctccgcatccgatgctgatcagcaggccctccggaaccaagcgctgaatttatcacttgcctacagctttgtcacgcctctcacatctatggtagtcaccaaacccgatgaccaagagcagtctcaagttgctgagaagcccatggaaggcgaaagtagaaacaggaatgtccactcagctggagctgctggctcccggatgaatttcagacctggggttctcagctccaggcaacttggactcccaggacctcctgatgttcctgaccatgctgcttaccaccccttccgccgtctggccatcttgcctgcttcagcaccaccagccacctcaaatcctgatccagctgtgtctcgtgtcatgaatatgaaatatgagagggagaaggctgggttctcatggatcgaagtgaccttcaagaaccccctggtatgggttcacgcatcccctgaacacgtggtggtgactcggaaccgaagaagctctgcgtacaagtggaaggagacgctattctcagtgatgcccggcctgaagatgaccatggacaagacgggtctcctgctgctcagtgacccagacaaagtgaccatcggcctgttgttctgggatggccgtggggaggggctccggctccttctgcgtgacactgaccgcttctccagccacgttggagggacccttggccagttttaccaggaggtgctctggggatctccagcagcatcagatgacggcagacgcacgctgagggttcagggcaatgaccactctgccaccagagagcgcaggctggattaccaggaggggcccccgggagtggagatttcctgctggtctgtggagctgtagttctgatggaaggagctgtgcccaccctgtacacttggcttccccctgcaactgcagggccgcttctggggcctggaccaccatggggaggaagagtcccactcattacaaataaagaaaggtggtgtgagcctgggaagtgggtgtctccagttccatgtggccaaatcctagggcctcaacctcgcatcctgaaccttagcatcgtggaacacagaagcttccactgtcagctctcaagagcccatggccaggaaggcccatgctgagctttcagtccagccccttcattttacaaacaaggaaactgagctcgaaccacccatttgagatgtcactgtggcccccagctagaggcccagggctgggagcattctccaggagcagaggttcagtctgcttcatggtctcttggaccagttttgactaca

SEQ ID NO: 2347 - protein, 843 aa, Homosapiens
MKPPRPVRTCSKVLVLLSLLAIHQTTTAEKNGIDIYSLTVDSRVSSRFAHTVVTSRVVNRANTVQEATFQMELPKKAFITNFSMIIDGMTYPGIIKEKAEAQAQYSAAVAKGKSAGLVKATGRNMEQFQVSVSVAPNAKITFELVYEELLKRRLGVYELLLKVRPQQLVKHLQMDIHIFEPQGISFLETESTFMTNQLVDALTTWQNKTKAHIRFKPTLSQQQKSPEQQETVLDGNLIIRYDVDRAISGGSIQIENGYFVHYFAPEGLTTMPKNVVFVIDKSGSMSGRKIQQTREALIKILDDLSPRDQFNLIVFSTEATQWRPSLVPASAENVNKARSFAAGIQALGGTNINDAMLMAVQLLDSSNQEERLPEGSVSLIILLTDGDPTVGETNPRSIQNNVREAVSGRYSLFCLGFGFDVSYAFLEKLALDNGGLARRIHEDSDSALQLQDFYQEVANPLLTAVTFEYPSNAVEEVTQNNFRLLFKGSEMVVAGKLQDRGPDVLTATVSGKLPTQNITFQTESSVAEQEAEFQSPKYIFHNFMERLWAYLTIQQLLEQTVSASDADQQALRNQALNLSLAYSFVTPLTSMVVTKPDDQEQSQVAEKPMEGESRNRNVHSAGAAGSRMNFRPGVLSSRQLGLPGPPDVPDHAAYHPFRRLAILPASAPPATSNPDPAVSRVMNMKYEREKAGFSWIEVTFKNPLVWVHASPEHVVVTRNRRSSAYKWKETLFSVMPGLKMTMDKTGLLLLSDPDKVTIGLLFWDGRGEGLRLLLRDTDRFSSHVGGTLGQFYQEVLWGSPAASDDGRRTLRVQGNDHSATRERRLDYQEGPPGVEISCWSVEL

SEQ ID NO: 2348 - DNA, 3963 bp, Homosapiens
gggtctctgcagccatctgctttcatcagggctgcagcccccaggcagcagtactgggagcccctctcatctccgagaataaactctgaagccagcgaccctgcggacctgaatcatcagggagcctgtcagaggaggggcagtgactctgcgggacaagcaagcaggctatataagtttcagaaggctgggctccactcagatcttttccagcagctgctgcctgccagagaggcgccttcagagacccagcgcttacacaatacccaccatgtcccaggctggtgctcaggaagcccctatcaagaagaagcgcccccctgtgaaggacgaggacctgaagggggcccgaggaaacctgaccaagaaccaggaaatcaagtccaagacctaccaggtcatgcgagagtgtgagcaagctggctcggccgccccgtcggtgttcagccgcacccgcacaggtaccgagactgtctttgagaagcccaaagccggacccaccaagagtgtcttcggctgagaagtgtgcgccactccccttgctgcccgaatgctcggaaacaggagcctttcccaggaactcttttttatgccagaacgcttcctctcccctgctgtctctggggctgccaccctcccccacagtccaggcccttcagccaagggctctgcaccagcaccttggaagcaccaataaagaggatgcccacgtggccccagcaatcagaagcgattcctgggctccctctgctccaccaaatgactccccagtcacccctcaggagctgctggcactgtcagaagcctcctggcagacactggagccacgatgaagcccccaaggcctgtccgtacctgcagcaaagttctcgtcctgctttcactgctggccatccaccagactactactgccgaaaagaatggcatcgacatctacagcctcaccgtggactccagggtctcatcccgatttgcccacacggtcgtcaccagccgagtggtcaatagggccaatactgtgcaggaggccaccttccagatggagctgcccaagaaagccttcatcaccaacttctccatgatcatcgatggcatgacctacccagggatcatcaaggagaaggctgaagcccaggcacagtacagcgcagcagtggccaagggaaagagcgctggcctcgtcaaggccaccgggagaaacatggagcagttccaggtgtcggtcagtgtggctcccaatgccaagatcacctttgagctggtctatgaggagctgctcaagcggcgtttgggggtgtacgagctgctgctgaaagtgcggccccagcagctggtcaagcacctgcagatggacattcacatcttcgagccccagggcatcagctttctggagacagagagcaccttcatgaccaaccagctggtagacgccctcaccacctggcagaataagaccaaggctcacatccggttcaagccaacactttcccagcagcaaaagtccccagagcagcaagaaacagtcctggacggcaacctcattatccgctatgatgtggaccgggccatctccgggggctccattcagatcgagaacggctactttgtacactactttgcccccgagggcctaaccacaatgcccaagaatgtggtctttgtcattgacaagagcggctccatgagtggcaggaaaatccagcagacccgggaagccctaatcaagatcctggatgacctcagccccagagaccagttcaacctcatcgtcttcagtacagaagcaactcagtggaggccatcactggtgccagcctcagccgagaacgtgaacaaggccaggagctttgctgcgggcatccaggccctgggagggaccaacatcaatgatgcaatgctgatggctgtgcagttgctggacagcagcaaccaggaggagcggctgcccgaagggagtgtctcactcatcatcctgctcaccgatggcgaccccactgtgggggagactaaccccaggagcatccagaataacgtgcgggaagctgtaagtggccggtacagcctcttctgcctgggcttcggtttcgacgtcagctatgccttcctggagaagctggcactggacaatggcggcctggcccggcgcatccatgaggactcagactctgccctgcagctccaggacttctaccaggaagtggccaacccactgctgacagcagtgaccttcgagtacccaagcaatgccgtggaggaggtcactcagaacaacttccggctcctcttcaagggctcagagatggtggtggctgggaagctccaggaccgggggcctgatgtgctcacagccacagtcagtgggaagctgcctacacagaacatcactttccaaacggagtccagtgtggcagagcaggaggcggagttccagagccccaagtatatcttccacaacttcatggagaggctctgggcatacctgactatccagcagctgctggagcaaactgtctccgcatccgatgctgatcagcaggccctccggaaccaagcgctgaatttatcacttgcctacagctttgtcacgcctctcacatctatggtagtcaccaaacccgatgaccaagagcagtctcaagttgctgagaagcccatggaaggcgaaagtagaaacaggaatgtccactcagctggagctgctggctcccggatgaatttcagacctggggttctcagctccaggcaacttggactcccaggacctcctgatgttcctgaccatgctgcttaccaccccttccgccgtctggccatcttgcctgcttcagcaccaccagccacctcaaatcctgatccagctgtgtctcgtgtcatgaatatgaaaatcgaagaaacaaccatgacaacccaaaccccagcccccatacaggctccctctgccatcctgccactgcctgggcagagtgtggagcggctctgtgtggaccccagacaccgccaggggccagtgaacctgctctcagaccctgagcaaggggttgaggtgactggccagtatgagagggagaaggctgggttctcatggatcgaagtgaccttcaagaaccccctggtatgggttcacgcatcccctgaacacgtggtggtgactcggaaccgaagaagctctgcgtacaagtggaaggagacgctattctcagtgatgcccggcctgaagatgaccatggacaagacgggtctcctgctgctcagtgacccagacaaagtgaccatcggcctgttgttctgggatggccgtggggaggggctccggctccttctgcgtgacactgaccgcttctccagccacgttggagggacccttggccagttttaccaggaggtgctctggggatctccagcagcatcagatgacggcagacgcacgctgagggttcagggcaatgaccactctgccaccagagagcgcaggctggattaccaggaggggcccccgggagtggagatttcctgctggtctgtggagctgtagttctgatggaaggagctgtgcccaccctgtacacttggcttccccctgcaactgcagggccgcttctggggcctggaccaccatggggaggaagagtcccactcattacaaataaagaaaggtggtgtgagcctgggaagtgggtgtctccagttccatgtggccaaatcctagggcctcaacctcgcatcctgaaccttagcatcgtggaacacagaagcttccactgtcagctctcaagagcccatggccaggaaggcccatgctgagctttcagtccagccccttcattttacaaacaaggaaactgagctcgaaccacccatttgagatgtcactgtggcccccagctagaggcccagggctgggagcattctccaggagcagaggttcagtctgcttcatggtctcttggaccagttttgactaca

SEQ ID NO: 2349 - protein, 900 aa, Homosapiens
MKPPRPVRTCSKVLVLLSLLAIHQTTTAEKNGIDIYSLTVDSRVSSRFAHTVVTSRVVNRANTVQEATFQMELPKKAFITNFSMIIDGMTYPGIIKEKAEAQAQYSAAVAKGKSAGLVKATGRNMEQFQVSVSVAPNAKITFELVYEELLKRRLGVYELLLKVRPQQLVKHLQMDIHIFEPQGISFLETESTFMTNQLVDALTTWQNKTKAHIRFKPTLSQQQKSPEQQETVLDGNLIIRYDVDRAISGGSIQIENGYFVHYFAPEGLTTMPKNVVFVIDKSGSMSGRKIQQTREALIKILDDLSPRDQFNLIVFSTEATQWRPSLVPASAENVNKARSFAAGIQALGGTNINDAMLMAVQLLDSSNQEERLPEGSVSLIILLTDGDPTVGETNPRSIQNNVREAVSGRYSLFCLGFGFDVSYAFLEKLALDNGGLARRIHEDSDSALQLQDFYQEVANPLLTAVTFEYPSNAVEEVTQNNFRLLFKGSEMVVAGKLQDRGPDVLTATVSGKLPTQNITFQTESSVAEQEAEFQSPKYIFHNFMERLWAYLTIQQLLEQTVSASDADQQALRNQALNLSLAYSFVTPLTSMVVTKPDDQEQSQVAEKPMEGESRNRNVHSAGAAGSRMNFRPGVLSSRQLGLPGPPDVPDHAAYHPFRRLAILPASAPPATSNPDPAVSRVMNMKIEETTMTTQTPAPIQAPSAILPLPGQSVERLCVDPRHRQGPVNLLSDPEQGVEVTGQYEREKAGFSWIEVTFKNPLVWVHASPEHVVVTRNRRSSAYKWKETLFSVMPGLKMTMDKTGLLLLSDPDKVTIGLLFWDGRGEGLRLLLRDTDRFSSHVGGTLGQFYQEVLWGSPAASDDGRRTLRVQGNDHSATRERRLDYQEGPPGVEISCWSVEL

SEQ ID NO: 2350 - DNA, 4001 bp, Homosapiens
gggtctctgcagccatctgctttcatcagggctgcagcccccaggcagcagtactgggagcccctctcatctccgagaataaactctgaagccagcgaccctgcggacctgaatcatcagggagcctgtcagaggaggggcagtgactctgcgggacaagcaagcaggctatataagtttcagaaggctgggctccactcagatcttttccagcagctgctgcctgccagagaggcgccttcagagacccagcgcttacacaatacccaccatgtcccaggctggtgctcaggaagcccctatcaagaagaagcgcccccctgtgaaggacgaggacctgaagggggcccgaggaaacctgaccaagaaccaggaaatcaagtccaagacctaccaggtcatgcgagagtgtgagcaagctggctcggccgccccgtcggtgttcagccgcacccgcacaggtaccgagactgtctttgagaagcccaaagccggacccaccaagagtgtcttcggctgagaagtgtgcgccactccccttgctgcccgaatgctcggaaacaggagcctttcccaggaactcttttttatgccagaacgcttcctctcccctgctgtctctggggctgccaccctcccccacagtccaggcccttcagccaagggctctgcaccagcaccttggaagcaccaataaagaggatgcccacgtggccccagcaatcagaagcgattcctgggctccctctgctccaccaaatgactccccagtcacccctcaggagctgctggcactgtcagaagcctcctggcagacactggagccacgatgaagcccccaaggcctgtccgtacctgcagcaaagttctcgtcctgctttcactgctggccatccaccagactactactgccgaaaagaatggcatcgacatctacagcctcaccgtggactccagggtctcatcccgatttgcccacacggtcgtcaccagccgagtggtcaatagggccaatactgtgcaggaggccaccttccagatggagctgcccaagaaagccttcatcaccaacttctccatgatcatcgatggcatgacctacccagggatcatcaaggagaaggctgaagcccaggcacagtacagcgcagcagtggccaagggaaagagcgctggcctcgtcaaggccaccgggagaaacatggagcagttccaggtgtcggtcagtgtggctcccaatgccaagatcacctttgagctggtctatgaggagctgctcaagcggcgtttgggggtgtacgagctgctgctgaaagtgcggccccagcagctggtcaagcacctgcagatggacattcacatcttcgagccccagggcatcagctttctggagacagagagcaccttcatgaccaaccagctggtagacgccctcaccacctggcagaataagaccaaggctcacatccggttcaagccaacactttcccagcagcaaaagtccccagagcagcaagaaacagtcctggacggcaacctcattatccgctatgatgtggaccgggccatctccgggggctccattcagatcgagaacggctactttgtacactactttgcccccgagggcctaaccacaatgcccaagaatgtggtctttgtcattgacaagagcggctccatgagtggcaggaaaatccagcagacccgggaagccctaatcaagatcctggatgacctcagccccagagaccagttcaacctcatcgtcttcagtacagaagcaactcagtggaggccatcactggtgccagcctcagccgagaacgtgaacaaggccaggagctttgctgcgggcatccaggccctgggagggaccaacatcaatgatgcaatgctgatggctgtgcagttgctggacagcagcaaccaggaggagcggctgcccgaagggagtgtctcactcatcatcctgctcaccgatggcgaccccactgtgggggagactaaccccaggagcatccagaataacgtgcgggaagctgtaagtggccggtacagcctcttctgcctgggcttcggtttcgacgtcagctatgccttcctggagaagctggcactggacaatggcggcctggcccggcgcatccatgaggactcagactctgccctgcagctccaggacttctaccaggaagtggccaacccactgctgacagcagtgaccttcgagtacccaagcaatgccgtggaggaggtcactcagaacaacttccggctcctcttcaagggctcagagatggtggtggctgggaagctccaggaccgggggcctgatgtgctcacagccacagtcagtgggaagctgcctacacagaacatcactttccaaacggagtccagtgtggcagagcaggaggcggagttccagagccccaagtatatcttccacaacttcatggagaggctctgggcatacctgactatccagcagctgctggagcaaactgtctccgcatccgatgctgatcagcaggccctccggaaccaagcgctgaatttatcacttgcctacagctttgtcacgcctctcacatctatggtagtcaccaaacccgatgaccaagagcagtctcaagttgctgagaagcccatggaaggcgaaagtagaaacaggaatgtccactcagctggagctgctggctcccggatgaatttcagacctggggttctcagctccaggcaacttggactcccaggacctcctgatgttcctgaccatgctgcttaccaccccttccgccgtctggccatcttgcctgcttcagcaccaccagccacctcaaatcctgatccagctgtgtctcgtgtcatgaatatcccccttggcccctttccacatccttgcccccagcctgcccttcctgctccaggagccgtgccccggctgtcccagcccccatacaggctccctctgccatcctgccactgcctgggcagagtgtggagcggctctgtgtggaccccagacaccgccaggggccagtgaacctgctctcagaccctgagcaaggggttgaggtgactggccagtatgagagggagaaggctgggttctcatggatcgaagtgaccttcaagaaccccctggtatgggttcacgcatcccctgaacacgtggtggtgactcggaaccgaagaagctctgcgtacaagtggaaggagacgctattctcagtgatgcccggcctgaagatgaccatggacaagacgggtctcctgctgctcagtgacccagacaaagtgaccatcggcctgttgttctgggatggccgtggggaggggctccggctccttctgcgtgacactgaccgcttctccagccacgttggagggacccttggccagttttaccaggaggtgctctggggatctccagcagcatcagatgacggcagacgcacgctgagggttcagggcaatgaccactctgccaccagagagcgcaggctggattaccaggaggggcccccgggagtggagatttcctgctggtctgtggagctgtagttctgatggaaggagctgtgcccaccctgtacacttggcttccccctgcaactgcagggccgcttctggggcctggaccaccatggggaggaagagtcccactcattacaaataaagaaaggtggtgtgagcctgggaagtgggtgtctccagttccatgtggccaaatcctagggcctcaacctcgcatcctgaaccttagcatcgtggaacacagaagcttccactgtcagctctcaagagcccatggccaggaaggcccatgctgagctttcagtccagccccttcattttacaaacaaggaaactgagctcgaaccacccatttgagatgtcactgtggcccccagctagaggcccagggctgggagcattctccaggagcagaggttcagtctgcttcatggtctcttggaccagttttgactaca

SEQ ID NO: 2351 - protein, 739 aa, Homosapiens
MKPPRPVRTCSKVLVLLSLLAIHQTTTAEKNGIDIYSLTVDSRVSSRFAHTVVTSRVVNRANTVQEATFQMELPKKAFITNFSMIIDGMTYPGIIKEKAEAQAQYSAAVAKGKSAGLVKATGRNMEQFQVSVSVAPNAKITFELVYEELLKRRLGVYELLLKVRPQQLVKHLQMDIHIFEPQGISFLETESTFMTNQLVDALTTWQNKTKAHIRFKPTLSQQQKSPEQQETVLDGNLIIRYDVDRAISGGSIQIENGYFVHYFAPEGLTTMPKNVVFVIDKSGSMSGRKIQQTREALIKILDDLSPRDQFNLIVFSTEATQWRPSLVPASAENVNKARSFAAGIQALGGTNINDAMLMAVQLLDSSNQEERLPEGSVSLIILLTDGDPTVGETNPRSIQNNVREAVSGRYSLFCLGFGFDVSYAFLEKLALDNGGLARRIHEDSDSALQLQDFYQEVANPLLTAVTFEYPSNAVEEVTQNNFRLLFKGSEMVVAGKLQDRGPDVLTATVSGKLPTQNITFQTESSVAEQEAEFQSPKYIFHNFMERLWAYLTIQQLLEQTVSASDADQQALRNQALNLSLAYSFVTPLTSMVVTKPDDQEQSQVAEKPMEGESRNRNVHSAGAAGSRMNFRPGVLSSRQLGLPGPPDVPDHAAYHPFRRLAILPASAPPATSNPDPAVSRVMNIPLGPFPHPCPQPALPAPGAVPRLSQPPYRLPLPSCHCLGRVWSGSVWTPDTARGQ

SEQ ID NO: 2352 - DNA, 4053 bp, Homosapiens
gggtctctgcagccatctgctttcatcagggctgcagcccccaggcagcagtactgggagcccctctcatctccgagaataaactctgaagccagcgaccctgcggacctgaatcatcagggagcctgtcagaggaggggcagtgactctgcgggacaagcaagcaggctatataagtttcagaaggctgggctccactcagatcttttccagcagctgctgcctgccagagaggcgccttcagagacccagcgcttacacaatacccaccatgtcccaggctggtgctcaggaagcccctatcaagaagaagcgcccccctgtgaaggacgaggacctgaagggggcccgaggaaacctgaccaagaaccaggaaatcaagtccaagacctaccaggtcatgcgagagtgtgagcaagctggctcggccgccccgtcggtgttcagccgcacccgcacaggtaccgagactgtctttgagaagcccaaagccggacccaccaagagtgtcttcggctgagaagtgtgcgccactccccttgctgcccgaatgctcggaaacaggagcctttcccaggaactcttttttatgccagaacgcttcctctcccctgctgtctctggggctgccaccctcccccacagtccaggcccttcagccaagggctctgcaccagcaccttggaagcaccaataaagaggatgcccacgtggccccagcaatcagaagcgattcctgggctccctctgctccaccaaatgactccccagtcacccctcaggagctgctggcactgtcagaagcctcctggcagacactggagccacgatgaagcccccaaggcctgtccgtacctgcagcaaagttctcgtcctgctttcactgctggccatccaccagactactactgccgaaaagaatggcatcgacatctacagcctcaccgtggactccagggtctcatcccgatttgcccacacggtcgtcaccagccgagtggtcaatagggccaatactgtgcaggaggccaccttccagatggagctgcccaagaaagccttcatcaccaacttctccatgatcatcgatggcatgacctacccagggatcatcaaggagaaggctgaagcccaggcacagtacagcgcagcagtggccaagggaaagagcgctggcctcgtcaaggccaccgggagaaacatggagcagttccaggtgtcggtcagtgtggctcccaatgccaagatcacctttgagctggtctatgaggagctgctcaagcggcgtttgggggtgtacgagctgctgctgaaagtgcggccccagcagctggtcaagcacctgcagatggacattcacatcttcgagccccagggcatcagctttctggagacagagagcaccttcatgaccaaccagctggtagacgccctcaccacctggcagaataagaccaaggctcacatccggttcaagccaacactttcccagcagcaaaagtccccagagcagcaagaaacagtcctggacggcaacctcattatccgctatgatgtggaccgggccatctccgggggctccattcagatcgagaacggctactttgtacactactttgcccccgagggcctaaccacaatgcccaagaatgtggtctttgtcattgacaagagcggctccatgagtggcaggaaaatccagcagacccgggaagccctaatcaagatcctggatgacctcagccccagagaccagttcaacctcatcgtcttcagtacagaagcaactcagtggaggccatcactggtgccagcctcagccgagaacgtgaacaaggccaggagctttgctgcgggcatccaggccctgggagggaccaacatcaatgatgcaatgctgatggctgtgcagttgctggacagcagcaaccaggaggagcggctgcccgaagggagtgtctcactcatcatcctgctcaccgatggcgaccccactgtgggggagactaaccccaggagcatccagaataacgtgcgggaagctgtaagtggccggtacagcctcttctgcctgggcttcggtttcgacgtcagctatgccttcctggagaagctggcactggacaatggcggcctggcccggcgcatccatgaggactcagactctgccctgcagctccaggacttctaccaggaagtggccaacccactgctgacagcagtgaccttcgagtacccaagcaatgccgtggaggaggtcactcagaacaacttccggctcctcttcaagggctcagagatggtggtggctgggaagctccaggaccgggggcctgatgtgctcacagccacagtcagtgggaagctgcctacacagaacatcactttccaaacggagtccagtgtggcagagcaggaggcggagttccagagccccaagtatatcttccacaacttcatggagaggctctgggcatacctgactatccagcagctgctggagcaaactgtctccgcatccgatgctgatcagcaggccctccggaaccaagcgctgaatttatcacttgcctacagctttgtcacgcctctcacatctatggtagtcaccaaacccgatgaccaagagcagtctcaagttgctgagaagcccatggaaggcgaaagtagaaacaggaatgtccactcaggttccactttcttcaaatattatctccagggagcaaaaataccaaaaccagaggcttccttttctccaagaagaggatggaatagacaagctggagctgctggctcccggatgaatttcagacctggggttctcagctccaggcaacttggactcccaggacctcctgatgttcctgaccatgctgcttaccaccccttccgccgtctggccatcttgcctgcttcagcaccaccagccacctcaaatcctgatccagctgtgtctcgtgtcatgaatatgaaaatcgaagaaacaaccatgacaacccaaaccccagcccccatacaggctccctctgccatcctgccactgcctgggcagagtgtggagcggctctgtgtggaccccagacaccgccaggggccagtgaacctgctctcagaccctgagcaaggggttgaggtgactggccagtatgagagggagaaggctgggttctcatggatcgaagtgaccttcaagaaccccctggtatgggttcacgcatcccctgaacacgtggtggtgactcggaaccgaagaagctctgcgtacaagtggaaggagacgctattctcagtgatgcccggcctgaagatgaccatggacaagacgggtctcctgctgctcagtgacccagacaaagtgaccatcggcctgttgttctgggatggccgtggggaggggctccggctccttctgcgtgacactgaccgcttctccagccacgttggagggacccttggccagttttaccaggaggtgctctggggatctccagcagcatcagatgacggcagacgcacgctgagggttcagggcaatgaccactctgccaccagagagcgcaggctggattaccaggaggggcccccgggagtggagatttcctgctggtctgtggagctgtagttctgatggaaggagctgtgcccaccctgtacacttggcttccccctgcaactgcagggccgcttctggggcctggaccaccatggggaggaagagtcccactcattacaaataaagaaaggtggtgtgagcctgggaagtgggtgtctccagttccatgtggccaaatcctagggcctcaacctcgcatcctgaaccttagcatcgtggaacacagaagcttccactgtcagctctcaagagcccatggccaggaaggcccatgctgagctttcagtccagccccttcattttacaaacaaggaaactgagctcgaaccacccatttgagatgtcactgtggcccccagctagaggcccagggctgggagcattctccaggagcagaggttcagtctgcttcatggtctcttggaccagttttgactaca

SEQ ID NO: 2353 - protein, 930 aa, Homosapiens; identical to SEQ ID NO: 251

SEQ ID NO: 2354 - DNA, 4151 bp, Homosapiens
gggtctctgcagccatctgctttcatcagggctgcagcccccaggcagcagtactgggagcccctctcatctccgagaataaactctgaagccagcgaccctgcggacctgaatcatcagggagcctgtcagaggaggggcagtgactctgcgggacaagcaagcaggctatataagtttcagaaggctgggctccactcagatcttttccagcagctgctgcctgccagagaggcgccttcagagacccagcgcttacacaatacccaccatgtcccaggctggtgctcaggaagcccctatcaagaagaagcgcccccctgtgaaggacgaggacctgaagggggcccgaggaaacctgaccaagaaccaggaaatcaagtccaagacctaccaggtcatgcgagagtgtgagcaagctggctcggccgccccgtcggtgttcagccgcacccgcacaggtaccgagactgtctttgagaagcccaaagccggacccaccaagagtgtcttcggctgagaagtgtgcgccactccccttgctgcccgaatgctcggaaacaggagcctttcccaggaactcttttttatgccagaacgcttcctctcccctgctgtctctggggctgccaccctcccccacagtccaggcccttcagccaagggctctgcaccagcaccttggaagcaccaataaagaggatgcccacgtggccccagcaatcagaagcgattcctgggctccctctgctccaccaaatgactccccagtcacccctcaggagctgctggcactgtcagaagcctcctggcagacactggagccacgatgaagcccccaaggcctgtccgtacctgcagcaaagttctcgtcctgctttcactgctggccatccaccagactactactgccgaaaagaatggcatcgacatctacagcctcaccgtggactccagggtctcatcccgatttgcccacacggtcgtcaccagccgagtggtcaatagggccaatactgtgcaggaggccaccttccagatggagctgcccaagaaagccttcatcaccaacttctccatgatcatcgatggcatgacctacccagggatcatcaaggagaaggctgaagcccaggcacagtacagcgcagcagtggccaagggaaagagcgctggcctcgtcaaggccaccgggagaaacatggagcagttccaggtgtcggtcagtgtggctcccaatgccaagatcacctttgagctggtctatgaggagctgctcaagcggcgtttgggggtgtacgagctgctgctgaaagtgcggccccagcagctggtcaagcacctgcagatggacattcacatcttcgagccccagggcatcagctttctggagacagagagcaccttcatgaccaaccagctggtagacgccctcaccacctggcagaataagaccaaggctcacatccggttcaagccaacactttcccagcagcaaaagtccccagagcagcaagaaacagtcctggacggcaacctcattatccgctatgatgtggaccgggccatctccgggggctccattcagatcgagaacggctactttgtacactactttgcccccgagggcctaaccacaatgcccaagaatgtggtctttgtcattgacaagagcggctccatgagtggcaggaaaatccagcagacccgggaagccctaatcaagatcctggatgacctcagccccagagaccagttcaacctcatcgtcttcagtacagaagcaactcagtggaggccatcactggtgccagcctcagccgagaacgtgaacaaggccaggagctttgctgcgggcatccaggccctgggagggaccaacatcaatgatgcaatgctgatggctgtgcagttgctggacagcagcaaccaggaggagcggctgcccgaagggagtgtctcactcatcatcctgctcaccgatggcgaccccactgtgggggagactaaccccaggagcatccagaataacgtgcgggaagctgtaagtggccggtacagcctcttctgcctgggcttcggtttcgacgtcagctatgccttcctggagaagctggcactggacaatggcggcctggcccggcgcatccatgaggactcagactctgccctgcagctccaggacttctaccaggaagtggccaacccactgctgacagcagtgaccttcgagtacccaagcaatgccgtggaggaggtcactcagaacaacttccggctcctcttcaagggctcagagatggtggtggctgggaagctccaggaccgggggcctgatgtgctcacagccacagtcagtgggaagctgcctacacagaacatcactttccaaacggagtccagtgtggcagagcaggaggcggagttccagagccccaagtatatcttccacaacttcatggagaggctctgggcatacctgactatccagcagctgctggagcaaactgtctccgcatccgatgctgatcagcaggccctccggaaccaagcgctgaatttatcacttgcctacagctttgtcacgcctctcacatctatggtagtcaccaaacccgatgaccaagagcagtctcaagttgctgagaagcccatggaaggcgaaagtagaaacaggaatgtccactcaggttccactttcttcaaatattatctccagggagcaaaaataccaaaaccaggtgacaaagtaggaggtggggggaggggagattgacagattgggctcagtcctggctgtggagggtagtgccttgcccagctcctctggctggtgacagccctcgggcctcagttcagttgtatctgatcaggacttgaccacacagaggcttccttttctccaagaagaggatggaatagacaagctggagctgctggctcccggatgaatttcagacctggggttctcagctccaggcaacttggactcccaggacctcctgatgttcctgaccatgctgcttaccaccccttccgccgtctggccatcttgcctgcttcagcaccaccagccacctcaaatcctgatccagctgtgtctcgtgtcatgaatatgctccctctgccatcctgccactgcctgggcagagtgtggagcggctctgtgtggaccccagacaccgccaggggccagtgaacctgctctcagaccctgagcaaggggttgaggtgactggccagtatgagagggagaaggctgggttctcatggatcgaagtgaccttcaagaaccccctggtatgggttcacgcatcccctgaacacgtggtggtgactcggaaccgaagaagctctgcgtacaagtggaaggagacgctattctcagtgatgcccggcctgaagatgaccatggacaagacgggtctcctgctgctcagtgacccagacaaagtgaccatcggcctgttgttctgggatggccgtggggaggggctccggctccttctgcgtgacactgaccgcttctccagccacgttggagggacccttggccagttttaccaggaggtgctctggggatctccagcagcatcagatgacggcagacgcacgctgagggttcagggcaatgaccactctgccaccagagagcgcaggctggattaccaggaggggcccccgggagtggagatttcctgctggtctgtggagctgtagttctgatggaaggagctgtgcccaccctgtacacttggcttccccctgcaactgcagggccgcttctggggcctggaccaccatggggaggaagagtcccactcattacaaataaagaaaggtggtgtgagcctgggaagtgggtgtctccagttccatgtggccaaatcctagggcctcaacctcgcatcctgaaccttagcatcgtggaacacagaagcttccactgtcagctctcaagagcccatggccaggaaggcccatgctgagctttcagtccagccccttcattttacaaacaaggaaactgagctcgaaccacccatttgagatgtcactgtggcccccagctagaggcccagggctgggagcattctccaggagcagaggttcagtctgcttcatggtctcttggaccagttttgactaca

SEQ ID NO: 2355 - protein, 648 aa, Homosapiens; identical to SEQ ID NO: 2341

SEQ ID NO: 2356 - DNA, 4004 bp, Homosapiens
gggtctctgcagccatctgctttcatcagggctgcagcccccaggcagcagtactgggagcccctctcatctccgagaataaactctgaagccagcgaccctgcggacctgaatcatcagggagcctgtcagaggaggggcagtgactctgcgggacaagcaagcaggctatataagtttcagaaggctgggctccactcagatcttttccagcagctgctgcctgccagagaggcgccttcagagacccagcgcttacacaatacccaccatgtcccaggctggtgctcaggaagcccctatcaagaagaagcgcccccctgtgaaggacgaggacctgaagggggcccgaggaaacctgaccaagaaccaggaaatcaagtccaagacctaccaggtcatgcgagagtgtgagcaagctggctcggccgccccgtcggtgttcagccgcacccgcacaggtaccgagactgtctttgagaagcccaaagccggacccaccaagagtgtcttcggctgagaagtgtgcgccactccccttgctgcccgaatgctcggaaacaggagcctttcccaggaactcttttttatgccagaacgcttcctctcccctgctgtctctggggctgccaccctcccccacagtccaggcccttcagccaagggctctgcaccagcaccttggaagcaccaataaagaggatgcccacgtggccccagcaatcagaagcgattcctgggctccctctgctccaccaaatgactccccagtcacccctcaggagctgctggcactgtcagaagcctcctggcagacactggagccacgatgaagcccccaaggcctgtccgtacctgcagcaaagttctcgtcctgctttcactgctggccatccaccagactactactgccgaaaagaatggcatcgacatctacagcctcaccgtggactccagggtctcatcccgatttgcccacacggtcgtcaccagccgagtggtcaatagggccaatactgtgcaggaggccaccttccagatggagctgcccaagaaagccttcatcaccaacttctccatgatcatcgatggcatgacctacccagggatcatcaaggagaaggctgaagcccaggcacagtacagcgcagcagtggccaagggaaagagcgctggcctcgtcaaggccaccgggagaaacatggagcagttccaggtgtcggtcagtgtggctcccaatgccaagatcacctttgagctggtctatgaggagctgctcaagcggcgtttgggggtgtacgagctgctgctgaaagtgcggccccagcagctggtcaagcacctgcagatggacattcacatcttcgagccccagggcatcagctttctggagacagagagcaccttcatgaccaaccagctggtagacgccctcaccacctggcagaataagaccaaggctcacatccggttcaagccaacactttcccagcagcaaaagtccccagagcagcaagaaacagtcctggacggcaacctcattatccgctatgatgtggaccgggccatctccgggggctccattcagatcgagaacggctactttgtacactactttgcccccgagggcctaaccacaatgcccaagaatgtggtctttgtcattgacaagagcggctccatgagtggcaggaaaatccagcagacccgggaagccctaatcaagatcctggatgacctcagccccagagaccagttcaacctcatcgtcttcagtacagaagcaactcagtggaggccatcactggtgccagcctcagccgagaacgtgaacaaggccaggagctttgctgcgggcatccaggccctgggagggaccaacatcaatgatgcaatgctgatggctgtgcagttgctggacagcagcaaccaggaggagcggctgcccgaagggagtgtctcactcatcatcctgctcaccgatggcgaccccactgtgggggagactaaccccaggagcatccagaataacgtgcgggaagctgtaagtggccggtacagcctcttctgcctgggcttcggtttcgacgtcagctatgccttcctggagaagctggcactggacaatggcggcctggcccggcgcatccatgaggactcagactctgccctgcagctccaggacttctaccaggaagtggccaacccactgctgacagcagtgaccttcgagtacccaagcaatgccgtggaggaggtcactcagaacaacttccggctcctcttcaagggctcagagatggtggtggctgggaagctccaggaccgggggcctgatgtgctcacagccacagtcagtgggaagctgcctacacagaacatcactttccaaacggagtccagtgtggcagagcaggaggcggagttccagagccccaagtatatcttccacaacttcatggagaggctctgggcatacctgactatccagcagctgctggagcaaactgtctccgcatccgatgctgatcagcaggccctccggaaccaagcgctgaatttatcacttgcctacagctttgtcacgcctctcacatctatggtagtcaccaaacccgatgaccaagagcagtctcaagttgctgagaagcccatggaaggcgaaagtagaaacaggaatgtccactcaggttccactttcttcaaatattatctccagggagcaaaaataccaaaaccagaggcttccttttctccaagaagaggatggaatagacaagctggagctgctggctcccggatgaatttcagacctggggttctcagctccaggcaacttggactcccaggacctcctgatgttcctgaccatgctgcttaccaccccttccgccgtctggccatcttgcctgcttcagcaccaccagccacctcaaatcctgatccagctgtgtctcgtgtcatgaatatgctccctctgccatcctgccactgcctgggcagagtgtggagcggctctgtgtggaccccagacaccgccaggggccagtgaacctgctctcagaccctgagcaaggggttgaggtgactggccagtatgagagggagaaggctgggttctcatggatcgaagtgaccttcaagaaccccctggtatgggttcacgcatcccctgaacacgtggtggtgactcggaaccgaagaagctctgcgtacaagtggaaggagacgctattctcagtgatgcccggcctgaagatgaccatggacaagacgggtctcctgctgctcagtgacccagacaaagtgaccatcggcctgttgttctgggatggccgtggggaggggctccggctccttctgcgtgacactgaccgcttctccagccacgttggagggacccttggccagttttaccaggaggtgctctggggatctccagcagcatcagatgacggcagacgcacgctgagggttcagggcaatgaccactctgccaccagagagcgcaggctggattaccaggaggggcccccgggagtggagatttcctgctggtctgtggagctgtagttctgatggaaggagctgtgcccaccctgtacacttggcttccccctgcaactgcagggccgcttctggggcctggaccaccatggggaggaagagtcccactcattacaaataaagaaaggtggtgtgagcctgggaagtgggtgtctccagttccatgtggccaaatcctagggcctcaacctcgcatcctgaaccttagcatcgtggaacacagaagcttccactgtcagctctcaagagcccatggccaggaaggcccatgctgagctttcagtccagccccttcattttacaaacaaggaaactgagctcgaaccacccatttgagatgtcactgtggcccccagctagaggcccagggctgggagcattctccaggagcagaggttcagtctgcttcatggtctcttggaccagttttgactaca

SEQ ID NO: 2357 - protein, 740 aa, Homosapiens
MKPPRPVRTCSKVLVLLSLLAIHQTTTAEKNGIDIYSLTVDSRVSSRFAHTVVTSRVVNRANTVQEATFQMELPKKAFITNFSMIIDGMTYPGIIKEKAEAQAQYSAAVAKGKSAGLVKATGRNMEQFQVSVSVAPNAKITFELVYEELLKRRLGVYELLLKVRPQQLVKHLQMDIHIFEPQGISFLETESTFMTNQLVDALTTWQNKTKAHIRFKPTLSQQQKSPEQQETVLDGNLIIRYDVDRAISGGSIQIENGYFVHYFAPEGLTTMPKNVVFVIDKSGSMSGRKIQQTREALIKILDDLSPRDQFNLIVFSTEATQWRPSLVPASAENVNKARSFAAGIQALGGTNINDAMLMAVQLLDSSNQEERLPEGSVSLIILLTDGDPTVGETNPRSIQNNVREAVSGRYSLFCLGFGFDVSYAFLEKLALDNGGLARRIHEDSDSALQLQDFYQEVANPLLTAVTFEYPSNAVEEVTQNNFRLLFKGSEMVVAGKLQDRGPDVLTATVSGKLPTQNITFQTESSVAEQEAEFQSPKYIFHNFMERLWAYLTIQQLLEQTVSASDADQQALRNQALNLSLAYSFVTPLTSMVVTKPDDQEQSQVAEKPMEGESRNRNVHSGSTFFKYYLQGAKIPKPEASFSPRRGWNRQAGAAGSRMNFRPGVLSSRQLGLPGPPDVPDHAAYHPFRRLAILPASAPPATSNPDPAVSRVMNMLPLPSCHCLGRVWSGSVWTPDTARGQ

SEQ ID NO: 2358 - DNA, 4783 bp, Homosapiens
gcggagtcggcggccgggcggaggtaccggctcaggcttgggatcccggctgcgggtttggcggcgctgcgccggcaggcagcgaggccgggcgggccctgggccctcgcgcccctcccgcgaggcctgtcatgcagggccccgccgggaacgcgagccggggactgccaggcgggccgccctccacagtcgcgtccggggcgggccgctgcgagagcggcgcgctcatgcacagcttcggcatcttcctgcaggggctgctcggcgtcgtggccttcagcacgttaatgctcaaacgcttcagagaaccaaagcatgaaagacgtccgtggaggatatggtttttagacacttccaaacaagccataggaatgctgttcatccactttgcaaatgtatacctagcagatctcactgaagaggacccttgttcactgtacctcatcaacttcctcctggacgccactgtgggcatgctgctcatctacgtgggggtgcgcgccgtcagcgtcctggtagagtggcagcagtgggagtccctgcgcttcggcgaatatggagaccctctgcagtgtggagcctgggtcgggcagtgcgctctttacatcgtgatcatgatttttgaaaagtctgtcgtcttcatcgtcctcctaatacttcagtggaaaaaggtggccctgttgaatcccattgaaaacccagacttgaagctggccatcgtcatgctgatcgtccccttctttgtcaacgctttgatgttttgggtagtggacaatttcctcatgagaaaggggaagacgaaagctaagctagaagaaaggggagccaaccaggactcgaggaatgggagcaaggtccgctaccggagggccgcatcccacgaggagtctgagtctgagatcctgatctcagcggatgatgagatggaggagtccgacgtggaggaggacctccgcagactgacccccctcaagcctgtgaagaaaaagaagcaccgctttgggctacccgctggtgctcaggaagcccctatcaagaagaagcgcccccctgtgaaggacgaggacctgaagggggcccgaggaaacctgaccaagaaccaggaaatcaagtccaagacctaccaggtcatgcgagagtgtgagcaagctggctcggccgccccgtcggtgttcagccgcacccgcacaggtaccgagactgtctttgagaagcccaaagccggacccaccaagagtgtcttcggctgagaagtgtgcgccactccccttgctgcccgaatgctcggaaacaggagcctttcccaggaactcttttttatgccagaacgcttcctctcccctgctgtctctggggctgccaccctcccccacagtccaggcccttcagccaagggctctgcaccagcaccttggaagcaccaataaagaggatgcccacgtggccccagcaatcagaagcgattcctgggctccctctgctccaccaaatgactccccagtcacccctcaggagctgctggcactgtcagaagcctcctggcagacactggagccacgatgaagcccccaaggcctgtccgtacctgcagcaaagttctcgtcctgctttcactgctggccatccaccagactactactgccgaaaagaatggcatcgacatctacagcctcaccgtggactccagggtctcatcccgatttgcccacacggtcgtcaccagccgagtggtcaatagggccaatactgtgcaggaggccaccttccagatggagctgcccaagaaagccttcatcaccaacttctccatgatcatcgatggcatgacctacccagggatcatcaaggagaaggctgaagcccaggcacagtacagcgcagcagtggccaagggaaagagcgctggcctcgtcaaggccaccgggagaaacatggagcagttccaggtgtcggtcagtgtggctcccaatgccaagatcacctttgagctggtctatgaggagctgctcaagcggcgtttgggggtgtacgagctgctgctgaaagtgcggccccagcagctggtcaagcacctgcagatggacattcacatcttcgagccccagggcatcagctttctggagacagagagcaccttcatgaccaaccagctggtagacgccctcaccacctggcagaataagaccaaggctcacatccggttcaagccaacactttcccagcagcaaaagtccccagagcagcaagaaacagtcctggacggcaacctcattatccgctatgatgtggaccgggccatctccgggggctccattcagatcgagaacggctactttgtacactactttgcccccgagggcctaaccacaatgcccaagaatgtggtctttgtcattgacaagagcggctccatgagtggcaggaaaatccagcagacccgggaagccctaatcaagatcctggatgacctcagccccagagaccagttcaacctcatcgtcttcagtacagaagcaactcagtggaggccatcactggtgccagcctcagccgagaacgtgaacaaggccaggagctttgctgcgggcatccaggccctgggagggaccaacatcaatgatgcaatgctgatggctgtgcagttgctggacagcagcaaccaggaggagcggctgcccgaagggagtgtctcactcatcatcctgctcaccgatggcgaccccactgtgggggagactaaccccaggagcatccagaataacgtgcgggaagctgtaagtggccggtacagcctcttctgcctgggcttcggtttcgacgtcagctatgccttcctggagaagctggcactggacaatggcggcctggcccggcgcatccatgaggactcagactctgccctgcagctccaggacttctaccaggaagtggccaacccactgctgacagcagtgaccttcgagtacccaagcaatgccgtggaggaggtcactcagaacaacttccggctcctcttcaagggctcagagatggtggtggctgggaagctccaggaccgggggcctgatgtgctcacagccacagtcagtgggaagctgcctacacagaacatcactttccaaacggagtccagtgtggcagagcaggaggcggagttccagagccccaagtatatcttccacaacttcatggagaggctctgggcatacctgactatccagcagctgctggagcaaactgtctccgcatccgatgctgatcagcaggccctccggaaccaagcgctgaatttatcacttgcctacagctttgtcacgcctctcacatctatggtagtcaccaaacccgatgaccaagagcagtctcaagttgctgagaagcccatggaaggcgaaagtagaaacaggaatgtccactcaggttccactttcttcaaatattatctccagggagcaaaaataccaaaaccagaggcttccttttctccaagaagaggatggaatagacaagctggagctgctggctcccggatgaatttcagacctggggttctcagctccaggcaacttggactcccaggacctcctgatgttcctgaccatgctgcttaccaccccttccgccgtctggccatcttgcctgcttcagcaccaccagccacctcaaatcctgatccagctgtgtctcgtgtcatgaatatgaaaatcgaagaaacaaccatgacaacccaaaccccagcccccatacaggctccctctgccatcctgccactgcctgggcagagtgtggagcggctctgtgtggaccccagacaccgccaggggccagtgaacctgctctcagaccctgagcaaggggttgaggtgactggccagtatgagagggagaaggctgggttctcatggatcgaagtgaccttcaagaaccccctggtatgggttcacgcatcccctgaacacgtggtggtgactcggaaccgaagaagctctgcgtacaagtggaaggagacgctattctcagtgatgcccggcctgaagatgaccatggacaagacgggtctcctgctgctcagtgacccagacaaagtgaccatcggcctgttgttctgggatggccgtggggaggggctccggctccttctgcgtgacactgaccgcttctccagccacgttggagggacccttggccagttttaccaggaggtgctctggggatctccagcagcatcagatgacggcagacgcacgctgagggttcagggcaatgaccactctgccaccagagagcgcaggctggattaccaggaggggcccccgggagtggagatttcctgctggtctgtggagctgtagttctgatggaaggagctgtgcccaccctgtacacttggcttccccctgcaactgcagggccgcttctggggcctggaccaccatggggaggaagagtcccactcattacaaataaagaaaggtggtgtgagcctgggaagtgggtgtctccagttccatgtggccaaatcctagggcctcaacctcgcatcctgaaccttagcatcgtggaacacagaagcttccactgtcagctctcaagagcccatggccaggaaggcccatgctgagctttcagtccagccccttcattttacaaacaaggaaactgagctcgaaccacccatttgagatgtcactgtggcccccagctagaggcccagggctgggagcattctccaggagcagaggttcagtctgcttcatggtctcttggaccagttttgactaca

SEQ ID NO: 2359 - protein, 930 aa, Homosapiens; identical to SEQ ID NO: 251

SEQ ID NO: 2360 - DNA, 4847 bp, Homosapiens
gcggagtcggcggccgggcggaggtaccggctcaggcttgggatcccggctgcgggtttggcggcgctgcgccggcaggcagcgaggccgggcgggccctgggccctcgcgcccctcccgcgaggcctgtcatgcagggccccgccgggaacgcgagccggggactgccaggcgggccgccctccacagtcgcgtccggggcgggccgctgcgagagcggcgcgctcatgcacagcttcggcatcttcctgcaggggctgctcggcgtcgtggccttcagcacgttaatgctcaaacgcttcagagaaccaaagcatgaaagacgtccgtggaggatatggtttttagacacttccaaacaagccataggaatgctgttcatccactttgcaaatgtatacctagcagatctcactgaagaggacccttgttcactgtacctcatcaacttcctcctggacgccactgtgggcatgctgctcatctacgtgggggtgcgcgccgtcagcgtcctggtagagtggcagcagtgggagtccctgcgcttcggcgaatatggagaccctctgcagtgtggagcctgggtcgggcagtgcgctctttacatcgtgatcatgatttttgaaaagtctgtcgtcttcatcgtcctcctaatacttcagtggaaaaaggtggccctgttgaatcccattgaaaacccagacttgaagctggccatcgtcatgctgatcgtccccttctttgtcaacgctttgatgttttgggtagtggacaatttcctcatgagaaaggggaagacgaaagctaagctagaagaaaggggagccaaccaggactcgaggaatgggagcaaggtccgctaccggagggccgcatcccacgaggagtctgagtctgagatcctgatctcagcggatgatgagatggaggagtccgacgtggaggaggacctccgcagactgacccccctcaagcctgtgaagaaaaagaagcaccgctttgggctacccctgctgcctgccagagaggcgccttcagagacccagcgcttacacaatacccaccatgtcccaggctggtgctcaggaagcccctatcaagaagaagcgcccccctgtgaaggacgaggacctgaagggggcccgaggaaacctgaccaagaaccaggaaatcaagtccaagacctaccaggtcatgcgagagtgtgagcaagctggctcggccgccccgtcggtgttcagccgcacccgcacaggtaccgagactgtctttgagaagcccaaagccggacccaccaagagtgtcttcggctgagaagtgtgcgccactccccttgctgcccgaatgctcggaaacaggagcctttcccaggaactcttttttatgccagaacgcttcctctcccctgctgtctctggggctgccaccctcccccacagtccaggcccttcagccaagggctctgcaccagcaccttggaagcaccaataaagaggatgcccacgtggccccagcaatcagaagcgattcctgggctccctctgctccaccaaatgactccccagtcacccctcaggagctgctggcactgtcagaagcctcctggcagacactggagccacgatgaagcccccaaggcctgtccgtacctgcagcaaagttctcgtcctgctttcactgctggccatccaccagactactactgccgaaaagaatggcatcgacatctacagcctcaccgtggactccagggtctcatcccgatttgcccacacggtcgtcaccagccgagtggtcaatagggccaatactgtgcaggaggccaccttccagatggagctgcccaagaaagccttcatcaccaacttctccatgatcatcgatggcatgacctacccagggatcatcaaggagaaggctgaagcccaggcacagtacagcgcagcagtggccaagggaaagagcgctggcctcgtcaaggccaccgggagaaacatggagcagttccaggtgtcggtcagtgtggctcccaatgccaagatcacctttgagctggtctatgaggagctgctcaagcggcgtttgggggtgtacgagctgctgctgaaagtgcggccccagcagctggtcaagcacctgcagatggacattcacatcttcgagccccagggcatcagctttctggagacagagagcaccttcatgaccaaccagctggtagacgccctcaccacctggcagaataagaccaaggctcacatccggttcaagccaacactttcccagcagcaaaagtccccagagcagcaagaaacagtcctggacggcaacctcattatccgctatgatgtggaccgggccatctccgggggctccattcagatcgagaacggctactttgtacactactttgcccccgagggcctaaccacaatgcccaagaatgtggtctttgtcattgacaagagcggctccatgagtggcaggaaaatccagcagacccgggaagccctaatcaagatcctggatgacctcagccccagagaccagttcaacctcatcgtcttcagtacagaagcaactcagtggaggccatcactggtgccagcctcagccgagaacgtgaacaaggccaggagctttgctgcgggcatccaggccctgggagggaccaacatcaatgatgcaatgctgatggctgtgcagttgctggacagcagcaaccaggaggagcggctgcccgaagggagtgtctcactcatcatcctgctcaccgatggcgaccccactgtgggggagactaaccccaggagcatccagaataacgtgcgggaagctgtaagtggccggtacagcctcttctgcctgggcttcggtttcgacgtcagctatgccttcctggagaagctggcactggacaatggcggcctggcccggcgcatccatgaggactcagactctgccctgcagctccaggacttctaccaggaagtggccaacccactgctgacagcagtgaccttcgagtacccaagcaatgccgtggaggaggtcactcagaacaacttccggctcctcttcaagggctcagagatggtggtggctgggaagctccaggaccgggggcctgatgtgctcacagccacagtcagtgggaagctgcctacacagaacatcactttccaaacggagtccagtgtggcagagcaggaggcggagttccagagccccaagtatatcttccacaacttcatggagaggctctgggcatacctgactatccagcagctgctggagcaaactgtctccgcatccgatgctgatcagcaggccctccggaaccaagcgctgaatttatcacttgcctacagctttgtcacgcctctcacatctatggtagtcaccaaacccgatgaccaagagcagtctcaagttgctgagaagcccatggaaggcgaaagtagaaacaggaatgtccactcaggttccactttcttcaaatattatctccagggagcaaaaataccaaaaccagaggcttccttttctccaagaagaggatggaatagacaagctggagctgctggctcccggatgaatttcagacctggggttctcagctccaggcaacttggactcccaggacctcctgatgttcctgaccatgctgcttaccaccccttccgccgtctggccatcttgcctgcttcagcaccaccagccacctcaaatcctgatccagctgtgtctcgtgtcatgaatatgaaaatcgaagaaacaaccatgacaacccaaaccccagcccccatacaggctccctctgccatcctgccactgcctgggcagagtgtggagcggctctgtgtggaccccagacaccgccaggggccagtgaacctgctctcagaccctgagcaaggggttgaggtgactggccagtatgagagggagaaggctgggttctcatggatcgaagtgaccttcaagaaccccctggtatgggttcacgcatcccctgaacacgtggtggtgactcggaaccgaagaagctctgcgtacaagtggaaggagacgctattctcagtgatgcccggcctgaagatgaccatggacaagacgggtctcctgctgctcagtgacccagacaaagtgaccatcggcctgttgttctgggatggccgtggggaggggctccggctccttctgcgtgacactgaccgcttctccagccacgttggagggacccttggccagttttaccaggaggtgctctggggatctccagcagcatcagatgacggcagacgcacgctgagggttcagggcaatgaccactctgccaccagagagcgcaggctggattaccaggaggggcccccgggagtggagatttcctgctggtctgtggagctgtagttctgatggaaggagctgtgcccaccctgtacacttggcttccccctgcaactgcagggccgcttctggggcctggaccaccatggggaggaagagtcccactcattacaaataaagaaaggtggtgtgagcctgggaagtgggtgtctccagttccatgtggccaaatcctagggcctcaacctcgcatcctgaaccttagcatcgtggaacacagaagcttccactgtcagctctcaagagcccatggccaggaaggcccatgctgagctttcagtccagccccttcattttacaaacaaggaaactgagctcgaaccacccatttgagatgtcactgtggcccccagctagaggcccagggctgggagcattctccaggagcagaggttcagtctgcttcatggtctcttggaccagttttgactaca

SEQ ID NO: 2361 - protein, 930 aa, Homosapiens; identical to SEQ ID NO: 251

SEQ ID NO: 2362 - DNA, 3498 bp, Homosapiens
gggtctctgcagccatctgctttcatcagggctgcagcccccaggcagcagtactgggagcccctctcatctccgagaataaactctgaagccagcgaccctgcggacctgaatcatcagggagcctgtcagaggaggggcagtgactctgcgggacaagcaagcaggctatataagtttcagaaggctgggctccactcagatcttttccagcagctgctgcctgccagagaggcgccttcagagacccagcgcttacacaatacccaccatgtcccaggctggtgctcaggaagcccctatcaagaagaagcgcccccctgtgaaggacgaggacctgaagggggcccgaggaaacctgaccaagaaccaggaaatcaagtccaagacctaccaggtcatgcgagagtgtgagcaagctggctcggccgccccgtcggtgttcagccgcacccgcacaggtaccgagactgtctttgagaagcccaaagccggacccaccaagagtgtcttcggctgagaagtgtgcgccactccccttgctgcccgaatgctcggaaacaggagcctttcccaggaactcttttttatgccagaacgcttcctctcccctgctgtctctggggctgccaccctcccccacagtccaggcccttcagccaagggctctgcaccagcaccttggaagcaccaataaagaggatgcccacgtggccccagcaatcagaagcgattcctgggctccctctgctccaccaaatgactccccagtcacccctcaggagctgctggcactgtcagaagcctcctggcagacactggagccacgatgaagcccccaaggcctgtccgtacctgcagcaaagttctcgtcctgctttcactgctggccatccaccagactactactgccgaaaagaatggcatcgacatctacagcctcaccgtggactccagggtctcatcccgatttgcccacacggtcgtcaccagccgagtggtcaatagggccaatactgtgcaggaggccaccttccagatggagctgcccaagaaagccttcatcaccaacttctccatgatcatcgatggcatgacctacccagggatcatcaaggagaaggctgaagcccaggcacagtacagcgcagcagtggccaagggaaagagcgctggcctcgtcaaggccaccgggagaaacatggagcagttccaggtgtcggtcagtgtggctcccaatgccaagatcacctttgagctggtctatgaggagctgctcaagcggcgtttgggggtgtacgagctgctgctgaaagtgcggccccagcagctggtcaagcacctgcagatggacattcacatcttcgagccccagggcatcagctttctggagacagagagcaccttcatgaccaaccagctggtagacgccctcaccacctggcagaataagaccaaggctcacatccggttcaagccaacactttcccagcagcaaaagtccccagagcagcaagaaacagtcctggacggcaacctcattatccgctatgatgtggaccgggccatctccgggggctccattcagatcgagaacggctactttgtacactactttgcccccgagggcctaaccacaatgcccaagaatgtggtctttgtcattgacaagagcggctccatgagtggcaggaaaatccagcagacccgggaagccctaatcaagatcctggatgacctcagccccagagaccagttcaacctcatcgtcttcagtacagaagcaactcagtggaggccatcactggtgccagcctcagccgagaacgtgaacaaggccaggagctttgctgcgggcatccaggccctgggagggaccaacatcaatgatgcaatgctgatggctgtgcagttgctggacagcagcaaccaggaggagcggctgcccgaagggagtgtctcactcatcatcctgctcaccgatggcgaccccactgtgggggagactaaccccaggagcatccagaataacgtgcgggaagctgtaagtggccggtacagcctcttctgcctgggcttcggtttcgacgtcagctatgccttcctggagaagctggcactggacaatggcggcctggcccggcgcatccatgaggactcagactctgccctgcagctccaggacttctaccaggaagtggccaacccactgctgacagcagtgaccttcgagtacccaagcaatgccgtggaggaggtcactcagaacaacttccggctcctcttcaagggctcagagatggtggtggctgggaagctccaggaccgggggcctgatgtgctcacagccacagtcagtgggaagctgcctacacagaacatcactttccaaacggagtccagtgtggcagagcaggaggcggagttccagagccccaagtatatcttccacaacttcatggagaggctctgggcatacctgactatccagcagctgctggagcaaactgtctccgcatccgatgctgatcagcaggccctccggaaccaagcgctgaatttatcacttgcctacagctttgtcacgcctctcacatctatggtagtcaccaaacccgatgaccaagagcagtctcaagttgctgagaagcccatggaaggcgaaagtagaaacaggaatgtccactcagctggagctgctggctcccggatgaatttcagacctggggttctcagctccaggcaacttggactcccaggacctcctgatgttcctgaccatgctgcttaccaccccttccgccgtctggccatcttgcctgcttcagcaccaccagccacctcaaatcctgatccagctgtgtctcgtgtcatgaatatgaaatatgagagggagaaggctgggttctcatggatcgaagtgaccttcaagaaccccctggtatgggttcacgcatcccctgaacacgtggtggtgactcggaaccgaagaagctctgcgtacaagtggaaggagacgctattctcagtgatgcccggcctgaagatgaccatggacaagacgggtctcctgctgctcagtgacccagacaaagtgaccatcggcctgttgttctgggatggccgtggggaggggctccggctccttctgcgtgacactgaccgcttctccagccacgttggagggacccttggccagttttaccaggaggtgctctggggatctccagcagcatcagatgacggcagacgcacgctgagggttcagggcaatgaccactctgccaccagagagcgcaggctggattaccaggaggggcccccgggagtggagatttcctgctggtctgtggagctgtagttctgatggaaggagctgtgcccaccctgtacacttggcttccccctgcaactgcagggccgcttctggggcctggaccaccatggggaggaagagtcccactcattacaaataaagaaaggtggtgtgagcctggg

SEQ ID NO: 2363 - protein, 843 aa, Homosapiens; identical to SEQ ID NO: 2347

SEQ ID NO: 2364 - DNA, 3669 bp, Homosapiens
gggtctctgcagccatctgctttcatcagggctgcagcccccaggcagcagtactgggagcccctctcatctccgagaataaactctgaagccagcgaccctgcggacctgaatcatcagggagcctgtcagaggaggggcagtgactctgcgggacaagcaagcaggctatataagtttcagaaggctgggctccactcagatcttttccagcagctgctgcctgccagagaggcgccttcagagacccagcgcttacacaatacccaccatgtcccaggctggtgctcaggaagcccctatcaagaagaagcgcccccctgtgaaggacgaggacctgaagggggcccgaggaaacctgaccaagaaccaggaaatcaagtccaagacctaccaggtcatgcgagagtgtgagcaagctggctcggccgccccgtcggtgttcagccgcacccgcacaggtaccgagactgtctttgagaagcccaaagccggacccaccaagagtgtcttcggctgagaagtgtgcgccactccccttgctgcccgaatgctcggaaacaggagcctttcccaggaactcttttttatgccagaacgcttcctctcccctgctgtctctggggctgccaccctcccccacagtccaggcccttcagccaagggctctgcaccagcaccttggaagcaccaataaagaggatgcccacgtggccccagcaatcagaagcgattcctgggctccctctgctccaccaaatgactccccagtcacccctcaggagctgctggcactgtcagaagcctcctggcagacactggagccacgatgaagcccccaaggcctgtccgtacctgcagcaaagttctcgtcctgctttcactgctggccatccaccagactactactgccgaaaagaatggcatcgacatctacagcctcaccgtggactccagggtctcatcccgatttgcccacacggtcgtcaccagccgagtggtcaatagggccaatactgtgcaggaggccaccttccagatggagctgcccaagaaagccttcatcaccaacttctccatgatcatcgatggcatgacctacccagggatcatcaaggagaaggctgaagcccaggcacagtacagcgcagcagtggccaagggaaagagcgctggcctcgtcaaggccaccgggagaaacatggagcagttccaggtgtcggtcagtgtggctcccaatgccaagatcacctttgagctggtctatgaggagctgctcaagcggcgtttgggggtgtacgagctgctgctgaaagtgcggccccagcagctggtcaagcacctgcagatggacattcacatcttcgagccccagggcatcagctttctggagacagagagcaccttcatgaccaaccagctggtagacgccctcaccacctggcagaataagaccaaggctcacatccggttcaagccaacactttcccagcagcaaaagtccccagagcagcaagaaacagtcctggacggcaacctcattatccgctatgatgtggaccgggccatctccgggggctccattcagatcgagaacggctactttgtacactactttgcccccgagggcctaaccacaatgcccaagaatgtggtctttgtcattgacaagagcggctccatgagtggcaggaaaatccagcagacccgggaagccctaatcaagatcctggatgacctcagccccagagaccagttcaacctcatcgtcttcagtacagaagcaactcagtggaggccatcactggtgccagcctcagccgagaacgtgaacaaggccaggagctttgctgcgggcatccaggccctgggagggaccaacatcaatgatgcaatgctgatggctgtgcagttgctggacagcagcaaccaggaggagcggctgcccgaagggagtgtctcactcatcatcctgctcaccgatggcgaccccactgtgggggagactaaccccaggagcatccagaataacgtgcgggaagctgtaagtggccggtacagcctcttctgcctgggcttcggtttcgacgtcagctatgccttcctggagaagctggcactggacaatggcggcctggcccggcgcatccatgaggactcagactctgccctgcagctccaggacttctaccaggaagtggccaacccactgctgacagcagtgaccttcgagtacccaagcaatgccgtggaggaggtcactcagaacaacttccggctcctcttcaagggctcagagatggtggtggctgggaagctccaggaccgggggcctgatgtgctcacagccacagtcagtgggaagctgcctacacagaacatcactttccaaacggagtccagtgtggcagagcaggaggcggagttccagagccccaagtatatcttccacaacttcatggagaggctctgggcatacctgactatccagcagctgctggagcaaactgtctccgcatccgatgctgatcagcaggccctccggaaccaagcgctgaatttatcacttgcctacagctttgtcacgcctctcacatctatggtagtcaccaaacccgatgaccaagagcagtctcaagttgctgagaagcccatggaaggcgaaagtagaaacaggaatgtccactcagctggagctgctggctcccggatgaatttcagacctggggttctcagctccaggcaacttggactcccaggacctcctgatgttcctgaccatgctgcttaccaccccttccgccgtctggccatcttgcctgcttcagcaccaccagccacctcaaatcctgatccagctgtgtctcgtgtcatgaatatgaaaatcgaagaaacaaccatgacaacccaaaccccagcccccatacaggctccctctgccatcctgccactgcctgggcagagtgtggagcggctctgtgtggaccccagacaccgccaggggccagtgaacctgctctcagaccctgagcaaggggttgaggtgactggccagtatgagagggagaaggctgggttctcatggatcgaagtgaccttcaagaaccccctggtatgggttcacgcatcccctgaacacgtggtggtgactcggaaccgaagaagctctgcgtacaagtggaaggagacgctattctcagtgatgcccggcctgaagatgaccatggacaagacgggtctcctgctgctcagtgacccagacaaagtgaccatcggcctgttgttctgggatggccgtggggaggggctccggctccttctgcgtgacactgaccgcttctccagccacgttggagggacccttggccagttttaccaggaggtgctctggggatctccagcagcatcagatgacggcagacgcacgctgagggttcagggcaatgaccactctgccaccagagagcgcaggctggattaccaggaggggcccccgggagtggagatttcctgctggtctgtggagctgtagttctgatggaaggagctgtgcccaccctgtacacttggcttccccctgcaactgcagggccgcttctggggcctggaccaccatggggaggaagagtcccactcattacaaataaagaaaggtggtgtgagcctggg

SEQ ID NO: 2365 - protein, 900 aa, Homosapiens; identical to SEQ ID NO: 2349

SEQ ID NO: 2366 - DNA, 3707 bp, Homosapiens
gggtctctgcagccatctgctttcatcagggctgcagcccccaggcagcagtactgggagcccctctcatctccgagaataaactctgaagccagcgaccctgcggacctgaatcatcagggagcctgtcagaggaggggcagtgactctgcgggacaagcaagcaggctatataagtttcagaaggctgggctccactcagatcttttccagcagctgctgcctgccagagaggcgccttcagagacccagcgcttacacaatacccaccatgtcccaggctggtgctcaggaagcccctatcaagaagaagcgcccccctgtgaaggacgaggacctgaagggggcccgaggaaacctgaccaagaaccaggaaatcaagtccaagacctaccaggtcatgcgagagtgtgagcaagctggctcggccgccccgtcggtgttcagccgcacccgcacaggtaccgagactgtctttgagaagcccaaagccggacccaccaagagtgtcttcggctgagaagtgtgcgccactccccttgctgcccgaatgctcggaaacaggagcctttcccaggaactcttttttatgccagaacgcttcctctcccctgctgtctctggggctgccaccctcccccacagtccaggcccttcagccaagggctctgcaccagcaccttggaagcaccaataaagaggatgcccacgtggccccagcaatcagaagcgattcctgggctccctctgctccaccaaatgactccccagtcacccctcaggagctgctggcactgtcagaagcctcctggcagacactggagccacgatgaagcccccaaggcctgtccgtacctgcagcaaagttctcgtcctgctttcactgctggccatccaccagactactactgccgaaaagaatggcatcgacatctacagcctcaccgtggactccagggtctcatcccgatttgcccacacggtcgtcaccagccgagtggtcaatagggccaatactgtgcaggaggccaccttccagatggagctgcccaagaaagccttcatcaccaacttctccatgatcatcgatggcatgacctacccagggatcatcaaggagaaggctgaagcccaggcacagtacagcgcagcagtggccaagggaaagagcgctggcctcgtcaaggccaccgggagaaacatggagcagttccaggtgtcggtcagtgtggctcccaatgccaagatcacctttgagctggtctatgaggagctgctcaagcggcgtttgggggtgtacgagctgctgctgaaagtgcggccccagcagctggtcaagcacctgcagatggacattcacatcttcgagccccagggcatcagctttctggagacagagagcaccttcatgaccaaccagctggtagacgccctcaccacctggcagaataagaccaaggctcacatccggttcaagccaacactttcccagcagcaaaagtccccagagcagcaagaaacagtcctggacggcaacctcattatccgctatgatgtggaccgggccatctccgggggctccattcagatcgagaacggctactttgtacactactttgcccccgagggcctaaccacaatgcccaagaatgtggtctttgtcattgacaagagcggctccatgagtggcaggaaaatccagcagacccgggaagccctaatcaagatcctggatgacctcagccccagagaccagttcaacctcatcgtcttcagtacagaagcaactcagtggaggccatcactggtgccagcctcagccgagaacgtgaacaaggccaggagctttgctgcgggcatccaggccctgggagggaccaacatcaatgatgcaatgctgatggctgtgcagttgctggacagcagcaaccaggaggagcggctgcccgaagggagtgtctcactcatcatcctgctcaccgatggcgaccccactgtgggggagactaaccccaggagcatccagaataacgtgcgggaagctgtaagtggccggtacagcctcttctgcctgggcttcggtttcgacgtcagctatgccttcctggagaagctggcactggacaatggcggcctggcccggcgcatccatgaggactcagactctgccctgcagctccaggacttctaccaggaagtggccaacccactgctgacagcagtgaccttcgagtacccaagcaatgccgtggaggaggtcactcagaacaacttccggctcctcttcaagggctcagagatggtggtggctgggaagctccaggaccgggggcctgatgtgctcacagccacagtcagtgggaagctgcctacacagaacatcactttccaaacggagtccagtgtggcagagcaggaggcggagttccagagccccaagtatatcttccacaacttcatggagaggctctgggcatacctgactatccagcagctgctggagcaaactgtctccgcatccgatgctgatcagcaggccctccggaaccaagcgctgaatttatcacttgcctacagctttgtcacgcctctcacatctatggtagtcaccaaacccgatgaccaagagcagtctcaagttgctgagaagcccatggaaggcgaaagtagaaacaggaatgtccactcagctggagctgctggctcccggatgaatttcagacctggggttctcagctccaggcaacttggactcccaggacctcctgatgttcctgaccatgctgcttaccaccccttccgccgtctggccatcttgcctgcttcagcaccaccagccacctcaaatcctgatccagctgtgtctcgtgtcatgaatatcccccttggcccctttccacatccttgcccccagcctgcccttcctgctccaggagccgtgccccggctgtcccagcccccatacaggctccctctgccatcctgccactgcctgggcagagtgtggagcggctctgtgtggaccccagacaccgccaggggccagtgaacctgctctcagaccctgagcaaggggttgaggtgactggccagtatgagagggagaaggctgggttctcatggatcgaagtgaccttcaagaaccccctggtatgggttcacgcatcccctgaacacgtggtggtgactcggaaccgaagaagctctgcgtacaagtggaaggagacgctattctcagtgatgcccggcctgaagatgaccatggacaagacgggtctcctgctgctcagtgacccagacaaagtgaccatcggcctgttgttctgggatggccgtggggaggggctccggctccttctgcgtgacactgaccgcttctccagccacgttggagggacccttggccagttttaccaggaggtgctctggggatctccagcagcatcagatgacggcagacgcacgctgagggttcagggcaatgaccactctgccaccagagagcgcaggctggattaccaggaggggcccccgggagtggagatttcctgctggtctgtggagctgtagttctgatggaaggagctgtgcccaccctgtacacttggcttccccctgcaactgcagggccgcttctggggcctggaccaccatggggaggaagagtcccactcattacaaataaagaaaggtggtgtgagcctggg

SEQ ID NO: 2367 - protein, 739 aa, Homosapiens; identical to SEQ ID NO: 2351

SEQ ID NO: 2368 - DNA, 3759 bp, Homosapiens
gggtctctgcagccatctgctttcatcagggctgcagcccccaggcagcagtactgggagcccctctcatctccgagaataaactctgaagccagcgaccctgcggacctgaatcatcagggagcctgtcagaggaggggcagtgactctgcgggacaagcaagcaggctatataagtttcagaaggctgggctccactcagatcttttccagcagctgctgcctgccagagaggcgccttcagagacccagcgcttacacaatacccaccatgtcccaggctggtgctcaggaagcccctatcaagaagaagcgcccccctgtgaaggacgaggacctgaagggggcccgaggaaacctgaccaagaaccaggaaatcaagtccaagacctaccaggtcatgcgagagtgtgagcaagctggctcggccgccccgtcggtgttcagccgcacccgcacaggtaccgagactgtctttgagaagcccaaagccggacccaccaagagtgtcttcggctgagaagtgtgcgccactccccttgctgcccgaatgctcggaaacaggagcctttcccaggaactcttttttatgccagaacgcttcctctcccctgctgtctctggggctgccaccctcccccacagtccaggcccttcagccaagggctctgcaccagcaccttggaagcaccaataaagaggatgcccacgtggccccagcaatcagaagcgattcctgggctccctctgctccaccaaatgactccccagtcacccctcaggagctgctggcactgtcagaagcctcctggcagacactggagccacgatgaagcccccaaggcctgtccgtacctgcagcaaagttctcgtcctgctttcactgctggccatccaccagactactactgccgaaaagaatggcatcgacatctacagcctcaccgtggactccagggtctcatcccgatttgcccacacggtcgtcaccagccgagtggtcaatagggccaatactgtgcaggaggccaccttccagatggagctgcccaagaaagccttcatcaccaacttctccatgatcatcgatggcatgacctacccagggatcatcaaggagaaggctgaagcccaggcacagtacagcgcagcagtggccaagggaaagagcgctggcctcgtcaaggccaccgggagaaacatggagcagttccaggtgtcggtcagtgtggctcccaatgccaagatcacctttgagctggtctatgaggagctgctcaagcggcgtttgggggtgtacgagctgctgctgaaagtgcggccccagcagctggtcaagcacctgcagatggacattcacatcttcgagccccagggcatcagctttctggagacagagagcaccttcatgaccaaccagctggtagacgccctcaccacctggcagaataagaccaaggctcacatccggttcaagccaacactttcccagcagcaaaagtccccagagcagcaagaaacagtcctggacggcaacctcattatccgctatgatgtggaccgggccatctccgggggctccattcagatcgagaacggctactttgtacactactttgcccccgagggcctaaccacaatgcccaagaatgtggtctttgtcattgacaagagcggctccatgagtggcaggaaaatccagcagacccgggaagccctaatcaagatcctggatgacctcagccccagagaccagttcaacctcatcgtcttcagtacagaagcaactcagtggaggccatcactggtgccagcctcagccgagaacgtgaacaaggccaggagctttgctgcgggcatccaggccctgggagggaccaacatcaatgatgcaatgctgatggctgtgcagttgctggacagcagcaaccaggaggagcggctgcccgaagggagtgtctcactcatcatcctgctcaccgatggcgaccccactgtgggggagactaaccccaggagcatccagaataacgtgcgggaagctgtaagtggccggtacagcctcttctgcctgggcttcggtttcgacgtcagctatgccttcctggagaagctggcactggacaatggcggcctggcccggcgcatccatgaggactcagactctgccctgcagctccaggacttctaccaggaagtggccaacccactgctgacagcagtgaccttcgagtacccaagcaatgccgtggaggaggtcactcagaacaacttccggctcctcttcaagggctcagagatggtggtggctgggaagctccaggaccgggggcctgatgtgctcacagccacagtcagtgggaagctgcctacacagaacatcactttccaaacggagtccagtgtggcagagcaggaggcggagttccagagccccaagtatatcttccacaacttcatggagaggctctgggcatacctgactatccagcagctgctggagcaaactgtctccgcatccgatgctgatcagcaggccctccggaaccaagcgctgaatttatcacttgcctacagctttgtcacgcctctcacatctatggtagtcaccaaacccgatgaccaagagcagtctcaagttgctgagaagcccatggaaggcgaaagtagaaacaggaatgtccactcaggttccactttcttcaaatattatctccagggagcaaaaataccaaaaccagaggcttccttttctccaagaagaggatggaatagacaagctggagctgctggctcccggatgaatttcagacctggggttctcagctccaggcaacttggactcccaggacctcctgatgttcctgaccatgctgcttaccaccccttccgccgtctggccatcttgcctgcttcagcaccaccagccacctcaaatcctgatccagctgtgtctcgtgtcatgaatatgaaaatcgaagaaacaaccatgacaacccaaaccccagcccccatacaggctccctctgccatcctgccactgcctgggcagagtgtggagcggctctgtgtggaccccagacaccgccaggggccagtgaacctgctctcagaccctgagcaaggggttgaggtgactggccagtatgagagggagaaggctgggttctcatggatcgaagtgaccttcaagaaccccctggtatgggttcacgcatcccctgaacacgtggtggtgactcggaaccgaagaagctctgcgtacaagtggaaggagacgctattctcagtgatgcccggcctgaagatgaccatggacaagacgggtctcctgctgctcagtgacccagacaaagtgaccatcggcctgttgttctgggatggccgtggggaggggctccggctccttctgcgtgacactgaccgcttctccagccacgttggagggacccttggccagttttaccaggaggtgctctggggatctccagcagcatcagatgacggcagacgcacgctgagggttcagggcaatgaccactctgccaccagagagcgcaggctggattaccaggaggggcccccgggagtggagatttcctgctggtctgtggagctgtagttctgatggaaggagctgtgcccaccctgtacacttggcttccccctgcaactgcagggccgcttctggggcctggaccaccatggggaggaagagtcccactcattacaaataaagaaaggtggtgtgagcctggg

SEQ ID NO: 2369 - protein, 930 aa, Homosapiens; identical to SEQ ID NO: 251

SEQ ID NO: 2370 - DNA, 3857 bp, Homosapiens
gggtctctgcagccatctgctttcatcagggctgcagcccccaggcagcagtactgggagcccctctcatctccgagaataaactctgaagccagcgaccctgcggacctgaatcatcagggagcctgtcagaggaggggcagtgactctgcgggacaagcaagcaggctatataagtttcagaaggctgggctccactcagatcttttccagcagctgctgcctgccagagaggcgccttcagagacccagcgcttacacaatacccaccatgtcccaggctggtgctcaggaagcccctatcaagaagaagcgcccccctgtgaaggacgaggacctgaagggggcccgaggaaacctgaccaagaaccaggaaatcaagtccaagacctaccaggtcatgcgagagtgtgagcaagctggctcggccgccccgtcggtgttcagccgcacccgcacaggtaccgagactgtctttgagaagcccaaagccggacccaccaagagtgtcttcggctgagaagtgtgcgccactccccttgctgcccgaatgctcggaaacaggagcctttcccaggaactcttttttatgccagaacgcttcctctcccctgctgtctctggggctgccaccctcccccacagtccaggcccttcagccaagggctctgcaccagcaccttggaagcaccaataaagaggatgcccacgtggccccagcaatcagaagcgattcctgggctccctctgctccaccaaatgactccccagtcacccctcaggagctgctggcactgtcagaagcctcctggcagacactggagccacgatgaagcccccaaggcctgtccgtacctgcagcaaagttctcgtcctgctttcactgctggccatccaccagactactactgccgaaaagaatggcatcgacatctacagcctcaccgtggactccagggtctcatcccgatttgcccacacggtcgtcaccagccgagtggtcaatagggccaatactgtgcaggaggccaccttccagatggagctgcccaagaaagccttcatcaccaacttctccatgatcatcgatggcatgacctacccagggatcatcaaggagaaggctgaagcccaggcacagtacagcgcagcagtggccaagggaaagagcgctggcctcgtcaaggccaccgggagaaacatggagcagttccaggtgtcggtcagtgtggctcccaatgccaagatcacctttgagctggtctatgaggagctgctcaagcggcgtttgggggtgtacgagctgctgctgaaagtgcggccccagcagctggtcaagcacctgcagatggacattcacatcttcgagccccagggcatcagctttctggagacagagagcaccttcatgaccaaccagctggtagacgccctcaccacctggcagaataagaccaaggctcacatccggttcaagccaacactttcccagcagcaaaagtccccagagcagcaagaaacagtcctggacggcaacctcattatccgctatgatgtggaccgggccatctccgggggctccattcagatcgagaacggctactttgtacactactttgcccccgagggcctaaccacaatgcccaagaatgtggtctttgtcattgacaagagcggctccatgagtggcaggaaaatccagcagacccgggaagccctaatcaagatcctggatgacctcagccccagagaccagttcaacctcatcgtcttcagtacagaagcaactcagtggaggccatcactggtgccagcctcagccgagaacgtgaacaaggccaggagctttgctgcgggcatccaggccctgggagggaccaacatcaatgatgcaatgctgatggctgtgcagttgctggacagcagcaaccaggaggagcggctgcccgaagggagtgtctcactcatcatcctgctcaccgatggcgaccccactgtgggggagactaaccccaggagcatccagaataacgtgcgggaagctgtaagtggccggtacagcctcttctgcctgggcttcggtttcgacgtcagctatgccttcctggagaagctggcactggacaatggcggcctggcccggcgcatccatgaggactcagactctgccctgcagctccaggacttctaccaggaagtggccaacccactgctgacagcagtgaccttcgagtacccaagcaatgccgtggaggaggtcactcagaacaacttccggctcctcttcaagggctcagagatggtggtggctgggaagctccaggaccgggggcctgatgtgctcacagccacagtcagtgggaagctgcctacacagaacatcactttccaaacggagtccagtgtggcagagcaggaggcggagttccagagccccaagtatatcttccacaacttcatggagaggctctgggcatacctgactatccagcagctgctggagcaaactgtctccgcatccgatgctgatcagcaggccctccggaaccaagcgctgaatttatcacttgcctacagctttgtcacgcctctcacatctatggtagtcaccaaacccgatgaccaagagcagtctcaagttgctgagaagcccatggaaggcgaaagtagaaacaggaatgtccactcaggttccactttcttcaaatattatctccagggagcaaaaataccaaaaccaggtgacaaagtaggaggtggggggaggggagattgacagattgggctcagtcctggctgtggagggtagtgccttgcccagctcctctggctggtgacagccctcgggcctcagttcagttgtatctgatcaggacttgaccacacagaggcttccttttctccaagaagaggatggaatagacaagctggagctgctggctcccggatgaatttcagacctggggttctcagctccaggcaacttggactcccaggacctcctgatgttcctgaccatgctgcttaccaccccttccgccgtctggccatcttgcctgcttcagcaccaccagccacctcaaatcctgatccagctgtgtctcgtgtcatgaatatgctccctctgccatcctgccactgcctgggcagagtgtggagcggctctgtgtggaccccagacaccgccaggggccagtgaacctgctctcagaccctgagcaaggggttgaggtgactggccagtatgagagggagaaggctgggttctcatggatcgaagtgaccttcaagaaccccctggtatgggttcacgcatcccctgaacacgtggtggtgactcggaaccgaagaagctctgcgtacaagtggaaggagacgctattctcagtgatgcccggcctgaagatgaccatggacaagacgggtctcctgctgctcagtgacccagacaaagtgaccatcggcctgttgttctgggatggccgtggggaggggctccggctccttctgcgtgacactgaccgcttctccagccacgttggagggacccttggccagttttaccaggaggtgctctggggatctccagcagcatcagatgacggcagacgcacgctgagggttcagggcaatgaccactctgccaccagagagcgcaggctggattaccaggaggggcccccgggagtggagatttcctgctggtctgtggagctgtagttctgatggaaggagctgtgcccaccctgtacacttggcttccccctgcaactgcagggccgcttctggggcctggaccaccatggggaggaagagtcccactcattacaaataaagaaaggtggtgtgagcctggg

SEQ ID NO: 2371 - protein, 648 aa, Homosapiens; identical to SEQ ID NO: 2341

SEQ ID NO: 2372 - DNA, 3710 bp, Homosapiens
gggtctctgcagccatctgctttcatcagggctgcagcccccaggcagcagtactgggagcccctctcatctccgagaataaactctgaagccagcgaccctgcggacctgaatcatcagggagcctgtcagaggaggggcagtgactctgcgggacaagcaagcaggctatataagtttcagaaggctgggctccactcagatcttttccagcagctgctgcctgccagagaggcgccttcagagacccagcgcttacacaatacccaccatgtcccaggctggtgctcaggaagcccctatcaagaagaagcgcccccctgtgaaggacgaggacctgaagggggcccgaggaaacctgaccaagaaccaggaaatcaagtccaagacctaccaggtcatgcgagagtgtgagcaagctggctcggccgccccgtcggtgttcagccgcacccgcacaggtaccgagactgtctttgagaagcccaaagccggacccaccaagagtgtcttcggctgagaagtgtgcgccactccccttgctgcccgaatgctcggaaacaggagcctttcccaggaactcttttttatgccagaacgcttcctctcccctgctgtctctggggctgccaccctcccccacagtccaggcccttcagccaagggctctgcaccagcaccttggaagcaccaataaagaggatgcccacgtggccccagcaatcagaagcgattcctgggctccctctgctccaccaaatgactccccagtcacccctcaggagctgctggcactgtcagaagcctcctggcagacactggagccacgatgaagcccccaaggcctgtccgtacctgcagcaaagttctcgtcctgctttcactgctggccatccaccagactactactgccgaaaagaatggcatcgacatctacagcctcaccgtggactccagggtctcatcccgatttgcccacacggtcgtcaccagccgagtggtcaatagggccaatactgtgcaggaggccaccttccagatggagctgcccaagaaagccttcatcaccaacttctccatgatcatcgatggcatgacctacccagggatcatcaaggagaaggctgaagcccaggcacagtacagcgcagcagtggccaagggaaagagcgctggcctcgtcaaggccaccgggagaaacatggagcagttccaggtgtcggtcagtgtggctcccaatgccaagatcacctttgagctggtctatgaggagctgctcaagcggcgtttgggggtgtacgagctgctgctgaaagtgcggccccagcagctggtcaagcacctgcagatggacattcacatcttcgagccccagggcatcagctttctggagacagagagcaccttcatgaccaaccagctggtagacgccctcaccacctggcagaataagaccaaggctcacatccggttcaagccaacactttcccagcagcaaaagtccccagagcagcaagaaacagtcctggacggcaacctcattatccgctatgatgtggaccgggccatctccgggggctccattcagatcgagaacggctactttgtacactactttgcccccgagggcctaaccacaatgcccaagaatgtggtctttgtcattgacaagagcggctccatgagtggcaggaaaatccagcagacccgggaagccctaatcaagatcctggatgacctcagccccagagaccagttcaacctcatcgtcttcagtacagaagcaactcagtggaggccatcactggtgccagcctcagccgagaacgtgaacaaggccaggagctttgctgcgggcatccaggccctgggagggaccaacatcaatgatgcaatgctgatggctgtgcagttgctggacagcagcaaccaggaggagcggctgcccgaagggagtgtctcactcatcatcctgctcaccgatggcgaccccactgtgggggagactaaccccaggagcatccagaataacgtgcgggaagctgtaagtggccggtacagcctcttctgcctgggcttcggtttcgacgtcagctatgccttcctggagaagctggcactggacaatggcggcctggcccggcgcatccatgaggactcagactctgccctgcagctccaggacttctaccaggaagtggccaacccactgctgacagcagtgaccttcgagtacccaagcaatgccgtggaggaggtcactcagaacaacttccggctcctcttcaagggctcagagatggtggtggctgggaagctccaggaccgggggcctgatgtgctcacagccacagtcagtgggaagctgcctacacagaacatcactttccaaacggagtccagtgtggcagagcaggaggcggagttccagagccccaagtatatcttccacaacttcatggagaggctctgggcatacctgactatccagcagctgctggagcaaactgtctccgcatccgatgctgatcagcaggccctccggaaccaagcgctgaatttatcacttgcctacagctttgtcacgcctctcacatctatggtagtcaccaaacccgatgaccaagagcagtctcaagttgctgagaagcccatggaaggcgaaagtagaaacaggaatgtccactcaggttccactttcttcaaatattatctccagggagcaaaaataccaaaaccagaggcttccttttctccaagaagaggatggaatagacaagctggagctgctggctcccggatgaatttcagacctggggttctcagctccaggcaacttggactcccaggacctcctgatgttcctgaccatgctgcttaccaccccttccgccgtctggccatcttgcctgcttcagcaccaccagccacctcaaatcctgatccagctgtgtctcgtgtcatgaatatgctccctctgccatcctgccactgcctgggcagagtgtggagcggctctgtgtggaccccagacaccgccaggggccagtgaacctgctctcagaccctgagcaaggggttgaggtgactggccagtatgagagggagaaggctgggttctcatggatcgaagtgaccttcaagaaccccctggtatgggttcacgcatcccctgaacacgtggtggtgactcggaaccgaagaagctctgcgtacaagtggaaggagacgctattctcagtgatgcccggcctgaagatgaccatggacaagacgggtctcctgctgctcagtgacccagacaaagtgaccatcggcctgttgttctgggatggccgtggggaggggctccggctccttctgcgtgacactgaccgcttctccagccacgttggagggacccttggccagttttaccaggaggtgctctggggatctccagcagcatcagatgacggcagacgcacgctgagggttcagggcaatgaccactctgccaccagagagcgcaggctggattaccaggaggggcccccgggagtggagatttcctgctggtctgtggagctgtagttctgatggaaggagctgtgcccaccctgtacacttggcttccccctgcaactgcagggccgcttctggggcctggaccaccatggggaggaagagtcccactcattacaaataaagaaaggtggtgtgagcctggg

SEQ ID NO: 2373 - protein, 740 aa, Homosapiens; identical to SEQ ID NO: 2357

SEQ ID NO: 2374 - DNA, 3516 bp, Homosapiens
gggtctctgcagccatctgctttcatcagggctgcagcccccaggcagcagtactgggagcccctctcatctccgagaataaactctgaagccagcgaccctgcggacctgaatcatcagggagcctgtcagaggaggggcagtgactctgcgggacaagcaagcaggctatataagtttcagaaggctgggctccactcagatcttttccagcagctgctgcctgccagagaggcgccttcagagacccagcgcttacacaatacccaccatgtcccaggctggtgctcaggaagcccctatcaagaagaagcgcccccctgtgaaggacgaggacctgaagggggcccgaggaaacctgaccaagaaccaggaaatcaagtccaagacctaccaggtcatgcgagagtgtgagcaagctggctcggccgccccgtcggtgttcagccgcacccgcacaggtaccgagactgtctttgagaagcccaaagccggacccaccaagagtgtcttcggctgagaagtgtgcgccactccccttgctgcccgaatgctcggaaacaggagcctttcccaggaactcttttttatgccagaacgcttcctctcccctgctgtctctggggctgccaccctcccccacagtccaggcccttcagccaagggctctgcaccagcaccttggaagcaccaataaagaggatgcccacgtggccccagcaatcagaagcgattcctgggctccctctgctccaccaaatgactccccagtcacccctcaggagctgctggcactgtcagaagcctcctggcagacactggagccacgatgaagcccccaaggcctgtccgtacctgcagcaaagttctcgtcctgctttcactgctggccatccaccagactactactgccgaaaagaatggcatcgacatctacagcctcaccgtggactccagggtctcatcccgatttgcccacacggtcgtcaccagccgagtggtcaatagggccaatactgtgcaggaggccaccttccagatggagctgcccaagaaagccttcatcaccaacttctccatgatcatcgatggcatgacctacccagggatcatcaaggagaaggctgaagcccaggcacagtacagcgcagcagtggccaagggaaagagcgctggcctcgtcaaggccaccgggagaaacatggagcagttccaggtgtcggtcagtgtggctcccaatgccaagatcacctttgagctggtctatgaggagctgctcaagcggcgtttgggggtgtacgagctgctgctgaaagtgcggccccagcagctggtcaagcacctgcagatggacattcacatcttcgagccccagggcatcagctttctggagacagagagcaccttcatgaccaaccagctggtagacgccctcaccacctggcagaataagaccaagcaaaagtccccagagcagcaagaaacagtcctggacggcaacctcattatccgctatgatgtggaccgggccatctccgggggctccattcagatcgagaacggctactttgtacactactttgcccccgagggcctaaccacaatgcccaagaatgtggtctttgtcattgacaagagcggctccatgagtggcaggaaaatccagcagacccgggaagccctaatcaagatcctggatgacctcagccccagagaccagttcaacctcatcgtcttcagtacagaagcaactcagtggaggccatcactggtgccagcctcagccgagaacgtgaacaaggccaggagctttgctgcgggcatccaggccctgggagggaccaacatcaatgatgcaatgctgatggctgtgcagttgctggacagcagcaaccaggaggagcggctgcccgaagggagtgtctcactcatcatcctgctcaccgatggcgaccccactgtgggggagactaaccccaggagcatccagaataacgtgcgggaagctgtaagtggccggtacagcctcttctgcctgggcttcggtttcgacgtcagctatgccttcctggagaagctggcactggacaatggcggcctggcccggcgcatccatgaggactcagactctgccctgcagctccaggacttctaccaggaagtggccaacccactgctgacagcagtgaccttcgagtacccaagcaatgccgtggaggaggtcactcagaacaacttccggctcctcttcaagggctcagagatggtggtggctgggaagctccaggaccgggggcctgatgtgctcacagccacagtcagtgggaagctgcctacacagaacatcactttccaaacggagtccagtgtggcagagcaggaggcggagttccagagccccaagtatatcttccacaacttcatggagaggctctgggcatacctgactatccagcagctgctggagcaaactgtctccgcatccgatgctgatcagcaggccctccggaaccaagcgctgaatttatcacttgcctacagctttgtcacgcctctcacatctatggtagtcaccaaacccgatgaccaagagcagtctcaagttgctgagaagcccatggaaggcgaaagtagaaacaggaatgtccactcagctggagctgctggctcccggatgaatttcagacctggggttctcagctccaggcaacttggactcccaggacctcctgatgttcctgaccatgctgcttaccaccccttccgccgtctggccatcttgcctgcttcagcaccaccagccacctcaaatcctgatccagctgtgtctcgtgtcatgaatatgaaaatcgaagaaacaaccatgacaacccaaaccccaggggttgaggtgactggccagtatgagagggagaaggctgggttctcatggatcgaagtgaccttcaagaaccccctggtatgggttcacgcatcccctgaacacgtggtggtgactcggaaccgaagaagctctgcgtacaagtggaaggagacgctattctcagtgatgcccggcctgaagatgaccatggacaagacgggtctcctgctgctcagtgacccagacaaagtgaccatcggcctgttgttctgggatggccgtggggaggggctccggctccttctgcgtgacactgaccgcttctccagccacgttggagggacccttggccagttttaccaggaggtgctctggggatctccagcagcatcagatgacggcagacgcacgctgagggttcagggcaatgaccactctgccaccagagagcgcaggctggattaccaggaggggcccccgggagtggagatttcctgctggtctgtggagctgtagttctgatggaaggagctgtgcccaccctgtacacttggcttccccctgcaactgcagggccgcttctggggcctggaccaccatggggaggaagagtcccactcattacaaataaagaaaggtggtgtgagcctggg

SEQ ID NO: 2375 - protein, 849 aa, Homosapiens
MKPPRPVRTCSKVLVLLSLLAIHQTTTAEKNGIDIYSLTVDSRVSSRFAHTVVTSRVVNRANTVQEATFQMELPKKAFITNFSMIIDGMTYPGIIKEKAEAQAQYSAAVAKGKSAGLVKATGRNMEQFQVSVSVAPNAKITFELVYEELLKRRLGVYELLLKVRPQQLVKHLQMDIHIFEPQGISFLETESTFMTNQLVDALTTWQNKTKQKSPEQQETVLDGNLIIRYDVDRAISGGSIQIENGYFVHYFAPEGLTTMPKNVVFVIDKSGSMSGRKIQQTREALIKILDDLSPRDQFNLIVFSTEATQWRPSLVPASAENVNKARSFAAGIQALGGTNINDAMLMAVQLLDSSNQEERLPEGSVSLIILLTDGDPTVGETNPRSIQNNVREAVSGRYSLFCLGFGFDVSYAFLEKLALDNGGLARRIHEDSDSALQLQDFYQEVANPLLTAVTFEYPSNAVEEVTQNNFRLLFKGSEMVVAGKLQDRGPDVLTATVSGKLPTQNITFQTESSVAEQEAEFQSPKYIFHNFMERLWAYLTIQQLLEQTVSASDADQQALRNQALNLSLAYSFVTPLTSMVVTKPDDQEQSQVAEKPMEGESRNRNVHSAGAAGSRMNFRPGVLSSRQLGLPGPPDVPDHAAYHPFRRLAILPASAPPATSNPDPAVSRVMNMKIEETTMTTQTPGVEVTGQYEREKAGFSWIEVTFKNPLVWVHASPEHVVVTRNRRSSAYKWKETLFSVMPGLKMTMDKTGLLLLSDPDKVTIGLLFWDGRGEGLRLLLRDTDRFSSHVGGTLGQFYQEVLWGSPAASDDGRRTLRVQGNDHSATRERRLDYQEGPPGVEISCWSVEL

SEQ ID NO: 2376 - DNA, 3711 bp, Homosapiens
gggtctctgcagccatctgctttcatcagggctgcagcccccaggcagcagtactgggagcccctctcatctccgagaataaactctgaagccagcgaccctgcggacctgaatcatcagggagcctgtcagaggaggggcagtgactctgcgggacaagcaagcaggctatataagtttcagaaggctgggctccactcagatcttttccagcagctgctgcctgccagagaggcgccttcagagacccagcgcttacacaatacccaccatgtcccaggctggtgctcaggaagcccctatcaagaagaagcgcccccctgtgaaggacgaggacctgaagggggcccgaggaaacctgaccaagaaccaggaaatcaagtccaagacctaccaggtcatgcgagagtgtgagcaagctggctcggccgccccgtcggtgttcagccgcacccgcacaggtaccgagactgtctttgagaagcccaaagccggacccaccaagagtgtcttcggctgagaagtgtgcgccactccccttgctgcccgaatgctcggaaacaggagcctttcccaggaactcttttttatgccagaacgcttcctctcccctgctgtctctggggctgccaccctcccccacagtccaggcccttcagccaagggctctgcaccagcaccttggaagcaccaataaagaggatgcccacgtggccccagcaatcagaagcgattcctgggctccctctgctccaccaaatgactccccagtcacccctcaggagctgctggcactgtcagaagcctcctggcagacactggagccacgatgaagcccccaaggcctgtccgtacctgcagcaaagttctcgtcctgctttcactgctggccatccaccagactactactgccgaaaagaatggcatcgacatctacagcctcaccgtggactccagggtctcatcccgatttgcccacacggtcgtcaccagccgagtggtcaatagggccaatactgtgcaggaggccaccttccagatggagctgcccaagaaagccttcatcaccaacttctccatgatcatcgatggcatgacctacccagggatcatcaaggagaaggctgaagcccaggcacagtacagcgcagcagtggccaagggaaagagcgctggcctcgtcaaggccaccgggagaaacatggagcagttccaggtgtcggtcagtgtggctcccaatgccaagatcacctttgagctggtctatgaggagctgctcaagcggcgtttgggggtgtacgagctgctgctgaaagtgcggccccagcagctggtcaagcacctgcagatggacattcacatcttcgagccccagggcatcagctttctggagacagagagcaccttcatgaccaaccagctggtagacgccctcaccacctggcagaataagaccaaggctcacatccggttcaagccaacactttcccagcagcaaaagtccccagagcagcaagaaacagtcctggacggcaacctcattatccgctatgatgtggaccgggccatctccgggggctccattcagatcgagaacggctactttgtacactactttgcccccgagggcctaaccacaatgcccaagaatgtggtctttgtcattgacaagagcggctccatgagtggcaggaaaatccagcagacccgggaagccctaatcaagatcctggatgacctcagccccagagaccagttcaacctcatcgtcttcagtacagaagcaactcagtggaggccatcactggtgccagcctcagccgagaacgtgaacaaggccaggagctttgctgcgggcatccaggccctgggagggaccaacatcaatgatgcaatgctgatggctgtgcagttgctggacagcagcaaccaggaggagcggctgcccgaagggagtgtctcactcatcatcctgctcaccgatggcgaccccactgtgggggagactaaccccaggagcatccagaataacgtgcgggaagctgtaagtggccggtacagcctcttctgcctgggcttcggtttcgacgtcagctatgccttcctggagaagctggcactggacaatggcggcctggcccggcgcatccatgaggactcagactctgccctgcagctccaggacttctaccaggaagtggccaacccactgctgacagcagtgaccttcgagtacccaagcaatgccgtggaggaggtcactcagaacaacttccggctcctcttcaagggctcagagatggtggtggctgggaagctccaggaccgggggcctgatgtgctcacagccacagtcagtgggaagctgcctacacagaacatcactttccaaacggagtccagtgtggcagagcaggaggcggagttccagagccccaagtatatcttccacaacttcatggagaggctctgggcatacctgactatccagcagctgctggagcaaactgtctccgcatccgatgctgatcagcaggccctccggaaccaagcgctgaatttatcacttgcctacagctttgtcacgcctctcacatctatggtagtcaccaaacccgatgaccaagagcagtctcaagttgctgagaagcccatggaaggcgaaagtagaaacaggaatgtccactcagctggagctgctggctcccggatgaatttcagacctggggttctcagctccaggcaacttggactcccaggacctcctgatgttcctgaccatgctgcttaccaccccttccgccgtctggccatcttgcctgcttcagcaccaccagccacctcaaatcctgatccagctgtgtctcgtgtcatgaatatgaaaatcgaagaaacaaccatgacaacccaaaccccagcctgcccttcctgctccaggagccgtgccccggctgtcccagcccccatacaggctccctctgccatcctgccactgcctgggcagagtgtggagcggctctgtgtggaccccagacaccgccaggggccagtgaacctgctctcagaccctgagcaaggggttgaggtgactggccagtatgagagggagaaggctgggttctcatggatcgaagtgaccttcaagaaccccctggtatgggttcacgcatcccctgaacacgtggtggtgactcggaaccgaagaagctctgcgtacaagtggaaggagacgctattctcagtgatgcccggcctgaagatgaccatggacaagacgggtctcctgctgctcagtgacccagacaaagtgaccatcggcctgttgttctgggatggccgtggggaggggctccggctccttctgcgtgacactgaccgcttctccagccacgttggagggacccttggccagttttaccaggaggtgctctggggatctccagcagcatcagatgacggcagacgcacgctgagggttcagggcaatgaccactctgccaccagagagcgcaggctggattaccaggaggggcccccgggagtggagatttcctgctggtctgtggagctgtagttctgatggaaggagctgtgcccaccctgtacacttggcttccccctgcaactgcagggccgcttctggggcctggaccaccatggggaggaagagtcccactcattacaaataaagaaaggtggtgtgagcctggg

SEQ ID NO: 2377 - protein, 914 aa, Homosapiens
MKPPRPVRTCSKVLVLLSLLAIHQTTTAEKNGIDIYSLTVDSRVSSRFAHTVVTSRVVNRANTVQEATFQMELPKKAFITNFSMIIDGMTYPGIIKEKAEAQAQYSAAVAKGKSAGLVKATGRNMEQFQVSVSVAPNAKITFELVYEELLKRRLGVYELLLKVRPQQLVKHLQMDIHIFEPQGISFLETESTFMTNQLVDALTTWQNKTKAHIRFKPTLSQQQKSPEQQETVLDGNLIIRYDVDRAISGGSIQIENGYFVHYFAPEGLTTMPKNVVFVIDKSGSMSGRKIQQTREALIKILDDLSPRDQFNLIVFSTEATQWRPSLVPASAENVNKARSFAAGIQALGGTNINDAMLMAVQLLDSSNQEERLPEGSVSLIILLTDGDPTVGETNPRSIQNNVREAVSGRYSLFCLGFGFDVSYAFLEKLALDNGGLARRIHEDSDSALQLQDFYQEVANPLLTAVTFEYPSNAVEEVTQNNFRLLFKGSEMVVAGKLQDRGPDVLTATVSGKLPTQNITFQTESSVAEQEAEFQSPKYIFHNFMERLWAYLTIQQLLEQTVSASDADQQALRNQALNLSLAYSFVTPLTSMVVTKPDDQEQSQVAEKPMEGESRNRNVHSAGAAGSRMNFRPGVLSSRQLGLPGPPDVPDHAAYHPFRRLAILPASAPPATSNPDPAVSRVMNMKIEETTMTTQTPACPSCSRSRAPAVPAPIQAPSAILPLPGQSVERLCVDPRHRQGPVNLLSDPEQGVEVTGQYEREKAGFSWIEVTFKNPLVWVHASPEHVVVTRNRRSSAYKWKETLFSVMPGLKMTMDKTGLLLLSDPDKVTIGLLFWDGRGEGLRLLLRDTDRFSSHVGGTLGQFYQEVLWGSPAASDDGRRTLRVQGNDHSATRERRLDYQEGPPGVEISCWSVEL

SEQ ID NO: 2378 - DNA, 3620 bp, Homosapiens
gggtctctgcagccatctgctttcatcagggctgcagcccccaggcagcagtactgggagcccctctcatctccgagaataaactctgaagccagcgaccctgcggacctgaatcatcagggagcctgtcagaggaggggcagtgactctgcgggacaagcaagcaggctatataagtttcagaaggctgggctccactcagatcttttccagcagctgctgcctgccagagaggcgccttcagagacccagcgcttacacaatacccaccatgtcccaggctggtgctcaggaagcccctatcaagaagaagcgcccccctgtgaaggacgaggacctgaagggggcccgaggaaacctgaccaagaaccaggaaatcaagtccaagacctaccaggtcatgcgagagtgtgagcaagctggctcggccgccccgtcggtgttcagccgcacccgcacaggtaccgagactgtctttgagaagcccaaagccggacccaccaagagtgtcttcggctgagaagtgtgcgccactccccttgctgcccgaatgctcggaaacaggagcctttcccaggaactcttttttatgccagaacgcttcctctcccctgctgtctctggggctgccaccctcccccacagtccaggcccttcagccaagggctctgcaccagcaccttggaagcaccaataaagaggatgcccacgtggccccagcaatcagaagcgattcctgggctccctctgctccaccaaatgactccccagtcacccctcaggagctgctggcactgtcagaagcctcctggcagacactggagccacgatgaagcccccaaggcctgtccgtacctgcagcaaagttctcgtcctgctttcactgctggccatccaccagactactactgccgaaaagaatggcatcgacatctacagcctcaccgtggactccagggtctcatcccgatttgcccacacggtcgtcaccagccgagtggtcaatagggccaatactgtgcaggaggccaccttccagatggagctgcccaagaaagccttcatcaccaacttctccatgatcatcgatggcatgacctacccagggatcatcaaggagaaggctgaagcccaggcacagtacagcgcagcagtggccaagggaaagagcgctggcctcgtcaaggccaccgggagaaacatggagcagttccaggtgtcggtcagtgtggctcccaatgccaagatcacctttgagctggtctatgaggagctgctcaagcggcgtttgggggtgtacgagctgctgctgaaagtgcggccccagcagctggtcaagcacctgcagatggacattcacatcttcgagccccagggcatcagctttctggagacagagagcaccttcatgaccaaccagctggtagacgccctcaccacctggcagaataagaccaaggctcacatccggttcaagccaacactttcccagcagcaaaagtccccagagcagcaagaaacagtcctggacggcaacctcattatccgctatgatgtggaccgggccatctccgggggctccattcagatcgagaacggctactttgtacactactttgcccccgagggcctaaccacaatgcccaagaatgtggtctttgtcattgacaagagcggctccatgagtggcaggaaaatccagcagacccgggaagccctaatcaagatcctggatgacctcagccccagagaccagttcaacctcatcgtcttcagtacagaagcaactcagtggaggccatcactggtgccagcctcagccgagaacgtgaacaaggccaggagctttgctgcgggcatccaggccctgggagggaccaacatcaatgatgcaatgctgatggctgtgcagttgctggacagcagcaaccaggaggagcggctgcccgaagggagtgtctcactcatcatcctgctcaccgatggcgaccccactgtgggggagactaaccccaggagcatccagaataacgtgcgggaagctgtaagtggccggtacagcctcttctgcctgggcttcggtttcgacgtcagctatgccttcctggagaagctggcactggacaatggcggcctggcccggcgcatccatgaggactcagactctgccctgcagctccaggacttctaccaggaagtggccaacccactgctgacagcagtgaccttcgagtacccaagcaatgccgtggaggaggtcactcagaacaacttccggctcctcttcaagggctcagagatggtggtggctgggaagctccaggaccgggggcctgatgtgctcacagccacagtcagtgggaagctgcctacacagaacatcactttccaaacggagtccagtgtggcagagcaggaggcggagttccagagccccaagtatatcttccacaacttcatggagaggctctgggcatacctgactatccagcagctgctggagcaaactgtctccgcatccgatgctgatcagcaggccctccggaaccaagcgctgaatttatcacttgcctacagctttgtcacgcctctcacatctatggtagtcaccaaacccgatgaccaagagcagtctcaagttgctgagaagcccatggaaggcgaaagtagaaacaggaatgtccactcagctggagctgctggctcccggatgaatttcagacctggggttctcagctccaggcaacttggactcccaggacctcctgatgttcctgaccatgctgcttaccaccccttccgccgtctggccatcttgcctgcttcagcaccaccagccacctcaaatcctgatccagctgtgtctcgtgtcatgaatatgctccctctgccatcctgccactgcctgggcagagtgtggagcggctctgtgtggaccccagacaccgccaggggccagtgaacctgctctcagaccctgagcaaggggttgaggtgactggccagtatgagagggagaaggctgggttctcatggatcgaagtgaccttcaagaaccccctggtatgggttcacgcatcccctgaacacgtggtggtgactcggaaccgaagaagctctgcgtacaagtggaaggagacgctattctcagtgatgcccggcctgaagatgaccatggacaagacgggtctcctgctgctcagtgacccagacaaagtgaccatcggcctgttgttctgggatggccgtggggaggggctccggctccttctgcgtgacactgaccgcttctccagccacgttggagggacccttggccagttttaccaggaggtgctctggggatctccagcagcatcagatgacggcagacgcacgctgagggttcagggcaatgaccactctgccaccagagagcgcaggctggattaccaggaggggcccccgggagtggagatttcctgctggtctgtggagctgtagttctgatggaaggagctgtgcccaccctgtacacttggcttccccctgcaactgcagggccgcttctggggcctggaccaccatggggaggaagagtcccactcattacaaataaagaaaggtggtgtgagcctggg

SEQ ID NO: 2379 - protein, 710 aa, Homosapiens; identical to SEQ ID NO: 2339

SEQ ID NO: 2380 - DNA, 3994 bp, Homosapiens
gggtctctgcagccatctgctttcatcagggctgcagcccccaggcagcagtactgggagcccctctcatctccgagaataaactctgaagccagcgaccctgcggacctgaatcatcagggagcctgtcagaggaggggcagtgactctgcgggacaagcaagcaggctatataagtttcagaaggctgggctccactcagatcttttccagcagctgctgcctgccagagaggcgccttcagagacccagcgcttacacaatacccaccatgtcccaggctggtgctcaggaagcccctatcaagaagaagcgcccccctgtgaaggacgaggacctgaagggggcccgaggaaacctgaccaagaaccaggaaatcaagtccaagacctaccaggtcatgcgagagtgtgagcaagctggctcggccgccccgtcggtgttcagccgcacccgcacaggtaccgagactgtctttgagaagcccaaagccggacccaccaagagtgtcttcggctgagaagtgtgcgccactccccttgctgcccgaatgctcggaaacaggagcctttcccaggaactcttttttatgccagaacgcttcctctcccctgctgtctctggggctgccaccctcccccacagtccaggcccttcagccaagggctctgcaccagcaccttggaagcaccaataaagaggatgcccacgtggccccagcaatcagaagcgattcctgggctccctctgctccaccaaatgactccccagtcacccctcaggagctgctggcactgtcagaagcctcctggcagacactggagccacgatgaagcccccaaggcctgtccgtacctgcagcaaagttctcgtcctgctttcactgctggccatccaccagactactactgccgaaaagaatggcatcgacatctacagcctcaccgtggactccagggtctcatcccgatttgcccacacggtcgtcaccagccgagtggtcaatagggccaatactgtgcaggaggccaccttccagatggagctgcccaagaaagccttcatcaccaacttctccatgatcatcgatggcatgacctacccagggatcatcaaggagaaggctgaagcccaggcacagtacagcgcagcagtggccaagggaaagagcgctggcctcgtcaaggccaccgggagaaacatggagcagttccaggtgtcggtcagtgtggctcccaatgccaagatcacctttgagctggtctatgaggagctgctcaagcggcgtttgggggtgtacgagctgctgctgaaagtgcggccccagcagctggtcaagcacctgcagatggacattcacatcttcgagccccagggcatcagctttctggagacagagagcaccttcatgaccaaccagctggtagacgccctcaccacctggcagaataagaccaaggctcacatccggttcaagccaacactttcccagcagcaaaagtccccagagcagcaagaaacagtcctggacggcaacctcattatccgctatgatgtggaccgggccatctccgggggctccattcagatcgagaacggctactttgtacactactttgcccccgagggcctaaccacaatgcccaagaatgtggtctttgtcattgacaagagcggctccatgagtggcaggaaaatccagcagacccgggaagccctaatcaagatcctggatgacctcagccccagagaccagttcaacctcatcgtcttcagtacagaagcaactcagtggaggccatcactggtgccagcctcagccgagaacgtgaacaaggccaggagctttgctgcgggcatccaggccctgggagggaccaacatcaatgatgcaatgctgatggctgtgcagttgctggacagcagcaaccaggaggagcggctgcccgaagggagtgtctcactcatcatcctgctcaccgatggcgaccccactgtgggggagactaaccccaggagcatccagaataacgtgcgggaagctgtaagtggccggtacagcctcttctgcctgggcttcggtttcgacgtcagctatgccttcctggagaagctggcactggacaatggcggcctggcccggcgcatccatgaggactcagactctgccctgcagctccaggacttctaccaggaagtggccaacccactgctgacagcagtgaccttcgagtacccaagcaatgccgtggaggaggtcactcagaacaacttccggctcctcttcaagggctcagagatggtggtggctgggaagctccaggaccgggggcctgatgtgctcacagccacagtcagtgggaagctgcctacacagaacatcactttccaaacggagtccagtgtggcagagcaggaggcggagttccagagccccaagtatatcttccacaacttcatggagaggctctgggcatacctgactatccagcagctgctggagcaaactgtctccgcatccgatgctgatcagcaggccctccggaaccaagcgctgaatttatcacttgcctacagctttgtcacgcctctcacatctatggtagtcaccaaacccgatgaccaagagcagtctcaagttgctgagaagcccatggaaggcgaaagtagaaacaggaatgtccactcaggttccactttcttcaaatattatctccagggagcaaaaataccaaaaccaggtgacaaagtaggaggtggggggaggggagattgacagattgggctcagtcctggctgtggagggtagtgccttgcccagctcctctggctggtgacagccctcgggcctcagttcagttgtatctgatcaggacttgaccacacagaggcttccttttctccaagaagaggatggaatagacaagctggagctgctggctcccggatgaatttcagacctggggttctcagctccaggcaacttggactcccaggacctcctgatgttcctgaccatgctgcttaccaccccttccgccgtctggccatcttgcctgcttcagcaccaccagccacctcaaatcctgatccagctgtgtctcgtgtcatgaatatgaaaatcgaagaaacaaccatgacaacccaaaccccaggtaagttcccagcccccttggcccctttccacatccttgcccccagcctgcccttcctgctccaggagccgtgccccggctgtcccagcccccatacaggctccctctgccatcctgccactgcctgggcagagtgtggagcggctctgtgtggaccccagacaccgccaggggccagtgaacctgctctcagaccctgagcaaggggttgaggtgactggccagtatgagagggagaaggctgggttctcatggatcgaagtgaccttcaagaaccccctggtatgggttcacgcatcccctgaacacgtggtggtgactcggaaccgaagaagctctgcgtacaagtggaaggagacgctattctcagtgatgcccggcctgaagatgaccatggacaagacgggtctcctgctgctcagtgacccagacaaagtgaccatcggcctgttgttctgggatggccgtggggaggggctccggctccttctgcgtgacactgaccgcttctccagccacgttggagggacccttggccagttttaccaggaggtgctctggggatctccagcagcatcagatgacggcagacgcacgctgagggttcagggcaatgaccactctgccaccagagagcgcaggctggattaccaggaggggcccccgggagtggagatttcctgctggtctgtggagctgtagttctgatggaaggagctgtgcccaccctgtacacttggcttccccctgcaactgcagggccgcttctggggcctggaccaccatggggaggaagagtcccactcattacaaataaagaaaggtggtgtgagcctggg

SEQ ID NO: 2381 - protein, 648 aa, Homosapiens; identical to SEQ ID NO: 2341

SEQ ID NO: 2382 - DNA, 3753 bp, Homosapiens
gggtctctgcagccatctgctttcatcagggctgcagcccccaggcagcagtactgggagcccctctcatctccgagaataaactctgaagccagcgaccctgcggacctgaatcatcagggagcctgtcagaggaggggcagtgactctgcgggacaagcaagcaggctatataagtttcagaaggctgggctccactcagatcttttccagcagctgctgcctgccagagaggcgccttcagagacccagcgcttacacaatacccaccatgtcccaggctggtgctcaggaagcccctatcaagaagaagcgcccccctgtgaaggacgaggacctgaagggggcccgaggaaacctgaccaagaaccaggaaatcaagtccaagacctaccaggtcatgcgagagtgtgagcaagctggctcggccgccccgtcggtgttcagccgcacccgcacaggtaccgagactgtctttgagaagcccaaagccggacccaccaagagtgtcttcggctgagaagtgtgcgccactccccttgctgcccgaatgctcggaaacaggagcctttcccaggaactcttttttatgccagaacgcttcctctcccctgctgtctctggggctgccaccctcccccacagtccaggcccttcagccaagggctctgcaccagcaccttggaagcaccaataaagaggatgcccacgtggccccagcaatcagaagcgattcctgggctccctctgctccaccaaatgactccccagtcacccctcaggagctgctggcactgtcagaagcctcctggcagacactggagccacgatgaagcccccaaggcctgtccgtacctgcagcaaagttctcgtcctgctttcactgctggccatccaccagactactactgccgaaaagaatggcatcgacatctacagcctcaccgtggactccagggtctcatcccgatttgcccacacggtcgtcaccagccgagtggtcaatagggccaatactgtgcaggaggccaccttccagatggagctgcccaagaaagccttcatcaccaacttctccatgatcatcgatggcatgacctacccagggatcatcaaggagaaggctgaagcccaggcacagtacagcgcagcagtggccaagggaaagagcgctggcctcgtcaaggccaccgggagaaacatggagcagttccaggtgtcggtcagtgtggctcccaatgccaagatcacctttgagctggtctatgaggagctgctcaagcggcgtttgggggtgtacgagctgctgctgaaagtgcggccccagcagctggtcaagcacctgcagatggacattcacatcttcgagccccagggcatcagctttctggagacagagagcaccttcatgaccaaccagctggtagacgccctcaccacctggcagaataagaccaaggctcacatccggttcaagccaacactttcccagcagcaaaagtccccagagcagcaagaaacagtcctggacggcaacctcattatccgctatgatgtggaccgggccatctccgggggctccattcagatcgagaacggctactttgtacactactttgcccccgagggcctaaccacaatgcccaagaatgtggtctttgtcattgacaagagcggctccatgagtggcaggaaaatccagcagacccgggaagccctaatcaagatcctggatgacctcagccccagagaccagttcaacctcatcgtcttcagtacagaagcaactcagtggaggccatcactggtgccagcctcagccgagaacgtgaacaaggccaggagctttgctgcgggcatccaggccctgggagggaccaacatcaatgatgcaatgctgatggctgtgcagttgctggacagcagcaaccaggaggagcggctgcccgaagggagtgtctcactcatcatcctgctcaccgatggcgaccccactgtgggggagactaaccccaggagcatccagaataacgtgcgggaagctgtaagtggccggtacagcctcttctgcctgggcttcggtttcgacgtcagctatgccttcctggagaagctggcactggacaatggcggcctggcccggcgcatccatgaggactcagactctgccctgcagctccaggacttctaccaggaagtggccaacccactgctgacagcagtgaccttcgagtacccaagcaatgccgtggaggaggtcactcagaacaacttccggctcctcttcaagggctcagagatggtggtggctgggaagctccaggaccgggggcctgatgtgctcacagccacagtcagtgggaagctgcctacacagaacatcactttccaaacggagtccagtgtggcagagcaggaggcggagttccagagccccaagtatatcttccacaacttcatggagaggctctgggcatacctgactatccagcagctgctggagcaaactgtctccgcatccgatgctgatcagcaggccctccggaaccaagcgctgaatttatcacttgcctacagctttgtcacgcctctcacatctatggtagtcaccaaacccgatgaccaagagcagtctcaagttgctgagaagcccatggaaggcgaaagtagaaacaggaatgtccactcagctggagctgctggctcccggatgaatttcagacctggggttctcagctccaggcaacttggactcccaggacctcctgatgttcctgaccatgctgcttaccaccccttccgccgtctggccatctctgcacagccaggctggacctatccctgacagcatgctcttctgtttgaaaatctcctgtgacaaaggccattctaggtggagttgcctgcttcagcaccaccagccacctcaaatcctgatccagctgtgtctcgtgtcatgaatatgaaaatcgaagaaacaaccatgacaacccaaaccccagcccccatacaggctccctctgccatcctgccactgcctgggcagagtgtggagcggctctgtgtggaccccagacaccgccaggggccagtgaacctgctctcagaccctgagcaaggggttgaggtgactggccagtatgagagggagaaggctgggttctcatggatcgaagtgaccttcaagaaccccctggtatgggttcacgcatcccctgaacacgtggtggtgactcggaaccgaagaagctctgcgtacaagtggaaggagacgctattctcagtgatgcccggcctgaagatgaccatggacaagacgggtctcctgctgctcagtgacccagacaaagtgaccatcggcctgttgttctgggatggccgtggggaggggctccggctccttctgcgtgacactgaccgcttctccagccacgttggagggacccttggccagttttaccaggaggtgctctggggatctccagcagcatcagatgacggcagacgcacgctgagggttcagggcaatgaccactctgccaccagagagcgcaggctggattaccaggaggggcccccgggagtggagatttcctgctggtctgtggagctgtagttctgatggaaggagctgtgcccaccctgtacacttggcttccccctgcaactgcagggccgcttctggggcctggaccaccatggggaggaagagtcccactcattacaaataaagaaaggtggtgtgagcctggg

SEQ ID NO: 2383 - protein, 671 aa, Homosapiens; identical to SEQ ID NO: 2343

SEQ ID NO: 2384 - DNA, 3843 bp, Homosapiens
gggtctctgcagccatctgctttcatcagggctgcagcccccaggcagcagtactgggagcccctctcatctccgagaataaactctgaagccagcgaccctgcggacctgaatcatcagggagcctgtcagaggaggggcagtgactctgcgggacaagcaagcaggctatataagtttcagaaggctgggctccactcagatcttttccagcagctgctgcctgccagagaggcgccttcagagacccagcgcttacacaatacccaccatgtcccaggctggtgctcaggaagcccctatcaagaagaagcgcccccctgtgaaggacgaggacctgaagggggcccgaggaaacctgaccaagaaccaggaaatcaagtccaagacctaccaggtcatgcgagagtgtgagcaagctggctcggccgccccgtcggtgttcagccgcacccgcacaggtaccgagactgtctttgagaagcccaaagccggacccaccaagagtgtcttcggctgagaagtgtgcgccactccccttgctgcccgaatgctcggaaacaggagcctttcccaggaactcttttttatgccagaacgcttcctctcccctgctgtctctggggctgccaccctcccccacagtccaggcccttcagccaagggctctgcaccagcaccttggaagcaccaataaagaggatgcccacgtggccccagcaatcagaagcgattcctgggctccctctgctccaccaaatgactccccagtcacccctcaggagctgctggcactgtcagaagcctcctggcagacactggagccacgatgaagcccccaaggcctgtccgtacctgcagcaaagttctcgtcctgctttcactgctggccatccaccagactactactgccgaaaagaatggcatcgacatctacagcctcaccgtggactccagggtctcatcccgatttgcccacacggtcgtcaccagccgagtggtcaatagggccaatactgtgcaggaggccaccttccagatggagctgcccaagaaagccttcatcaccaacttctccatgatcatcgatggcatgacctacccagggatcatcaaggagaaggctgaagcccaggcacagtacagcgcagcagtggccaagggaaagagcgctggcctcgtcaaggccaccgggagaaacatggagcagttccaggtgtcggtcagtgtggctcccaatgccaagatcacctttgagctggtctatgaggagctgctcaagcggcgtttgggggtgtacgagctgctgctgaaagtgcggccccagcagctggtcaagcacctgcagatggacattcacatcttcgagccccagggcatcagctttctggagacagagagcaccttcatgaccaaccagctggtagacgccctcaccacctggcagaataagaccaaggctcacatccggttcaagccaacactttcccagcagcaaaagtccccagagcagcaagaaacagtcctggacggcaacctcattatccgctatgatgtggaccgggccatctccgggggctccattcagatcgagaacggctactttgtacactactttgcccccgagggcctaaccacaatgcccaagaatgtggtctttgtcattgacaagagcggctccatgagtggcaggaaaatccagcagacccgggaagccctaatcaagatcctggatgacctcagccccagagaccagttcaacctcatcgtcttcagtacagaagcaactcagtggaggccatcactggtgccagcctcagccgagaacgtgaacaaggccaggagctttgctgcgggcatccaggccctgggagggaccaacatcaatgatgcaatgctgatggctgtgcagttgctggacagcagcaaccaggaggagcggctgcccgaagggagtgtctcactcatcatcctgctcaccgatggcgaccccactgtgggggagactaaccccaggagcatccagaataacgtgcgggaagctgtaagtggccggtacagcctcttctgcctgggcttcggtttcgacgtcagctatgccttcctggagaagctggcactggacaatggcggcctggcccggcgcatccatgaggactcagactctgccctgcagctccaggacttctaccaggaagtggccaacccactgctgacagcagtgaccttcgagtacccaagcaatgccgtggaggaggtcactcagaacaacttccggctcctcttcaagggctcagagatggtggtggctgggaagctccaggaccgggggcctgatgtgctcacagccacagtcagtgggaagctgcctacacagaacatcactttccaaacggagtccagtgtggcagagcaggaggcggagttccagagccccaagtatatcttccacaacttcatggagaggctctgggcatacctgactatccagcagctgctggagcaaactgtctccgcatccgatgctgatcagcaggccctccggaaccaagcgctgaatttatcacttgcctacagctttgtcacgcctctcacatctatggtagtcaccaaacccgatgaccaagagcagtctcaagttgctgagaagcccatggaaggcgaaagtagaaacaggaatgtccactcaggttccactttcttcaaatattatctccagggagcaaaaataccaaaaccagaggcttccttttctccaagaagaggatggaatagacaagctggagctgctggctcccggatgaatttcagacctggggttctcagctccaggcaacttggactcccaggacctcctgatgttcctgaccatgctgcttaccaccccttccgccgtctggccatctctgcacagccaggctggacctatccctgacagcatgctcttctgtttgaaaatctcctgtgacaaaggccattctaggtggagttgcctgcttcagcaccaccagccacctcaaatcctgatccagctgtgtctcgtgtcatgaatatgaaaatcgaagaaacaaccatgacaacccaaaccccagcccccatacaggctccctctgccatcctgccactgcctgggcagagtgtggagcggctctgtgtggaccccagacaccgccaggggccagtgaacctgctctcagaccctgagcaaggggttgaggtgactggccagtatgagagggagaaggctgggttctcatggatcgaagtgaccttcaagaaccccctggtatgggttcacgcatcccctgaacacgtggtggtgactcggaaccgaagaagctctgcgtacaagtggaaggagacgctattctcagtgatgcccggcctgaagatgaccatggacaagacgggtctcctgctgctcagtgacccagacaaagtgaccatcggcctgttgttctgggatggccgtggggaggggctccggctccttctgcgtgacactgaccgcttctccagccacgttggagggacccttggccagttttaccaggaggtgctctggggatctccagcagcatcagatgacggcagacgcacgctgagggttcagggcaatgaccactctgccaccagagagcgcaggctggattaccaggaggggcccccgggagtggagatttcctgctggtctgtggagctgtagttctgatggaaggagctgtgcccaccctgtacacttggcttccccctgcaactgcagggccgcttctggggcctggaccaccatggggaggaagagtcccactcattacaaataaagaaaggtggtgtgagcctggg

SEQ ID NO: 2385 - protein, 701 aa, Homosapiens; identical to SEQ ID NO: 2345

SEQ ID NO: 2386 - DNA, 3474 bp, Homosapiens
gggtctctgcagccatctgctttcatcagggctgcagcccccaggcagcagtactgggagcccctctcatctccgagaataaactctgaagccagcgaccctgcggacctgaatcatcagggagcctgtcagaggaggggcagtgactctgcgggacaagcaagcaggctatataagtttcagaaggctgggctccactcagatcttttccagcagctgctgcctgccagagaggcgccttcagagacccagcgcttacacaatacccaccatgtcccaggctggtgctcaggaagcccctatcaagaagaagcgcccccctgtgaaggacgaggacctgaagggggcccgaggaaacctgaccaagaaccaggaaatcaagtccaagacctaccaggtcatgcgagagtgtgagcaagctggctcggccgccccgtcggtgttcagccgcacccgcacaggtaccgagactgtctttgagaagcccaaagccggacccaccaagagtgtcttcggctgagaagtgtgcgccactccccttgctgcccgaatgctcggaaacaggagcctttcccaggaactcttttttatgccagaacgcttcctctcccctgctgtctctggggctgccaccctcccccacagtccaggcccttcagccaagggctctgcaccagcaccttggaagcaccaataaagaggatgcccacgtggccccagcaatcagaagcgattcctgggctccctctgctccaccaaatgactccccagtcacccctcaggagctgctggcactgtcagaagcctcctggcagacactggagccacgatgaagcccccaaggcctgtccgtacctgcagcaaagttctcgtcctgctttcactgctggccatccaccagactactactgccgaaaagaatggcatcgacatctacagcctcaccgtggactccagggtctcatcccgatttgcccacacggtcgtcaccagccgagtggtcaatagggccaatactgtgcaggaggccaccttccagatggagctgcccaagaaagccttcatcaccaacttctccatgatcatcgatggcatgacctacccagggatcatcaaggagaaggctgaagcccaggcacagtacagcgcagcagtggccaagggaaagagcgctggcctcgtcaaggccaccgggagaaacatggagcagttccaggtgtcggtcagtgtggctcccaatgccaagatcacctttgagctggtctatgaggagctgctcaagcggcgtttgggggtgtacgagctgctgctgaaagtgcggccccagcagctggtcaagcacctgcagatggacattcacatcttcgagccccagggcatcagctttctggagacagagagcaccttcatgaccaaccagctggtagacgccctcaccacctggcagaataagaccaaggctcacatccggttcaagccaacactttcccagcagcaaaagtccccagagcagcaagaaacagtcctggacggcaacctcattatccgctatgatgtggaccgggccatctccgggggctccattcagatcgagaacggctactttgtacactactttgcccccgagggcctaaccacaatgcccaagaatgtggtctttgtcattgacaagagcggctccatgagtggcaggaaaatccagcagacccgggaagccctaatcaagatcctggatgacctcagccccagagaccagttcaacctcatcgtcttcagtacagaagcaactcagtggaggccatcactggtgccagcctcagccgagaacgtgaacaaggccaggagctttgctgcgggcatccaggccctgggagggaccaacatcaatgatgcaatgctgatggctgtgcagttgctggacagcagcaaccaggaggagcggctgcccgaagggagtgtctcactcatcatcctgctcaccgatggcgaccccactgtgggggagactaaccccaggagcatccagaataacgtgcgggaagctgtaagtggccggtacagcctcttctgcctgggcttcggtttcgacgtcagctatgccttcctggagaagctggcactggacaatggcggcctggcccggcgcatccatgaggactcagactctgccctgcagctccaggacttctaccaggaagtggccaacccactgctgacagcagtgaccttcgagtacccaagcaatgccgtggaggaggtcactcagaacaacttccggctcctcttcaagggctcagagatggtggtggctgggaagctccaggaccgggggcctgatgtgctcacagccacagtcagtgggaagctgcctacacagaacatcactttccaaacggagtccagtgtggcagagcaggaggcggagttccagagccccaagtatatcttccacaacttcatggagaggctctgggcatacctgactatccagcagctgctggagcaaactgtctccgcatccgatgctgatcagcaggccctccggaaccaagcgctgaatttatcacttgcctacagctttgtcacgcctctcacatctatggtagtcaccaaacccgatgaccaagagcagtctcaagttgctgagaagcccatggaaggcgaaagtagaaacaggaatgtccactcaggttccactttcttcaaatattatctccagggagcaaaaataccaaaaccagaggcttccttttctccaagaagaggatggaatagacaagctggagctgctggctcccggatgaatttcagacctggggttctcagctccaggcaacttggactcccaggacctcctgatgttcctgaccatgctgcttaccaccccttccgccgtctggccatctctgcacagccaggctggacctatccctgacagcatgctcttctgtttgaaaatctcctgtgacaaaggccattctaggtggagtgtatgtgtggcaggatggggggctggagcttggtggcagcgctgctggttgcccgcctcctgactgccttcctgctccctttctgtttccggatgttcctgccctagtgcctgcttcagcaccaccagccacctcaaatcctgatccagctgtgtctcgtgtcatgaatatgaaaatcgaaggtgcccccaaggccagaggccctgtcctaacagggggatcctgggaggggagtgacctgtcacatgtctcgatgttgaagtagtgagggaacccagccacacctagtcactgctccctccctcaacctcccactcctcaggaaggggctgcctaaacccagactttttcttcttttagaaacaaccatgacaacccaaaccccaggtaagttcccagcccccttggcccctttccacatccttgcccccagcctgcccttcctgctccaggagccgtgccccggctgtcccagcccccatac

SEQ ID NO: 2387 - protein, 701 aa, Homosapiens; identical to SEQ ID NO: 2345

SEQ ID NO: 2388 - DNA, 3384 bp, Homosapiens
gggtctctgcagccatctgctttcatcagggctgcagcccccaggcagcagtactgggagcccctctcatctccgagaataaactctgaagccagcgaccctgcggacctgaatcatcagggagcctgtcagaggaggggcagtgactctgcgggacaagcaagcaggctatataagtttcagaaggctgggctccactcagatcttttccagcagctgctgcctgccagagaggcgccttcagagacccagcgcttacacaatacccaccatgtcccaggctggtgctcaggaagcccctatcaagaagaagcgcccccctgtgaaggacgaggacctgaagggggcccgaggaaacctgaccaagaaccaggaaatcaagtccaagacctaccaggtcatgcgagagtgtgagcaagctggctcggccgccccgtcggtgttcagccgcacccgcacaggtaccgagactgtctttgagaagcccaaagccggacccaccaagagtgtcttcggctgagaagtgtgcgccactccccttgctgcccgaatgctcggaaacaggagcctttcccaggaactcttttttatgccagaacgcttcctctcccctgctgtctctggggctgccaccctcccccacagtccaggcccttcagccaagggctctgcaccagcaccttggaagcaccaataaagaggatgcccacgtggccccagcaatcagaagcgattcctgggctccctctgctccaccaaatgactccccagtcacccctcaggagctgctggcactgtcagaagcctcctggcagacactggagccacgatgaagcccccaaggcctgtccgtacctgcagcaaagttctcgtcctgctttcactgctggccatccaccagactactactgccgaaaagaatggcatcgacatctacagcctcaccgtggactccagggtctcatcccgatttgcccacacggtcgtcaccagccgagtggtcaatagggccaatactgtgcaggaggccaccttccagatggagctgcccaagaaagccttcatcaccaacttctccatgatcatcgatggcatgacctacccagggatcatcaaggagaaggctgaagcccaggcacagtacagcgcagcagtggccaagggaaagagcgctggcctcgtcaaggccaccgggagaaacatggagcagttccaggtgtcggtcagtgtggctcccaatgccaagatcacctttgagctggtctatgaggagctgctcaagcggcgtttgggggtgtacgagctgctgctgaaagtgcggccccagcagctggtcaagcacctgcagatggacattcacatcttcgagccccagggcatcagctttctggagacagagagcaccttcatgaccaaccagctggtagacgccctcaccacctggcagaataagaccaaggctcacatccggttcaagccaacactttcccagcagcaaaagtccccagagcagcaagaaacagtcctggacggcaacctcattatccgctatgatgtggaccgggccatctccgggggctccattcagatcgagaacggctactttgtacactactttgcccccgagggcctaaccacaatgcccaagaatgtggtctttgtcattgacaagagcggctccatgagtggcaggaaaatccagcagacccgggaagccctaatcaagatcctggatgacctcagccccagagaccagttcaacctcatcgtcttcagtacagaagcaactcagtggaggccatcactggtgccagcctcagccgagaacgtgaacaaggccaggagctttgctgcgggcatccaggccctgggagggaccaacatcaatgatgcaatgctgatggctgtgcagttgctggacagcagcaaccaggaggagcggctgcccgaagggagtgtctcactcatcatcctgctcaccgatggcgaccccactgtgggggagactaaccccaggagcatccagaataacgtgcgggaagctgtaagtggccggtacagcctcttctgcctgggcttcggtttcgacgtcagctatgccttcctggagaagctggcactggacaatggcggcctggcccggcgcatccatgaggactcagactctgccctgcagctccaggacttctaccaggaagtggccaacccactgctgacagcagtgaccttcgagtacccaagcaatgccgtggaggaggtcactcagaacaacttccggctcctcttcaagggctcagagatggtggtggctgggaagctccaggaccgggggcctgatgtgctcacagccacagtcagtgggaagctgcctacacagaacatcactttccaaacggagtccagtgtggcagagcaggaggcggagttccagagccccaagtatatcttccacaacttcatggagaggctctgggcatacctgactatccagcagctgctggagcaaactgtctccgcatccgatgctgatcagcaggccctccggaaccaagcgctgaatttatcacttgcctacagctttgtcacgcctctcacatctatggtagtcaccaaacccgatgaccaagagcagtctcaagttgctgagaagcccatggaaggcgaaagtagaaacaggaatgtccactcagctggagctgctggctcccggatgaatttcagacctggggttctcagctccaggcaacttggactcccaggacctcctgatgttcctgaccatgctgcttaccaccccttccgccgtctggccatctctgcacagccaggctggacctatccctgacagcatgctcttctgtttgaaaatctcctgtgacaaaggccattctaggtggagtgtatgtgtggcaggatggggggctggagcttggtggcagcgctgctggttgcccgcctcctgactgccttcctgctccctttctgtttccggatgttcctgccctagtgcctgcttcagcaccaccagccacctcaaatcctgatccagctgtgtctcgtgtcatgaatatgaaaatcgaaggtgcccccaaggccagaggccctgtcctaacagggggatcctgggaggggagtgacctgtcacatgtctcgatgttgaagtagtgagggaacccagccacacctagtcactgctccctccctcaacctcccactcctcaggaaggggctgcctaaacccagactttttcttcttttagaaacaaccatgacaacccaaaccccaggtaagttcccagcccccttggcccctttccacatccttgcccccagcctgcccttcctgctccaggagccgtgccccggctgtcccagcccccatac

SEQ ID NO: 2389 - protein, 671 aa, Homosapiens; identical to SEQ ID NO: 2343

SEQ ID NO: 2390 - DNA, 2781 bp, Homosapiens
gggtctctgcagccatctgctttcatcagggctgcagcccccaggcagcagtactgggagcccctctcatctccgagaataaactctgaagccagcgaccctgcggacctgaatcatcagggagcctgtcagaggaggggcagtgactctgcgggacaagcaagcaggctatataagtttcagaaggctgggctccactcagatcttttccagcagctgctgcctgccagagaggcgccttcagagacccagcgcttacacaatacccaccatgtcccaggctggtgctcaggaagcccctatcaagaagaagcgcccccctgtgaaggacgaggacctgaagggggcccgaggaaacctgaccaagaaccaggaaatcaagtccaagacctaccaggtcatgcgagagtgtgagcaagctggctcggccgccccgtcggtgttcagccgcacccgcacaggtaccgagactgtctttgagaagcccaaagccggacccaccaagagtgtcttcggctgagaagtgtgcgccactccccttgctgcccgaatgctcggaaacaggagcctttcccaggaactcttttttatgccagaacgcttcctctcccctgctgtctctggggctgccaccctcccccacagtccaggcccttcagccaagggctctgcaccagcaccttggaagcaccaataaagaggatgcccacgtggccccagcaatcagaagcgattcctgggctccctctgctccaccaaatgactccccagtcacccctcaggagctgctggcactgtcagaagcctcctggcagacactggagccacgatgaagcccccaaggcctgtccgtacctgcagcaaagttctcgtcctgctttcactgctggccatccaccagactactactgccgaaaagaatggcatcgacatctacagcctcaccgtggactccagggtctcatcccgatttgcccacacggtcgtcaccagccgagtggtcaatagggccaatactgtgcaggaggccaccttccagatggagctgcccaagaaagccttcatcaccaacttctccatgatcatcgatggcatgacctacccagggatcatcaaggagaaggctgaagcccaggcacagtacagcgcagcagtggccaagggaaagagcgctggcctcgtcaaggccaccgggagaaacatggagcagttccaggtgtcggtcagtgtggctcccaatgccaagatcacctttgagctggtctatgaggagctgctcaagcggcgtttgggggtgtacgagctgctgctgaaagtgcggccccagcagctggtcaagcacctgcagatggacattcacatcttcgagccccagggcatcagctttctggagacagagagcaccttcatgaccaaccagctggtagacgccctcaccacctggcagaataagaccaaggctcacatccggttcaagccaacactttcccagcagcaaaagtccccagagcagcaagaaacagtcctggacggcaacctcattatccgctatgatgtggaccgggccatctccgggggctccattcagatcgagaacggctactttgtacactactttgcccccgagggcctaaccacaatgcccaagaatgtggtctttgtcattgacaagagcggctccatgagtggcaggaaaatccagcagacccgggaagccctaatcaagatcctggatgacctcagccccagagaccagttcaacctcatcgtcttcagtacagaagcaactcagtggaggccatcactggtgccagcctcagccgagaacgtgaacaaggccaggagctttgctgcgggcatccaggccctgggagggaccaacatcaatgatgcaatgctgatggctgtgcagttgctggacagcagcaaccaggaggagcggctgcccgaagggagtgtctcactcatcatcctgctcaccgatggcgaccccactgtgggggagactaaccccaggagcatccagaataacgtgcgggaagctgtaagtggccggtacagcctcttctgcctgggcttcggtttcgacgtcagctatgccttcctggagaagctggcactggacaatggcggcctggcccggcgcatccatgaggactcagactctgccctgcagctccaggacttctaccaggaagtggccaacccactgctgacagcagtgaccttcgagtacccaagcaatgccgtggaggaggtcactcagaacaacttccggctcctcttcaagggctcagagatggtggtggctgggaagctccaggaccgggggcctgatgtgctcacagccacagtcagtgggaagctgcctacacagaacatcactttccaaacggagtccagtgtggcagagcaggaggcggagttccagagccccaagtatatcttccacaacttcatggagaggctctgggcatacctgactatccagcagctgctggagcaaactgtctccgcatccgatgctgatcagcaggccctccggaaccaagcgctgaatttatcacttgcctacagctttgtcacgcctctcacatctatggtagtcaccaaacccgatgaccaagagcagtctcaagttgctgagaagcccatggaaggcgaaagtagaaacaggaatgtccactcaggttccactttcttcaaatattatctccagggagcaaaaatacctgctggctcccggatgaatttcagacctggggttctcagctccaggca

SEQ ID NO: 2391 - protein, 649 aa, Homosapiens
MKPPRPVRTCSKVLVLLSLLAIHQTTTAEKNGIDIYSLTVDSRVSSRFAHTVVTSRVVNRANTVQEATFQMELPKKAFITNFSMIIDGMTYPGIIKEKAEAQAQYSAAVAKGKSAGLVKATGRNMEQFQVSVSVAPNAKITFELVYEELLKRRLGVYELLLKVRPQQLVKHLQMDIHIFEPQGISFLETESTFMTNQLVDALTTWQNKTKAHIRFKPTLSQQQKSPEQQETVLDGNLIIRYDVDRAISGGSIQIENGYFVHYFAPEGLTTMPKNVVFVIDKSGSMSGRKIQQTREALIKILDDLSPRDQFNLIVFSTEATQWRPSLVPASAENVNKARSFAAGIQALGGTNINDAMLMAVQLLDSSNQEERLPEGSVSLIILLTDGDPTVGETNPRSIQNNVREAVSGRYSLFCLGFGFDVSYAFLEKLALDNGGLARRIHEDSDSALQLQDFYQEVANPLLTAVTFEYPSNAVEEVTQNNFRLLFKGSEMVVAGKLQDRGPDVLTATVSGKLPTQNITFQTESSVAEQEAEFQSPKYIFHNFMERLWAYLTIQQLLEQTVSASDADQQALRNQALNLSLAYSFVTPLTSMVVTKPDDQEQSQVAEKPMEGESRNRNVHSGSTFFKYYLQGAKIPAGSRMNFRPGVLSS

SEQ ID NO: 2392 - DNA, 470 bp, Homosapiens
gagtgattctcatgagaccagcacatacaggctctcggcagccggtctgtgcacctgcaagcacagtgtctccgcatccgatgctgatcagcaggccctccggaaccaagcgctgaatttatcacttgcctacagctttgtcacgcctctcacatctatggtagtcaccaaacccgatgaccaagagcagtctcaagttgctgagaagcccatggaaggcggtgggtgtggggttgagatctcagcctcccaggtagcagagtttggacccagcgttctccccgatcttccctgcatcctgaccaagaccccaaccgtgcccccaacagactccccctgggagattcagcctattcactgatgaggaaagtgaagccgggtctcctgtctccccaaattcattgcacctacgatatagtccaggattgggtagcaagattaaacacaagcgcttcaaattgatgaaaacc

SEQ ID NO: 2393 - protein, 34 aa, Homosapiens
MRPAHTGSRQPVCAPASTVSPHPMLISRPSGTKR

SEQ ID NO: 2394 - DNA, 2912 bp, Homosapiens
gggtctctgcagccatctgctttcatcagggctgcagcccccaggcagcagtactgggagcccctctcatctccgagaataaactctgaagccagcgaccctgcggacctgaatcatcagggagcctgtcagaggaggggcagtgactctgcgggacaagcaagcaggctatataagtttcagaaggctgggctccactcagatcttttccagcagctgctgcctgccagagaggcgccttcagagacccagcgcttacacaatacccaccatgtcccaggctggtgctcaggaagcccctatcaagaagaagcgcccccctgtgaaggacgaggacctgaagggggcccgaggaaacctgaccaagaaccaggaaatcaagtccaagacctaccaggtcatgcgagagtgtgagcaagctggctcggccgccccgtcggtgttcagccgcacccgcacaggtaccgagactgtctttgagaagcccaaagccggacccaccaagagtgtcttcggctgagaagtgtgcgccactccccttgctgcccgaatgctcggaaacaggagcctttcccaggaactcttttttatgccagaacgcttcctctcccctgctgtctctggggctgccaccctcccccacagtccaggcccttcagccaagggctctgcaccagcaccttggaagcaccaataaagaggatgcccacgtggccccagcaatcagaagcgattcctgggctccctctgctccaccaaatgactccccagtcacccctcaggagctgctggcactgtcagaagcctcctggcagacactggagccacgatgaagcccccaaggcctgtccgtacctgcagcaaagttctcgtcctgctttcactgctggccatccaccagactactactgccgaaaagaatggcatcgacatctacagcctcaccgtggactccagggtctcatcccgatttgcccacacggtcgtcaccagccgagtggtcaatagggccaatactgtgcaggaggccaccttccagatggagctgcccaagaaagccttcatcaccaacttctccatgatcatcgatggcatgacctacccagggatcatcaaggagaaggctgaagcccaggcacagtacagcgcagcagtggccaagggaaagagcgctggcctcgtcaaggccaccgggagaaacatggagcagttccaggtgtcggtcagtgtggctcccaatgccaagatcacctttgagctggtctatgaggagctgctcaagcggcgtttgggggtgtacgagctgctgctgaaagtgcggccccagcagctggtcaagcacctgcagatggacattcacatcttcgagccccagggcatcagctttctggagacagagagcaccttcatgaccaaccagctggtagacgccctcaccacctggcagaataagaccaaggctcacatccggttcaagccaacactttcccagcagcaaaagtccccagagcagcaagaaacagtcctggacggcaacctcattatccgctatgatgtggaccgggccatctccgggggctccattcagatcgagaacggctactttgtacactactttgcccccgagggcctaaccacaatgcccaagaatgtggtctttgtcattgacaagagcggctccatgagtggcaggaaaatccagcagacccgggaagccctaatcaagatcctggatgacctcagccccagagaccagttcaacctcatcgtcttcagtacagaagcaactcagtggaggccatcactggtgccagcctcagccgagaacgtgaacaaggccaggagctttgctgcgggcatccaggccctgggagggaccaacatcaatgatgcaatgctgatggctgtgcagttgctggacagcagcaaccaggaggagcggctgcccgaagggagtgtctcactcatcatcctgctcaccgatggcgaccccactgtgggggagactaaccccaggagcatccagaataacgtgcgggaagctgtaagtggccggtacagcctcttctgcctgggcttcggtttcgacgtcagctatgccttcctggagaagctggcactggacaatggcggcctggcccggcgcatccatgaggactcagactctgccctgcagctccaggacttctaccaggaagtggccaacccactgctgacagcagtgaccttcgagtacccaagcaatgccgtggaggaggtcactcagaacaacttccggctcctcttcaagggctcagagatggtggtggctgggaagctccaggaccgggggcctgatgtgctcacagccacagtcagtgggaagctgcctacacagaacatcactttccaaacggagtccagtgtggcagagcaggaggcggagttccagagccccaagtatatcttccacaacttcatggagaggctctgggcatacctgactatccagcagctgctggagcaaactgtctccgcatccgatgctgatcagcaggccctccggaaccaagcgctgaatttatcacttgcctacagctttgtcacgcctctcacatctatggtagtcaccaaacccgatgaccaagagcagtctcaagttgctgagaagcccatggaaggcggtgggtgtggggttgagatctcagcctcccaggtagcagagtttggacccagcgttctccccgatcttccctgcatcctgaccaagaccccaaccgtgcccccaacagactccccctgggagattcagcctattcactgatgaggaaagtgaagccgggtctcctgtctccccaaattcattgcacctacgatatagtccaggattgggtagcaagattaaacacaagcgcttcaaattgatgaaaacc

SEQ ID NO: 2395 - protein, 657 aa, Homosapiens
MKPPRPVRTCSKVLVLLSLLAIHQTTTAEKNGIDIYSLTVDSRVSSRFAHTVVTSRVVNRANTVQEATFQMELPKKAFITNFSMIIDGMTYPGIIKEKAEAQAQYSAAVAKGKSAGLVKATGRNMEQFQVSVSVAPNAKITFELVYEELLKRRLGVYELLLKVRPQQLVKHLQMDIHIFEPQGISFLETESTFMTNQLVDALTTWQNKTKAHIRFKPTLSQQQKSPEQQETVLDGNLIIRYDVDRAISGGSIQIENGYFVHYFAPEGLTTMPKNVVFVIDKSGSMSGRKIQQTREALIKILDDLSPRDQFNLIVFSTEATQWRPSLVPASAENVNKARSFAAGIQALGGTNINDAMLMAVQLLDSSNQEERLPEGSVSLIILLTDGDPTVGETNPRSIQNNVREAVSGRYSLFCLGFGFDVSYAFLEKLALDNGGLARRIHEDSDSALQLQDFYQEVANPLLTAVTFEYPSNAVEEVTQNNFRLLFKGSEMVVAGKLQDRGPDVLTATVSGKLPTQNITFQTESSVAEQEAEFQSPKYIFHNFMERLWAYLTIQQLLEQTVSASDADQQALRNQALNLSLAYSFVTPLTSMVVTKPDDQEQSQVAEKPMEGGGCGVEISASQVAEFGPSVLPDLPCILTKTPTVPPTDSPWEIQPIH

SEQ ID NO: 2396 - DNA, 397 bp, Homosapiens
cagaagaggctgtaccggccacttacagcttcccgcacgttattctggatgctcctgggatcccacagcaagcccaggtgcagccccagccgcctcccctgtgcagcacgtcctggagtcacgggcagggccctcacccacagtggggtcgccatcggtgagcaggatgatgagtgagacactcccttcgggcagccgctcctcctggttgctgctgtccagcaactgcacagccatcagcattgcatcattgatgttggtccctgaggaacacgcactctcaagtatttcagatggtttatactaaaaagttcagacatcataaacctgacaaccatcaaaagagggaagacttcaaaaacatggagtaaaagggaagtataataacaatggcaga

SEQ ID NO: 2397 - protein, 46 aa, Homosapiens
MMSETLPSGSRSSWLLLSSNCTAISIASLMLVPEEHALSSISDGLY

SEQ ID NO: 2398 - DNA, 1043 bp, Homosapiens
gggtctctgcagccatctgctttcatcagggctgcagcccccaggcagcagtactgggagcccctctcatctccgagaataaactctgaagccagcgaccctgcggacctgaatcatcagggagcctgtcagaggaggggcagtgactctgcgggacaagcaagcaggctatataagtttcagaaggctgggctccactcagatcttttccagcagctgctgcctgccagagaggcgccttcagagacccagcgcttacacaatacccaccatgtcccaggctggtgctcaggaagcccctatcaagaagaagcgcccccctgtgaaggacgaggacctgaagggggcccgaggaaacctgaccaagaaccaggaaatcaagtccaagacctaccaggtcatgcgagagtgtgagcaagctggctcggccgccccgtcggtgttcagccgcacccgcacaggtaccgagactgtctttgagaagcccaaagccggacccaccaagagtgtcttcggctgagaagtgtgcgccactccccttgctgcccgaatgctcggaaacaggagcctttcccaggaactcttttttatgccagaacgcttcctctcccctgctgtctctggggctgccaccctcccccacagtccaggcccttcagccaagggctctgcaccagcaccttggaagcaccaataaagaggatgcccacgtggccccagcaatcagaagaagcctcctggcagacactggagccacgatgaagcccccaaggcctgtccgtacctgcagcaaagttctcgtcctgctttcactgctggccatccaccagactactactgccgaaaaggtagccagtgtccatgggtgtggcgtgagctgggggatgagagaacgcctgggaagtggggaagagcctccgcatgtgccagcgtgtcagcacaagtgcgtgtgcatccctgtgtgtgcaaaaaaatggtgcagacctcccgccaggcactaccccaagggccttactggtattctcccacctaatagaggggat

SEQ ID NO: 2399 - protein, 82 aa, Homosapiens
MSQAGAQEAPIKKKRPPVKDEDLKGARGNLTKNQEIKSKTYQVMRECEQAGSAAPSVFSRTRTGTETVFEKPKAGPTKSVFG

SEQ ID NO: 2400 - DNA, 724 bp, Homosapiens
ccaggtagccagacacgccagtgtgaggctgcagcagccactgctcccaagagctcccaggctataggggaaaggcacatgggcaagtcagaccaagacagctgggagacctgcagcaggtggagtatagttgggaaggctttctctggaagaggagtagagccttgaataggcttgggtttaatgagcagagaagaggggtcttggccaaggcacagaggtaggtgtgcctttctaccgaggcttcaggtagtaagatgaggctcttggatctccaaggctggtgctcaggaagcccctatcaagaagaagcgcccccctgtgaaggacgaggacctgaagggggcccgaggaaacctgaccaagaaccaggaaatcaagtccaagacctaccaggtcatgcgagagtgtgagcaagctggctcggccgccccgtcggtgttcagccgcacccgcacaggtaccgagactgtctttgagaagcccaaagccggacccaccaagagtgtcttcggctgagaagtgtgcgccactccccttgctgcccgaatgctcggaaacaggagcctttcccaggaactcttttttatgccagaacgcttcctctcccctgctgtctctggggctgccaccctcccccacagtccaggcccttcagccaagggctctgcaccagcaccttggaagcaccaataaagaggatgcccacgtggccccagcaatc

SEQ ID NO: 2401 - protein, 39 aa, Homosapiens
MRECEQAGSAAPSVFSRTRTGTETVFEKPKAGPTKSVFG

SEQ ID NO: 2402 - DNA, 600 bp, Homosapiens
tggaggtggagtcctggacactttcggctctggcagctgtgtcttgatctgagccccaagcatgaactggaggctctgcagcccttgggagatgggggctcagggaggaccccctgaagaacccctcttctatgtggctttggtggtattccacggctggtgctcaggaagcccctatcaagaagaagcgcccccctgtgaaggacgaggacctgaagggggcccgaggaaacctgaccaagaaccaggaaatcaagtccaagacctaccaggtcatgcgagagtgtgagcaagctggctcggccgccccgtcggtgttcagccgcacccgcacaggtaccgagactgtctttgagaagcccaaagccggacccaccaagagtgtcttcggctgagaagtgtgcgccactccccttgctgcccgaatgctcggaaacaggagcctttcccaggaactcttttttatgccagaacgcttcctctcccctgctgtctctggggctgccaccctcccccacagtccaggcccttcagccaagggctctgcaccagcaccttggaagcaccaataaagaggatgcccacgtggccccagcaatc

SEQ ID NO: 2403 - protein, 87 aa, Homosapiens
MWLWWYSTAGAQEAPIKKKRPPVKDEDLKGARGNLTKNQEIKSKTYQVMRECEQAGSAAPSVFSRTRTGTETVFEKPKAGPTKSVFG

SEQ ID NO: 2404 - DNA, 5630 bp, Homosapiens
atcctgatctcagcggatgatgagatggaggagtccgacgtggaggaggacctccgcagactgacccccctcaagcctgtgaagaaaaagaagcaccgctttgggctacccgtatgacacattcccatgctgggggtgacgggagggccccgccagccgctggtgtgcagaggtcatcccgcagcatcgttccttaccctctctctgcccttcctttctacctctgctcctcttgctgtctctgcccgctctcgcctgcccccagactactgtgacttaaaaagagggaagaggagccagcgcccgagggggccactggcggctggaggtccccattcagttgcactacaaacactgaccaaatatgcaaggaaggagctgtgtttgtttgttgtcgtcccagacagtgttgtgagggacctgaggccctgccccgtgtccgaccaccgagtggcaaggtggaaggaagcacaggcacacagaccgtgggtgggtctcctcaccgtggctgtgggcagtgcgaacacataacaccctcgggctaaaagtgactcgttgaccaagttggaaccggaatgctttcttactcaaaatggcttttgtaactattgatttctgaagctggttttatgagttgtgacagtgttaccaggttgggggtatgtgtttatttcctacaaagtacttacgggactaatgggcaaaacagagatttttaagtcttccgtatgctgtttgacttttatatttttaagttatattttcatactattgtatttaaaaactctttttagtccccaaagaaatgggtttatttgcctttcatggggtgtgggctggcaggaggaaaaatcgggagttttttatttggaatattattagatgatgccctatgataagatgagacaaatgatggggagggaaggaggatggcccttctctagaatcagcaaacccaatggttctgtgaaggtcagacccaagcttggagcagctggtctggatgcagatccaggagctgcagagtgtggaacaggaaaggctctgcccagggcccatgagctctagcattcctgctggcagattagagatcttagttaaatttgaccaagaaaggagcttagctaagaggtctttgtttccagaggacccaagactaccagactcctgtgcagtctgcctgtctgcagagcctccaatcacggtttaaagtggtcttggcctcccagcccccactgctgcagccttcagagccagcctctggactcagcgccaggagcctcctctcctgctgccctggtacctgtcatcctagtgtcacctatttgttttgcacagcattctggagaacatgtgcctcacaaagtgatcctgtttttctcaccctccaaagctgaggtggctaagggaggcaggggtgagagagctcactctctaaaccacaggcagggcaaggtgcttctaggccgtgtcccctccctggggaatggtcactactcctcagcatggccacaggcccctgtggttttgggagtttgctgagtgactgtggaatgggctgaccccagccgtttccctgctgtggaaacagcaaggtaggggcactgcttggtggtttgtcaagctcagaggcagccacggatggttaggaacaggaagccacactgctaaggtgtgatgagctagaagggagacatcctggacttcaagtgagacaagtgcagaggaggccactccacttaggaccttccttttagacctgcatgagcacgtgtttcacttaagcacattgggtccgaattgggcgcatgaacccagctgttaaaccaggtaccctgggactgccctctgcctctcagagccctacctgtcctggacttgaaggcgagcatcaggcaggccttctcagcccatcttccaccaggagtgcagagccagggtgctgagaggagcagggactgtaactacagtaggaggcaactttgctggtgtcattcctgctcggattgactttgtgctccctcccatccacagctatggtagccagtatttccccagcagctctctagtggggaagagtggctagaaccaggccattctcagtcgaatttaggaagaccaagactcatgttcctgacaggacggtcattccctcatggcatcactgactcagttctaattcctcccctcctgtttcattttggtttgaacaacctgtgcctgcagctgtttcttccaccttcctggagctcacaattggagcttcatgttcagtcttgagctcctaatgtttccagacagggcaggggataggagagccataatctatgaaagctgtgaaacaaaccctgggttatatagatctcagatggtctcatctgaaggctttgcccacttcccagtgagcagagggtttggggaacaaagaggtagctgaagagtggtggtttttccctgtatcctgattttcagaaagggctttagtctctgagctgtggctagtagctggctggctgaccaggggacgggggtctaatagggtgtctgaccataggacacctctcgtgtttggccttccctttcttgtgtgtttgtgtgtgtgtgtgcacgtgcacgtgcacacacatgtacacacacaaatctgtatccccaggagtgcctcctgcagtcactgggggctcttccgtggtgcaccatcccatgagagcagatcagagggctgtggtcaggacttcctcccgagctgccctccctccctgggatgagtttcctctccacctgctccaaggtgccttacgaggtgcagctcttcacctggccacatggcatccatcaccgtgttgagaaatggtgggacgttggctggatattgtgtgctatgaatctgatttgtccaaatctggacctcagccaagccacctgtggtggaaccttgcaagtcaaggtcatgaacaaatttcttgtaactattggaaataaactaatgaggtagaactgtcatatccaaatggaagaggtggttggtactgttacttccttttgctgtcagagggttgttgacaatggcaaggggggatgttagtgagatccaggtggtggtggcttcttggtccactcagcttgcacacatgcaagaggagggtctgtggcccctcagccgtgctggtggcctccttcctcaagctttaacttgtgccctccctggcaacagggagtcatgggttaatgtcacctgtcatgcctctttcttcagggaaaatattaaaaggctcaaatccaagctgtgacttcccttagacagtgtaagcctgtagggtgcagccccaagtttatgtccaaaggctgcctcagaaccctggagggagcagcgcccagctggcagctcactctgcccttgcagttcactggccttttcgcagccaggctaagataggcagtgcaaggagcttcccactggccagagcagctgccttgtagaatgtggggctggcttttagaagtttcacacgcttgcagctaagagtgcagagctctctgttttacttcgtgaaacattagcagctctgaggggcttggcttttggtaagggacttatggtctgacttgccacaagcaccttgagctcctgggttggttggtggttggttggttgggttgttttaaatttgatttttcttttcctgaagtttgttagaagtcagacctatgcaaggaaaaccatggcccacttcagcagccatccagtgggggtgcttaatcggtggtggtaggattcatggaaacgtttttttgaaatgaaagagaagatgatgtacttacattgtaaaatggtttacaataaagtttggcatcttattacagttttttttaaaaagaaaccatcacatttgtggttgtggttgtgggttctctggagttgaaacagcttggcagggtcaaaaaagattcccctgtgaattagaaggttctccccagggaccagagtgagaaggaaccttacgaagcctcatggcaggagtgggagccagcaactgcccagtgaaaagccaaacatgctcttgccatgtccatctccacttcttcgctagtgagaattaaagcaagtccgtctctgaggaggacatcgtgttggggaggtagagtataagcagtgagtagcccacatccttgtccctgaggctgcggggctggaaggaggtccctgggcagagccgcagcatcaggtgccatctgcaggggcacccctggaactagtggaaggcccccacaaggcctggcctgccctcagctgcctcttggcccatgtgccacatcctgggcattcctcatgtcagcacttgtctcagatcaagcctggcagtcctctcattggcctcctggagccagggtgtcaggagggggattggggtggggttcaaagtatgacagcaatggagtggcatttgggataaccaaatgtcagtgcctggttgagttccatctgcctggagccttcgaggataaaaataatctccatcataaactgaaaaggacttagatatgtgtgttactgggagggctgcgacctatgcacacctattccccatacccaccccaggcgtaggctcctggcctgtgccctgggggatcttccccttgcaaggaggggtgtgttaggagcttctagcaaaggagagctaagtgaccttccggggagcccttgggcctgttcttgtctctgcagctcagtatctggagtgggcttcactctcccccaccctctttgagcaactgaaactgtcctgcaggccagcccccctgcggtggcctcacctactcggaggacccaaatccgtaaacacaaagcatgtccgtcagtgccagcacctccccccggcgaatcaagcagctgtcccagagggcaaagggtctctgcagccatctgctttcatcagggctgcagcccccaggcagcagtactgggagcccctctcatctccgagaataaactctgaagccagcgaccctgcggacctgaatcatcagggagcctgtcagaggaggggcagtgactctgcgggacaagcaagcaggctatataagtttcagaaggctgggctccactcagatcttttccagcagctgctgcctgccagagaggcgccttcagagacccagcgcttacacaatacccaccatgtcccaggctggtgctcaggaagcccctatcaagaagaagcgcccccctgtgaaggacgaggacctgaagggggcccgaggaaacctgaccaagaaccaggaaatcaagtccaagacctaccaggtcatgcgagagtgtgagcaagctggctcggccgccccgtcggtgttcagccgcacccgcacaggtaccgagactgtctttgagaagcccaaagccggacccaccaagagtgtcttcggctgagaagtgtgcgccactccccttgctgcccgaatgctcggaaacaggagcctttcccaggaactcttttttatgccagaacgcttcctctcccctgctgtctctggggctgccaccctcccccacagtccaggcccttcagccaagggctctgcaccagcaccttggaagcaccaataaagaggatgcccacgtggccccagcaatc

SEQ ID NO: 2405 - protein, 82 aa, Homosapiens; identical to SEQ ID NO: 2399

SEQ ID NO: 2406 - DNA, 3979 bp, Homosapiens
attctggagcataggacagaaggacaagaagtgaggcacaggctgagctagatcggcaatgccctgtgatccaggctgaggcattgggatgtgctcgtacaggcgatcctgatctcagcggatgatgagatggaggagtccgacgtggaggaggacctccgcagactgacccccctcaagcctgtgaagaaaaagaagcaccgctttgggctacccgtatgacacattcccatgctgggggtgacgggagggccccgccagccgctggtgtgcagaggtcatcccgcagcatcgttccttaccctctctctgcccttcctttctacctctgctcctcttgctgtctctgcccgctctcgcctgcccccagactactgtgacttaaaaagagggaagaggagccagcgcccgagggggccactggcggctggaggtccccattcagttgcactacaaacactgaccaaatatgcaaggaaggagctgtgtttgtttgttgtcgtcccagacagtgttgtgagggacctgaggccctgccccgtgtccgaccaccgagtggcaaggtggaaggaagcacaggcacacagaccgtgggtgggtctcctcaccgtggctgtgggcagtgcgaacacataacaccctcgggctaaaagtgactcgttgaccaagttggaaccggaatgctttcttactcaaaatggcttttgtaactattgatttctgaagctggttttatgagttgtgacagtgttaccaggttgggggtatgtgtttatttcctacaaagtacttacgggactaatgggcaaaacagagatttttaagtcttccgtatgctgtttgacttttatatttttaagttatattttcatactattgtatttaaaaactctttttagtccccaaagaaatgggtttatttgcctttcatggggtgtgggctggcaggaggaaaaatcgggagttttttatttggaatattattagatgatgccctatgataagatgagacaaatgatggggagggaaggaggatggcccttctctagaatcagcaaacccaatggttctgtgaaggtcagacccaagcttggagcagctggtctggatgcagatccaggagctgcagagtgtggaacaggaaaggctctgcccagggcccatgagctctagcattcctgctggcagattagagatcttagttaaatttgaccaagaaaggagcttagctaagaggtctttgtttccagaggacccaagactaccagactcctgtgcagtctgcctgtctgcagagcctccaatcacggtttaaagtggtcttggcctcccagcccccactgctgcagccttcagagccagcctctggactcagcgccaggagcctcctctcctgctgccctggtacctgtcatcctagtgtcacctatttgttttgcacagcattctggagaacatgtgcctcacaaagtgatcctgtttttctcaccctccaaagctgaggtggctaagggaggcaggggtgagagagctcactctctaaaccacaggcagggcaaggtgcttctaggccgtgtcccctccctggggaatggtcactactcctcagcatggccacaggcccctgtggttttgggagtttgctgagtgactgtggaatgggctgaccccagccgtttccctgctgtggaaacagcaaggtaggggcactgcttggtggtttgtcaagctcagaggcagccacggatggttaggaacaggaagccacactgctaaggtgtgatgagctagaagggagacatcctggacttcaagtgagacaagtgcagaggaggccactccacttaggaccttccttttagacctgcatgagcacgtgtttcacttaagcacattgggtccgaattgggcgcatgaacccagctgttaaaccaggtaccctgggactgccctctgcctctcagagccctacctgtcctggacttgaaggcgagcatcaggcaggccttctcagcccatcttccaccaggagtgcagagccagggtgctgagaggagcagggactgtaactacagtaggaggcaactttgctggtgtcattcctgctcggattgactttgtgctccctcccatccacagctatggtagccagtatttccccagcagctctctagtggggaagagtggctagaaccaggccattctcagtcgaatttaggaagaccaagactcatgttcctgacaggacggtcattccctcatggcatcactgactcagttctaattcctcccctcctgtttcattttggtttgaacaacctgtgcctgcagctgtttcttccaccttcctggagctcacaattggagcttcatgttcagtcttgagctcctaatgtttccagacagggcaggggataggagagccataatctatgaaagctgtgaaacaaaccctgggttatatagatctcagatggtctcatctgaaggctttgcccacttcccagtgagcagagggtttggggaacaaagaggtagctgaagagtggtggtttttccctgtatcctgattttcagaaagggctttagtctctgagctgtggctagtagctggctggctgaccaggggacgggggtctaatagggtgtctgaccataggacacctctcgtgtttggccttccctttcttgtgtgtttgtgtgtgtgtgtgcacgtgcacgtgcacacacatgtacacacacaaatctgtatccccaggagtgcctcctgcagtcactgggggctcttccgtggtgcaccatcccatgagagcagatcagagggctgtggtcaggacttcctcccgagctgccctccctccctgggatgagtttcctctccacctgctccaaggtgccttacgaggtgcagctcttcacctggccacatggcatccatcaccgtgttgagaaatggtgggacgttggctggatattgtgtgctatgaatctgatttgtccaaatctggacctcagccaagccacctgtggtggaaccttgcaagtcaaggtcatgaacaaatttcttgtaactattggaaataaactaatgaggtagaactgtcatatccaaatggaagaggtggttggtactgttacttccttttgctgtcagagggttgttgacaatggcaaggggggatgttagtgagatccaggtggtggtggcttcttggtccactcagcttgcacacatgcaagaggagggtctgtggcccctcagccgtgctggtggcctccttcctcaagctttaacttgtgccctccctggcaacagggagtcatgggttaatgtcacctgtcatgcctctttcttcagggaaaatattaaaaggctcaaatccaagctgtgacttcccttagacagtgtaagcctgtagggtgcagccccaagtttatgtccaaaggctgcctcagaaccctggagggagcagcgcccagctggcagctcactctgcccttgcagttcactggccttttcgcagccaggctaagataggcagtgcaaggagcttcccactggccagagcagctgccttgtagaatgtggggctggcttttagaagtttcacacgcttgcagctaagagtgcagagctctctgttttacttcgtgaaacattagcagctctgaggggcttggcttttggtaagggacttatggtctgacttgccacaagcaccttgagctcctgggttggttggtggttggttggttgggttgttttaaatttgatttttcttttcctgaagtttgttagaagtcagacctatgcaaggaaaaccatggcccacttcagcagccatccagtgggggtgcttaatcggtggtggtaggattcatggaaacgtttttttgaaatgaaagagaagatgatgtacttacattgtaaaatggtttacaataaagtttggcatcttattacagttttttttaaaaa

SEQ ID NO: 2407 - protein, 134 aa, Homosapiens [sequence omitted]

SEQ ID NO: 2408 - DNA, 823 bp, Homosapiens
ataggacagaaggacaagaagtgaggcacaggctgagctagatcggcaatgccctgtgatccaggctgaggcattgggatgtgctcgtacaggcgatcctgatctcagcggatgatgagatggaggagtccgacgtggaggaggacctccgcagactgacccccctcaagcctgtgaagaaaaagaagcaccgctttgggctacccgtatgacacattcccatgctgggggtgacgggagggccccgccagccgctggtgtgcagaggtcatcccgcagcatcgttccttaccctctctctgcccttcctttctacctctgctcctcttgctgtctctgcccgctctcgcctgcccccagactactgtgacttaaaaagagggaagaggagccagcgcccgagggggccactggcggctggaggtccccattcagttgcactacaaacactgaccaaatatgcaaggaaggagctgtgtttgtttgttgtcgtcccagacagtgttgtgagggacctgaggccctgccccgtgtccgaccaccgagtggcaaggtggaaggaagcacaggcacacagaccgtgggtgggtctcctcaccgtggctgtgggcagtgcgaacacataacaccctcgggctaaaagtgactcgttgaccaagttggaaccggaatgctttcttactcaaaatggcttttgtaactattgatttctgaagctggttttatgagttgtgacagtgttaccaggttgggggtatgtgtttatttcctacaaagtacttacgggactaatgggcaaaacagagatttttaagtcttccgt

SEQ ID NO: 2409 - protein, 134 aa, Homosapiens [sequence omitted]

SEQ ID NO: 2410 - DNA, 1611 bp, Homosapiens
ggcggaggtaccggctcaggcttgggatcccggctgcgggtttggcggcgctgcgccggcaggcagcgaggccgggcgggccctgggccctcgcgcccctcccgcgaggcctgtcatgcagggccccgccgggaacgcgagccggggactgccaggcgggccgccctccacagtcgcgtccggggcgggccgctgcgagagcggcgcgctcatgcacagcttcggcatcttcctgcaggggctgctcggcgtcgtggccttcagcacgttaatgctcaaacgcttcagagaaccaaagcatgaaagacgtccgtggaggatatggtttttagacacttccaaacaagccataggaatgctgttcatccactttgcaaatgtatacctagcagatctcactgaagaggacccttgttcactgtacctcatcaacttcctcctggacgccactgtgggcatgctgctcatctacgtgggggtgcgcgccgtcagcgtcctggtagagtggcagcagtgggagtccctgcgcttcggcgaatatggagaccctctgcagtgtggagcctgggtcgggcagtgcgctctttacatcgtgatcatgatttttgaaaagtctgtcgtcttcatcgtcctcctaatacttcagtggaaaaaggtggccctgttgaatcccattgaaaacccagacttgaagctggccatcgtcatgctgatcgtccccttctttgtcaacgctttgatgttttgggtagtggacaatttcctcatgagaaaggggaagacgaaagctaagctagaagaaaggggagccaaccaggactcgaggaatgggagcaaggtccgctaccggagggccgcatcccacgaggagtctgagtctgagatcctgatctcagcggatgatgagatggaggagtccgacgtggaggaggacctccgcagactgacccccctcaagcctgtgaagaaaaagaagcaccgctttgggctacccgtatgacacattcccatgctgggggtgacgggagggccccgccagccgctggtgtgcagaggtcatcccgcagcatcgttccttaccctctctctgcccttcctttctacctctgctcctcttgctgtctctgcccgctctcgcctgcccccagactactgtgacttaaaaagagggaagaggagccagcgcccgagggggccactggcggctggaggtccccattcagttgcactacaaacactgaccaaatatgcaaggaaggagctgtgtttgtttgttgtcgtcccagacagtgttgtgagggacctgaggccctgccccgtgtccgaccaccgagtggcaaggtggaaggaagcacaggcacacagaccgtgggtgggtctcctcaccgtggctgtgggcagtgcgaacacataacaccctcgggctaaaagtgactcgttgaccaagttggaaccggaatgctttcttactcaaaatggcttttgtaactattgatttctgaagctggttttatgagttgtgacagtgttaccaggttgggggtatgtgtttatttcctacaaagtacttacgggactaatgggcaaaacagagatttttaagtcttccgt

SEQ ID NO: 2411 - protein, 294 aa, Homosapiens; identical to SEQ ID NO: 255

SEQ ID NO: 2412 - DNA, 3486 bp, Homosapiens
cgccgccgcctccgccggagcgcgggtggaggggggcggggagagctgccggccgccccgctccgccgaacccagcaggaaggagggcgcgagcgggcgagcgcgggcagcacgggaggaaaaagcttccgcgcgggggagcgaaaagacggaaagaaagaaagaaaacgagcgcgagagggggaaaagcgagcgatcgagcgagcgcgcgcgcgaaaactccgggcagcactttcatttggacccgtggatacccattgaacagatgcttgaaacctgcaagtaatcttcagatcctagcagaaccataggcctttcctttgttttgggaggatatagcctgcctatatgctgtggaaatgaacggggagcagcagcttgatgcagatgccggctctggtatggaagaggtagaattaagctgggaagattatctagaagaaacagggtccacagcagttccctatgggtcttttaaacatgtggacacacgtttgcaaaatggatttgctcctgggatgaagctggaggtggctgtgagaacagatcctgagacctactgggttgccaccgttatcactacctgtgagcagttgctccttctccgctatgatggctatggggaggatcggagagcagatttctggtgtgacatcaggaaggctgatctctaccccattgggtggtgtgagcagaataagaagacccttgaagccccagaaggcatcagagataaagtatctgactgggatgagtttctgcggcagaccctgataggagcatgtagtcctcctgttccgctgctagagggcctccgtaatgggaggaatcctttagatctcattgctccaggatccagactagaatgtcaagctttccaggactctttaagcacttggattgttactgtagtagaaaacattggaggaaggctgaagctacgttatgaaggacttgaaagttctgacaattatgaacattggttgtattacttggatccatttcttcatcacgttggttgggctgctcaacagggatatgagcttcagcccccttcagccattagacatctaaaaaatgaagctgagtggcaagagattttggccaaagtgaaagaggaagaggaagagccattaccatcttacttatttaaggacaaacaagttattggcattcatacattctctgtaaacatgaaattggaagctgtagacccctggtctccttttgggatctctcctgctacagttgttaaggtttttgatgagaagtactttctggtggaaatggatgacttgcgtcctgagaaccacgcacggcgatcctttgtgtgccacgccgacagtcctggcatcttccctgtgcagtggagtctgaagaatggcctacacatcagcccccctccaggctacccaagccaggactttgactgggctgactacctcaaacagtgtggtgctgaagctgctccccagaggtgcttccctccgttaatttctgaacatgaatttaaggagaacatgaagctcgaggcggtgaaccccattctccctgaagaagtgtgtgttgctaccatcactgcagtgagaggctcctacctgtggctccagctggagggttctaagaagcctatacctgaatgtattgtgagtgtggaatccatggatatatttcctttgggctggtgtgaaaccaacggccaccccctcagcactcctcgccgagcacgagtatataaacagaggaaaattgcagtggttcagccagaaaaacaagtaccatcctcgaggactgtccacgagggcctgaggaatcaggagctgaactccacagagtcagttatgattaatggaaaatattgctgtccaaagatatacttcaaccaccgttgcttctcagggccatatcttaacaaaggaagaattgctgagctgcctcaatgtgtaggacctgggaactgtgttctggtccttagagaggtcctcactttacttatcaatgcagcctacaaacccagccgtgtccttcgggagctccagctggacaaagactctgtgtggcacggatgtggggaagtcctaaaagccaaatataaaggaaagagttatcgggctactgttgagatagtgaaaacagcagatcgggtgactgaattctgccggcaaacctgtatcaaactggaatgctgtcctaacctcttcggtccacggatggttctggataagtgttctgagaactgttctgtacttacaaagaccaaatacacacactattacggaaagaagaaaaataaaagaattgggaggccacctggtgggcatagtaacttagcttgtgccctgaaaaaagccagtaagaggagaaagaggcggaaaaatgtttttgttcataagaagaaacgctcctctgcatctgttgataataccccagcgggctctccccagggaagtgggggtgaagatgaggatgacccagatgaaggggatgatgattccctaagtgaaggcagtacatccgagcagcaggatgagctacaggaagaatcagaaatgtcagaaaaaaagtcatgctcctcttctcccacccaaagtgagatatccacatcgctgcctccagatagacaaaggagaaaaagggagcttcgcaccttttcattttctgacgatgaaaataaacctccttcaccaaaggaaataaggatcgaagttgctgaaaggcttcacctggacagtaaccccttgaagtggagtgtggcagacgttgtgcggttcatcagatccactgactgtgctccattagcaagaatattcctagaccaggaaattgatgggcaggccctgttgctccttacccttcccactgttcaagaatgcatggacttaaaattgggccctgccatcaaactttgccatcacatagagaggatcaagtttgctttttatgagcagtttgccaactgagaaggacaaccaaagtgagctggatctttgaagcacaaatgcagcaaatccttcaccctgctttataagtggagctggaatagtcctggggctctggggcctgcaggtatcagcttgctctctttgcactttcggggaaggaggactcacagtgaggaagcaaaaactgtgcacagaagtggatcacctgctggtggaaatgtggacatctcttgttcagcagatggcagtttttaaaaaataaaggttgtgaggaaaagacttatataagaagaaaagcatttccagtggtgtggcctgaaaacaaagaataacctaggctgctggaaagcacccttttggttgttttcattctgttccctcccattgtagattgaactttgttctctgctttctttttcttggaaagagaggacttagctttaagtcagcactgatttgggactgttcctaaggcatatcagtgcttcattgtcattgtgtttttaaactttttaaaattaaaacagttcattttggggatgat

SEQ ID NO: 2413 - protein, 866 aa, Homosapiens; identical to SEQ ID NO: 257

SEQ ID NO: 2414 - DNA, 710 bp, Homosapiens
ccagggcaaaggttgcagtgagccaagtttgcgccactgcactccagcctgggtgacagggcaagaccctgtatcagaaaaaaaaaaaaatctgagccaaaccttttcatgattttataaacccaacacagggcaaatccatctcagttgaataaactggtactaataaatttataaaaccactgaaaaagttctaaacaaaacccaaactcaagaataacctaaactggaaaaaaagaaaacaaagaaagtgaaactgtggagccaatatttttaaagattttggacaacaatgagaaattgttaagtaaaatatagcataagcatacaatgcaccatacatggccattggaaattgtgttagagaaatggttttcttctccaaatcccaatagggcattttttttcttctgattctatggttgacccaataggccactgtatttgacttgataagataattttagaatgcacctaagctgggcatagtggctcacacctgtaatcccagcactgtgggaaggcaaggcgggaggatagcttgagcccaggacctcctaagtaactgggattacaggtgtgtgctaccacgcccggctactttttgtatttttggtagagacagggtttcaccatgttggccaggctggtctcgaactcctgacctcaggtgagttgatctgctcttgcctcagactcccaaagtgctg

SEQ ID NO: 2415 - protein, 42 aa, Homosapiens
AQDLLSNWDYRCVLPRPATFCIFGRDRVSPCWPGWSRTPDLR

SEQ ID NO: 2416 - DNA, 1967 bp, Homosapiens
cgcccgtggagctcccgggcccggctgccccgctcccgccccagcgccatccctcctggctggggccgcgcgggaggcaaggactccgcgggctggtgtgccgggggtccggcgccgcgggccacccacgcccccagccagcaactcggcgcggacggccccgaggccgtggcgcaggacacgcggcggcgcctcgggcccccgacggcgctgtggccccgagcggaacggcccggaagaggagacgcgtccccgggaacccagtgcccgccctggcccagccccgatccagcctgcgcctcacctcgggttgtagacagagcggcggggatcccagaggggttcgcgggtcggacctggagtaccggcccggcgaagcgcgccgctgtcgcccgcacgtgactggctcggacaagatggcatgagcggagaagcggccggatcccagatgcgcgcgtgccgccgccgcgggcactgcgcccgtttgcctgcccctcgtcggggatcgggcgctccctctgagacctgaaagggcacccaagtgccccctgtctgcgaagtccggcgcgggcccttcggcgcccccgatgtctctaggcttccgcaggaggcgccctgtaaatcttgagtcttcctgcagcgagggggcacaggacagctgcgaattgggacgaacgagcccagagccccgggaaggatcagaacctcgaaggcggcttcaagtcggccccgcagcccgaggtgaccgtgggcggttacgttgcccgagctcgccccctcctcctgagcgcaggtgcccgtgggacatacacccgcccacctgctccggaaagttccctccagaagggagttcccgcgccaccgagacccgggagctcccgatcagactcccaggccgtgaaaggcgttatcggacagggcccagaggcgcccccacagcaagaagaaagtctggggttctcaccgtgtgccaggtgcgagctcaagccacctccctcaaccgctctgagaaatatcccacttcacaaacttgctcaaagtcacgctgctggctggatttgaatccagattttttttagcaccactgaaaaaacaatatgacaaccggagaaagaaaaatctaaaaagaatacagtaatccatattgttacaaagaaatgcaacttttcacgacatgaaacatatatatactgtgtatagttgcaaccacactttttttgttactactttcactaccatttttatttgttcacgattcatttttaaggtgtgcaggtgtccttaactattcactcagccccctaatgtttttggttctttacggttgtttgctaacgtatccttgaattctgcacttgggacaaatacctgggagtggaaaggctcccaggtagaaggctatgaatggccaagtggtcttggcttacagcgtcatatttttcccaagagctgccccaattattctaccgcctccaaggaacaagtgtaaggagtttaacacacttataaacattgagtgccatttcccccctactttaatagtctattgctagttcaaggttacttagcatttcttaggtgacacaacattcaaaaatgaatgtttttccatgcatttactatatgcattccctctcctgtgaataatctattcatatccatcttctggggacttgaacctcttctaactttgaacaagcatttttttatgttacagatattacttctttgtcgtcattgatgcaaatattttctagcctgttgttctttcttgttttattctaatgttcagtgtgtcattctaatgttttaattgcttcagtgctgacaaagtgagctttctgctgcccatctgatagtcttttttctgctagttttgtacaatttcatttcatatttcattctctgatgactatcccgattttattttggcttatttatttggagtaaaatatggacataactca

SEQ ID NO: 2417 - protein, 163 aa, Homosapiens
MSLGFRRRRPVNLESSCSEGAQDSCELGRTSPEPREGSEPRRRLQVGPAARGDRGRLRCPSSPPPPERRCPWDIHPPTCSGKFPPEGSSRATETRELPIRLPGRERRYRTGPRGAPTARRKSGVLTVCQVRAQATSLNRSEKYPTSQTCSKSRCWLDLNPDFF

SEQ ID NO: 2418 - DNA, 5331 bp, Homosapiens
cggagtggcggcggcatttcctggtgtctgagcctggcgcggaggctatgggcagccaggaggtgctgggccacgcggcccggctggcctcctccggtctcctcctgcaggtgttgtttcggttgatcacctttgtcttgaatgcatttattcttcgcttcctgtcaaaggaaatcgttggcgtagtaaatgtaagactaacgctgctttactcaaccaccctcttcctggccagagaggccttccgcagagcatgtctcagtgggggcacccagcgagactggagccagaccctcaacctgctgtggctaacagtccccctgggtgtgttttggtccttattcctgggctggatctggttgcagctgcttgaagtgcctgatcctaatgttgtccctcactatgcaactggagtggtgctgtttggtctctcggcagtggtggagcttctaggagagcccttttgggtcttggcacaagcacatatgtttgtgaagctcaaggtgattgcagagagcctgtcggtaattcttaagagcgttctgacagcttttctcgtgctgtggttgcctcactggggattgtacattttctctttggcccagcttttctataccacagttctggtgctctgctatgttatttatttcacaaagttactgggttccccagaatcaaccaagcttcaaactcttcctgtctccagaataacagatctgttacccaatattacaagaaatggagcgtttataaactggaaagaggctaaactgacttggagttttttcaaacagtctttcttgaaacagattttgacagaaggcgagcgatatgtgatgacatttttgaatgtattgaactttggtgatcagggtgtgtatgatatagtgaataatcttggctcccttgtggccagattaattttccagccaatagaggaaagtttttatatattttttgctaaggtgctggagaggggaaaggatgccacacttcagaagcaggaggacgttgctgtggctgctgcagtcttggagtccctgctcaagctggccctgctggccggcctgaccatcactgtttttggctttgcctattctcagctggctctggatatctacggagggaccatgcttagctcaggatccggtcctgttttgctgcgttcctactgtctctatgttctcctgcttgccatcaatggagtgacagagtgtttcacatttgctgccatgagcaaagaggaggtcgacaggtacaattttgtgatgctggccctgtcctcctcattcctggtgttatcctatctcttgacccgttggtgtggcagcgtgggcttcatcttggccaactgctttaacatgggcattcggatcacgcagagcctttgcttcatccaccgctactaccgaaggagcccccacaggcccctggctggcctgcacctatcgccagtcctgctcgggacatttgccctcagtggtggggttactgctgtttcggaggtattcctctgctgtgagcagggctggccagccagactggcacacattgctgtgggggccttctgtctgggagcaactctcgggacagcattcctcacagagaccaagctgatccatttcctcaggactcagttaggtgtgcccagacgcactgacaaaatgacatgacttcagggaagcctggacacccgaggcacctggaccagctatgggtagttctgtgggtggaacacattctgtgtaagagccccactgagggctctgcagcggagtgacagcaaccccagagatgaggcaccagagagtgccactgcatgagacacctgtgaccattcgaagtctgaaatgcggggggggagtttcatttttaagtgaagaccaaaagccctttaaaaataatagttttttatcattttatagtaatcagcattttctcttttactaatatactcattccttttgcgtatgattggcctttggagctacatgctccaacaaactatatcttaattgttaactgttaataattatctggcccagaaaaagagatgcagtgattttacccttcacaggaatattgaacttcttctgtaaaagagagagagaaacctctctctctcatgcaccacatggaaacagagtgtggccctgaagttgtggctttctttgtgtcaaaactgtggtctgagtttttagagaaggaaaaatgctactcagtgagaaatccaagaaatgaaaccaggaaggttttcagatcacatttcccagagtgagttcgggagaatcttgcctgtcgtgatcacactgttccccgccgccccaggtcagcacatacttgacccagagtgggctctcaggatttgttgattgaagggtgggtgaaagctggctggagactcctggcctggccacctgcaagaggcggactttgaagaaaactgtgatccagttgagccactttgtccctgaggggaatgctgctttgcagctttctgtaacttctcacatgggaattgcactggtgacagataaggtttaacagatgtacttttttatcctcagaataagacaaggcaaactctatatggctagtattactgagtcaggtccctcccgttgacccattaattccagcattgatcaatacaaccaaattccagccccaggacaagagtggcaggcatgggggcctggtactccaggctacagtgtgagcccaggtgttctgcaccttgcagcctgcacactgcaggtgaaatcatgagcagtgttctggagtgtgaagtgtttttatttttttgttaatgtattaattccttttagatattaacccccctcagaactatatgcacaaactataacttggatgttaataatcctgtcactcagtgccccaaaccttctgtgtctacacctagagagagggccagtaagggcaactcctatcatgcattaaaatgcatgtatttaaatctgcttgcccagagccagtacccaggggctaaggattaagacctgtcagtacaccaagactggggcccagtcacctggcaggtttttatctactcagagggagaatgctttgcactaagtgggagaaaagcagctaaatgcaaggtgtcctgagcaattagaggacctccaaagcatggcctcagtcatgccttcatcgggcaaggtcaggccagctcagaaaaatggatggtcccatagggtcaagtggagcacacacggaaggcagtcctccttccctcccatgtcctttctctgtccctggcatccacagaaagggaccttcagtcctcatgagctgcttctctgcagctgctgatcaccctcccggaaccctgcacctatcccgtgcccacctgaccccagactcaagcatgatcctcattctacctgcctcggaatcacctggattgcaagtcagaacatggcttcccaggacccactccaggccttcagggtctgtgtctcccaggaggagggctctgagattggcttttctggcaagcccacgtggctttgatgccaccaaggttggcatgccccattgtcttccttcgtgacaggcccaggaccatcatgctcatgctcacagtgcctgttctctgctccaggaacagagctgctgctctacaagcagccttgtgactccggggtctctgggagcaggactccccaggcttgtgctctctcagcttgagagaggctctatgtctgaaggcagtgctcactctctcatccctcccctgctgttcgcccagtgctgctgtcagggccagctcctcttgaaagacagccagccgcaaaggcagcccagggcttcttccggtgtcctgcttccctgtatctagggagagttgtacatgtggctgcgtgttttcccaggactagccctgccgcctgggctgtcagcactttggcagcaggtcctctgtggttctctgcctctggtgcctccctaaagctcagctggacctgaccaggcctctggcatttcccctgctggaccccctagagccacagctgtgcctcagggagcttgcatacatgtgggccagcctgcctcactttacccaagtggatttggggagcagaaatcatacttttggctttcaataccacttatagtgaggctacttctccatggaaacaagtctctgaggcacaacctttatgaaaggaaggagcattcgttggtgagaagaacagtatcgctgacttcctgtgctcctctggccacaggtaactgttggtcacttcagatttggcttggggtctctcagtgaggagctgctgctgtgctgtttaatgcttacctgatggcaacttctggctctggaaccgctactctgccctgttcccagccacttcccaacctgattcaagcagggcccctccttcctcctgtctttatttatttatttattgagacagagtctcactctgtcgcccaggctggagtgcagtagcgcgatctcggctcactgcgagctctgcctcctgggttcaagcgattctcttgcctcagcctcctgagtagctggggctacaggcgcctgccaccacacccggctaatttttgtatttttagtagagacagggtttcaccatattggccaggctggtcttgaactcctgaccttgtgatccgcccgcctcagcctcccaaagtgctgggattacaggcgtgagccaccgctcctggcctattcttttcttttcagagacaaggtctcactctctcctctcgcccaggctggagtgcagtggtgtcatcatagctcattgcagcctcaaactcctgggctcaagcaatcctcccacctcagcctcctgagtagctgggatcacaggtgtgtgctacctcacccagctaatttctaatttttttttgtagagactggatctcactgttgccttgaactcctgggctcaagtgatcctcctgcctcagcctcccaaagtgctgggattccagaccagccattttttttccttaatcatgcattcctgttgctagtttcacatcagtcccctggtttaataagaaataaaatattttcttcacacttttgaaaagacctttcttctttcataccccttctccctccaaaagggacaaaaattctttaatttcataaggagggtaggtaagtaacttgaggatgtgaacctttggtgttcctcagctggaacgtttctctctctgttgatgttgtagctgggactgggcttcttgactttggaagagggatggtatcctggcacctcctgtgtctgggactgaaaggcctgtggtgtctcctttgctcctctc

SEQ ID NO: 2419 - protein, 541 aa, Homosapiens; identical to SEQ ID NO: 267

SEQ ID NO: 2420 - DNA, 2284 bp, Homosapiens
gttaatgtattaattccttttagatattaacccccctcagaactatatgcacaaactataacttggatgttaataatcctgtcactcagtgccccaaaccttctgtgtctacacctagagagagggccagtaagggcaactcctatcatgcattaaaatgcatgtatttaaatctgcttgcccagagccagtacccaggggctaaggattaagacctgtcagtacaccaagactggggcccagtcacctggcaggtttttatctactcagagggagaatgctttgcactaagtgggagaaaagcagctaaatgcaaggtgtcctgagcaattagaggacctccaaagcatggcctcagtcatgccttcatcgggcaaggtcaggccagctcagaaaaatggatggtcccatagggtcaagtggagcacacacggaaggcagtcctccttccctcccatgtcctttctctgtccctggcatccacagaaagggaccttcagtcctcatgagctgcttctctgcagctgctgatcaccctcccggaaccctgcacctatcccgtgcccacctgaccccagactcaagcatgatcctcattctacctgcctcggaatcacctggattgcaagtcagaacatggcttcccaggacccactccaggccttcagggtctgtgtctcccaggaggagggctctgagattggcttttctggcaagcccacgtggctttgatgccaccaaggttggcatgccccattgtcttccttcgtgacaggcccaggaccatcatgctcatgctcacagtgcctgttctctgctccaggaacagagctgctgctctacaagcagccttgtgactccggggtctctgggagcaggactccccaggcttgtgctctctcagcttgagagaggctctatgtctgaaggcagtgctcactctctcatccctcccctgctgttcgcccagtgctgctgtcagggccagctcctcttgaaagacagccagccgcaaaggcagcccagggcttcttccggtgtcctgcttccctgtatctagggagagttgtacatgtggctgcgtgttttcccaggactagccctgccgcctgggctgtcagcactttggcagcaggtcctctgtggttctctgcctctggtgcctccctaaagctcagctggacctgaccaggcctctggcatttcccctgctggaccccctagagccacagctgtgcctcagggagcttgcatacatgtgggccagcctgcctcactttacccaagtggatttggggagcagaaatcatacttttggctttcaataccacttatagtgaggctacttctccatggaaacaagtctctgaggcacaacctttatgaaaggaaggagcattcgttggtgagaagaacagtatcgctgacttcctgtgctcctctggccacaggtaactgttggtcacttcagatttggcttggggtctctcagtgaggagctgctgctgtgctgtttaatgcttacctgatggcaacttctggctctggaaccgctactctgccctgttcccagccacttcccaacctgattcaagcagggcccctccttcctcctgtctttatttatttatttattgagacagagtctcactctgtcgcccaggctggagtgcagtagcgcgatctcggctcactgcgagctctgcctcctgggttcaagcgattctcttgcctcagcctcctgagtagctggggctacaggcgcctgccaccacacccggctaatttttgtatttttagtagagacagggtttcaccatattggccaggctggtcttgaactcctgaccttgtgatccgcccgcctcagcctcccaaagtgctgggattacaggcgtgagccaccgctcctggcctattcttttcttttcagagacaaggtctcactctctcctctcgcccaggctggagtgcagtggtgtcatcatagctcattgcagcctcaaactcctgggctcaagcaatcctcccacctcagcctcctgagtagctgggatcacaggtgtgtgctacctcacccagctaatttctaatttttttttgtagagactggatctcactgttgccttgaactcctgggctcaagtgatcctcctgcctcagcctcccaaagtgctgggattccagaccagccattttttttccttaatcatgcattcctgttgctagtttcacatcagtcccctggtttaataagaaataaaatattttcttcacacttttg

SEQ ID NO: 2421 - protein, 124 aa, Homosapiens
MDGPIGSSGAHTEGSPPSLPCPFSVPGIHRKGPSVLMSCFSAAADHPPGTLHLSRAHLTPDSSMILILPASESPGLQVRTWLPRTHSRPSGSVSPRRRALRLAFLASPRGFDATKVGMPHCLPS

SEQ ID NO: 2422 - DNA, 2781 bp, Homosapiens
cggagtggcggcggcatttcctggtgtctgagcctggcgcggaggctatgggcagccaggaggtgctgggccacgcggcccggctggcctcctccggtctcctcctgcaggtgttgtttcggttgatcacctttgtcttgaatgcatttattcttcgcttcctgtcaaaggaaatcgttggcgtagtaaatgtaagactaacgctgctttactcaaccaccctcttcctggccagagaggccttccgcagagcatgtctcagtgggggcacccagcgagactggagccagaccctcaacctgctgtggctaacagtccccctgggtgtgttttggtccttattcctgggctggatctggttgcagctgcttgaagtgcctgatcctaatgttgtccctcactatgcaactggagtggtgctgtttggtctctcggcagtggtggagcttctaggagagcccttttgggtcttggcacaagcacatatgtttgtgaagctcaaggtgattgcagagagcctgtcggtaattcttaagagcgttctgacagcttttctcgtgctgtggttgcctcactggggattgtacattttctctttggcccagcttttctataccacagttctggtgctctgctatgttatttatttcacaaagttactgggttccccagaatcaaccaagcttcaaactcttcctgtctccagaataacagatctgttacccaatattacaagaaatggagcgtttataaactggaaagaggctaaactgacttggagttttttcaaacagtctttcttgaaacagattttgacagaaggcgagcgatatgtgatgacatttttgaatgtattgaactttggtgatcagggtgtgtatgatatagtgaataatcttggctcccttgtggccagattaattttccagccaatagaggaaagtttttatatattttttgctaaggtgctggagaggggaaaggatgccacacttcagaagcaggaggacgttgctgtggctgctgcagtcttggagtccctgctcaagctggccctgctggccggcctgaccatcactgtttttggctttgcctattctcagctggctctggatatctacggagggaccatgcttagctcaggatccggtcctgttttgctgcgttcctactgtctctatgttctcctgcttgccatcaatggagtgacagagtgtttcacatttgctgccatgagcaaagaggaggtcgacaggtacaattttgtgatgctggccctgtcctcctcattcctggtgttatcctatctcttgacccgttggtgtggcagcgtgggcttcatcttggccaactgctttaacatgggcattcggatcacgcagagcctttgcttcatccaccgctactaccgaaggagcccccacaggcccctggctggcctgcacctatcgccagtcctgctcgggacatttgccctcagtggtggggttactgctgtttcggaggtattcctctgctgtgagcagggctggccagccagactggcacacattgctgtgggggccttctgtctgggagcaactctcgggacagcattcctcacagagaccaagctgatccatttcctcaggactcagttaggtgtgcccagacgcactgacaaaatgacatgacttcagggaagcctggacacccgaggcacctggaccagctatgggtagttctgtgggtggaacacattctgtgtaagagccccactgagggctctgcagcggagtgacagcaaccccagagatgaggcaccagagagtgccactgcatgagacacctgtgaccattcgaagtctgaaatgcggggggggagtttcatttttaagtgaagaccaaaagccctttaaaaataatagttttttatcattttatagtaatcagcattttctcttttactaatatactcattccttttgcgtatgattggcctttggagctacatgctccaacaaactatatcttaattgttaactgttaataattatctggcccagaaaaagagatgcagtgattttacccttcacaggaatattgaacttcttctgtaaaagagagagagaaacctctctctctcatgcaccacatggaaacagagtgtggccctgaagttgtggctttctttgtgtcaaaactgtggtctgagtttttagagaaggaaaaatgctactcagtgagaaatccaagaaatgaaaccaggaaggttttcagatcacatttcccagagtgagttcgggagaatcttgcctgtcgtgatcacactgttccccgccgccccaggtcagcacatacttgacccagagtgggctctcaggatttgttgattgaagggtgggtgaaagctggctggagactcctggcctggccacctgcaagaggcggactttgaagaaaactgtgatccagttgagccactttgtccctgaggggaatgctgctttgcagctttctgtaacttctcacatgggaattgcactggtgacagataaggtttaacagatgtacttttttatcctcagaataagacaaggcaaactctatatggctagtattactgagtcaggtccctcccgttgacccattaattccagcattgatcaatacaaccaaattccagccccaggacaagagtggcaggcatgggggcctggtactccaggctacagtgtgagcccaggtgttctgcaccttgcagcctgcacactgcaggtgaaatcatgagcagtgttctgg

SEQ ID NO: 2423 - protein, 541 aa, Homosapiens; identical to SEQ ID NO: 267

SEQ ID NO: 2424 - DNA, 2678 bp, Homosapiens
ccgccccctcgcacttccgtgtgccgcggcgccggagcccgaggcggctgtagcccacatctcccgagcgacccccggcgcccgcccgccgcgcggaggcccgggccacacctcactggccgcttggcccatcccagtcagcgccgcgccgaaccccgtccgcgcgcgccggggagcggcgcccccgccgctgccgccgcgacccttggcgcctgcccctgcaacgggaggtctgcagggaactggccaggcaagggggcaggcccgtttctcctggtggttggtgcgttgtagcagcagcgggagccaggactaaggacaagcaggagctgggagccccagccccactgcaggccccaccatggcgccgttcctgcgcatcgccttcaactcctatgagctgggctccctgcaggccgaggacgaggcgaaccagcccttctgtgccgtgaagatgaaggaggcgctcagcacagagcgtgggaaaacactggtgcagaagaagccgaccatgtatcctgagtggaagtcgacgttcgatgcccacatctatgaggggcgcgtcatccagattgtgctaatgcgggcagcagaggagccagtgtctgaggtgaccgtgggtgtgtcggtgctggccgagcgctgcaagaagaacaatggcaaggctgagttctggctggacctgcagcctcaggccaaggtgttgatgtctgttcagtatttcctggaggacgtggattgcaaacagtctatgcgcagtgaggacgaggccaagttcccaacgatgaaccgccgcggagccatcaaacaggccaaaatccactacatcaagaaccatgagtttatcgccaccttctttgggcaacccaccttctgttctgtgtgcaaagactttgtctggggcctcaacaagcaaggctacaaatgcaggcaatgtaacgctgccatccacaagaaatgcatcgacaagatcatcggcagatgcactggcaccgcggccaacagccgggacactatattccagaaagaacgcttcaacatcgacatgccgcaccgcttcaaggttcacaactacatgagccccaccttctgtgaccactgcggcagcctgctctggggactggtgaagcagggattaaagtgtgaagactgcggcatgaatgtgcaccataaatgccgggagaaggtggccaacctctgcggcatcaaccagaagcttttggctgaggccttgaaccaagtcacccagagagcctcccggagatcagactcagcctcctcagagcctgttgggatatatcagggtttcgagaagaagaccggagttgctggggaggacatgcaagacaacagtgggacctacggcaagatctgggagggcagcagcaagtgcaacatcaacaacttcatcttccacaaggtcctgggcaaaggcagcttcgggaaggtgctgcttggagagctgaagggcagaggagagtactttgccatcaaggccctcaagaaggatgtggtcctgatcgacgacgacgtggagtgcaccatggttgagaagcgggtgctgacacttgccgcagagaatccctttctcacccacctcatctgcaccttccagaccaaggaccacctgttctttgtgatggagttcctcaacgggggggacctgatgtaccacatccaggacaaaggccgctttgaactctaccgtgccacgttttatgccgctgagataatgtgtggactgcagtttctacacagcaagggcatcatttacagggacctcaaactggacaatgtgctgctggaccgggatggccacatcaagattgccgactttgggatgtgcaaagagaacatattcggggagagccgggccagcaccttctgcggcacccctgactatatcgcccctgagatcctacagggcctgaagtacacattctctgtggactggtggtctttcggggtccttctgtacgagatgctcattggccagtcccccttccatggtgatgatgaggatgaactcttcgagtccatccgtgtggacacgccacattatccccgctggatcaccaaggagtccaaggacatcctggagaagctctttgaaagggaaccaaccaagaggctgggagtgaccggaaacatcaaaatccaccccttcttcaagaccataaactggactctgctggaaaagcggaggttggagccacctttcaggcccaaagtgaagtcacccagagactacagtaactttgaccaggagttcctgaacgagaaggcgcgcctctcctacagcgacaagaacctcatcgactccatggaccagtctgcattcgctggcttctcctttgtgaaccccaaattcgagcacctcctggaagattgaggttcctggacagatcaggctagccctgccctccacccacacctgcccgctccccacgataagcaccagtgggactgtggtgacttctgctgctggccccgcccctgcccccagagcgtccttggctgccgtctggccgggctctcatggtacttcctctgtgaactgtgtgtgaatctgcttttcctctgccttcggagggaaattgtaaatcctgtgtttcattacttgaatgtagttatctattgaaaatatatattatatacatagacatatatatatatat

SEQ ID NO: 2425 - protein, 676 aa, Homosapiens; identical to SEQ ID NO: 269

SEQ ID NO: 2426 - DNA, 2566 bp, Homosapiens
ccgccccctcgcacttccgtgtgccgcggcgccggagcccgaggcggctgtagcccacatctcccgagcgacccccggcgcccgcccgccgcgcggaggcccgggccacacctcactggccgcttggcccatcccagtcagcgccgcgccgaaccccgtccgcgcgcgccggggagcggcgcccccgccgctgccgccgcgacccttggcgcctgcccctgcaacgggagccccactgcaggccccaccatggcgccgttcctgcgcatcgccttcaactcctatgagctgggctccctgcaggccgaggacgaggcgaaccagcccttctgtgccgtgaagatgaaggaggcgctcagcacagagcgtgggaaaacactggtgcagaagaagccgaccatgtatcctgagtggaagtcgacgttcgatgcccacatctatgaggggcgcgtcatccagattgtgctaatgcgggcagcagaggagccagtgtctgaggtgaccgtgggtgtgtcggtgctggccgagcgctgcaagaagaacaatggcaaggctgagttctggctggacctgcagcctcaggccaaggtgttgatgtctgttcagtatttcctggaggacgtggattgcaaacagtctatgcgcagtgaggacgaggccaagttcccaacgatgaaccgccgcggagccatcaaacaggccaaaatccactacatcaagaaccatgagtttatcgccaccttctttgggcaacccaccttctgttctgtgtgcaaagactttgtctggggcctcaacaagcaaggctacaaatgcaggcaatgtaacgctgccatccacaagaaatgcatcgacaagatcatcggcagatgcactggcaccgcggccaacagccgggacactatattccagaaagaacgcttcaacatcgacatgccgcaccgcttcaaggttcacaactacatgagccccaccttctgtgaccactgcggcagcctgctctggggactggtgaagcagggattaaagtgtgaagactgcggcatgaatgtgcaccataaatgccgggagaaggtggccaacctctgcggcatcaaccagaagcttttggctgaggccttgaaccaagtcacccagagagcctcccggagatcagactcagcctcctcagagcctgttgggatatatcagggtttcgagaagaagaccggagttgctggggaggacatgcaagacaacagtgggacctacggcaagatctgggagggcagcagcaagtgcaacatcaacaacttcatcttccacaaggtcctgggcaaaggcagcttcgggaaggtgctgcttggagagctgaagggcagaggagagtactttgccatcaaggccctcaagaaggatgtggtcctgatcgacgacgacgtggagtgcaccatggttgagaagcgggtgctgacacttgccgcagagaatccctttctcacccacctcatctgcaccttccagaccaaggaccacctgttctttgtgatggagttcctcaacgggggggacctgatgtaccacatccaggacaaaggccgctttgaactctaccgtgccacgttttatgccgctgagataatgtgtggactgcagtttctacacagcaagggcatcatttacagggacctcaaactggacaatgtgctgctggaccgggatggccacatcaagattgccgactttgggatgtgcaaagagaacatattcggggagagccgggccagcaccttctgcggcacccctgactatatcgcccctgagatcctacagggcctgaagtacacattctctgtggactggtggtctttcggggtccttctgtacgagatgctcattggccagtcccccttccatggtgatgatgaggatgaactcttcgagtccatccgtgtggacacgccacattatccccgctggatcaccaaggagtccaaggacatcctggagaagctctttgaaagggaaccaaccaagaggctgggagtgaccggaaacatcaaaatccaccccttcttcaagaccataaactggactctgctggaaaagcggaggttggagccacctttcaggcccaaagtgaagtcacccagagactacagtaactttgaccaggagttcctgaacgagaaggcgcgcctctcctacagcgacaagaacctcatcgactccatggaccagtctgcattcgctggcttctcctttgtgaaccccaaattcgagcacctcctggaagattgaggttcctggacagatcaggctagccctgccctccacccacacctgcccgctccccacgataagcaccagtgggactgtggtgacttctgctgctggccccgcccctgcccccagagcgtccttggctgccgtctggccgggctctcatggtacttcctctgtgaactgtgtgtgaatctgcttttcctctgccttcggagggaaattgtaaatcctgtgtttcattacttgaatgtagttatctattgaaaatatatattatatacatagacatatatatatatat

SEQ ID NO: 2427 - protein, 676 aa, Homosapiens; identical to SEQ ID NO: 269

SEQ ID NO: 2428 - DNA, 2731 bp, Homosapiens
ccgccccctcgcacttccgtgtgccgcggcgccggagcccgaggcggctgtagcccacatctcccgagcgacccccggcgcccgcccgccgcgcggaggcccgggccacacctcactggccgcttggcccatcccagtcagcgccgcgccgaaccccgtccgcgcgcgccggggagcggcgcccccgccgctgccgccgcgacccttggcgcctgcccctgcaacgggagccccactgcaggccccaccatggcgccgttcctgcgcatcgccttcaactcctatgagctgggctccctgcaggccgaggacgaggcgaaccagcccttctgtgccgtgaagatgaaggaggcgctcagcacagagcgtgggaaaacactggtgcagaagaagccgaccatgtatcctgagtggaagtcgacgttcgatgcccacatctatgaggggcgcgtcatccagattgtgctaatgcgggcagcagaggagccagtgtctgaggtgaccgtgggtgtgtcggtgctggccgagcgctgcaagaagaacaatggcaaggctgagttctggctggacctgcagcctcaggccaaggtgttgatgtctgttcagtatttcctggaggacgtggattgcaaacagtctatgcgcagtgaggacgaggccaagttcccaacgatgaaccgccgcggagccatcaaacaggccaaaatccactacatcaagaaccatgagtttatcgccaccttctttgggcaacccaccttctgttctgtgtgcaaagactttgtctggggcctcaacaagcaaggctacaaatgcaggcaatgtaacgctgccatccacaagaaatgcatcgacaagatcatcggcagatgcactggcaccgcggccaacagccgggacactatattccagaaagaacgcttcaacatcgacatgccgcaccgcttcaaggttcacaactacatgagccccaccttctgtgaccactgcggcagcctgctctggggactggtgaagcagggattaaagtgtgaagactgcggcatgaatgtgcaccataaatgccgggagaaggtggccaacctctgcggcatcaaccagaagcttttggctgaggccttgaaccaagtcacccagagagcctcccggagatcagactcagcctcctcagagcctgttgggatatatcagggtttcgagaagaagaccggagttgctggggaggacatgcaagacaacagtgggacctacggcaagatctgggagggcagcagcaagtgcaacatcaacaacttcatcttccacaaggtcctgggcaaaggcagcttcgggaaggtgctgcttggagagctgaagggcagaggagagtactttgccatcaaggccctcaagaaggatgtggtcctgatcgacgacgacgtggagtgcaccatggttgagaagcgggtgctgacacttgccgcagagaatccctttctcacccacctcatctgcaccttccagaccaaggaccacctgttctttgtgatggagttcctcaacgggggggacctgatgtaccacatccaggacaaaggccgctttgaactctaccgtgccacgttttatgccgctgagataatgtgtggactgcagtttctacacagcaagggcatcatttacagggacctcaaactggacaatgtgctgctggaccgggatggccacatcaagattgccgactttgggatgtgcaaagagaacatattcggggagagccgggccagcaccttctgcggcacccctgactatatcgcccctgagatcctacagggcctgaagtacacattctctgtggactggtggtctttcggggtccttctgtacgagatgctcattggccagtcccccttccatggtgatgatgaggatgaactcttcgagtccatccgtgtggacacgccacattatccccgctggatcaccaaggagtccaaggacatcctggagaagctctttgaaagggaaccaaccaagaggctgggagtgaccggaaacatcaaaatccaccccttcttcaagaccataaactggactctgctggaaaagcggaggttggagccacctttcaggcccaaagtgaagtcacccagagactacagtaactttgaccaggagttcctgaacgagaaggcgcgcctctcctacagcgacaagaacctcatcgactccatggaccagtctgcattcgctggcttctcctttgtgaaccccaaattcgagcacctcctggaagattgaggttcctggacagatcaggctagccctgccctccacccacacctgcccgctccccacgataagcaccagtgggactgtggtgacttctgctgctggccccgcccctgcccccagagcgtccttggctgccgtctggccgggctctcatggtacttcctctgtgaactgtgtgtgaatctgcttttcctctgccttcggagggaaattgtaaatcctgtgtttcattacttgaatgtagttatctattgaaaatatatattatatacatagacatatatatatatataataggctgtatatattgctcagtagagaaaaaccatgggggactggtgatatgttgatctttttcaaaaaaatatatatatgacaaaaaaaaaaaaaaaggagcacaagctgtttgaaccaccaggtttatttgtgtgtctaaataaacaccaaatagtaccaa

SEQ ID NO: 2429 - protein, 676 aa, Homosapiens; identical to SEQ ID NO: 269

SEQ ID NO: 2430 - DNA, 463 bp, Homosapiens
cagagcgtgggaaaacactggtgcagaagaagccgaccatgtatcctgagtggaagtcgacgttcgatgcccacatctatgaggggcgcgtcatccagattgtgtgctggccccgcccctgcccccagagcgtccttggctgccgtctggccgggctctcatggtacttcctctgtgaactgtgtgtgaatctgcttttcctctgccttcggagggaaattgtaaatcctgtgtttcattacttgaatgtagttatctattgaaaatatatattatatacatagacatatatatatatataataggctgtatatattgctcagtagagaaaaaccatgggggactggtgatatgttgatctttttcaaaaaaatatatatatgacaaaaaaaaaaaaaaaggagcacaagctgtttgaaccaccaggtttatttgtgtgtctaaataaacaccaaatagtacc

SEQ ID NO: 2431 - protein, 74 aa, Homosapiens
MYPEWKSTFDAHIYEGRVIQIVCWPRPCPQSVLGCRLAGLSWYFLCELCVNLLFLCLRREIVNPVFHYLNVVIY

SEQ ID NO: 2432 - DNA, 495 bp, Homosapiens
acctccagttccagaaagaacgcttcaacatcgacatgccgcaccgcttcaaggttcacaactacatgagccccaccttctgtgaccactgcccgctccccacgataagcaccagtgggactgtggtgacttctgctgctggccccgcccctgcccccagagcgtccttggctgccgtctggccgggctctcatggtacttcctctgtgaactgtgtgtgaatctgcttttcctctgccttcggagggaaattgtaaatcctgtgtttcattacttgaatgtagttatctattgaaaatatatattatatacatagacatatatatatatataataggctgtatatattgctcagtagagaaaaaccatgggggactggtgatatgttgatctttttcaaaaaaatatatatatgacaaaaaaaaaaaaaaaggagcacaagctgtttgaaccaccaggtttatttgtgtgtctaaataaacaccaaatagtacc

SEQ ID NO: 2433 - protein, 61 aa, Homosapiens
MPHRFKVHNYMSPTFCDHCPLPTISTSGTVVTSAAGPAPAPRASLAAVWPGSHGTSSVNCV

SEQ ID NO: 2434 - DNA, 577 bp, Homosapiens
agacaacagtgggacctacggcaagatctgggagggcagcagcaagtgatcaaaatccaccccttcttcaagaccataaactggactctgctggaaaagcggaggttggagccacctttcaggcccaaagtgaagtcacccagagactacagtaactttgaccaggagttcctgaacgagaaggcgcgcctctcctacagcgacaagaacctcatcgactccatggaccagtctgcattcgctggcttctcctttgtgaaccccaaattcgagcacctcctggaagattgaggttcctggacagatcaggctagccctgccctccacccacacctgcccgctccccacgataagcaccagtgggactgtggtgacttctgctgctggccccgcccctgcccccagagcgtccttggctgccgtctggccgggctctcatggtacttcctctgtgaactgtgtgtgaatctgcttttcctctgccttcggagggaaattgtaaatcctgtgtttcattacttgaatgtagttatctattgaaaatatatattatatacatagacatatatatatatat

SEQ ID NO: 2435 - protein, 50 aa, Homosapiens
TTVGPTARSGRAAASDQNPPLLQDHKLDSAGKAEVGATFQAQSEVTQRLQ

SEQ ID NO: 2436 - DNA, 740 bp, Homosapiens
agacaacagtgggacctacggcaagatctgggagggcagcagcaagtgatcaaaatccaccccttcttcaagaccataaactggactctgctggaaaagcggaggttggagccacctttcaggcccaaagtgaagtcacccagagactacagtaactttgaccaggagttcctgaacgagaaggcgcgcctctcctacagcgacaagaacctcatcgactccatggaccagtctgcattcgctggcttctcctttgtgaaccccaaattcgagcacctcctggaagattgaggttcctggacagatcaggctagccctgccctccacccacacctgcccgctccccacgataagcaccagtgggactgtggtgacttctgctgctggccccgcccctgcccccagagcgtccttggctgccgtctggccgggctctcatggtacttcctctgtgaactgtgtgtgaatctgcttttcctctgccttcggagggaaattgtaaatcctgtgtttcattacttgaatgtagttatctattgaaaatatatattatatacatagacatatatatatatataataggctgtatatattgctcagtagagaaaaaccatgggggactggtgatatgttgatctttttcaaaaaaatatatatatgacaaaaaaaaaaaaaaaggagcacaagctgtttgaaccaccaggtttatttgtgtgtctaaataaacaccaaatagtacc

SEQ ID NO: 2437 - protein, 50 aa, Homosapiens; identical to SEQ ID NO: 2435

SEQ ID NO: 2438 - DNA, 757 bp, Homosapiens
gggtccttctgtacgagatgctcattggccagtcccccttccatggtgatgatgaggatgaactcttcgagtccatccgtgtggacacgccacattatccccgtctgctggaaaagcggaggttggagccacctttcaggcccaaagtgaagtcacccagagactacagtaactttgaccaggagttcctgaacgagaaggcgcgcctctcctacagcgacaagaacctcatcgactccatggaccagtctgcattcgctggcttctcctttgtgaaccccaaattcgagcacctcctggaagattgaggttcctggacagatcaggctagccctgccctccacccacacctgcccgctccccacgataagcaccagtgggactgtggtgacttctgctgctggccccgcccctgcccccagagcgtccttggctgccgtctggccgggctctcatggtacttcctctgtgaactgtgtgtgaatctgcttttcctctgccttcggagggaaattgtaaatcctgtgtttcattacttgaatgtagttatctattgaaaatatatattatatacatagacatatatatatatataataggctgtatatattgctcagtagagaaaaaccatgggggactggtgatatgttgatctttttcaaaaaaatatatatatgacaaaaaaaaaaaaaaaggagcacaagctgtttgaaccaccaggtttatttgtgtgtctaaataaacaccaaatagtacc

SEQ ID NO: 2439 - protein, 96 aa, Homosapiens
MLIGQSPFHGDDEDELFESIRVDTPHYPRLLEKRRLEPPFRPKVKSPRDYSNFDQEFLNEKARLSYSDKNLIDSMDQSAFAGFSFVNPKFEHLLED

SEQ ID NO: 2440 - DNA, 393 bp, Homosapiens
caagaacctcatcgactccatggaccagtctgcattcgctggccgcccctgcccccagagcgtccttggctgccgtctggccgggctctcatggtacttcctctgtgaactgtgtgtgaatctgcttttcctctgccttcggagggaaattgtaaatcctgtgtttcattacttgaatgtagttatctattgaaaatatatattatatacatagacatatatatatatataataggctgtatatattgctcagtagagaaaaaccatgggggactggtgatatgttgatctttttcaaaaaaatatatatatgacaaaaaaaaaaaaaaaggagcacaagctgtttgaaccaccaggtttatttgtgtgtctaaataaacaccaaatagtacc

SEQ ID NO: 2441 - protein, 57 aa, Homosapiens
MDQSAFAGRPCPQSVLGCRLAGLSWYFLCELCVNLLFLCLRREIVNPVFHYLNVVIY

SEQ ID NO: 2442 - DNA, 2979 bp, Homosapiens
cccgcccggcgacttaacgcgcccccgccccgcgcccggcctcggcagccgcctgtcgccgcgggagcagccgctatctctgtgtgtccgcgtgtgcgcccggtccccgcctgccgcaccatggagagctaccacaagcctgaccagcagaagctgcaggccttgaaggacacggccaaccgcctacgtatcagctccatccaggccaccactgcggcgggctctggccaccccacgtcatgctgcagcgccgcagagatcatggctgtcctctttttccacaccatgcgctacaagtcccaggacccccggaatccgcacaatgaccgctttgtgctctccaagggccatgcagctcccatcctctacgcggtctgggctgaagctggtttcctggccgaggcggagctgctgaacctgaggaagatcagctccgacttggacgggcacccggtcccgaaacaagctttcaccgacgtggccactggctccctgggccagggcctcggggccgcttgtgggatggcctacaccggcaaatacttcgacaaggccagctaccgagtctattgcttgctgggagacggggagctgtcagagggctctgtatgggaggccatggccttcgccagcatctataagctggacaaccttgtggccattctagacatcaatcgcctgggccagagtgacccggccccactgcagcaccagatggacatctaccagaagcggtgcgaggccttcggttggcatgccatcatcgtggatggacacagcgtggaggagctgtgcaaggcctttggccaggccaagcaccagccaacagccatcattgccaagaccttcaagggccgagggatcacgggggtagaagataaggagtcttggcatgggaagcccctccccaaaaacatggctgagcagatcatccaggagatctacagccagatccagagcaaaaagaagatcctggcaacccctccacaggaggacgcaccctcagtggacattgccaacatccgcatgcccagcctgcccagctacaaagttggggacaagatagccacccgcaaggcctacgggcaggcactggccaagctgggccatgccagtgaccgcatcatcgccctggatggggacaccaaaaattccaccttctcggagatcttcaaaaaggagcacccggaccgcttcatcgagtgctacattgctgagcagaacatggtgagcatcgcggtgggctgtgccacccgcaacaggacggtgcccttctgcagcacttttgcagccttcttcacgcgggcctttgaccagattcgcatggccgccatctccgagagcaacatcaacctctgcggctcccactgcggcgtttccatcggggaagacgggccctcccagatggccctagaagatctggctatgtttcggtcagtccccacatcaactgtcttttacccaagtgatggcgttgctacagagaaggcagtggaactagccgccaatacaaagggtatctgcttcatccggaccagccgcccagaaaatgccatcatctataacaacaatgaggacttccaggtcggacaagccaaggtggtcctgaagagcaaggatgaccaggtgaccgttatcggggctggggtgaccctgcacgaggccttggccgctgccgaactgctgaagaaagaaaagatcaacatccgcgtgctggaccccttcaccatcaagcccctggacagaaaactcattctcgacagcgctcgtgccaccaagggcaggatcctcaccgtggaggaccattattatgaaggtggcattggtgaggctgtgtccagtgcagtagtgggcgagcctggcatcactgtcacccacctggcagttaaccgggtaccaagaagtgggaagccggctgagctgctgaagatgtttggtatcgacagggatgccattgcacaagctgtgaggggcctcatcaccaaggcctagggcggccagtgcaggttctggggaagaagcgtggagggtgcgctagggaggctggtgtccttggtcctgggccaggacctgggtgtcccaagtccccttggaatcacctgcaactgccctcaacctccagaactatcgctgcctcccattcatcaccaggtgacatttgactgcaacctgccttctagctgagaggctgagacctacatccctcattgtgacctcagtccacctggccctgagcgggctggggaactgcctcagtctggaagctgaccaggcactctcagggccgccccacctcccccaagtccccacagccttgcagtcaggtctcctgggatagggaggttcacttgcttgttgtccctcgtccttgtcatatccttttaactaggcatctcagagaagcagagacagggcagccttcgtcctgggggaaaagggaccctcaggatggcatgagaggtcctcaatcccaagtgtggaactgtccccctcaacttgttaaaatgcagatttctgggtcttgccaatggggcctgggactccatgtgacaactggcccaggagcttctgatgtcacacagaattctgcagtcccaagctccagccccgacctgctctgctgttcctaggtgactgccctcacactgctgaccacagtggatttctccccctgctgctcgggctcagctggggtcagccctgcttataaggtcaactgtgcaaaaccttatactggccaagaacaaactagtgctgggggaggagggctgggtgccccggccactggtggagtccccaggaaatcctcagagctgttgcgaggatgagacacatttgtggacacgtccacctgtcctcctgaccgtctggagagaataaacctgtcaaagccaaggtcaggcaattgccccccacttagctacccagccaggtctagcagtgccagaggctgtgcctgtgtttgcctcaacaccaatt

SEQ ID NO: 2443 - protein, 623 aa, Homosapiens; identical to SEQ ID NO: 273

SEQ ID NO: 2444 - DNA, 2893 bp, Homosapiens
cccgcccggcgacttaacgcgcccccgccccgcgcccggcctcggcagccgcctgtcgccgcgggagcagccgctatctctgtgtgtccgcgtgtgcgcccggtccccgcctgccgcaccatggagagctaccacaagcctgaccagcagaagctgcaggccttgaaggacacggccaaccgcctacgtatcagctccatccaggccaccactgcggcgggctctggccaccccacgtcatgctgcagcgccgcagagatcatggctgtcctctttttccacaccatgcgctacaagtcccaggacccccggaatccgcacaatgaccgctttgtgctctccaagggccatgcagctcccatcctctacgcggtctgggctgaagctggtttcctggccgaggcggagctgctgaacctgaggaagatcagctccgacttggacgggcacccggtcccgaaacaagctttcaccgacgtggccactggctccctgggccagggcctcggggccgcttgtgggatggcctacaccggcaaatacttcgacaaggccagctaccgagtctattgcttgctgggagacggggagctgtcagagggctctgtatgggaggccatggccttcgccagcatctataagctggacaaccttgtggccattctagacatcaatcgcctgggccagagtgacccggccccactgcagcaccagatggacatctaccagaagcggtgcgaggccttcggttggcatgccatcatcgtggatggacacagcgtggaggagctgtgcaaggcctttggccaggccaagcaccagccaacagccatcattgccaagaccttcaagggccgagggatcacgggggtagaagataaggagtcttggcatgggaagcccctccccaaaaacatggctgagcagatcatccaggagatctacagccagatccagagcaaaaagaagatcctggcaacccctccacaggaggacgcaccctcagtggacattgccaacatccgcatgcccagcctgcccagctacaaagttggggacaagatagccacccgcaaggcctacgggcaggcactggccaagctgggccatgccagtgaccgcatcatcgccctggatggggacaccaaaaattccaccttctcggagatcttcaaaaaggagcacccggaccgcttcatcgagtgctacattgctgagcagaacatggtgagcatcgcggtgggctgtgccacccgcaacaggacggtgcccttctgcagcacttttgcagccttcttcacgcgggcctttgaccagattcgcatggccgccatctccgagagcaacatcaacctctgcggctcccactgcggcgtttccatcggggaagacgggccctcccagatggccctagaagatctggctatgtttcggtcagtccccacatcaactgtcttttacccaagtgatggcgttgctacagagaaggcagtggaactagccgccaatacaaagggtatctgcttcatccggaccagccgcccagaaaatgccatcatctataacaacaatgaggacttccaggtcggacaagccaaggtggtcctgaagagcaaggatgaccaggtgaccgttatcggggctggggtgaccctgcacgaggccttggccgctgccgaactgctgaagaaagaaaagatcaacatccgcgtgctggaccccttcaccatcaagcccctggacagaaaactcattctcgacagcgctcgtgccaccaagggcaggatcctcaccgtggaggaccattattatgaaggtggcattggtgaggctgtgtccagtgcagtagtgggcgagcctggcatcactgtcacccacctggcagttaaccgggtaccaagaagtgggaagccggctgagctgctgaagatgtttggtatcgacagggatgccattgcacaagctgtgaggggcctcatcaccaaggcctagggcggccagtgcaggttctggggaagaagcgtggagggtgcgctagggaggctggtgtccttggtcctgggccaggacctgggtgtcccaagtccccttggaatcacctgcaactgccctcaacctccagaactatcgctgcctcccattcatcaccaggtgacatttgactgcaacctgccttctagctgagaggctgagacctacatccctcattgtgacctcagtccacctggccctgagcgggctggggaactgcctcagtctggaagctgaccaggcactctcagggccgccccacctcccccaagtccccacagccttgcagtcaggtctcctgggatagggaggttcacttgcttgttgtccctcgtccttgtcatatccttttaactaggcatctcagagaagcagagacagggcagccttcgtcctgggggaaaagggaccctcaggatggcatgagaggtcctcaatcccaagtgtggaactgtccccctcaacttgttaaaatgcagatttctgggtcttgccaatggggcctgggactccatgtgacaactggcccaggagcttctgatgtcacacagaattctgcagtcccaagctccagccccgacctgctctgctgttcctaggtgactgccctcacactgctgaccacagtggatttctccccctgctgctcgggctcagctggggtcagccctgcttataaggtcaactgtgcaaaaccttatactggccaagaacaaactagtgctgggggaggagggctgggtgccccggccactggtggagtccccaggaaatcctcagagctgttgcgaggatgagacacatttgtggacacgtccacctgtcctcctgaccgtctggagagaataaacctgtcaaagcc

SEQ ID NO: 2445 - protein, 623 aa, Homosapiens; identical to SEQ ID NO: 273

SEQ ID NO: 2446 - DNA, 1990 bp, Homosapiens
attgtcatggctttggtgctgctgcctggcactgccctctggtgttaaaaatgggcaggatctggaccacttgcagcttcttgggggctcctgctagtctttcgggctgctgggtgctacctgggagttcagtctgttcttggctctggccagactctagtgactactgaggtgacctccagggagagggatattcagccttcctggccgcacacaacaaggtgccatggggtgggcatgcctaggtgcttatagactcctctgctgctcacagatgcattgggtgaccctggaagccctgttctgggccttgggttccccttctgatggccagggtcccttccaacccagtcgacaaactgagtatttctgcagcagacacctctacctgtgtgtgaccctgcaggcggggttgtggggaggaagagaatggacacattggtgaagggatggggcagtgggcccagaaacacacacctgcccacgtctggcccctcctttcccactcagctgtgagctcccaaaggaccaggcagtagacagtgagtggtgggcacgtaggagtccatcctattcactgcgaccctcctttcctggcccccgtgcctggctgggctctgcctgtctgggatgatgccattcctcccttgccctcggcaggtagagggccagtctcctggagcagcctcctggccctctgggagcttctgtcttacccattcctctgtcctcccgtgttgggtctgcaggggtagaagataaggagtcttggcatgggaagcccctccccaaaaacatggctgagcagatcatccaggagatctacagccagatccagagcaaaaagaagatcctggcaacccctccacaggaggacgcaccctcagtggacattgccaacatccgcatgcccagcctgcccagctacaaagttggggacaagatagccacccgcaaggcctacgggcaggcactggccaagctgggccatgccagtgaccgcatcatcgccctggatggggacaccaaaaattccaccttctcggagatcttcaaaaaggagcacccggaccgcttcatcgagtgctacattgctgagcagaacatggtgagcatcgcggtgggctgtgccacccgcaacaggacggtgcccttctgcagcacttttgcagccttcttcacgcgggcctttgaccagattcgcatggccgccatctccgagagcaacatcaacctctgcggctcccactgcggcgtttccatcggggaagacgggccctcccagatggccctagaagatctggctatgtttcggtcagtccccacatcaactgtcttttacccaagtgatggcgttgctacagagaaggcagtggaactagccgccaatacaaagggtatctgcttcatccggaccagccgcccagaaaatgccatcatctataacaacaatgaggacttccaggtcggacaagccaaggtggtcctgaagagcaaggatgaccaggtgaccgttatcggggctggggtgaccctgcacgaggccttggccgctgccgaactgctgaagaaagaaaagatcaacatccgcgtgctggaccccttcaccatcaagcccctggacagaaaactcattctcgacagcgctcgtgccaccaagggcaggatcctcaccgtggaggaccattattatgaaggtggcattggtgaggctgtgtccagtgcagtagtgggcgagcctggcatcactgtcacccacctggcagttaaccgggtaccaagaagtgggaagccggctgagctgctgaagatgtttggtatcgacagggatgccattgcacaagctgtgaggggcctcatcaccaaggcctagggcgggtatgaagtgtggggcgggggtctatacattcctgagattctgggaaaggtgctcaaagatgtactgagaggaggggtaaatatatgttttgagaaaaatgaattggccctg

SEQ ID NO: 2447 - protein, 358 aa, Homosapiens
MAEQIIQEIYSQIQSKKKILATPPQEDAPSVDIANIRMPSLPSYKVGDKIATRKAYGQALAKLGHASDRIIALDGDTKNSTFSEIFKKEHPDRFIECYIAEQNMVSIAVGCATRNRTVPFCSTFAAFFTRAFDQIRMAAISESNINLCGSHCGVSIGEDGPSQMALEDLAMFRSVPTSTVFYPSDGVATEKAVELAANTKGICFIRTSRPENAIIYNNNEDFQVGQAKVVLKSKDDQVTVIGAGVTLHEALAAAELLKKEKINIRVLDPFTIKPLDRKLILDSARATKGRILTVEDHYYEGGIGEAVSSAVVGEPGITVTHLAVNRVPRSGKPAELLKMFGIDRDAIAQAVRGLITKA

SEQ ID NO: 2448 - DNA, 3184 bp, Homosapiens
cagctaccgagtctattgcttgctgggagacggggagctgtcagagggctctgtatgggaggccatggccttcgccagcatctataagctggacaaccttgtggccattctagacatcaatcgcctgggccagagtgacccggccccactgcagcaccagatggacatctaccagaagcggtgcgaggccttcgggtatgtacgaggctgtggcctgagtgtggtcacagcacgggagagtggtctgtgatcacagctttgcaggtgcaggtgcaggagctgaagctgggaccttaagcaccatctaaaggtccctttctttagcatttgactcacaatttcaaactctaggcatttggacttaatggctcaggatatgtgggccaggcccagttttaagtgagtttccttgttttcgtggttgtggcatggtggctctcggagcttccacacaccatctcacgtcagctcgctttgttcttgaggaaggagggttcttgagggatgggggcttgctcggtaaagctaaaggatgtatagctgcggagaggtttgaacctcagtttggtggccacgtcctgtgcccagccccgcccagcctggggaggaggaacaggctcctggtgaaatgggagatagggtttccagatgccccccttcggccttgattggttacaaattcagggtcaaagggcacaaagcagggaggtcaatctgcatgggtgtcagccagaggggctccacctcaaagcctccaccggtgttgccaaacacaagctgctctgcacaggggcccagcattggctgaggaggctgtggaggggagggagcagggcaggtgccgtgcaaggctttgagactcaggtcaggcctccaggactgcgttttgcggatgaacccatgcctgtgactacactaagtaacaggatgcttggggttaccttgcagtagcacagcatacgcaggcctgtgttccctgatgactgacctcagaaagggagaggaggaagggaggaaataatctctgttggacaggcgaggaaactgagccacagggtcctcaccccacaggcctccccaaggccacatctatctggggactcagagtacaaccccagcagcacccccaggacctgtgtccataacctcgtgactcaagccagattcctgaagtcctggctccaccgctaacttgctttgtggcgtgggtcacgttacttactccaccttcggtgtctcagttgatttgtctgtacaatggggccagctcagcacccaagcatggcgtggtgaggcttcagtgggctaatatgggtagtggttggcatggcactcagtttgagaagtgctatttttattcttatgtcaaaaagagtccccaaaaggatagcttttcaagagaaagggtgctctgccccagctccttcctgtatatttgactccatggttcatttcaaaaacatttccagcaccacatccagcatctgtggagtgatcaaatgtgttccccaaataagaattgggccaaaaaattcatcaagaatctaatagcagacagattccaaacccagtgcgctgaccccagaacagctttcagtaggaaatgagcagatcaggaatgaaagagacaataaaggaactgagctctggattacttaagaggaggaggaaaacctgttcagaggcaaacaaaaggaagtaaaataatgtgaaaaagaaaaggatttaaaaaacccaaactggaaacaggaatgttgcaagctttctactactccagctgaggccgcagttgtggggtggagcctgggcagaccccagctgccaaggcagacctttccctggaaggctcctcggtgttgtggcccctgggaattgccccttactctctgccccctgtccccagttggcatgccatcatcgtggatggacacagcgtggaggagctgtgcaaggcctttggccaggccaagcaccagccaacagccatcattgccaagaccttcaagggccgagggatcacgggggtagaagataaggagtcttggcatgggaagcccctccccaaaaacatggctgagcagatcatccaggagatctacagccagatccagaagccttcccactctcttcctcacagatagccacccgcaaggcctacgggcaggcactggccaagctgggccatgccagtgaccgcatcatcgccctggatggggacaccaaaaattccaccttctcggagatcttcaaaaaggagcacccggaccgcttcatcgagtgctacattgctgagcagaacatggtgagcatcgcggtgggctgtgccacccgcaacaggacggtgcccttctgcagcacttttgcagccttcttcacgcgggcctttgaccagattcgcatggccgccatctccgagagcaacatcaacctctgcggctcccactgcggcgtttccatcggggaagacgggccctcccagatggccctagaagatctggctatgtttcggtcagtccccacatcaactgtcttttacccaagtgatggcgttgctacagagaaggcagtggaactagccgccaatacaaagggtatctgcttcatccggaccagccgcccagaaaatgccatcatctataacaacaatgaggacttccaggtcggacaagccaaggtggtcctgaagagcaaggatgaccaggtgaccgttatcggggctggggtgaccctgcacgaggccttggccgctgccgaactgctgaagaaagaaaagatcaacatccgcgtgctggaccccttcaccatcaagcccctggacagaaaactcattctcgacagcgctcgtgccaccaagggcaggatcctcaccgtggaggaccattattatgaaggtggcattggtgaggctgtgtccagtgcagtagtgggcgagcctggcatcactgtcacccacctggcagttaaccgggtaccaagaagtgggaagccggctgagctgctgaagatgtttggtatcgacagggatgccattgcacaagctgtgaggggcctcatcaccaaggcctagggcgggtatgaagtgtggggcgggggtctatacattcctgagattctgggaaaggtgctcaaagatgtactgagaggaggggtaaatatatgttttgagaaaaatgaattggccctg

SEQ ID NO: 2449 - protein, 255 aa, Homosapiens [sequence omitted]

SEQ ID NO: 2450 - DNA, 1821 bp, Homosapiens
ctcggcagccgcctgtcgccgcgggagcagccgctatctctgtgtgtccgcgtgtgcgcccggtccccgcctgccgcaccatggagagctaccacaagcctgaccagcagaagctgcaggccttgaaggacacggccaaccgcctacgtatcagctccatccaggccaccactgcggcgggctctggccaccccacgtcatgctgcagcgccgcagagatcatggctgtcctctttttccacaccatgcaaatacttcgacaaggccagctaccgagtctattgcttgctgggagacggggagctgtcagagggctctgtatgggaggccatggccttcgccagcatctataagctggacaaccttgtggccattctagacatcaatcgcctgggccagagtgacccggccccactgcagcaccagatggacatctaccagaagcggtgcgaggccttcggttggcatgccatcatcgtggatggacacagcgtggaggagctgtgcaaggcctttggccaggccaagcaccagccaacagccatcattgccaagaccttcaagggccgagggatcacgggggtagaagataaggagtcttggcatgggaagcccctccccaaaaacatggctgagcagatcatccaggagatctacagccagatccagagcaaaaagaagatcctggcaacccctccacaggaggacgcaccctcagtggacattgccaacatccgcatgcccagcctgcccagctacaaagttggggacaagatagccacccgcaaggcctacgggcaggcactggccaagctgggccatgccagtgaccgcatcatcgccctggatggggacaccaaaaattccaccttctcggagatcttcaaaaaggagcacccggaccgcttcatcgagtgctacattgctgagcagaacatggtgagcatcgcggtgggctgtgccacccgcaacaggacggtgcccttctgcagcacttttgcagccttcttcacgcgggcctttgaccagattcgcatggccgccatctccgagagcaacatcaacctctgcggctcccactgcggcgtttccatcggggaagacgggccctcccagatggccctagaagatctggctatgtttcggtcagtccccacatcaactgtcttttacccaagtgatggcgttgctacagagaaggcagtggaactagccgccaatacaaagggtatctgcttcatccggaccagccgcccagaaaatgccatcatctataacaacaatgaggacttccaggtcggacaagccaaggtggtcctgaagagcaaggatgaccaggtgaccgttatcggggctggggtgaccctgcacgaggccttggccgctgccgaactgctgaagaaagaaaagatcaacatccgcgtgctggaccccttcaccatcaagcccctggacagaaaactcattctcgacagcgctcgtgccaccaagggcaggatcctcaccgtggaggaccattattatgaaggtggcattggtgaggctgtgtccagtgcagtagtgggcgagcctggcatcactgtcacccacctggcagttaaccgggtaccaagaagtgggaagccggctgagctgctgaagatgtttggtatcgacagggatgccattgcacaagctgtgaggggcctcatcaccaaggcctagggcgggtatgaagtgtggggcgggggtctatacattcctgagattctgggaaaggtgctcaaagatgtactgagaggaggggtaaatatatgttttgagaaaaatgaattggccctg

SEQ ID NO: 2451 - protein, 457 aa, Homosapiens
MAFASIYKLDNLVAILDINRLGQSDPAPLQHQMDIYQKRCEAFGWHAIIVDGHSVEELCKAFGQAKHQPTAIIAKTFKGRGITGVEDKESWHGKPLPKNMAEQIIQEIYSQIQSKKKILATPPQEDAPSVDIANIRMPSLPSYKVGDKIATRKAYGQALAKLGHASDRIIALDGDTKNSTFSEIFKKEHPDRFIECYIAEQNMVSIAVGCATRNRTVPFCSTFAAFFTRAFDQIRMAAISESNINLCGSHCGVSIGEDGPSQMALEDLAMFRSVPTSTVFYPSDGVATEKAVELAANTKGICFIRTSRPENAIIYNNNEDFQVGQAKVVLKSKDDQVTVIGAGVTLHEALAAAELLKKEKINIRVLDPFTIKPLDRKLILDSARATKGRILTVEDHYYEGGIGEAVSSAVVGEPGITVTHLAVNRVPRSGKPAELLKMFGIDRDAIAQAVRGLITKA

SEQ ID NO: 2452 - DNA, 2009 bp, Homosapiens
cccgccccgcgcccggcctcggcagccgcctgtcgccgcgggagcagccgctatctctgtgtgtccgcgtgtgcgcccggtccccgcctgccgcaccatggagagctaccacaagcctgaccagcagaagctgcaggccttgaaggacacggccaaccgcctacgtatcagctccatccaggccaccactgcggcgggctctggccaccccacgtcatgctgcagcgccgcagagatcatggctgtcctctttttccacaccatgcgctacaagtcccaggacccccggaatccgcacaatgaccgctttgtgctctccaagggccatgcagctcccatcctctacgcggtctgggctgaagctggtttcctggccgaggcggagctgctgaacctgaggaagatcagctccgacttgtgggatggcctacaccggcaaatacttcgacaaggccagctaccgagtctattgcttgctgggagacggggagctgtcagagggctctgtatgggaggccatggccttcgccagcatctataagctggacaaccttgtggccattctagacatcaatcgcctgggccagagtgacccggccccactgcagcaccagatggacatctaccagaagcggtgcgaggccttcggttggcatgccatcatcgtggatggacacagcgtggaggagctgtgcaaggcctttggccaggccaagcaccagccaacagccatcattgccaagaccttcaagggccgagggatcacgggggtagaagataaggagtcttggcatgggaagcccctccccaaaaacatggctgagcagatcatccaggagatctacagccagatccagagcaaaaagaagatcctggcaacccctccacaggaggacgcaccctcagtggacattgccaacatccgcatgcccagcctgcccagctacaaagttggggacaagatagccacccgcaaggcctacgggcaggcactggccaagctgggccatgccagtgaccgcatcatcgccctggatggggacaccaaaaattccaccttctcggagatcttcaaaaaggagcacccggaccgcttcatcgagtgctacattgctgagcagaacatggtgagcatcgcggtgggctgtgccacccgcaacaggacggtgcccttctgcagcacttttgcagccttcttcacgcgggcctttgaccagattcgcatggccgccatctccgagagcaacatcaacctctgcggctcccactgcggcgtttccatcggggaagacgggccctcccagatggccctagaagatctggctatgtttcggtcagtccccacatcaactgtcttttacccaagtgatggcgttgctacagagaaggcagtggaactagccgccaatacaaagggtatctgcttcatccggaccagccgcccagaaaatgccatcatctataacaacaatgaggacttccaggtcggacaagccaaggtggtcctgaagagcaaggatgaccaggtgaccgttatcggggctggggtgaccctgcacgaggccttggccgctgccgaactgctgaagaaagaaaagatcaacatccgcgtgctggaccccttcaccatcaagcccctggacagaaaactcattctcgacagcgctcgtgccaccaagggcaggatcctcaccgtggaggaccattattatgaaggtggcattggtgaggctgtgtccagtgcagtagtgggcgagcctggcatcactgtcacccacctggcagttaaccgggtaccaagaagtgggaagccggctgagctgctgaagatgtttggtatcgacagggatgccattgcacaagctgtgaggggcctcatcaccaaggcctagggcgggtatgaagtgtggggcgggggtctatacattcctgagattctgggaaaggtgctcaaagatgtactgagaggaggggtaaatatatgttttgagaaaaatgaattggccctg

SEQ ID NO: 2453 - protein, 489 aa, Homosapiens [sequence omitted]

SEQ ID NO: 2454 - DNA, 2109 bp, Homosapiens
cccgcccggcgacttaacgcgcccccgccccgcgcccggcctcggcagccgcctgtcgccgcgggagcagccgctatctctgtgtgtccgcgtgtgcgcccggtccccgcctgccgcaccatggagagctaccacaagcctgaccagcagaagctgcaggccttgaaggacacggccaaccgcctacgtatcagctccatccaggccaccactgcggcgggctctggccaccccacgtcatgctgcagcgccgcagagatcatggctgtcctctttttccacaccatgcgctacaagtcccaggacccccggaatccgcacaatgaccgctttgtgctctccaagggccatgcagctcccatcctctacgcggtctgggctgaagctggtttcctggccgaggcggagctgctgaacctgaggaagatcagctccgacttggacgggcacccggtcccgaaacaagctttcaccgacgtggccactggctccctgggccagggcctcggggccgcttgtgggatggcctacaccggcaaatacttcgacaaggccagctaccgagtctattgcttgctgggagacggggagctgtcagagggctctgtatgggaggccatggccttcgccagcatctataagctggacaaccttgtggccattctagacatcaatcgcctgggccagagtgacccggccccactgcagcaccagatggacatctaccagaagcggtgcgaggccttcggttggcatgccatcatcgtggatggacacagcgtggaggagctgtgcaaggcctttggccaggccaagcaccagccaacagccatcattgccaagaccttcaagggccgagggatcacgggggtagaagataaggagtcttggcatgggaagcccctccccaaaaacatggctgagcagatcatccaggagatctacagccagatccagagcaaaaagaagatcctggcaacccctccacaggaggacgcaccctcagtggacattgccaacatccgcatgcccagcctgcccagctacaaagttggggacaagatagccacccgcaaggcctacgggcaggcactggccaagctgggccatgccagtgaccgcatcatcgccctggatggggacaccaaaaattccaccttctcggagatcttcaaaaaggagcacccggaccgcttcatcgagtgctacattgctgagcagaacatggtgagcatcgcggtgggctgtgccacccgcaacaggacggtgcccttctgcagcacttttgcagccttcttcacgcgggcctttgaccagattcgcatggccgccatctccgagagcaacatcaacctctgcggctcccactgcggcgtttccatcggggaagacgggccctcccagatggccctagaagatctggctatgtttcggtcagtccccacatcaactgtcttttacccaagtgatggcgttgctacagagaaggcagtggaactagccgccaatacaaagggtatctgcttcatccggaccagccgcccagaaaatgccatcatctataacaacaatgaggacttccaggtcggacaagccaaggtggtcctgaagagcaaggatgaccaggtgaccgttatcggggctggggtgaccctgcacgaggccttggccgctgccgaactgctgaagaaagaaaagatcaacatccgcgtgctggaccccttcaccatcaagcccctggacagaaaactcattctcgacagcgctcgtgccaccaagggcaggatcctcaccgtggaggaccattattatgaaggtggcattggtgaggctgtgtccagtgcagtagtgggcgagcctggcatcactgtcacccacctggcagttaaccgggtaccaagaagtgggaagccggctgagctgctgaagatgtttggtatcgacagggatgccattgcacaagctgtgaggggcctcatcaccaaggcctagggcgggtatgaagtgtggggcgggggtctatacattcctgagattctgggaaaggtgctcaaagatgtactgagaggaggggtaaatatatgttttgagaaaaatgaattggccctg

SEQ ID NO: 2455 - protein, 623 aa, Homosapiens; identical to SEQ ID NO: 273

SEQ ID NO: 2456 - DNA, 7290 bp, Homosapiens
tcccactggcccacccagccagtcccaaggcctcctccaacctctggttcacagcggggtctgtcccctgcagcaggtggctcaagcctattcacccacccttcctcactttcctctcattccaacaacccccatttttctagatcttattagccagatccctgttgtcctagacctctgtttcttaacaaccagtacttcttcctgagctcctgacgtcttccttcatgccattttctcttggggtgtggcttgtggtaggctgcaggaacctggtgacactgttgcccctcgagtgtaaatgccatctgttctgcatatccatgcgtggctgctcctttacccagaatgcaggctccttggatgggtgggggggtgggagccagctgggtccaggtgagagggactggcctgattcactctctgtccacagctaccgagtctattgcttgctgggagacggggagctgtcagagggctctgtatgggaggccatggccttcgccagcatctataagctggacaaccttgtggccattctagacatcaatcgcctgggccagagtgacccggccccactgcagcaccagatggacatctaccagaagcggtgcgaggccttcgggtatgtacgaggctgtggcctgagtgtggtcacagcacgggagagtggtctgtgatcacagctttgcaggtgcaggtgcaggagctgaagctgggaccttaagcaccatctaaaggtccctttctttagcatttgactcacaatttcaaactctaggcatttggacttaatggctcaggatatgtgggccaggcccagttttaagtgagtttccttgttttcgtggttgtggcatggtggctctcggagcttccacacaccatctcacgtcagctcgctttgttcttgaggaaggagggttcttgagggatgggggcttgctcggtaaagctaaaggatgtatagctgcggagaggtttgaacctcagtttggtggccacgtcctgtgcccagccccgcccagcctggggaggaggaacaggctcctggtgaaatgggagatagggtttccagatgccccccttcggccttgattggttacaaattcagggtcaaagggcacaaagcagggaggtcaatctgcatgggtgtcagccagaggggctccacctcaaagcctccaccggtgttgccaaacacaagctgctctgcacaggggcccagcattggctgaggaggctgtggaggggagggagcagggcaggtgccgtgcaaggctttgagactcaggtcaggcctccaggactgcgttttgcggatgaacccatgcctgtgactacactaagtaacaggatgcttggggttaccttgcagtagcacagcatacgcaggcctgtgttccctgatgactgacctcagaaagggagaggaggaagggaggaaataatctctgttggacaggcgaggaaactgagccacagggtcctcaccccacaggcctccccaaggccacatctatctggggactcagagtacaaccccagcagcacccccaggacctgtgtccataacctcgtgactcaagccagattcctgaagtcctggctccaccgctaacttgctttgtggcgtgggtcacgttacttactccaccttcggtgtctcagttgatttgtctgtacaatggggccagctcagcacccaagcatggcgtggtgaggcttcagtgggctaatatgggtagtggttggcatggcactcagtttgagaagtgctatttttattcttatgtcaaaaagagtccccaaaaggatagcttttcaagagaaagggtgctctgccccagctccttcctgtatatttgactccatggttcatttcaaaaacatttccagcaccacatccagcatctgtggagtgatcaaatgtgttccccaaataagaattgggccaaaaaattcatcaagaatctaatagcagacagattccaaacccagtgcgctgaccccagaacagctttcagtaggaaatgagcagatcaggaatgaaagagacaataaaggaactgagctctggattacttaagaggaggaggaaaacctgttcagaggcaaacaaaaggaagtaaaataatgtgaaaaagaaaaggatttaaaaaacccaaactggaaacaggaatgttgcaagctttctactactccagctgaggccgcagttgtggggtggagcctgggcagaccccagctgccaaggcagacctttccctggaaggctcctcggtgttgtggcccctgggaattgccccttactctctgccccctgtccccagttggcatgccatcatcgtggatggacacagcgtggaggagctgtgcaaggcctttggccaggccaagcaccagccaacagccatcattgccaagaccttcaagggccgagggatcacgggtcagtatgcacaagccgccctccccaccttcacccctcgcccagacactgtggctacgtagctctgacccgcacatccagggaaacagcccttgctgctcactgagctcaccaggctccagggaaggggagcgggagatgctgtgactcagtgacccctgtggctgagccaggatttaaactcagatccgtctggcctctgccggtgggggcatgtacaggcaggaggagaggagggacttggagggtctgtgggtgagaggaaggtcgtggagtgaggcagcccccgtgccccaccctggctggtgcctttcagagctgcagctgtgtgtgctctgccagctccggccacctgctccagctgaagggccgacacagagccaggcagggcccggagagaactgttccctccaggaggtgagtggggtactcctcaagcaatggcagatgctgagcaaggcctgtgtgggccaagagccttggggggtttggaacctgggttctgccccaggccggagaatgaggcaggcgtaagtcactccctggcacccaggtgtgggcttcagattcctaggcctgggatggcctcacccattttaaagatgggaaaatgagactacaagtggtcagggacttgcccggggacagaggaagtctatggcacgaggggggctgatcccagggcctgggtcggcttccctgccaaatgcccctggctgcccacctgcctgctctcaggggttgtggcttgttctgcccatgtagactcaggtatatgaggatgttctgagtgggggtttggcagtgctgggaggtgtctgggagggggtggatgtcgaggaaagggctctgggatattgtcatggctttggtgctgctgcctggcactgccctctggtgttaaaaatgggcaggatctggaccacttgcagcttcttgggggctcctgctagtctttcgggctgctgggtgctacctgggagttcagtctgttcttggctctggccagactctagtgactactgaggtgacctccagggagagggatattcagccttcctggccgcacacaacaaggtgccatggggtgggcatgcctaggtgcttatagactcctctgctgctcacagatgcattgggtgaccctggaagccctgttctgggccttgggttccccttctgatggccagggtcccttccaacccagtcgacaaactgagtatttctgcagcagacacctctacctgtgtgtgaccctgcaggcggggttgtggggaggaagagaatggacacattggtgaagggatggggcagtgggcccagaaacacacacctgcccacgtctggcccctcctttcccactcagctgtgagctcccaaaggaccaggcagtagacagtgagtggtgggcacgtaggagtccatcctattcactgcgaccctcctttcctggcccccgtgcctggctgggctctgcctgtctgggatgatgccattcctcccttgccctcggcaggtagagggccagtctcctggagcagcctcctggccctctgggagcttctgtcttacccattcctctgtcctcccgtgttgggtctgcaggggtagaagataaggagtcttggcatgggaagcccctccccaaaaacatggctgagcagatcatccaggagatctacagccagatccagagcaaaaagaagatcctggcaacccctccacaggaggacgcaccctcagtggacattgccaacatccgcatgcccagcctgcccagctacaaagttggggacaagatagccacccgcaaggcctacgggcaggcactggccaagctgggccatgccagtgaccgcatcatcgccctggatggggacaccaaaaattccaccttctcggagatcttcaaaaaggagcacccggaccgcttcatcgagtgctacattgctgagcagaacatggtgagcatcgcggtgggctgtgccacccgcaacaggacggtgcccttctgcagcacttttgcagccttcttcacgcgggcctttgaccagattcgcatggccgccatctccgagagcaacatcaacctctgcggctcccactgcggcgtttccatcggggaagacgggccctcccagatggccctagaagatctggctatgtttcggtcagtccccacatcaactgtcttttacccaagtgatggcgttgctacagagaaggcagtggaactagccgccaatacaaagggtatctgcttcatccggaccagccgcccagaaaatgccatcatctataacaacaatgaggacttccaggtcggacaagccaaggtggtcctgaagagcaaggatgaccaggtgaccgttatcggggctggggtgaccctgcacgaggccttggccgctgccgaactgctgaagaaaggtgaggagaaggggcctccaaagtcatcaactgagcggccactgcatgctaggtcttggggttctttctttcgttctttctgttctttcttgaagagctcacagctagagagaaagcatttcatttcattaaataatgatagcaattatagccatcctttgagcacttgttctgtctggcatgttgctaagtcctggggctgcagtgcccacagtccctaccctatgactctaaagtcgagacccccccagcatggtggccagatcagtggcctggagcctgccagctgggctggaatcactcagccaggcactagttaaggaagtaagttattcactgtcaccatgcctgttttcctatctgtaaaatggagatactagccccttgccctcagagctctcctgagggttacatgcatgtgacttggtattctattattattactgcgagctcacagtgttggctagtggtttgtaggggagacaggcattggcctctcctgcaatagaatcacacagcagatgtcatgttttagcacgaaagagggggcaggtgtggcatcttccagaaagtggcttcagagtgggtaggaattgattagcagagaggagagtgaagggaggccggaggagggtcaggcaggagcaagatggggctggaggagccagaggagtccatccccaggcagggggagacccaggggggtgagctttaagcagggcctggcaagcgtgggtttgtccttctgagaaggtgcctctgctgctggggccgcacgtgggcctctgatcactctgcgggctgcagctccccaacgtcaccacatcaagcctcaccttccatcaggccagacacctggggtgttttctctcgcattccctttgtcttcaaggttgtgggaggatgagggaaggcgctcagggcctgcacgctccgctctgggttcttggatactgcgggcaacacagctggaccagatgccccagtgcaaggggttggcaagcatgagctcagccatgggaacgaggtggcaagtggttctccctgggacagggacaggcccgcaggctgagctcttagctacacgcagccctcaggatgtcccaccaggcccccaccagggcagatagtggtgcccagccctcccctcagccacgccgtgtgctctccctcacagaaaagatcaacatccgcgtgctggaccccttcaccatcaagcccctggacagaaaactcattctcgacagcgctcgtgccaccaagggcaggatcctcaccgtggaggaccattattatgaaggtaaggaggcctggggcaggcaggctgggcaagggacagggccagagagccgagcgttggacgtgcctcttctatctgagccccaggagggcagctgtggcccagaacacccagagctgtccctcagagcagctgggacgtggtctcttaaaaggcctcaggcttggcctggggacctagctaactcacagctgctgatgagctctgtggagctcctgctgcccaggaagctggtgaggattccaacctcgctgctaaatggtggatggtggcgtccctgaggtagtgtagggtggaagctatggtgcagcttgggaagcaatgcagaatttctggtatttgtgagtccttcacacagcaggctccctaagtacacaccagcctctctaagtaggaggccccagtgggagagatgggctttgactctggggtcaaatgtagataattggactatggacagtggctggctggtcaccaacaatggtgtttgaaacaaacatttagaggccatatttgggcttataaaaatagttctgggccgtgcatggtggctcacacctgcaatcccagcactttgggaggctgaggacagcggatttcttgagctcaggagttgggagaccagcctgggcaacatggtgatacctgtctgtctctttaaaataaaaaaaatcaatgagttatgtgatgggctcatggctacaggtggagaaaggcagtgcatatgcagcctcctccatccttgactaaggctgacagagggctgggcccaccactgctcaccctgaggcctcgtcttctgactcccctcctttcatttctaggtggcattggtgaggctgtgtccagtgcagtagtgggcgagcctggcatcactgtcacccacctggcagttaaccgggtaccaagaagtgggaagccggctgagctgctgaagatgtttggtatcgacagggatgccattgcacaagctgtgaggggcctcatcaccaaggcctagggcgggtatgaagtgtggggcgggggtctatacattcctgagattctgggaaaggtgctcaaagatgtactgagaggaggggtaaatatatgttttgagaaaaatgaa

SEQ ID NO: 2457 - protein, 365 aa, Homosapiens
MAEQIIQEIYSQIQSKKKILATPPQEDAPSVDIANIRMPSLPSYKVGDKIATRKAYGQALAKLGHASDRIIALDGDTKNSTFSEIFKKEHPDRFIECYIAEQNMVSIAVGCATRNRTVPFCSTFAAFFTRAFDQIRMAAISESNINLCGSHCGVSIGEDGPSQMALEDLAMFRSVPTSTVFYPSDGVATEKAVELAANTKGICFIRTSRPENAIIYNNNEDFQVGQAKVVLKSKDDQVTVIGAGVTLHEALAAAELLKKGEEKGPPKSSTERPLHARSWGSFFRSFCSFLKSSQLERKHFISLNNDSNYSHPLSTCSVWHVAKSWGCSAHSPYPMTLKSRPPQHGGQISGLEPASWAGITQPGTS

SEQ ID NO: 2458 - DNA, 1208 bp, Homosapiens
cccgcccggcgacttaacgcgcccccgccccgcgcccggcctcggcagccgcctgtcgccgcgggagcagccgctatctctgtgtgtccgcgtgtgcgcccggtccccgcctgccgcaccatggagagctaccacaagcctgaccagcagaagctgcaggccttgaaggacacggccaaccgcctacgtatcagctccatccaggccaccactgcggcgggctctggccaccccacgtcatgctgcagcgccgcagagatcatggctgtcctctttttccacaccatgcgctacaagtcccaggacccccggaatccgcacaatgaccgctttgtgctctccaagggccatgcagctcccatcctctacgcggtctgggctgaagctggtttcctggccgaggcggagctgctgaacctgaggaagatcagctccgacttggacgggcacccggtcccgaaacaagctttcaccgacgtggccactggctccctgggccagggcctcggggccgcttgtgggatggcctacaccggcaaatacttcgacaaggccagctaccgagtctattgcttgctgggagacggggagctgtcagagggctctgtatgggaggccatggccttcgccagcatctataagctggacaaccttgtggccattctagacatcaatcgcctgggccagagtgacccggccccactgcagcaccagatggacatctaccagaagcggtgcgaggccttcggttggcatgccatcatcgtggatggacacagcgtggaggagctgtgcaaggcctttggccaggccaagcaccagccaacagccatcattgccaagaccttcaagggccgagggatcacgggggtagaagataaggagtcttggcatgggaagcccctccccaaaaacatggctgagcagatcatccaggagatctacagccagatccagagcaaaaagaagatcctggcaacccctccacaggaggacgcaccctcagtggacattgccaacatccgcatgcccagcctgcccagctacaaagttggggacaaggtacaaagtggggcctgtttctctgaacccatagttctcaggtttcccaagtctgtggcccagatacaccctctggagggctgggaaagggaggagagcgattcatttagggcgaggagtgatccctgaggtgttgttcctgtcac

SEQ ID NO: 2459 - protein, 356 aa, Homosapiens
MESYHKPDQQKLQALKDTANRLRISSIQATTAAGSGHPTSCCSAAEIMAVLFFHTMRYKSQDPRNPHNDRFVLSKGHAAPILYAVWAEAGFLAEAELLNLRKISSDLDGHPVPKQAFTDVATGSLGQGLGAACGMAYTGKYFDKASYRVYCLLGDGELSEGSVWEAMAFASIYKLDNLVAILDINRLGQSDPAPLQHQMDIYQKRCEAFGWHAIIVDGHSVEELCKAFGQAKHQPTAIIAKTFKGRGITGVEDKESWHGKPLPKNMAEQIIQEIYSQIQSKKKILATPPQEDAPSVDIANIRMPSLPSYKVGDKVQSGACFSEPIVLRFPKSVAQIHPLEGWEREESDSFRARSDP

SEQ ID NO: 2460 - DNA, 754 bp, Homosapiens
gacttaacgcgcccccgccccgcgcccggcctcggcagccgcctgtcgccgcgggagcagccgctatctctgtgtgtccgcgtgtgcgcccggtccccgcctgccgcaccatggagagctaccacaagcctgaccagcagaagctgcaggccttgaaggacacggccaaccgcctacgtatcagctccatccaggccaccactgcggcgggctctggccaccccacgtcatgctgcagcgccgcagagatcatggctgtcctctttttccacaccatgcgctacaagtcccaggacccccggaatccgcacaatgaccgctttgtgctctccaagggccatgcagctcccatcctctacgcggtctgggctgaagctggtttcctggccgaggcggagctgctgaacctgaggaagatcagctccgacttggacgggcacccggtcccgaaacaagctttcaccgacgtggccactggctccctgggccagggcctcggggccgcttgtgggatggcctacaccggcaaatacttcgacaaggccagatggagtctcgctctgtcacccaggctggagtgcagtggtacgatctcggcccactgcaacctccgcctcccgggttcaagtgattctcctcctgcctcagcctcccgagtagctgggactacagacatcaatcgcctgggccagagtgacccggccccactgcagcaccagatggacatctaccagaagcggtgcgaggccttcgg

SEQ ID NO: 2461 - protein, 213 aa, Homosapiens
MESYHKPDQQKLQALKDTANRLRISSIQATTAAGSGHPTSCCSAAEIMAVLFFHTMRYKSQDPRNPHNDRFVLSKGHAAPILYAVWAEAGFLAEAELLNLRKISSDLDGHPVPKQAFTDVATGSLGQGLGAACGMAYTGKYFDKARWSLALSPRLECSGTISAHCNLRLPGSSDSPPASASRVAGTTDINRLGQSDPAPLQHQMDIYQKRCEA

SEQ ID NO: 2462 - DNA, 1889 bp, Homosapiens
caggccagaatgaatccctagagaagccaggccaagcctggataattgcagctggatgaccctggcccgaaagtcacagttcagttgccttattcctagttcaggcttactatctagaacctcatgctagcttaggttgcatgtttacattgctgcagtgtctttactggaagcttagttggatcgaaatggacaccgagatggagatgcttctggctagatttcgcagaaccccaggagacctgcatttagaccactctgtccatttgtgtgcccacccccacccccagggtctaagtgtagactccaagaggagcagcccagagcttggaggagaggtgtgtctggggcaccactggtgggtggtgctgctcttctttttgttgtagttaatgcggtgtcttttaatggactctcaggcctcccagacagccttgttcctttaaggcagaagctcttcttcattgtgtacctcctgggattcatgaggtgtgagatttggcctgcttgactttgaattcaagtttttcaagtgactctcagtgtcagaagaagcatttcatgctgtccacatgtggtatgtccacagctcaccttcaaaggcttagatgtagccatcacagagagtggtattttattaagaacccaagtcccagcctgaccaacatggtgaaaccccatctctactaaaaatacaaaaattagccgggcgtggtggcacgcgcctatactcccagctacttaggaggctgaggcaggagaatcacttgaacccgggaggcagaggttgcagtgagccaagatcacaccactgcactctagcctgggcgacagtgagactccacctcaaaaaaaaaaaaaaaaaaaaaaaaaaaagtcacgctgggcccctctctacagggggacacacaggcttagtttagtatatgtctaaccagattttgcatgtcaagcatttgtccttttcctggcttatgttttcttgtagaaattatataaaccctatcaaatccactactaggtaaatttttaaaccatgcagctttattactctcctcccccaaagaatgtagtttgaaattttctcatttccatatgtaactctgagaggaatgagaggtggcacaggcacgagtgggctcagcccgtgtgagtgaggagaactgaggaatcctagggtgcgcatcctgcatcctggctgcacgtttgctgcagagtatgtttttctttcttgcctcccttcagttttcttcagttgcgttcagtgtatcttctggaaccaatagtgccctgtgttctcaagtctctaaaatgctaagatctgagcaaagtcaagcagcttacactaggcttttttacagctgtgcttgagaacatttccgagtggaccagggccttgaggagcctgtttttcagcaaattcaacagatgtgtgcagtgattccctccgttttgtatttgacaccttcatttaaaatgctaagatgcaatatcattcacttcaaagtggggaaaatgcagaattgtgtttcctttttatctgtgtgattccttaagaaacatgtttttaaaatatgtgttctaaatggttttttattctgtattactgctttggccatgtggctctcatgactttcattgtaccagattctcagctccctgaaacatggggacgagaagctctggaattacagcaagatttttgttccatgagcgcaatactgtatcattaacatttttaatggtatggattttatagcatctgtgtatgtttgcaaatattaagttattacatgttttaaaatgagcgtttttcatcttaaattttatatgtttgcaaatatatttttttaataaaatttcaaaaccaagttttagcacctactaaa

SEQ ID NO: 2463 - protein, 82 aa, Homosapiens [sequence omitted]

SEQ ID NO: 2464 - DNA, 2083 bp, Homosapiens
ggggactgacgcagatgggggaattttgcctcgatggcactttcctgtccgcgactccgcccccaccagaggggctaggctctgggattcaagatggaggcgctgagtcgagctgggcaggagatgagcctagcggccctgaagcaacacgacccctatatcaccagcatcgcagacctcacgggccaggtcgctctgtacaccttctgccccaaggccaaccagtgggagaagactgatatagaagggaccttattcgtatatcgaaggtcagcttccccttaccatggttttaccattgtgaatcgactaaatatgcacaatctagttgaaccagtgaataaagatttggaatttcagctccatgaaccatttcttctgtatagaaatgcaagcttgtcgatatatagtatctggttttatgacaagaatgactgtcaccgcatagcaaaactcatggctgatgtggtagaagaggagacacggcgatcccagcaagctgctcgggacaaacagagtcccagccaggccaatggctgcagcgaccacaggcccatcgacatcctggagatgctgagcagagccaaggatgagtatgagaggaatcagatgggtgactcaaatatctccagccctgggttacagccaagcactcagctctccaatctgggaagcaccgagactctagaagaaatgccctccgggtcacaggataagtctgctccatctggacacaagcatctgacggtagaagagttatttggaacctctttgccaaaggaacaaccagcagttgtgggtctggattcagaagaaatggagaggttgccaggagatgcctcccagaaagagcccaattcattcctaccatttccctttgagcagttaggaggagcccctcaatcagaaaccctgggtgtcccttctgctgcccaccattcagtccagcctgaaatcaccaccccggtgctaatcactccagcctccatcacacagtccaatgaaaagcatgctccaacctacacaatcccgttgagccctgttctcagtcccactctgccagctgaagctcctactgcacaggttccccccagcttacctcgaaacagcaccatgatgcaggcagtgaagaccacgcctagacagaggtctccactcctgaaccagccagtccctgagctaagccatgccagtctgattgccaaccagagccccttcagggccccattgaacgtgacgaacacagctggcacatccctcccaagcgttgatcttctccagaaactcaggttgaccccacagcatgaccaaatacagacacaaccacttgggaaaggtgcaatggtagccagcttttctccggcagctggtcagctagccacacctgagagcttcatagagcctccctctaagacagcagcagcaagagtggcggcctcagcctccctgagcaacatggtgcttgctccccttcagtctatgcagcagaaccaggatcctgaagtatttgtgcagcctaaggtgttatccagtgccagtgccatcccggttgcaggcgccccactggttactgcaacgaccactgcagtgtcttcagtcctgctggccccaagtgttttccagcagacagttacaagatcttcggaccttgagaggaaagccagctccccttctcctctaactattggaacgccagaaagtcagagaaagccttccattattctcagcaagtctcagctccaggatacattaatacatctaataaagaatgattccagcttcctcagtacacttcatgaagtctacttgcaggttctgaccaagaacaaagacaaccacaacctatgactggagcagaataagtctaaaggcagagccccagcctcagagacaaataggcttcatcatggaaacttctgagcagaacattgagtttgagaatcctgaaattgagcctatgagaaagagactcatttcttaagaatgttttccaagtgacattctcagtgataatggaggtttcactgtgaagcatcaccagcagatccttgttttgacaaaaaaaaaaaaaaaaaaaaaaaaa

SEQ ID NO: 2465 - protein, 584 aa, Homosapiens
MEALSRAGQEMSLAALKQHDPYITSIADLTGQVALYTFCPKANQWEKTDIEGTLFVYRRSASPYHGFTIVNRLNMHNLVEPVNKDLEFQLHEPFLLYRNASLSIYSIWFYDKNDCHRIAKLMADVVEEETRRSQQAARDKQSPSQANGCSDHRPIDILEMLSRAKDEYERNQMGDSNISSPGLQPSTQLSNLGSTETLEEMPSGSQDKSAPSGHKHLTVEELFGTSLPKEQPAVVGLDSEEMERLPGDASQKEPNSFLPFPFEQLGGAPQSETLGVPSAAHHSVQPEITTPVLITPASITQSNEKHAPTYTIPLSPVLSPTLPAEAPTAQVPPSLPRNSTMMQAVKTTPRQRSPLLNQPVPELSHASLIANQSPFRAPLNVTNTAGTSLPSVDLLQKLRLTPQHDQIQTQPLGKGAMVASFSPAAGQLATPESFIEPPSKTAAARVAASASLSNMVLAPLQSMQQNQDPEVFVQPKVLSSASAIPVAGAPLVTATTTAVSSVLLAPSVFQQTVTRSSDLERKASSPSPLTIGTPESQRKPSIILSKSQLQDTLIHLIKNDSSFLSTLHEVYLQVLTKNKDNHNL

SEQ ID NO: 2466 - DNA, 2274 bp, Homosapiens
agaacacattatttttaagttctgctggatgtgaagtaaaaggttgtcagcttagtgaaaagagttagctatggagcccagcacatcttagatgcctttcctaggccaggtcctctcccaccccgtcctggcagagtccattgctgtggcttctgtggatctcgaggcgtctgcatggatatcttccctgactgtgtgtgtagagggcacggtgggcccttactcggtatttgtgaatgggtgactgctaagagtgtggtagcctggcttctataagtaggaaatactgccctggaagagctgtgatgtcccaggtggcagagccactatcctgctatagtcctctcatttcccattgctctgagaacaaagcctcccaggcctgtgtcttctgtcccatttgtcctcccttgcttcattttttgttgtccctactctccatcacccactaaccttgcaatgcacacaggtttttttttagctccctaaagtcatttctgttttcctttgagcctttgtaccctccttgagtcttggagtttaaatgggaaccagcttctgactggtcttacatcttggagtttaaatgggagccagcacctgactggtcttggaaacgagcctcttttctatgtgtcttgtccttctgcatggtgatctatctcagcctgcttttgcaccaaaaataaataaataaaaggtaaatagctcagatgccaaaaaccataccgttgaaactgtggcccgctctgtgctctttgtaaatgaggaggtgacatataagagaaagaaatgcagatctctgttgattgtatcaaatctgacaaatactgaaaatactgattattactggtttaatgtattcagataattagctggaattagcctagaagcacatctaaatggaggagagaggtagatgttagctttattttaagaaattttctcattgctatctataatagtataaaaaaatagattgaacataactggatttttttttttttttggaagcagagtcttgctttgttgcccaggctggagtgcaatggtgcagtctcggctcactgcaacctccacctcctgggttcaagcgattctcatgccttagcctcctgagtctgggattacaggcacacgccaccatgcccagctaatttttgtatttttagtacagacggggtttcaccatgttggccaggctggtctcgaaccccacctcggcctcccagagtgctgggattataggcatgaaccactgcgcccagccaaaacatgcagatttttaaatgagtttttgacacatgtatgtaatatcccttgggcaacccaatcaatatgtaacattttgtcactccagaaagttccctcatgtcctcttcagtcatttccccaactctcctcccaaaaagcctttacattttaaatttatcataggatttttcttactgtgcattctatactgttacttctcttacctactgtggtggttggacttggcttcccgtaatgattctaggacattcttacataaatgggctggtcatcctttagctaatggaagtttataaccagatgtcagatgttcacatgttcctactgaatgtttacctgaactcaaaatagtctgtctctgtgctccactcttctgctgcttatgcctgtttccacatggtccctattctgggcctggctactggcttctgcacttcggtacaaaatgaccattgtcactctccaggttgcaggcgccccactggttactgcaacgaccactgcagtgtcttcagtcctgctggccccaagtgttttccagcagacagttacaagatcttcggaccttgagaggaaagccagctccccttctcctctaactattggaacgccagaaagtcagagaaagccttccattattctcagcaagtctcagctccaggatacattaatacatctaataaagaatgattccagcttcctcagtacacttcatgaagtctacttgcaggttctgaccaagaacaaagacaaccacaacctatgactggagcagaataagtctaaaggcagagccccagcctcagagacaaataggcttcatcatggaaacttctgagcagaacattgagtttgagaatcctgaaattgagcctatgagaaagagactcatttcttaagaatgttttccaagtgacattctcagtgataatggaggtttcactgtgaagcatcaccagcagatccttgttttgacaaaaaaaaaaaaaaaaaaaaaaa

SEQ ID NO: 2467 - protein, 127 aa, Homosapiens
MPVSTWSLFWAWLLASALRYKMTIVTLQVAGAPLVTATTTAVSSVLLAPSVFQQTVTRSSDLERKASSPSPLTIGTPESQRKPSIILSKSQLQDTLIHLIKNDSSFLSTLHEVYLQVLTKNKDNHNL

SEQ ID NO: 2468 - DNA, 2188 bp, Homosapiens
agtatgtataaagtgcttagaagagggcctggaacataggacatggatgaagctggaaaccatcattctcagcagactaacacaggaacagaaaaccaaacaccagtgttccagatttgcattaagctgtcacccggtggctgtgtaactagctgcttttgtgactgttacagccgcaaaagccttaacagacctgcagttacagactcagggaaaagcttgtactgttgtttgtggatcgcagggaagccagagttgcagctgactttctgtccacgagatggcggtagaggagcacagaaaaaagaaaccatcttgggctgttaatcatgttgactgttgagaagctaagagggaagccgatctgtcattagggtgaaaaaaaaagtcactgtaacaggagtcaagaaggggcttagaacctagtcatgtgaatattttcaagtttttcttgccttgtgttttttcatcaaatgaggttcagtgaattcgggactcagtaactccattagtgactgcacccacatagacctttttctaaaagtctccacatttgtccagttgtttcctccttggtccaatgccaacgctccgtcaatgctattgccacccccattctgcctcttccaaaagcctgcatcagtcatggagtcctcttcacctgaaataagcacttagtataaaccgatgcaactggttttgtgctggaagacaagcttagcaacgacatttcaaaaagagcagctcttctctcatttgaagccttgactcttttctgaaaaagtttggtaaggtcaggcatttgaacactcagtcacatgcggcagaacctagcacatggaggacagctgactccacagaaccagggatttgggttttgcaatggaacaaatatggttgctgctgcttctaacaattagagtgcttccggggtctgctcagttcaacggctacaactgtgatgccaacctccacagtagatttcctgctgaaagagacatcagtgtctattgtggagtgcaggctattacgatgaagattaatttttgcacggtacttttctcgggttattcggaaacagatctggcactgaatggaaggcatggggactcccactgcagagggttcatcaataacaacacctttccagcagtggtcatttttatcatcaatctcagcaccttggagggctgtggaaacaacctggtggtatccacaattcctggagtcagtgcttatggaaatgcaacttcagtgcaagtaggaaatatttcaggatatattgatactccagacccaccaacaatcatcagctatctacctgggcttctttacaaatttagttgtagttatccattggaatacctggttaataatacccagcttgcttcgtcctcagcggctatttctgtgagagagaacaatggcacatttgtcagcactttgaacctgctcctttataacgattcaacctacaaccagcagttaattatccccagtataggattacctttgaaaaccaaagtatttgcagctgtccaagccactaatttggatggcagatggaatgttttaatggattattgctatactaccccatcaggaaacccaaatgatgacattcgatatgatcttttccttagctgtgacaaggaccctcagaccaccgtcattgagaatggccgaagccagcggggccggttttcttttgaagtgttccgatttgtgaaacacaagaatcagaaaatgtccactgtcttcttgcactgcgttaccaagctctgcagagcagatgactgccccttccttatgccgatttgcagccacagagaaaggagagatgctgggaggaggacgacttggagcccccagagctcttctggcagcgcggtgctctctgctggtcccatcattactcggagtgatgagactccaaccaacaattcgcaacttggttctccaagtatgcctcccttccagctgaacgccatcaccagcgcactgatatcaggaatggtcattctgggagttacgagcttttctcttcttctgtgctcactggcccttctgcacaggaagggacccacaagtttagtgttgaatggcataagaaacccagtctttgactgactataacagattcctgctctctggagaaggcttcactgactaaactatgtgtgactgc

SEQ ID NO: 2469 - protein, 415 aa, Homosapiens
MEQIWLLLLLTIRVLPGSAQFNGYNCDANLHSRFPAERDISVYCGVQAITMKINFCTVLFSGYSETDLALNGRHGDSHCRGFINNNTFPAVVIFIINLSTLEGCGNNLVVSTIPGVSAYGNATSVQVGNISGYIDTPDPPTIISYLPGLLYKFSCSYPLEYLVNNTQLASSSAAISVRENNGTFVSTLNLLLYNDSTYNQQLIIPSIGLPLKTKVFAAVQATNLDGRWNVLMDYCYTTPSGNPNDDIRYDLFLSCDKDPQTTVIENGRSQRGRFSFEVFRFVKHKNQKMSTVFLHCVTKLCRADDCPFLMPICSHRERRDAGRRTTWSPQSSSGSAVLSAGPIITRSDETPTNNSQLGSPSMPPFQLNAITSALISGMVILGVTSFSLLLCSLALLHRKGPTSLVLNGIRNPVFD

SEQ ID NO: 2470 - DNA, 463 bp, Homosapiens
tgtaaatgcataatgtctccagaagctttcagctaaaataccaatgtgttattttggagagagaacacatgaactctgagcattcacaaattgcctaagcatgaaccagtttatcaagtcatttaagttgagagaaaggtcctcaaggaaggaattacaaaattgtgctttttatgggacgtcgtgagaaggctcagggaagttatgagggtaagattagtggaaggaagaaaaatctgaagacacttgggaaggcgtgcccaggagcaaggcaagggtcacagtcacattcacagaacctcattagggtggatccacaggacatacttcccactgctcgcagaagtattaccaccctttggaataatcaatcaatcaaaccaactcaacaatctttcttttaatgctagtggcacatattgacataaaaataaaattttgcttcctggtggaacatgaataa

SEQ ID NO: 2471 - protein, 76 aa, Homosapiens
MGRREKAQGSYEGKISGRKKNLKTLGKACPGARQGSQSHSQNLIRVDPQDILPTARRSITTLWNNQSIKPTQQSFF

SEQ ID NO: 2472 - DNA, 3619 bp, Homosapiens
taaagggtgttaacataatcccccaatcccatacaattcaatttcagaaaagtatttagggactgtgctaaaatagcatctccaagcttgctatggcaagatgatgctcaggttttccatgtgcaggggaaatgatgaaggttttgcaatggaacaaatatggttgctgctgcttctaacaattagagtgcttccggggtctgctcagttcaacggctacaactgtgatgccaacctccacagtagatttcctgctgaaagagacatcagtgtctattgtggagtgcaggctattacgatgaagattaatttttgcacggtacttttctcgggttattcggaaacagatctggcactgaatggaaggcatggggactcccactgcagagggttcatcaataacaacacctttccagcagtggtcatttttatcatcaatctcagcaccttggagggctgtggaaacaacctggtggtatccacaattcctggagtcagtgcttatggaaatgcaacttcagtgcaagtaggaaatatttcaggatatattgatactccagacccaccaacaatcatcagctatctacctgggcttctttacaaatttagttgtagttatccattggaatacctggttaataatacccagcttgcttcgtcctcagcggctatttctgtgagagagaacaatggcacatttgtcagcactttgaacctgctcctttataacgattcaacctacaaccagcagttaattatccccagtataggattacctttgaaaaccaaagtatttgcagctgtccaagccactaatttggatggcagatggaatgttttaatggattattgctatactaccccatcaggaaacccaaatgatgacattcgatatgatcttttccttagctgtgacaaggaccctcagaccaccgtcattgagaatggccgaagccagcggggccggttttcttttgaagtgttccgatttgtgaaacacaagaatcagaaaatgtccactgtcttcttgcactgcgttaccaagctctgcagagcagatgactgccccttccttatgccgatttgcagccacagagaaaggagagatgctgggaggaggacgacttggagcccccagagctcttctggcagcgcggtgctctctgctggtcccatcattactcggagtgatgagactccaaccaacaattcgcaacttggttctccaagtatgcctcccttccagctgaacgccatcaccagcgcactgatatcaggaatggtcattctgggagttacgagcttttctcttcttctgtgctcactggcccttctgcacaggaagggacccacaagtttagtgttgaatggcataagaaacccagtctttgactgactataacagattcctgctctctggagaaggcttcactgactaaactatgtgtgactgcagtcagtgttccgtctgaatttcatgtcagtccacattcaatatttgtaggtttgataaatttcacagtatagcttgtcagcataatgatagtgaaagaagtttattatattgctattgtcacttatgtacgtggcgagccgtatttttatgccaccagtgaatatattgacaataagtgaaaaatattcaggacttagggcttacaggatcagtaatatttcattttatttcagttttcttttgattgttggttaaaagataaaaggtgggagtagacaaaaaatgaaatgtgttgcatttcccccttaagcattaatggcatttagatttgcacacgtggtcctagaataaatgttgctttttgttttaatccggatattcccagcttcaggatgtgttttaataggactggccaatttggatacctgagatttaactactcattctatgacctcctgtgtttttggccgattttcatgtctgaccatattcattttaaaagaaactcttgggacatatctcttaacctggggcacccttttgtgtagaagatagtgaaaatagttgttagcttccaaggctactgctaagtggccctagatcattattcattagaataggaatggctgcgatcagttttcttcttctggttcaggtgagaacaccagcacatgttaactctcctcccaggtaaacagttcagctgctgttgcagctgtgcttccagcagtgaggtaactatgcaaagattatttttaattcaagaatcatcacatgtgaaaacaagctgtagttgtgaaaagagttcctagaagggtttttaacaatttagattccctttttcctaaaacaaaaaggaaacttaggttaagtgtagtttgcagaacattgttggaatctacataaaaagatattccttcccccatattttcgatgccaggcaataatcaggagagggtttctttttaaggtatcttcttgtaggtgtcataattgccatgaataaacaatattttcctctaacagtaaactgcaagaagcttctgatcctttatcagttttgcaaaaaagcaagctttaagcagcccatgttcttacaaaaaaaatcaacattctctttgtttaagctacctatgcactgaacaaacaaaacaatttaatagccaacaccaaaacccagcatgtgaagttactagaattgccatgttaactataagcaattgctgtaatcactaatttctattcaacatttgtgacccattagtccggacttaatttactatactgcatgcaaatcatcaagcaattgcttcaaaggaaatgtctacaatgtgagttaataattaaatcaatcctcaagttgaaaaacactttttctccaatttgcctgaatatttcaggaggaagtgtttatattataataattagctatataattgcatcaactttttatttcaaggtatagttgccaagtaaagtgggatctggaaagtctctggataatttctttacaaaaaaagtttaaatcacataaaaagccaatctactcttccctgtgttactttaaaataactttgaagtgactattctgagctttatctgtgttaacatgattaactgaccatactactaatgtgaccctgtatatacatggatagtattgaaatatgctggtaaatctatttcagatactttaagtgaattgccattgattctacgattaagttctgtgaataggacattatatcatttaagctgttttgtcaatttgatttttatgcttttggaacggctgctgtttcagctgttggccttttcaattctatactccattttatagaattgaataatggacacatgtcacttgggaagcaacgtaagtatcacattattttttgccaccctttcatcataaatggaagaatcagagttataatgagataaaccaggtctgttttttacaactttgttcttataaatctgcagttatatggagtatttagttatactgaattttacagttattatagtgtgaaaaaccttacaaaatatgtgcaaatgtttcttcagttttaatacctcaaactgttttttgcacttcaggggtaaggtctgatgacatgtaaaagatgatcgtttaataaaataattgtttaaaatgtt

SEQ ID NO: 2473 - protein, 431 aa, Homosapiens; identical to SEQ ID NO: 277

SEQ ID NO: 2474 - DNA, 515 bp, Homosapiens
aggcttttcagtcacagcaccctctgtgacaaacgtgtggagcaccgcacgacttcttcaaccagctggtttttctggcattcgaataaaagtaaaaatagaaaacaaagagggagaagaaaagtgacaagctgaaacctgcgaagagaaagaggacaagaaatgaacaagttgatctggtcttgagggaggaggaggcacaggaacacagtaaaggaacctatctgaggagctgcagacatgaaccaacaaagccagaagagcctgaagcaatactgcaagtgggtgctttggtactgctttgaagcatctttccagactctgcagtagccaaggcctgtgactccagtccctgagaaagtaccatcaggagcaatacgtaagcttttcagggacaaagaaccttgtcctcttaatctggattcacaattcacaattatacccctagcctgcccaacgcctttttctcagtctctgagaagtattgactctcttttacctaagagcaggagtct

SEQ ID NO: 2475 - protein, 67 aa, Homosapiens
KTKREKKSDKLKPAKRKRTRNEQVDLVLREEEAQEHSKGTYLRSCRHEPTKPEEPEAILQVGALVLL

SEQ ID NO: 2476 - DNA, 570 bp, Homosapiens
atgtccttaaagcaagttcttcgaacaagcttttgcacaaccgtcatcacagcatttataagcggcaaccccatcaatatggaagagagaaaagctagaagtgaaaattgcatcatccctcctatatcagacaagttaattagttggtccataatcacagactctgctccaaatgaaaagcacagctttgttccttttgaacagaaaggcacagaagagtcttcccagtttacagctatagccagaagtcttgaagtaaatgggaaccacctgagaaaatcagctgccagcaagccaaagttggaggcctctgccacaaacatactctgccagatcattagtcaggtcaagaagcatccaagcttgatgcccctctttgtatttattggagttggagatactggagcagcactgtatctcttgtttctggcattgttcaatccagatgttaattgggacagaaagaataactcagagccctggaacaaactggatcccaatgatcagtacaagttctactcagtgaatgtggattacagcaaactaaagaaagaaggtccagatttctaa

SEQ ID NO: 2477 - protein, 189 aa, Homosapiens
MSLKQVLRTSFCTTVITAFISGNPINMEERKARSENCIIPPISDKLISWSIITDSAPNEKHSFVPFEQKGTEESSQFTAIARSLEVNGNHLRKSAASKPKLEASATNILCQIISQVKKHPSLMPLFVFIGVGDTGAALYLLFLALFNPDVNWDRKNNSEPWNKLDPNDQYKFYSVNVDYSKLKKEGPDF

SEQ ID NO: 2478 - DNA, 458 bp, Homosapiens
ttatttaattctctaatgtatgggaagcagcgtagcatcgtccttgctgttgctatggtatttattgctgttgagccttcaggaaacctctctgcatctcggtttcctcatctataaaatggagatgataactgtacttacatcatggagctgctatgaggatcaaagaagttatcaacacttcagaatatggccagcacataggaacaatatatctatttgctaaatcgaaggataaaaagaaacctactttgtatggaaaaggagaaagaaaagagtaagattgaactatgctttgctgcatggtgggtttgatgaaagtggagtcacgctgattggtgctcaagataaatgtcttaggggaagactcatacccagtggaattttttttagtgaaatatcgtggctcatggactgtgagatttgtcatttgttttcaataaaatgataaaaatcat

SEQ ID NO: 2479 - protein, 41 aa, Homosapiens
MRIKEVINTSEYGQHIGTIYLFAKSKDKKKPTLYGKGERKE

SEQ ID NO: 2480 - DNA, 472 bp, Homosapiens
tctcctacagtatttatacatctgttcactattgttgccaggtattcttcaaaaagttctgcgcagtttctgagagaaagaggaaaatatgagtgacatacagaggttggaactcttacacattgctgatgagactgtagagtggcacaactctggaaaactcattggcagtttcttaccttatctcccggcaattccattcctaggtatttacctgagaaaagtaggagtgaggagaatgtgtcctcaaaaaacctgtgaaagaataatcacagcagccttacatataatagccaaaacctggaaacaacccaaatgcccacaaaaggagattagataaacaaattgtggtatattcatacaatagatactacccagaaataaaaaggtatgaactgcagctataaaaaacaacatgaatgaatttctaaaacactctgttgagaaaaataaatcagacacaaaaagtaca

SEQ ID NO: 2481 - protein, 83 aa, Homosapiens [sequence omitted]

SEQ ID NO: 2482 - DNA, 215 bp, Homosapiens
agcataacagatagcctagacactatggatggaagcttggaatatcatcggatagagtggcaccatcagaggaattcctgggaagtgaaggcatgagaatttgaacagaagagacaccctactacctgtacttcctacacaagacccagtgaccacaggctcccagagagaaaatatgatcccgtgaagaaagactccaagatttatctttccat

SEQ ID NO: 2483 - protein, 38 aa, Homosapiens
EFEQKRHPTTCTSYTRPSDHRLPERKYDPVKKDSKIYL

SEQ ID NO: 2484 - DNA, 544 bp, Homosapiens
gaaagaaaagaaaagagaaatgaaaaaaaaaataggaaaacaggtgaagacaatgaacaaatggctccacttttgtaaccaacagagattccagcatgatcacaaacaaaacatctgacaactcaaaaaagtatctccatgtgtttccacacatggaccaatttggactggaatgaaaagtgtgagctaccacaaacagttcctcttcaggtcatatatggtggtcaccccaacactatgctcttctgtaaaacattttacacttacagccttgtccagtttctctctccaacaacttgacttcctgtgctatagataattaaactagtatgttcctctggcaaaagggaaatgtgaagaggctatgtcaaactttccatactgaaatcacctcatcaaaattgcatgcacttagagatgttcaagattctcttggttcccgtcccggtttacctgggcatgatttgagccatctttgaaccacagaggaatgcttgagtgcaaaagatttctcaagacctattcagccatgcaattgcttgca

SEQ ID NO: 2485 - protein, 53 aa, Homosapiens
MCFHTWTNLDWNEKCELPQTVPLQVIYGGHPNTMLFCKTFYTYSLVQFLSPTT

SEQ ID NO: 2486 - DNA, 7757 bp, Homosapiens
atggagccaacagccaagggacggactgaggagagtttcagctacgtcatcagagcccccagcagtgaggggttcgacataatgaacgttgatgtgaagattgacacatcctggatattccaggacatggaagatagtgctgaggagcgggaatgtcttcaggaagaagcagctggccgcccagacatggatatgggtgcgctcaggaggcagctggagtcctccgagcagaagctgtcagcagcagaggacaagtacgtgacatcggagtccgggctgagaagcagaattcaggagctggagctgtcagaaaggaaactcctccggaaggtggaccagctgagcacccacgtggcccaggagagaagcgcctggctccaggcccaggagaagctggcggcgctgcagggggagctggccagccaggagcgcgtcctgcgggagcaggtgcagcggctggagcgcaacgtgcggcgcctctgccgcgccgcgggcctcctgctggcccagtgggacaccgcggccccaggctcccagggcgccaccgaggcggctgcggaactgcgcgccctgcaggcgagggcagagcgcagcgagcgcgagcgggaagaggcggcgcgcagcctgcaggagcaccgggccaccgagcgccagctccgcgggcagctggaggagctgcgctgctgcatctatgggctgaagctgtcagagattggcctgcagggccaggtggaggacctcgcccagcaaaaccagtgcctgcgagaggagctgggagcccaggcccctattggtcactgcagcctgagtccagagagcatcgcatgctgtgtgactgcccaaggctgccagtgcatcttcaaaggactgggagtgacccaggaggaccgagagccacacgcaggtcttcagcaccttgctctggacaacagtggtgactgtcaaaggatctccctccataagcaccccaccatggctgcccacggcctcaggatcaagttcaacctcctatccacggcattcaaggcccccggtgttctgctccttcaagctcagtcccccatatgccaccttagtcacactgagctgcaggtccctgagtgtgccaggctcttctgccttgatgctctgggctgtgttcagggtgactcactgcccctgcccagggaggaggccctggacccctgcagaagccaagactggcggaactccctgcggtccaatgatgcacccagacaaagggccccagcaggccagtccccagaggggccctgcacctggagccgcatcaggcctggacgggcctcttctgttttggctccaggcccggagaccacaagcgagctccccagagacctggccggatccaaccgtgaacagcttactctggcagagcccagcttggatgaacagattcttctcctggtctgtggctgcccaccagaggagtgcttggacgagtcactcctccgcatggacctggcctggatttcagagaatctagcagctgacccagctgcagaagcctttctcctggtgcagacatccgcactccctctctgggggccggctggggactccgcttcttggcgaccactgctgctccaggaggttccctcagatggacaaaaaatccaagaagagttggccaccaggtccccgcctcctcccaaagccacaggacacccaggctgggattgtcaccagacaagaggccgcggtgcctccctcttccacgaggccccctacatttcaaatcacccatttctgaaaaaacaccccaaggatctgaaagacacttggaacaatggaggaggaagccttgcggggagaactgaagaggggaaggcaagggggactttgggcaggaaggggaaaaaccttggtgacaagtaccagctaagtcaggaaagccatcagaacctgagcttggagaatggggctggagctgcagaggacgtgcaggatcagaatggggcttcagagactaaggccgccacctgccgccctgggtcctggcaggagtttttgatgcctcttctacagggggaggcctcagtatcaaaggagggtcccgaatccctgagcaggagggaaagggtggaaggatacgtctggggtctccgaggaggactgtcatcagagaatgaggaagtggcacccccagccaccttctccagggctcatgagaccaaagagccatggccaacagacagtcagctcctcgcagggaaagtcagagccactgggaggacagctaggggcaaggaggaaaaccaagtgtggcttggaaatgctctgcttctgcaaggaggaagcctggaggacaaagggctagaggaagaggatgagatgccgcatcaagaagcatccggtctggggtgcaggggtgcccccgaggagcctgactcccaggaacatgagagcaaggaaatgcttttctttgcaggagagacaggtttgccactgtttcccagatttgccttatcagttgaaggggccgaacccactgatcatggtcatccacaggctgtgagcaaaggacacaacaggtgtgcactcacaatcgatgagcttgcacaggacgtggaggcttgtttccagcagctgtccaccctgcagccgggcagcaggggctggcagtgctcagcctctgcatgtaggggagagaactggagctttgctcagaagtggcacagtggctgggagagagctcactctcagcaggtttggggaaattggggtatttgttctaatgaagaagcgaagtctaaagagagtggtgaaggtgataagccgggaaagaccacggccctgggcaccagcgaagttcctggtaacccagggacactgcctcattgggatgaagccagcccaaaccctccacaggggcctgctgagccctggggtgccctcgagagagtgaggagcaggtttcatcagctcatttctggattgaagaaacagagaagccagattttacatgacaacaccaaacttcacggagaccaagagaggttccatgaaagagtgtgcgcccttgaaagagagagagagagagaggtgacaaaaatatccaggctcgagcgggataaccacaggctggtaggggacatctctcagttaaagaaagaactggatcaatatttacaggcaatctctgaccttgaagactgcaatgggaagagttactgcaaaattttggagcttgaagaggaaaatgaaacactgaaagggaatctgggccaactccagaaagccacgtctgagagtgtcaggaaatccaaagacacgatggagcaagtcaccctggaaaactggaagctccagacactgatctcggagcttggcgtcagttataaagagctgataaaggatatcgtgctaggaatagaagacatgatccgggccttaagtggggagaacgagcaccttctacgcagggtccatgtcctggagagggaagtcaccttgcagaggagcacggatcaggggcgtttggtgaggggaagggagcacctccagggaaaagccaagatgcacgctctagacaaagaggtgcaggtgactccactcacaggacagctgctttcaagagcctgtgggccacccttggaggaggaaatgagtctggctgcagggcagacaggaccttccacaggcaccgggaattccagacgcggtgctgattctccccctccatcgctggtctggagaaacactggtgtagccaatgccctgcaaggaaatgtcagtggagcagaagtgaaagaagcacatttggagaaagaggagaagaggcccaggtgttctgtggctcaggggcaagctctgagctccctgagcaatggccccatgctccgggactcagaggccgaggttactgaggaggatcccaggctgcgggcccagcagctccatcaccgggtgctgaccctgcagtgccagctcagggaccagggcgctgcccaccaggcgtctctggacgaggccacccgcctccaggaggagctccaggccaagcttgaagaacttcagaaaaagcaacatgaagcaaagttggcagtgactcccctgaaggccaagatagcttccctcgtccggaagtgccgggagaggaaccgcctgatcacccacctgctgcaggagctgcacagacatgggctggggaacctcctgctctccgagctggcgcagaacatgctcaacgacgtggcactggctgagtacacggccaccttcctggctccgggagtcccagagacaagccaccacctggacgtcaagtctgagatgacggcagctttaagagctcagacatacctcttgaatcctgaaatggacagtgtcctccaaagctcattgtcttcagagtcctggcctattcccgagccggagtggccagcacagacagcccaactggattctctgaagctccctctgtccttggtgtccacgcttgatcctggaacgtgcctggcagcggtcactgtggaaccaggtctccccgcacaacgtctgcaagaaaaaggcggaatgccctgtcctgccctccaagtcgataacgtcccagcaccctctgagctcctgagcccagcaaggatcctggcttttcaccaagagcttagacaaagcatttgcagcaattcccaggtccataaatcaccgctggagttagaaatgtaatagggccactcattctccggagccatttcatagactccataaatatttgaagcagaaccttcagagagtgctttaagaaattggtagcaatcagagccctcatttagtggcaagtggttttgccttcggctttgggattttgtgttcattgtcagagcttgagagaaacgctggcctgtgcctggcaaattctgaggagtttggctttggcaatgtcaaggcagcataggaaatatttactgtaccaaaacctattgaatgattggtccagaggttctcaactgggcacagttttagccccccagggaaaatctggccatgtctggagacatttttggttgtcacagctgggacactgctactggcatctggtgggtagaggccagggatgctatgaaatgtcctacaatacccaggccagcctcctacagcaaagaattacagcccgagggtcgccagtgctgaggtcgagagtccaggacggatctcatagctcccaacaagatcagccatggagaattgttttgttttgttttttctctgcccccggggtccttcccatgttttaaaagattttttgtctactaagtgaaacgcctaagtcaccatatattttacatttaaaaacattaaaactaaccagaactttctaatcagtccatccactccaaaaacgtctgttgatatccactggatgccaggcaatgtggcatgaaggagaagagacaagtcaatgttgatcctggcgccggggacctcacaggacaatgggagagatactcctgtgagtaaatcagcacgcacgcaagtgtcacatgtgccctgagcaacgggatgaaggtaagggtccgttctacttggcttgggacaactggaagtcagccacaaaggaatggctgggcagtgtccggtgggtgaggtgggaagggtgctgctgtacgagggaacgcatgtgcaaaggccctgaggcataaaactgaactgtggatgtgcccctggaggggaagtgggcaaagcatgctcttgtcaagccagctgcaagcagtcactgcatcgttcccatccagcaccccttccttccaccgagaacagagactcgtgccccgaatcaggtgggcgacccaggagaagagcacttctatcctgagggcagccccccaaaaagagagtctagggggcttggacgacacacaccagaccctgacccaggctcacccaccagagatgtcacctctctctttgggaaggggctgaggaggggcttaagggaaaggccaaagccgctacctgtccaattctgtcctctcctggaagtgactgtcccttcatggaaggacaaacaaggacaaggacaaggaactgacggctccccaggaagtgtcaaagtgtatagatttattttaacgtagtttagctttttgtttgaaatgaaaattacacagagttcccgtagactcttccccgggcttcccttgatgttaacatctcatgtgacttatgttgtacaattatagaaactagtgggttttatttcgaggaaaattggggagccattgagacgtaagaaaggcagcctcagcacattgagttccaccctttaaattcgtttatggggttttctgatgggttagcacattcatccatgtattcctggattgatttacccacagatctgtctatttatttatttattcaatatgcatttagtgactgctgtgcgagtgtctggctggatgctgctggggaagaagtgaagatgatgctgtccacctaggttttcagggacccccctggagaccctgtggccccgttaccacccctcaagaatccccagattggaaaccactgcggtgatccctttgttggttcaaccaccccagggcttccctataatttccaagcaggaagtgacctgcagcactggtttggtgatccgccttctgcctccctctgtattttgggacaatgtcattagctttgagcatcaggaacatgacagagagaggacagaaacccggtgcagccgaggacagccagctgagcccttgctgagccagcgagatgcagcgtggtgccaccacatctggtctccaggagtcccaggagctcagacgtccgtcgtcttgtgacttcatgctcccctctgccgcgctcacgtgctgggcctgggcagaaaggcaacccaggaaatccattaaagcaagccaagacgacctttgcagcgtaacccaacgattccctaataaatcatgtttccaaggcagagccacttattctcccgggccatgaattgccgtctgggtctagcactttgggtcggctcaagctttgtgccgtggctccctggggcacagtacaggatggcggactcccctcgcctggtctgtagaccccagcatttggaagggcacatggtggctccttgccacccatcagatgctccaggggcaggacctgctctggcaacccagtagttcactttggtagaacctctgtggactccttagttcttccaggttgaatcctgggcagaaatcacatgaaagctgtgaagcacagacatcagtttagaaattgtgtactttcccgctgaatcccaaatgcacaataactgtacaccttgcggttgcatgaatctacaaggtctcctatgcgccctcattcataaactcaaggctgagaatgttggcaggccaagtcctgcccctccccggagtgagctgccttggttcacacgggagtggtccagcgacaggacccgacacctcccctccggaagctcttcagcaggacctgcctcgggtcctggggcagctatcctccggggcctgcctgcagtgaaaccatcagtccgtggagatgttcactggattcctgaccagttgtgggtcgggctcaaccctccctctgggttttcaggatttgtaatgatcgctccatttgtgtaaaataggccggcattttctcttgttactgagatgtatttttctatgtgagttaaatgtataatttgtgtaattttgtacattaaaatgtatgctttttcacaattaaagggtttttttcccttc

SEQ ID NO: 2487 - protein, 1561 aa, Homosapiens
MEPTAKGRTEESFSYVIRAPSSEGFDIMNVDVKIDTSWIFQDMEDSAEERECLQEEAAGRPDMDMGALRRQLESSEQKLSAAEDKYVTSESGLRSRIQELELSERKLLRKVDQLSTHVAQERSAWLQAQEKLAALQGELASQERVLREQVQRLERNVRRLCRAAGLLLAQWDTAAPGSQGATEAAAELRALQARAERSEREREEAARSLQEHRATERQLRGQLEELRCCIYGLKLSEIGLQGQVEDLAQQNQCLREELGAQAPIGHCSLSPESIACCVTAQGCQCIFKGLGVTQEDREPHAGLQHLALDNSGDCQRISLHKHPTMAAHGLRIKFNLLSTAFKAPGVLLLQAQSPICHLSHTELQVPECARLFCLDALGCVQGDSLPLPREEALDPCRSQDWRNSLRSNDAPRQRAPAGQSPEGPCTWSRIRPGRASSVLAPGPETTSELPRDLAGSNREQLTLAEPSLDEQILLLVCGCPPEECLDESLLRMDLAWISENLAADPAAEAFLLVQTSALPLWGPAGDSASWRPLLLQEVPSDGQKIQEELATRSPPPPKATGHPGWDCHQTRGRGASLFHEAPYISNHPFLKKHPKDLKDTWNNGGGSLAGRTEEGKARGTLGRKGKNLGDKYQLSQESHQNLSLENGAGAAEDVQDQNGASETKAATCRPGSWQEFLMPLLQGEASVSKEGPESLSRRERVEGYVWGLRGGLSSENEEVAPPATFSRAHETKEPWPTDSQLLAGKVRATGRTARGKEENQVWLGNALLLQGGSLEDKGLEEEDEMPHQEASGLGCRGAPEEPDSQEHESKEMLFFAGETGLPLFPRFALSVEGAEPTDHGHPQAVSKGHNRCALTIDELAQDVEACFQQLSTLQPGSRGWQCSASACRGENWSFAQKWHSGWERAHSQQVWGNWGICSNEEAKSKESGEGDKPGKTTALGTSEVPGNPGTLPHWDEASPNPPQGPAEPWGALERVRSRFHQLISGLKKQRSQILHDNTKLHGDQERFHERVCALEREREREVTKISRLERDNHRLVGDISQLKKELDQYLQAISDLEDCNGKSYCKILELEEENETLKGNLGQLQKATSESVRKSKDTMEQVTLENWKLQTLISELGVSYKELIKDIVLGIEDMIRALSGENEHLLRRVHVLEREVTLQRSTDQGRLVRGREHLQGKAKMHALDKEVQVTPLTGQLLSRACGPPLEEEMSLAAGQTGPSTGTGNSRRGADSPPPSLVWRNTGVANALQGNVSGAEVKEAHLEKEEKRPRCSVAQGQALSSLSNGPMLRDSEAEVTEEDPRLRAQQLHHRVLTLQCQLRDQGAAHQASLDEATRLQEELQAKLEELQKKQHEAKLAVTPLKAKIASLVRKCRERNRLITHLLQELHRHGLGNLLLSELAQNMLNDVALAEYTATFLAPGVPETSHHLDVKSEMTAALRAQTYLLNPEMDSVLQSSLSSESWPIPEPEWPAQTAQLDSLKLPLSLVSTLDPGTCLAAVTVEPGLPAQRLQEKGGMPCPALQVDNVPAPSELLSPARILAFHQELRQSICSNSQVHKSPLELEM

SEQ ID NO: 2488 - DNA, 1582 bp, Homosapiens
ttcagcaaacagggctgtgtacctgctgtgtcaggccccggacagggccctggggacgtagaggtggatgaaccgtggacactgtccttgagaagcccgctgcacagtaaggcttttagttagaagctgacaccgggggccaacctcagcccctggtctccgcagtctgcttgctttctctgagatggatgagatcaaagggaaagaccgtgtgattctggccttggagaaggaacttggcgtgcaggctgggcagacccagaagctgcttctgcagaaagaggctttggatgagcagctggttcaggtcaaggaggccgagcggcaccacagtagtccaaagagagagctcccgcccgggatcggggacatggtggagctcatgggcgtccaggatcaacatatggacgagcgagatgtgaggcgatttcaactaaaaattgctgaactgaattcagtgatacggaagctggaagacagaaatacgctgttggcagatgagaggaatgaactgctgaaacgctcacgagagaccgaggttcagctgaagcccctggtggagaagaacaagcggatgaacaagaagaatgaggatctgttgcagagtatccagaggatggaggagaaaatcaagaacctcacgcgggaaaacgtggaaatgaaagaaaagctgtcagcgcaggcgtctctgaagcggcatacctccttgaatgacctcagcctgacgagggatgagcaggagatcgagttcctgaggctgcaggtgctggagcagcagcacgtcattgacgacctctcactggagagagaacggctgttgcgctccaaaaggcatcgagggaaaagtctgaaaccgcccaagaagcatgttgtggagacattttttggatttgatgaggagtctgtggactcagaaacgttgtccgaaacatcctacaacacagacaggacagacaggaccccagccacgcccgaagaagacttggacgatgccacagcccgagaggaggctgacctgcgcttctgccagctgacccgggaactcgggagcagctacaagctgatctgctgaggtgtcaggccaaaatcgaagatttggagaagttactggttgagaagggacaggattccaagtgggttgaagagaagcagctgctcatcagaacaaaccaagacttgctggaaaagatttacagactggaaatggaagagaaccagctgaagaatgaaatgcaagacgccaaggatcagaacgagctgttagaattcagagtgctagaactcgaagtaagagactctatctgttgtaaactctcaaacggagcagacattctctttgaacccaaactgaaattcatgtaaagctctcagatgttttcaagcatgtgtaaaggggacatgttatagtttctttctttctttctttctttttttttttaaatctgtatgttcagaataatttcactgccttaatgtgttctggagagcgtgctcacccaagtctatggacatgtaccagagctaatatatttattgcctatggcttgttttgcacttaataaaataatttgtttttgcaata

SEQ ID NO: 2489 - protein, 295 aa, Homosapiens
MDEIKGKDRVILALEKELGVQAGQTQKLLLQKEALDEQLVQVKEAERHHSSPKRELPPGIGDMVELMGVQDQHMDERDVRRFQLKIAELNSVIRKLEDRNTLLADERNELLKRSRETEVQLKPLVEKNKRMNKKNEDLLQSIQRMEEKIKNLTRENVEMKEKLSAQASLKRHTSLNDLSLTRDEQEIEFLRLQVLEQQHVIDDLSLERERLLRSKRHRGKSLKPPKKHVVETFFGFDEESVDSETLSETSYNTDRTDRTPATPEEDLDDATAREEADLRFCQLTRELGSSYKLIC

SEQ ID NO: 2490 - DNA, 2370 bp, Homosapiens
gagtcaggagcctggactgacccgggtccctccacagcactggagggggtgggacacatcactacagggtttccttccatgaggactctgaggagttgacagtggaggcaaggagtgagctggatcccaagtgatggtggtttcctcggagggcgagctgagtcctgcgcgactggttagcacggtggagctggtagccacgcctgctggctggcgtgcgtgaacaggtgtggaccgcaggatctcagcactctgacccaaggggaagcatgtcgaagaaaggccggagcaagggcgagaagcccgagatggagacggacgcggtgcagatggccaacgaggagctgcgggccaagctgaccagcattcagatcgagttccagcaggaaaaaagcaaggtgggcaaactgcgcgagcggctgcaggaggcgaagctggagcgcgagcaggagcagcgacggcacacggcctacatttcggagctcaaggccaagctgcatgaggagaagaccaaggagctgcaggcgctgcgcgaggggctcatccggcagcacgagcaggaggcggcgcgcaccgccaagatcaaggagggcgagctgcagcggctgcaggccacgctgaacgtgctgcgcgacggcgcggccgacaaggtcaagacggcgctgctgaccgaggcgcgcgaggaggcgcgcagggccttcgatggagagcgcctgcggctgcagcaggagatcctggagctcaaggcagcgcgcaagcaggcagaggaggcgctcagtaactgcatgcaggctgacaagaccaaggcagccgacctgcgtgccgcctaccaggcgcaccaagacgaggtgcaccgcatcaagcgcgagtgcgagcgcgacatccgcaggctgatggatgagatcaaagggaaagaccgtgtgattctggccttggagaaggaacttggcgtgcaggctgggcagacccagaagctgcttctgcagaaagaggctttggatgagcagctggttcaggtcaaggaggccgagcggcaccacagtagtccaaagagagagctcccgcccgggatcggggacatggtggagctcatgggcgtccaggatcaacatatggacgagcgagatgtgaggcgatttcaactaaaaattgctgaactgaattcagtgatacggaagctggaagacagaaatacgctgttggcagatgagaggaatgaactgctgaaacgctcacgagagaccgaggttcagctgaagcccctggtggagaagaacaagcggatgaacaagaagaatgaggatctgttgcagagtatccagaggatggaggagaaaatcaagaacctcacgcgggaaaacgtggaaatgaaagaaaagctgtcagcgcaggcgtctctgaagcggcatacctccttgaatgacctcagcctgacgagggatgagcaggagatcgagttcctgaggctgcaggtgctggagcagcagcacgtcattgacgacctctcactggagagagaacggctgttgcgctccaaaaggcatcgagggaaaagtctgaaaccgcccaagaagcatgttgtggagacattttttggatttgatgaggagtctgtggactcagaaacgttgtccgaaacatcctacaacacagacaggacagacaggaccccagccacgcccgaagaagacttggacgatgccacagcccgagaggaggctgacctgcgcttctgccagctgacccgggagtaccaggccctgcaacgcgcctacgccctgctccaggagcaggtgggaggcacgctggacgctgagagggaggcccggactcgggagcagctacaagctgatctgctgaggtgtcaggccaaaatcgaagatttggagaagttactggttgagaagggacaggattccaagtgggttgaagagaagcagctgctcatcagaacaaaccaagacttgctggaaaagatttacagactggaaatggaagagaaccagctgaagaatgaaatgcaagacgccaaggatcagaacgagctgttagaattcagagtgctagaactcgaagtaagagactctatctgttgtaaactctcaaacggagcagacattctctttgaacccaaactgaaattcatgtaaagctctcagatgttttcaagcatgtgtaaaggggacatgttatagtttctttctttctttctttctttttttttttaaatctgtatgttcagaataatttcactgccttaatgtgttctggagagcgtgctcacccaagtctatggacatgtaccagagctaatatatttattgcctatggcttgttttgcacttaataaaataatttgtttttgcaata

SEQ ID NO: 2491 - protein, 626 aa, Homosapiens; identical to SEQ ID NO: 281

SEQ ID NO: 2492 - DNA, 2609 bp, Homosapiens
ggagctgcagccacccgcgtgcggcacgcgccggccgcctgcccggatcgcggccaccagtgccgcggcctctcgactcccgccccgccgagccgcgcgcgcgactgccatcctcctcaattgctttttacgattttttttgtgcatgcattcattttctgttccgttttgtcctttttaaggcggtggcggcggcgacagcggcgtaagctcgcagcggggagggggcggccggaggatgcggcgcggggctgcgctcgctacgtccgctgctgctgcccggctcgggcctgagcgccgagcaggatcccaagtgatggtggtttcctcggagggcgagctgagtcctgcgcgactggttagcacggtggagctggtagccacgcctgctggctggcgtgcgtgaacaggtgtggaccgcaggatctcagcactctgacccaaggggaagcatgtcgaagaaaggccggagcaagggcgagaagcccgagatggagacggacgcggtgcagatggccaacgaggagctgcgggccaagctgaccagcattcagatcgagttccagcaggaaaaaagcaaggtgggcaaactgcgcgagcggctgcaggaggcgaagctggagcgcgagcaggagcagcgacggcacacggcctacatttcggagctcaaggccaagctgcatgaggagaagaccaaggagctgcaggcgctgcgcgaggggctcatccggcagcacgagcaggaggcggcgcgcaccgccaagatcaaggagggcgagctgcagcggctgcaggccacgctgaacgtgctgcgcgacggcgcggccgacaaggtcaagacggcgctgctgaccgaggcgcgcgaggaggcgcgcagggccttcgatggagagcgcctgcggctgcagcaggagatcctggagctcaaggcagcgcgcaagcaggcagaggaggcgctcagtaactgcatgcaggctgacaagaccaaggcagccgacctgcgtgccgcctaccaggcgcaccaagacgaggtgcaccgcatcaagcgcgagtgcgagcgcgacatccgcaggctgatggatgagatcaaagggaaagaccgtgtgattctggccttggagaaggaacttggcgtgcaggctgggcagacccagaagctgcttctgcagaaagaggctttggatgagcagctggttcaggtcaaggaggccgagcggcaccacagtagtccaaagagagagctcccgcccgggatcggggacatggtggagctcatgggcgtccaggatcaacatatggacgagcgagatgtgaggcgatttcaactaaaaattgctgaactgaattcagtgatacggaagctggaagacagaaatacgctgttggcagatgagaggaatgaactgctgaaacgctcacgagagaccgaggttcagctgaagcccctggtggagaagaacaagcggatgaacaagaagaatgaggatctgttgcagagtatccagaggatggaggagaaaatcaagaacctcacgcgggaaaacgtggaaatgaaagaaaagctgtcagcgcaggcgtctctgaagcggcatacctccttgaatgacctcagcctgacgagggatgagcaggagatcgagttcctgaggctgcaggtgctggagcagcagcacgtcattgacgacctctcactggagagagaacggctgttgcgctccaaaaggcatcgagggaaaagtctgaaaccgcccaagaagcatgttgtggagacattttttggatttgatgaggagtctgtggactcagaaacgttgtccgaaacatcctacaacacagacaggacagacaggaccccagccacgcccgaagaagacttggacgatgccacagcccgagaggaggctgacctgcgcttctgccagctgacccgggagtaccaggccctgcaacgcgcctacgccctgctccaggagcaggtgggaggcacgctggacgctgagagggaggcccggactcgggagcagctacaagctgatctgctgaggtgtcaggccaaaatcgaagatttggagaagttactggttgagaagggacaggattccaagtgggttgaagagaagcagctgctcatcagaacaaaccaagacttgctggaaaagtgacttctcgctgctgccaggcgatgggtgctgctgtttcccttcttggacagaagatttacagactggaaatggaagagaaccagctgaagaatgaaatgcaagacgccaaggatcagaacgagctgttagaattcagagtgctagaactcgaagtaagagactctatctgttgtaaactctcaaacggagcagacattctctttgaacccaaactgaaattcatgtaaagctctcagatgttttcaagcatgtgtaaaggggacatgttatagtttctttctttctttctttctttttttttttaaatctgtatgttcagaataatttcactgccttaatgtgttctggagagcgtgctcacccaagtctatggacatgtaccagagctaatatatttattgcctatggcttgttttgcacttaataaaataatttgtttttgcaata

SEQ ID NO: 2493 - protein, 569 aa, Homosapiens
MSKKGRSKGEKPEMETDAVQMANEELRAKLTSIQIEFQQEKSKVGKLRERLQEAKLEREQEQRRHTAYISELKAKLHEEKTKELQALREGLIRQHEQEAARTAKIKEGELQRLQATLNVLRDGAADKVKTALLTEAREEARRAFDGERLRLQQEILELKAARKQAEEALSNCMQADKTKAADLRAAYQAHQDEVHRIKRECERDIRRLMDEIKGKDRVILALEKELGVQAGQTQKLLLQKEALDEQLVQVKEAERHHSSPKRELPPGIGDMVELMGVQDQHMDERDVRRFQLKIAELNSVIRKLEDRNTLLADERNELLKRSRETEVQLKPLVEKNKRMNKKNEDLLQSIQRMEEKIKNLTRENVEMKEKLSAQASLKRHTSLNDLSLTRDEQEIEFLRLQVLEQQHVIDDLSLERERLLRSKRHRGKSLKPPKKHVVETFFGFDEESVDSETLSETSYNTDRTDRTPATPEEDLDDATAREEADLRFCQLTREYQALQRAYALLQEQVGGTLDAEREARTREQLQADLLRCQAKIEDLEKLLVEKGQDSKWVEEKQLLIRTNQDLLEK

SEQ ID NO: 2494 - DNA, 2553 bp, Homosapiens
ggagctgcagccacccgcgtgcggcacgcgccggccgcctgcccggatcgcggccaccagtgccgcggcctctcgactcccgccccgccgagccgcgcgcgcgactgccatcctcctcaattgctttttacgattttttttgtgcatgcattcattttctgttccgttttgtcctttttaaggcggtggcggcggcgacagcggcgtaagctcgcagcggggagggggcggccggaggatgcggcgcggggctgcgctcgctacgtccgctgctgctgcccggctcgggcctgagcgccgagcaggatcccaagtgatggtggtttcctcggagggcgagctgagtcctgcgcgactggttagcacggtggagctggtagccacgcctgctggctggcgtgcgtgaacaggtgtggaccgcaggatctcagcactctgacccaaggggaagcatgtcgaagaaaggccggagcaagggcgagaagcccgagatggagacggacgcggtgcagatggccaacgaggagctgcgggccaagctgaccagcattcagatcgagttccagcaggaaaaaagcaaggtgggcaaactgcgcgagcggctgcaggaggcgaagctggagcgcgagcaggagcagcgacggcacacggcctacatttcggagctcaaggccaagctgcatgaggagaagaccaaggagctgcaggcgctgcgcgaggggctcatccggcagcacgagcaggaggcggcgcgcaccgccaagatcaaggagggcgagctgcagcggctgcaggccacgctgaacgtgctgcgcgacggcgcggccgacaaggtcaagacggcgctgctgaccgaggcgcgcgaggaggcgcgcagggccttcgatggagagcgcctgcggctgcagcaggagatcctggagctcaaggcagcgcgcaagcaggcagaggaggcgctcagtaactgcatgcaggctgacaagaccaaggcagccgacctgcgtgccgcctaccaggcgcaccaagacgaggtgcaccgcatcaagcgcgagtgcgagcgcgacatccgcaggctgatggatgagatcaaagggaaagaccgtgtgattctggccttggagaaggaacttggcgtgcaggctgggcagacccagaagctgcttctgcagaaagaggctttggatgagcagctggttcaggtcaaggaggccgagcggcaccacagtagtccaaagagagagctcccgcccgggatcggggacatggtggagctcatgggcgtccaggatcaacatatggacgagcgagatgtgaggcgatttcaactaaaaattgctgaactgaattcagtgatacggaagctggaagacagaaatacgctgttggcagatgagaggaatgaactgctgaaacgctcacgagagaccgaggttcagctgaagcccctggtggagaagaacaagcggatgaacaagaagaatgaggatctgttgcagagtatccagaggatggaggagaaaatcaagaacctcacgcgggaaaacgtggaaatgaaagaaaagctgtcagcgcaggcgtctctgaagcggcatacctccttgaatgacctcagcctgacgagggatgagcaggagatcgagttcctgaggctgcaggtgctggagcagcagcacgtcattgacgacctctcactggagagagaacggctgttgcgctccaaaaggcatcgagggaaaagtctgaaaccgcccaagaagcatgttgtggagacattttttggatttgatgaggagtctgtggactcagaaacgttgtccgaaacatcctacaacacagacaggacagacaggaccccagccacgcccgaagaagacttggacgatgccacagcccgagaggaggctgacctgcgcttctgccagctgacccgggagtaccaggccctgcaacgcgcctacgccctgctccaggagcaggtgggaggcacgctggacgctgagagggaggcccggactcgggagcagctacaagctgatctgctgaggtgtcaggccaaaatcgaagatttggagaagttactggttgagaagggacaggattccaagtgggttgaagagaagcagctgctcatcagaacaaaccaagacttgctggaaaagatttacagactggaaatggaagagaaccagctgaagaatgaaatgcaagacgccaaggatcagaacgagctgttagaattcagagtgctagaactcgaagtaagagactctatctgttgtaaactctcaaacggagcagacattctctttgaacccaaactgaaattcatgtaaagctctcagatgttttcaagcatgtgtaaaggggacatgttatagtttctttctttctttctttctttttttttttaaatctgtatgttcagaataatttcactgccttaatgtgttctggagagcgtgctcacccaagtctatggacatgtaccagagctaatatatttattgcctatggcttgttttgcacttaataaaataatttgtttttgcaata

SEQ ID NO: 2495 - protein, 626 aa, Homosapiens; identical to SEQ ID NO: 281

SEQ ID NO: 2496 - DNA, 3566 bp, Homosapiens
atggcagcagcttcatcttcatcagcatcatcattctcactggcatgtgctgccagatttgccaacaatgtccatagcttgacccaggatttttcctatgactctatcaacagtgggctgcgtaaggagcaagggcgtcaaatggtcctcagtgttcaggcccggaacaacgactctccatccataatgggggtgggccgtgcggacggcaccacgtggaacgagggctggcgaccattgctaatcccagagagggccacctgtggccagggctcccaagccctgtgtcccatcactgatgccaagaggtcacagctgccacccctgcagggccaccagaaggcaccacctatagcaagcatcagccacacctcacccctgcagagagataaaacagcagtaacaggaacctgcctgtggcggcccactgcccagaacccccacacccagggggtgccttgcccggcccctggccgtctcacccgggcgtcgggtccacttgcaaccttcagagctccttccacaccatcaggtttagttgaatctccagtaccaggcaaggtgccttgcccagagcagaatcaagtacaactggacaagagctggcacatgtgtggtcagatgctgggcgtggccccaccccatgccagccaggaaccattgatatttaaatgtggcctttggctaaatggtaagtgccaaggtacctccattgataatggggatggtgacttcgagcacaagctctttgaaagccttagaagacgtacaaccataaacattttgtttccatatgaaaaaggaatagacacccgcttcttaatccctgcctcggaggcagctcccacggcgctcaacggactcctgaccttcatgaacagaccacggggccggcagcacctgcatcagcgtctgtctggcttcctcttcaaaacccaacagactccatctgggccccagaaaactgccctgatgctacagatgccgggagctctcctgccgccgtgggagggggagctgagctgccggagcgtgcgcactgggccagcgggcggccggggcagggctggggtcccggcgctgagcgcccccagccgcgccgggcagcctggcgcctcgctgagtcggagcaacccccggcaggagctttcaggctctggtcaagcctcgggacccgggaagctatccctgccctcgggggctcgagcctggagtggggcttgcagaaaaggaaagggggctggcctaaaggcaagaagagaaaccccccgagggaccttgctgttccgtgttcctacgacagggtacatgatattcctgaatgagcagagaagtcagctgagggccacacaccccgatctgcctttcacagaaatcatgaagatgctggctgttcagtgggcccagctgtctcaggataaaaagggggagatgaactcaatgacctctactgcgggacctccaggcagctcttcagctccctgtgcaacaagaaggaacctgctgcaaaggcagcacctgcagcgcctctcaggtaaccagcctgggccaggcggctcagccgcaaacgctggccttgactccacctgcgccagaggtcaccaacaggcggcccacgtgacacctcttgttattaaaatgcaattttaagacagactctagtcaagcccacttaccaccaggtgggtgtttaggacagggtaggtcttccactatatctgttttcctcttagttcgccaggcccgcctgctctgggccacgcaggacacggacgtcagcttctcctggagcgctcgctcactttattccatctctacgagctcctcaagtatcccagagcatccccaggcctgtggccacctcgggtctggatgccgcattctctgacctgtggcacattctgggtgcccatgattatgatgaggttctgtgcccatgtggcctcagggctcttgagaccacccttcaaccaggtctttgctcacctgtctcctgcccagggacgccacccaggtcaccggtgcaaacctccagcccctgcccgtttctctccatgagtgcattgccacctcgcagcctcttccacttgctcattcctggtgttattgcctgtctcccactggaagagaaggccctcaagttcagcaactgttttgcctgttttgttcactgtggtgaaccccgggcctagaaccacgcctggcactcccagtaggtgctcaataagtatccaatgagtggacaaatgaatggatgtgttcaacaaatgaccctagagcgtgtattccttccagggacagagcgaggtactggggacacaggaaggacgaggcagagctccgcgctgacgaaaccaagggccaagcgtgcgagtgaatacgaacatcctggcgttaaaacgtcttgcattctagtgaaatgagacccattggacacagagaagccccaccacaattgcatctgtgtaaaatcgagagaaagatcgtgaaaacagccatggcaggggaatttaaaaaagatcctgccacgtactcatagcacctggagcctctggaggaagaggagggacaaatgaggtcaagtcagaggaggaagctgagggccccgagtcccttctgctcagatgtccgcatccagagaggagttctgcttctctcaacctgtgtttcttgcaagagtttatctataaattgctgaaaaatgggtaatcaagttcagcaactccctggcatctgtgatgacctatggtttgtaatcctagtcagaatcacctacatagaggatataatattaatcagaacaaaacagaaaagtcgctagaggaataacaatagtaaaatttacaatcagatgaagaataaagttttcaatgaggcacagttctaagcacttcatacaaataacctgtcttaattctcataaaagtactgcaaggcaggtgataatatcatctccttctaaagataaaatgcagcacagagaggttaagtaacttgtccaatgttgaacagctagtgagtggtcaatctgagatttaaatccaggctgtctgggtccaagaactctgttcttcactacttctcaacaacatcaactatgtaaaatgacacacatacataaacccacatcaatggtaatggtggtaatctctggccggcaagatgaaagaagatgttatgcaattcttcagtcctttctgtgtctgccacattttccccaatggatagatgtcacttaaattatcagaggaagaaacaaactctattaaaaggaatttcaagggccgggcaagatggatcacacctgtaatcccagcactttgggaggccgaggtgggcggatcacctgaggtcagcagttcgagaccagcctggccaacatggcgaaaccctgtctctactaaacatacaaaaaaattagccgggcgtggtggcacatgcctgtaatcccaactacttgggaggctgaggcaggagaatcacttgaatctgggaggtggaggttgcagtgagccaagatcgcaccactgcactcaagcctgggcgacagagcaaggcttcatctc

SEQ ID NO: 2497 - protein, 549 aa, Homosapiens
MAAASSSSASSFSLACAARFANNVHSLTQDFSYDSINSGLRKEQGRQMVLSVQARNNDSPSIMGVGRADGTTWNEGWRPLLIPERATCGQGSQALCPITDAKRSQLPPLQGHQKAPPIASISHTSPLQRDKTAVTGTCLWRPTAQNPHTQGVPCPAPGRLTRASGPLATFRAPSTPSGLVESPVPGKVPCPEQNQVQLDKSWHMCGQMLGVAPPHASQEPLIFKCGLWLNGKCQGTSIDNGDGDFEHKLFESLRRRTTINILFPYEKGIDTRFLIPASEAAPTALNGLLTFMNRPRGRQHLHQRLSGFLFKTQQTPSGPQKTALMLQMPGALLPPWEGELSCRSVRTGPAGGRGRAGVPALSAPSRAGQPGASLSRSNPRQELSGSGQASGPGKLSLPSGARAWSGACRKGKGAGLKARRETPRGTLLFRVPTTGYMIFLNEQRSQLRATHPDLPFTEIMKMLAVQWAQLSQDKKGEMNSMTSTAGPPGSSSAPCATRRNLLQRQHLQRLSGNQPGPGGSAANAGLDSTCARGHQQAAHVTPLVIKMQF

SEQ ID NO: 2498 - DNA, 4121 bp, Homosapiens
acaatggagtaggttggattcctaatccagtctgccttctatccttataaaagggggaaattggatacagagacacaagcaacgggagcatgccgtgtgaacatgaaggtagagatcaggtcgaggcatcagctagccaaggaaatgccaaagatgggagcaaacccccggaagccatgagagcggcctgggacagatccttccccagggcttcatagggagcgtggaccagctgacacctgatttcagacttctagcttacagaagatgtaattttctttttcaaaatgtcttctacgtggcaagttggctgcctcttcccagacatctcatcactattccagtcaagaaggggaagaacaaaaggcatacccacactaggtcagctccacttcaccgctttcctgaaaactctccccagagagctctgttttatctcattggctgggacggtgtctcatggccagccctggcttcagaggaggctgggagtattgttattattttttaagatggtgtcttgctctgttgtccagtttggagtgcaatggcgtgatcttggctcattgcaacctccgcctcccgggttcaagtgattctcctgcctcagcctctcaagtagctgggattacaggcccacaccaccacacccagctaatttttgtatttttagtagagatggagttttgccatgttggccaagctggtctcaaactgcagacctcaggtgatccacccaccttggcctcccaaaatgctggaattacaggtgtgagccaccacgcccggccaaggatgtttttttttaattgaaggtacattgctgcctgaaacaaagtcagggttccattagtgaggaaaagaagaagaatgacttttgaacaggcaactattggttagtagatccaggttttgtaaaacctggagccgctacagtcccccttaggaagaagaatttaaaaaccccagtacaagacttggtacaaaaatgaaaacttatttagaataataacaaatcacaacaaattttaaaatattttaagttgacaaatatcaaaaacgttgcgaaaacattataaaactaatataaaattgtattaattggatacctgatatccacctttataatatcttcttttttttacattttttgcttcttcgtcatttttgattacctctttggaagccaatgattttataatatttttcctgtggagaaaatagataattcagagtactcctataatgatgggaacaaattttaatgttggttggaaaactttgtcagcctcataactcattattggtaatctcaggtagttttttgagattgttttcaaatttggagaaaggtctatcattctttcataaatgaatgctaacacttggaagaattctatttcttccaggcttcttactgggattttattaattttcatgatgaaaagcaactgaacaattgcaaaccagaacatgactcgactaacacctcctaaacctcagtgctggcgcccatcacctggagaggcataggagaaatgcagatgcccaggctcctccacatcccactgaattgaagcctcagagtagcagggtctaggaatcagcattttactaaatgccccaggtgactcctgctgagcagtcctgggctatgcgacacccccagttgccttgtgactctgagggtctgcaaatccagacctctcctattggaagaatgacattttcaacccttatgtctcttcctctgcccatagactcctggtgccaggcaccatagcacacattgccagtgccatggcaaggagggcactcctgggagccattagcctgttcagggagcaacaactcgacccacacagactggctcagacctacataaacacaccccactaaacccaaaccaaggcatccccaactcaatcccccttcagctacatccccaaaatgcccttggcctccgcagcagctccgaagtgggaggaagcatgatgagggcggcatagggaaagagacagagggtattatgggttggattgtgtcctccagaacttgagtgctgaagccctaacccccaggagctcagaatgtgactgtatttggtgataggacctttaaagaggtcactgagcttaaatgaggtctttagggtgggacctaatgcaatatgcctggtgtccttataagaagagattaagacacagaaggaagcccctgtggagacacagtgagaagatggccatctgcaagccaaggagaggggacttggaggaaaccaacaccttggtctcagacttgaagcctcctgaactgtgaaaaataagtttctgttgttaaagctcttcagtctgtggaaccctgtcttggaaaccctggcagccagcttagccagttacagctaaaatatcttgcttttggaaagtatttccaaacacaaggccacatgaacccagagctctggctctcccaggccttggaagggtctgtacttagcttcacaaggaattcacccccgctgccaccacgtggtcactacataaccctcaggacgacctatggggcagggggtcaggtaccaccaagatctccctattagggacgagaggttggggcccaggggctcactcacagcaagcagcatggaagccacgagtcttccgaagccaaagctgctttccccgccccgtgtgccctgagcccacaagtggtagggaggaagtgccctgagccctggaagtggtagagaggcaggtttcagctccctataaagacaaacattctcatcagaggggctcctctctgggaagctgtgagcacccaacacctgtgatgggctggtcacttgcaaagatggtggaaagaaacttcagttcctgctgctcttgcagagtagagtgtggtcaccaccaccactgcagggctgggctgctgggattaaattccagctgtgtcaggtacccatggtgaccttaggcaagtaagtgaacctttagtttccttatctgtaagattaatcttttaatcataataactgcataggtttgggtggggattcagtgagtgaatatatgtgactctgggtttgtttcctgggctgccctaatacagtatcacagactgggaggcctgaaacaacagacatttattttctcacagttatgcctggccagagtccacagtcagggtgttggcagggctgtgcttcccctagaggctctaggagaggatccttcttggcctcttccagctcccggtggctccaggacttccttggcttgcggccgcatcactccagtctctgcctctgtattacacggcttcctcctctttgtgtgagtgtcttttataaggatgtcattggatggaggactcacccagataacccaggaggatctcttctcaagctccctaacttaatcatacctgcaaagactctttttccaaatgagttcccatatcacagtttccaggatgtggacatacctttagttattatgaattatatggttatttatctacagctgtgataattctaaaggaggaagagaagttggtaggagaccatgtaacatggagattggcttggtctgaggggcagagtcttccttgaggtggttagcttgagtattagctagctagaagaagaggaacagaaacaatgtcccagggccagtgaacagcagcatgaaggcccagagttaggatttgaccttccacttgaaagggagccactgggggctcttggggcagggcgagagtggcaggattaaaggaggcctgtgagcacgtgtggaagagcagcctgacctcaccagccccgtggaagatcccaccaagaccggtgcacatctactgtgctggcactctgcctaggcaccaggaacacagcagggaaacagctgtttgtgcccccaagggctcatgggccagtgggagagacagaagagtacctggatcattctgatggggtagccctgggctataaaagtgcagaggaaggggccaggtgcagtgtcgcatgtctataatcctagtgctttgggaggctgaggcagaaggatcccttcaaaccaggagttcaagccagcctgggcagcatagcaagaccttgtctctac

SEQ ID NO: 2499 - protein, 122 aa, Homosapiens
MPGQSPQSGCWQGCASPRGSRRGSFLASSSSRWLQDFLGLRPHHSSLCLCITRLPPLCVSVFYKDVIGWRTHPDNPGGSLLKLPNLIIPAKTLFPNEFPYHSFQDVDIPLVIMNYMVIYLQL

SEQ ID NO: 2500 - DNA, 1260 bp, Homosapiens
atgtgcaccaatgtctgtgtctgtcactcctctctgctcctcgacctcacccgcaatgctgaaggcccaggtttggctgtttcatccccaatgacccagaatggtggccctaggtcctctggcaccagggtccgggctctggaagagctcccagcccagaggggaagcagggagaatgccggataccgtggggagggggtaaagtgggagggcagggccggtagggaggaggtggtaactgcccggagggagagactggtctggaaagaaaagggtgcccttcctcctgcaaatggggctaacagccctgcaggccccgcggtcagagcagagaacagacacagtcaggatggaaaagaagccctcgcctttgctgacggcgcctccaacaaggtgtggggctcctctcttccatccgtaaacggctcgacctgccccgccggggggctgcgtgcaggaaatgcaatcgtgtgtgcagggcgcgcggcacagagcaggccttcgaggcgctgggaactgtcatccacctggctgggagaagggcgctggggctcctggactaggcggccttcgcgaagccagaaggagctgctttcctcccgcagacgccgcgtccacgatggcttcttgctctggagcccaccctgctttggctctgggcagccccgtcttcagcgaaaactacacctcccagcaggctttgcagcgcccgcctggcccctgggatgcgcgaggggtgccctgggactttctggaagctctagtcctgcctggagagcaggggcgatgcccgagtcgcgaggccccgtagggcgatggctgcaggcactgcggccgcgcacccgggggtctgcacggagagcaagcgcctcccgactgcgcagtccctgtgctttcgctgtgctgcgaggccaccgtagccagggctctgccccagacagctcccgtcctggaagctcctcccgcgctgcgcaggaagcccctctcccactgcgggcccacagcattctgcagctgcttcccaaagcagccaatgtcatgactgcaggaattgcatctgagtgtcaaggaagaaagaatgggggctgtgtttgtatggtgctgacggctggtcagaaacgcactagtggggccacatcaggtctgtttggcaaatgtcccccagaccatccaccatctaaggtgctgaaacctggctcagcacatgacccccagggaccctgctccaaggacaaagcctgcttgctggtggtgtcctga

SEQ ID NO: 2501 - protein, 419 aa, Homosapiens
MCTNVCVCHSSLLLDLTRNAEGPGLAVSSPMTQNGGPRSSGTRVRALEELPAQRGSRENAGYRGEGVKWEGRAGREEVVTARRERLVWKEKGALPPANGANSPAGPAVRAENRHSQDGKEALAFADGASNKVWGSSLPSVNGSTCPAGGLRAGNAIVCAGRAAQSRPSRRWELSSTWLGEGRWGSWTRRPSRSQKELLSSRRRRVHDGFLLWSPPCFGSGQPRLQRKLHLPAGFAAPAWPLGCARGALGLSGSSSPAWRAGAMPESRGPVGRWLQALRPRTRGSARRASASRLRSPCAFAVLRGHRSQGSAPDSSRPGSSSRAAQEAPLPLRAHSILQLLPKAANVMTAGIASECQGRKNGGCVCMVLTAGQKRTSGATSGLFGKCPPDHPPSKVLKPGSAHDPQGPCSKDKACLLVVS

SEQ ID NO: 2502 - DNA, 3808 bp, Homosapiens
ttgattctgggcactgaaagcagtacttggctgcagacactcgtttcaaacaggccccatttttccatctctgctgctgttattaggggagcccttagactctcttgcagcgccggaataggcgctcaagacgtgtgttaatattgcaacagcaaatataatgaatctgcagttggggacgctgaggccggagtggtggatgaaaggtggccggagccttttccacgggtccaaaccacctgttacaggagaaggcgagcggcctcgctaagcaactggacgttccgcgggcggggcgggggcggggccggggcccgagtccgctcggaaactttcgctgtgggcgagccggacccgccttctggcccctcgggcccaaccacgcagggggagtgccgggccgcagctaggcgaggcgcaccgtgattggcggagatgtggagtgattggcggctacaccggccactcagcaggccgagctggcgccgcatccggggggccgcgtctggagtggagggaggccgaaggccccgcccctgccccgccccctcgtgcagaaggccgcgctagccggctcttcagcagcgagtgcagattgctcccccgcggccgcagatctcccgtttgcgccgcgttcagctgctcccgaacaacttttctgccggcccagaggccccagggcgtcgcagcgccgcgtgcggcccactcacgggccggcaggatggactccaacactgctccgctgggcccctcctgcccacagcccccgccagcaccgcagccccaggcgcgttcccgactcaatgccacagcctcgttggagcaggagaggagcgaaaggccccgagcacccggaccccaggctggccctggccctggtgttagagacgcagcggcccccgctgaaccccaggcccagcataccaggagccgggaaagagcagacggcaccgggcctacaaagggagacatggaaatcccctttgaagaagtcctggagagggccaaggccggggaccccaaggcacagactgaggtggggaagcactacctgcagttggccggcgacacggatgaagaactcaacagctgcaccgctgtggactggctggtcctcgccgcgaagcagggccgtcgcgaggctgtgaagctgcttcgccggtgcttggcggacagaagaggcatcacgtccgagaacgaacgggaggtgaggcagctctcctccgagaccgacctggagagggccgtgcgcaaggcagccctggtcatgtactggaagctcaaccccaagaagaagaagcaggtggccgtggcggagctgctggagaatgtcggccaggtcaacgagcacgatggaggggcgcagccaggccccgtgcccaagtccctgcagaagcagaggcgcatgctggagcgcctggtcagcagcgagtccaagaactacatcgcgctggatgactttgtggagatcactaagaagtacgccaagggcgtcatccccagcagcctgttcctgcaggacgacgaagatgatgacgagctggcggggaagagccctgaggacctgccactgcgtctgaaggtggtcaagtaccccctgcacgccatcatggagatcaaggagtacctgattgacatggcctccagggcaggcatgcactggctgtccaccatcatccccacgcaccacatcaacgcgctcatcttcttcttcatcgtcagcaacctcaccatcgacttcttcgccttcttcatcccgctggtcatcttctacctgtccttcatctccatggtgatctgcaccctcaaggtgttccaggacagcaaggcctgggagaacttccgcaccctcaccgacctgctgctgcgcttcgagcccaacctggatgtggagcaggccgaggtcaacttcggctggaaccacctggagccctatgcccatttcctgctctctgtcttcttcgtcatcttctccttccccatcgccagcaaggactgcatcccctgctcggagctggctgtcatcaccggcttctttaccgtgaccagctacctgagcctgagcacccatgcagagccctacacgcgcagggccctggccaccgaggtcaccgccggcctgctatcgctgctgccctccatgcccttgaattggccctacctgaaggtccttggccagaccttcatcaccgtgcctgtcggccacctggtcgtcctcaacgtcagcgtcccgtgcctgctctatgtctacctgctctatctcttcttccgcatggcacagctgaggaatttcaagggcacctactgctaccttgtgccctacctggtgtgcttcatgtggtgtgagctctccgtggtcatcctgctggagtccaccggcctggggctgctccgcgcctccatcggctacttcctcttcctctttgccctccccatcctggtggccggcctggccctggtgggcgtgctgcagttcgcccggtggttcacgtctctggagctcaccaagatcgcagtcaccgtggcggtctgtagtgtgcccctgctgttgcgctggtggaccaaggccagcttctctgtggtggggatggtgaagtccctgacgcggagctccatggtcaagctcatcctggtgtggctcacggccatcgtgctgttctgctggttctatgtgtaccgctcagagggcatgaaggtctacaactccacactgacctggcagcagtatggtgcgctgtgcgggccacgcgcctggaaggagaccaacatggcgcgcacccagatcctctgcagccacctggagggccacagggtcacgtggaccggccgcttcaagtacgtccgcgtgactgacatcgacaacagcgccgagtctgccatcaacatgctcccgttcttcatcggcgactggatgcgctgcctctacggcgaggcctaccctgcctgcagccctggcaacacctccacggccgaggaggagctctgtcgccttaagctgctggccaagcacccctgccacatcaagaagttcgaccgctacaagtttgagattaccgtgggcatgccattcagcagcggcgctgacggctcgcgcagccgcgaggaggacgacgtcaccaaggacatcgtgctgcgggccagcagcgagttcaagagcgtgctgctcagcctgcgccagggcagcctcatcgagttcagcaccatcctggagggccgcctgggcagcaagtggcctgtcttcgagctcaaggccatcagctgcctcaactgcatggcccagctctcacccaccaggcggcacgtgaagatcgagcacgactggcgcagcaccgtgcatggcgccgtgaagttcgccttcgacttctttttcttcccattcctgtcggcggcctgaggatggtccgccacgaggagcttccagtgcatgttgccatgaggcctttccccagtgtggccccagcccgacaggcatgcaccagtgccgcctgtgcccacgtgtgcagactgtggctgcagagaccttgcgaccatgtgtagattgcgtggaccccgacaaagggaaggctgctgtgtagctctgtccactctgaataccaagtgtgttgggaattgcatgccatctccaccctgagcctgacctttctgagtgacatgggtgtgccaggctagactaggaggttccggtgtctggaaaagcactttacagatgagattccctctcctcccccaccttcaagcaccctgttccctctttctttcttttgtgttggatttgtttaaaaaccaaataagcatctgtgtaacctcc

SEQ ID NO: 2503 - protein, 890 aa, Homosapiens
MDSNTAPLGPSCPQPPPAPQPQARSRLNATASLEQERSERPRAPGPQAGPGPGVRDAAAPAEPQAQHTRSRERADGTGPTKGDMEIPFEEVLERAKAGDPKAQTEVGKHYLQLAGDTDEELNSCTAVDWLVLAAKQGRREAVKLLRRCLADRRGITSENEREVRQLSSETDLERAVRKAALVMYWKLNPKKKKQVAVAELLENVGQVNEHDGGAQPGPVPKSLQKQRRMLERLVSSESKNYIALDDFVEITKKYAKGVIPSSLFLQDDEDDDELAGKSPEDLPLRLKVVKYPLHAIMEIKEYLIDMASRAGMHWLSTIIPTHHINALIFFFIVSNLTIDFFAFFIPLVIFYLSFISMVICTLKVFQDSKAWENFRTLTDLLLRFEPNLDVEQAEVNFGWNHLEPYAHFLLSVFFVIFSFPIASKDCIPCSELAVITGFFTVTSYLSLSTHAEPYTRRALATEVTAGLLSLLPSMPLNWPYLKVLGQTFITVPVGHLVVLNVSVPCLLYVYLLYLFFRMAQLRNFKGTYCYLVPYLVCFMWCELSVVILLESTGLGLLRASIGYFLFLFALPILVAGLALVGVLQFARWFTSLELTKIAVTVAVCSVPLLLRWWTKASFSVVGMVKSLTRSSMVKLILVWLTAIVLFCWFYVYRSEGMKVYNSTLTWQQYGALCGPRAWKETNMARTQILCSHLEGHRVTWTGRFKYVRVTDIDNSAESAINMLPFFIGDWMRCLYGEAYPACSPGNTSTAEEELCRLKLLAKHPCHIKKFDRYKFEITVGMPFSSGADGSRSREEDDVTKDIVLRASSEFKSVLLSLRQGSLIEFSTILEGRLGSKWPVFELKAISCLNCMAQLSPTRRHVKIEHDWRSTVHGAVKFAFDFFFFPFLSAA

SEQ ID NO: 2504 - DNA, 4192 bp, Homosapiens
ttgattctgggcactgaaagcagtacttggctgcagacactcgtttcaaacaggccccatttttccatctctgctgctgttattaggggagcccttagactctcttgcagcgccggaataggcgctcaagacgtgtgttaatattgcaacagcaaatataatgaatctgcagttggggacgctgaggccggagtggtggatgaaaggtggccggagccttttccacgggtccaaaccacctgttacaggagaaggcgagcggcctcgctaagcaactggacgttccgcgggcggggcgggggcggggccggggcccgagtccgctcggaaactttcgctgtgggcgagccggacccgccttctggcccctcgggcccaaccacgcagggggagtgccgggccgcagctaggcgaggcgcaccgtgattggcggagatgtggagtgattggcggctacaccggccactcagcaggccgagctggcgccgcatccggggggccgcgtctggagtggagggaggccgaaggccccgcccctgccccgccccctcgtgcagaaggccgcgctagccggctcttcagcagcgagtgcagattgctcccccgcggccgcagatctcccgtttgcgccgcgttcagctgctcccgaacaacttttctgccggcccagaggccccagggcgtcgcagcgccgcgtgcggcccactcacgggccggcaggatggactccaacactgctccgctgggcccctcctgcccacagcccccgccagcaccgcagccccaggcgcgttcccgactcaatgccacagcctcgttggagcaggagaggagcgaaaggccccgagcacccggaccccaggctggccctggccctggtgttagagacgcagcggcccccgctgaaccccaggcccagcataccaggagccgggaaagagcagacggcaccgggcctacaaagggagacatggaaatcccctttgaagaagtcctggagagggccaaggccggggaccccaaggcacagactgaggtggggaagcactacctgcagttggccggcgacacggatgaagaactcaacagctgcaccgctgtggactggctggtcctcgccgcgaagcagggccgtcgcgaggctgtgaagctgcttcgccggtgcttggcggacagaagaggcatcacgtccgagaacgaacgggaggtgaggcagctctcctccgagaccgacctggagagggccgtgcgcaaggcagccctggtcatgtactggaagctcaaccccaagaagaagaagcaggtggccgtggcggagctgctggagaatgtcggccaggtcaacgagcacgatggaggggcgcagccaggccccgtgcccaagtccctgcagaagcagaggcgcatgctggagcgcctggtcagcagcgagtccaagaactacatcgcgctggatgactttgtggagatcactaagaagtacgccaagggcgtcatccccagcagcctgttcctgcaggacgacgaagatgatgacgagctggcggggaagagccctgaggacctgccactgcgtctgaaggtggtcaagtaccccctgcacgccatcatggagatcaaggagtacctgattgacatggcctccagggcaggcatgcactggctgtccaccatcatccccacgcaccacatcaacgcgctcatcttcttcttcatcgtcagcaacctcaccatcgacttcttcgccttcttcatcccgctggtcatcttctacctgtccttcatctccatggtgatctgcaccctcaaggtgttccaggacagcaaggcctgggagaacttccgcaccctcaccgacctgctgctgcgcttcgagcccaacctggatgtggagcaggccgaggtcaacttcggctggaaccacctggagccctatgcccatttcctgctctctgtcttcttcgtcatcttctccttccccatcgccagcaaggactgcatcccctgctcggagctggctgtcatcaccggcttctttaccgtgaccagctacctgagcctgagcacccatgcagagccctacacgcgcagggccctggccaccgaggtcaccgccggcctgctatcgctgctgccctccatgcccttgaattggccctacctgaaggtccttggccagaccttcatcaccgtgcctgtcggccacctggtcgtcctcaacgtcagcgtcccgtgcctgctctatgtctacctgctctatctcttcttccgcatggcacagctgaggaatttcaagggcacctactgctaccttgtgccctacctggtgtgcttcatgtggtgtgagctctccgtggtcatcctgctggagtccaccggcctggggctgctccgcgcctccatcggctacttcctcttcctctttgccctccccatcctggtggccggcctggccctggtgggcgtgctgcagttcgcccggtggttcacgtctctggagctcaccaagatcgcagtcaccgtggcggtctgtagtgtgcccctgctgttgcgctggtggaccaaggccagcttctctgtggtggggatggtgaagtccctgacgcggagctccatggtcaagctcatcctggtgtggctcacggccatcgtgctgttctgctggttctatgtgtaccgctcagagggcatgaaggtctacaactccacactgacctggcagcagtatggtgcgctgtgcgggccacgcgcctggaaggagaccaacatggcgcgcacccagatcctctgcagccacctggagggccacagggtcacgtggaccggccgcttcaagtacgtccgcgtgactgacatcgacaacagcgccgagtctgccatcaacatgctcccgttcttcatcggcgactggatgcgctgcctctacggcgaggcctaccctgcctgcagccctggcaacacctccacggccgaggaggagctctgtcgccttaagctgctggccaagcacccctgccacatcaagaagttcgaccgctacaagtttgagattaccgtgggcatgccattcagcagcggcgctgacggctcgcgcagccgcgaggaggacgacgtcaccaaggacatcgtgctgcgggccagcagcgagttcaagagcgtgctgctcagcctgcgccagggcagcctcatcgagttcagcaccatcctggagggccgcctgggcagcaagtggcctgtcttcgagctcaaggccatcagctgcctcaactgcatggcccagctctcacccaccaggcggcacgtgaagatcgagcacgactggcgcagcaccgtgcatggcgccgtgaagttcgccttcgacttctttttcttcccattcctgtcggcggcctgaggatggtccgccacgaggagcttccagtgcatgttgccatgaggcctttccccagtgtggccccagcccgacaggcatgcaccagtgccgcctgtgcccacgtgtgcagactgtggctgcagagaccttgcgaccatgtgtagattgcgtggaccccgacaaagggaaggctgctgtgtagctctgtccactctgaataccaagtgtgttgggaattgcatgccatctccaccctgagcctgacctttctgagtgacatgggtgtgccaggctagactaggaggttccggtgtctggaaaagcactttacagatgagattccctctcctcccccaccttcaagcaccctgttccctctttctttcttttgtgttggatttgtttaaaaaccaaataagcatctgtgtaacctccacagtagcatttcttatttgtttggtcactgctacaccttagcagctcttcccctttcctgggggatgtgcacggcagcttgagcctgtcacgtggtcaaggcccggccccatcagaggctgggggaggcggcacattggcagtgtgtcacactgagctgggcaccacaggctgcctcatgaccctcctgtccagcaggtagtgggtgaatgtgtgaaggtcttgcctgaatccatcaggacttgggaaacagagaaccctgtgggggcggctgtgggggaggtccctgccagtgtttagaagagcctgactgtgttcagtgccttggagcagaaagccagggtcctgagtggctgaaataaaagcctctggtggaacctgcag

SEQ ID NO: 2505 - protein, 890 aa, Homosapiens; identical to SEQ ID NO: 2503

SEQ ID NO: 2506 - DNA, 2109 bp, Homosapiens
gatctcccgtttgcgccgcgttcagctgctcccgaacaacttttctgccggcccagaggccccagggcgtcgcagcgccgcgtgcggcccactcacgggccggcaggatggactccaacactgctccgctgggcccctcctgcccacagcccccgccagcaccgcagccccaggcgcgttcccgactcaatgccacagcctcgttggagcaggagaggagcgaaaggccccgagcacccggaccccaggctggccctggccctggtgttagagacgcagcggcccccgctgaaccccaggcccagcataccaggactggctgtcatcaccggcttctttaccgtgaccagctacctgagcctgagcacccatgcagagccctacacgcgcagggccctggccaccgaggtcaccgccggcctgctatcgctgctgccctccatgcccttgaattggccctacctgaaggtccttggccagaccttcatcaccgtgcctgtcggccacctggtcgtcctcaacgtcagcgtcccgtgcctgctctatgtctacctgctctatctcttcttccgcatggcacagctgaggaatttcaagggcacctactgctaccttgtgccctacctggtgtgcttcatgtggtgtgagctctccgtggtcatcctgctggagtccaccggcctggggctgctccgcgcctccatcggctacttcctcttcctctttgccctccccatcctggtggccggcctggccctggtgggcgtgctgcagttcgcccggtggttcacgtctctggagctcaccaagatcgcagtcaccgtggcggtctgtagtgtgcccctgctgttgcgctggtggaccaaggccagcttctctgtggtggggatggtgaagtccctgacgcggagctccatggtcaagctcatcctggtgtggctcacggccatcgtgctgttctgctggttctatgtgtaccgctcagagggcatgaaggtctacaactccacactgacctggcagcagtatggtgcgctgtgcgggccacgcgcctggaaggagaccaacatggcgcgcacccagatcctctgcagccacctggagggccacagggtcacgtggaccggccgcttcaagtacgtccgcgtgactgacatcgacaacagcgccgagtctgccatcaacatgctcccgttcttcatcggcgactggatgcgctgcctctacggcgaggcctaccctgcctgcagccctggcaacacctccacggccgaggaggagctctgtcgccttaagctgctggccaagcacccctgccacatcaagaagttcgaccgctacaagtttgagattaccgtgggcatgccattcagcagcggcgctgacggctcgcgcagccgcgaggaggacgacgtcaccaaggacatcgtgctgcgggccagcagcgagttcaagagcgtgctgctcagcctgcgccagggcagcctcatcgagttcagcaccatcctggagggccgcctgggcagcaagtggcctgtcttcgagctcaaggccatcagctgcctcaactgcatggcccagctctcacccaccaggcggcacgtgaagatcgagcacgactggcgcagcaccgtgcatggcgccgtgaagttcgccttcgacttctttttcttcccattcctgtcggcggcctgaggatggtccgccacgaggagcttccagtgcatgttgccatgaggcctttccccagtgtggccccagcccgacaggcatgcaccagtgccgcctgtgcccacgtgtgcagactgtggctgcagagaccttgcgaccatgtgtagattgcgtggaccccgacaaagggaaggctgctgtgtagctctgtccactctgaataccaagtgtgttgggaattgcatgccatctccaccctgagcctgacctttctgagtgacatgggtgtgccaggctagactaggaggttccggtgtctggaaaagcactttacagatgagattccctctcctcccccaccttcaagcaccctgttccctctttctttcttttgtgttggatttgtttaaaaaccaaataagcatctgtgtaacctcc

SEQ ID NO: 2507 - protein, 501 aa, Homosapiens
MPQPRWSRRGAKGPEHPDPRLALALVLETQRPPLNPRPSIPGLAVITGFFTVTSYLSLSTHAEPYTRRALATEVTAGLLSLLPSMPLNWPYLKVLGQTFITVPVGHLVVLNVSVPCLLYVYLLYLFFRMAQLRNFKGTYCYLVPYLVCFMWCELSVVILLESTGLGLLRASIGYFLFLFALPILVAGLALVGVLQFARWFTSLELTKIAVTVAVCSVPLLLRWWTKASFSVVGMVKSLTRSSMVKLILVWLTAIVLFCWFYVYRSEGMKVYNSTLTWQQYGALCGPRAWKETNMARTQILCSHLEGHRVTWTGRFKYVRVTDIDNSAESAINMLPFFIGDWMRCLYGEAYPACSPGNTSTAEEELCRLKLLAKHPCHIKKFDRYKFEITVGMPFSSGADGSRSREEDDVTKDIVLRASSEFKSVLLSLRQGSLIEFSTILEGRLGSKWPVFELKAISCLNCMAQLSPTRRHVKIEHDWRSTVHGAVKFAFDFFFFPFLSAA

SEQ ID NO: 2508 - DNA, 2493 bp, Homosapiens
gatctcccgtttgcgccgcgttcagctgctcccgaacaacttttctgccggcccagaggccccagggcgtcgcagcgccgcgtgcggcccactcacgggccggcaggatggactccaacactgctccgctgggcccctcctgcccacagcccccgccagcaccgcagccccaggcgcgttcccgactcaatgccacagcctcgttggagcaggagaggagcgaaaggccccgagcacccggaccccaggctggccctggccctggtgttagagacgcagcggcccccgctgaaccccaggcccagcataccaggactggctgtcatcaccggcttctttaccgtgaccagctacctgagcctgagcacccatgcagagccctacacgcgcagggccctggccaccgaggtcaccgccggcctgctatcgctgctgccctccatgcccttgaattggccctacctgaaggtccttggccagaccttcatcaccgtgcctgtcggccacctggtcgtcctcaacgtcagcgtcccgtgcctgctctatgtctacctgctctatctcttcttccgcatggcacagctgaggaatttcaagggcacctactgctaccttgtgccctacctggtgtgcttcatgtggtgtgagctctccgtggtcatcctgctggagtccaccggcctggggctgctccgcgcctccatcggctacttcctcttcctctttgccctccccatcctggtggccggcctggccctggtgggcgtgctgcagttcgcccggtggttcacgtctctggagctcaccaagatcgcagtcaccgtggcggtctgtagtgtgcccctgctgttgcgctggtggaccaaggccagcttctctgtggtggggatggtgaagtccctgacgcggagctccatggtcaagctcatcctggtgtggctcacggccatcgtgctgttctgctggttctatgtgtaccgctcagagggcatgaaggtctacaactccacactgacctggcagcagtatggtgcgctgtgcgggccacgcgcctggaaggagaccaacatggcgcgcacccagatcctctgcagccacctggagggccacagggtcacgtggaccggccgcttcaagtacgtccgcgtgactgacatcgacaacagcgccgagtctgccatcaacatgctcccgttcttcatcggcgactggatgcgctgcctctacggcgaggcctaccctgcctgcagccctggcaacacctccacggccgaggaggagctctgtcgccttaagctgctggccaagcacccctgccacatcaagaagttcgaccgctacaagtttgagattaccgtgggcatgccattcagcagcggcgctgacggctcgcgcagccgcgaggaggacgacgtcaccaaggacatcgtgctgcgggccagcagcgagttcaagagcgtgctgctcagcctgcgccagggcagcctcatcgagttcagcaccatcctggagggccgcctgggcagcaagtggcctgtcttcgagctcaaggccatcagctgcctcaactgcatggcccagctctcacccaccaggcggcacgtgaagatcgagcacgactggcgcagcaccgtgcatggcgccgtgaagttcgccttcgacttctttttcttcccattcctgtcggcggcctgaggatggtccgccacgaggagcttccagtgcatgttgccatgaggcctttccccagtgtggccccagcccgacaggcatgcaccagtgccgcctgtgcccacgtgtgcagactgtggctgcagagaccttgcgaccatgtgtagattgcgtggaccccgacaaagggaaggctgctgtgtagctctgtccactctgaataccaagtgtgttgggaattgcatgccatctccaccctgagcctgacctttctgagtgacatgggtgtgccaggctagactaggaggttccggtgtctggaaaagcactttacagatgagattccctctcctcccccaccttcaagcaccctgttccctctttctttcttttgtgttggatttgtttaaaaaccaaataagcatctgtgtaacctccacagtagcatttcttatttgtttggtcactgctacaccttagcagctcttcccctttcctgggggatgtgcacggcagcttgagcctgtcacgtggtcaaggcccggccccatcagaggctgggggaggcggcacattggcagtgtgtcacactgagctgggcaccacaggctgcctcatgaccctcctgtccagcaggtagtgggtgaatgtgtgaaggtcttgcctgaatccatcaggacttgggaaacagagaaccctgtgggggcggctgtgggggaggtccctgccagtgtttagaagagcctgactgtgttcagtgccttggagcagaaagccagggtcctgagtggctgaaataaaagcctctggtggaacctgcag

SEQ ID NO: 2509 - protein, 501 aa, Homosapiens; identical to SEQ ID NO: 2507

SEQ ID NO: 2510 - DNA, 2645 bp, Homosapiens
gcagagagggacacttggggtgggggacagcacacccaggggccgggggccaggagtggaggctggcacttggcaaacctgcccccttcctcctcacccagcctggtcctcaaccctcaggccgcccagggaagggtttcctccacctgaacccactcagctcctttcttagcttggccccacgccaccgtccccagcccattgctctgtgtgagggtggcagtggggctgcagtgtggggcgcccatgctgttttctctcatgcttcagccaagaactacatcgcgctggatgactttgtggagatcactaagaagtacgccaagggcgtcatccccagcagcctgttcctgcaggacgacgaagatgatgacgagctggcggggaagagccctgaggacctgccactgcgtctgaaggtggtcaagtaccccctgcacgccatcatggagatcaaggagtacctgattgacatggcctccagggcaggcatgcactggctgtccaccatcatccccacgcaccacatcaacgcgctcatcttcttcttcatcgtcagcaacctcaccatcgacttcttcgccttcttcatcccgctggtcatcttctacctgtccttcatctccatggtgatctgcaccctcaaggtgttccaggacagcaaggcctgggagaacttccgcaccctcaccgacctgctgctgcgcttcgagcccaacctggatgtggagcaggccgaggtcaacttcggctggaaccacctggagccctatgcccatttcctgctctctgtcttcttcgtcatcttctccttccccatcgccagcaaggactgcatcccctgctcggagctggctgtcatcaccggcttctttaccgtgaccagctacctgagcctgagcacccatgcagagccctacacgcgcagggccctggccaccgaggtcaccgccggcctgctatcgctgctgccctccatgcccttgaattggccctacctgaaggtccttggccagaccttcatcaccgtgcctgtcggccacctggtcgtcctcaacgtcagcgtcccgtgcctgctctatgtctacctgctctatctcttcttccgcatggcacagctgaggaatttcaagggcacctactgctaccttgtgccctacctggtgtgcttcatgtggtgtgagctctccgtggtcatcctgctggagtccaccggcctggggctgctccgcgcctccatcggctacttcctcttcctctttgccctccccatcctggtggccggcctggccctggtgggcgtgctgcagttcgcccggtggttcacgtctctggagctcaccaagatcgcagtcaccgtggcggtctgtagtgtgcccctgctgttgcgctggtggaccaaggccagcttctctgtggtggggatggtgaagtccctgacgcggagctccatggtcaagctcatcctggtgtggctcacggccatcgtgctgttctgctggttctatgtgtaccgctcagagggcatgaaggtctacaactccacactgacctggcagcagtatggtgcgctgtgcgggccacgcgcctggaaggagaccaacatggcgcgcacccagatcctctgcagccacctggagggccacagggtcacgtggaccggccgcttcaagtacgtccgcgtgactgacatcgacaacagcgccgagtctgccatcaacatgctcccgttcttcatcggcgactggatgcgctgcctctacggcgaggcctaccctgcctgcagccctggcaacacctccacggccgaggaggagctctgtcgccttaagctgctggccaagcacccctgccacatcaagaagttcgaccgctacaagtttgagattaccgtgggcatgccattcagcagcggcgctgacggctcgcgcagccgcgaggaggacgacgtcaccaaggacatcgtgctgcgggccagcagcgagttcaagagcgtgctgctcagcctgcgccagggcagcctcatcgagttcagcaccatcctggagggccgcctgggcagcaagtggcctgtcttcgagctcaaggccatcagctgcctcaactgcatggcccagctctcacccaccaggcggcacgtgaagatcgagcacgactggcgcagcaccgtgcatggcgccgtgaagttcgccttcgacttctttttcttcccattcctgtcggcggcctgaggatggtccgccacgaggagcttccagtgcatgttgccatgaggcctttccccagtgtggccccagcccgacaggcatgcaccagtgccgcctgtgcccacgtgtgcagactgtggctgcagagaccttgcgaccatgtgtagattgcgtggaccccgacaaagggaaggctgctgtgtagctctgtccactctgaataccaagtgtgttgggaattgcatgccatctccaccctgagcctgacctttctgagtgacatgggtgtgccaggctagactaggaggttccggtgtctggaaaagcactttacagatgagattccctctcctcccccaccttcaagcaccctgttccctctttctttcttttgtgttggatttgtttaaaaaccaaataagcatctgtgtaacctcc

SEQ ID NO: 2511 - protein, 594 aa, Homosapiens
MEIKEYLIDMASRAGMHWLSTIIPTHHINALIFFFIVSNLTIDFFAFFIPLVIFYLSFISMVICTLKVFQDSKAWENFRTLTDLLLRFEPNLDVEQAEVNFGWNHLEPYAHFLLSVFFVIFSFPIASKDCIPCSELAVITGFFTVTSYLSLSTHAEPYTRRALATEVTAGLLSLLPSMPLNWPYLKVLGQTFITVPVGHLVVLNVSVPCLLYVYLLYLFFRMAQLRNFKGTYCYLVPYLVCFMWCELSVVILLESTGLGLLRASIGYFLFLFALPILVAGLALVGVLQFARWFTSLELTKIAVTVAVCSVPLLLRWWTKASFSVVGMVKSLTRSSMVKLILVWLTAIVLFCWFYVYRSEGMKVYNSTLTWQQYGALCGPRAWKETNMARTQILCSHLEGHRVTWTGRFKYVRVTDIDNSAESAINMLPFFIGDWMRCLYGEAYPACSPGNTSTAEEELCRLKLLAKHPCHIKKFDRYKFEITVGMPFSSGADGSRSREEDDVTKDIVLRASSEFKSVLLSLRQGSLIEFSTILEGRLGSKWPVFELKAISCLNCMAQLSPTRRHVKIEHDWRSTVHGAVKFAFDFFFFPFLSAA

SEQ ID NO: 2512 - DNA, 3029 bp, Homosapiens
gcagagagggacacttggggtgggggacagcacacccaggggccgggggccaggagtggaggctggcacttggcaaacctgcccccttcctcctcacccagcctggtcctcaaccctcaggccgcccagggaagggtttcctccacctgaacccactcagctcctttcttagcttggccccacgccaccgtccccagcccattgctctgtgtgagggtggcagtggggctgcagtgtggggcgcccatgctgttttctctcatgcttcagccaagaactacatcgcgctggatgactttgtggagatcactaagaagtacgccaagggcgtcatccccagcagcctgttcctgcaggacgacgaagatgatgacgagctggcggggaagagccctgaggacctgccactgcgtctgaaggtggtcaagtaccccctgcacgccatcatggagatcaaggagtacctgattgacatggcctccagggcaggcatgcactggctgtccaccatcatccccacgcaccacatcaacgcgctcatcttcttcttcatcgtcagcaacctcaccatcgacttcttcgccttcttcatcccgctggtcatcttctacctgtccttcatctccatggtgatctgcaccctcaaggtgttccaggacagcaaggcctgggagaacttccgcaccctcaccgacctgctgctgcgcttcgagcccaacctggatgtggagcaggccgaggtcaacttcggctggaaccacctggagccctatgcccatttcctgctctctgtcttcttcgtcatcttctccttccccatcgccagcaaggactgcatcccctgctcggagctggctgtcatcaccggcttctttaccgtgaccagctacctgagcctgagcacccatgcagagccctacacgcgcagggccctggccaccgaggtcaccgccggcctgctatcgctgctgccctccatgcccttgaattggccctacctgaaggtccttggccagaccttcatcaccgtgcctgtcggccacctggtcgtcctcaacgtcagcgtcccgtgcctgctctatgtctacctgctctatctcttcttccgcatggcacagctgaggaatttcaagggcacctactgctaccttgtgccctacctggtgtgcttcatgtggtgtgagctctccgtggtcatcctgctggagtccaccggcctggggctgctccgcgcctccatcggctacttcctcttcctctttgccctccccatcctggtggccggcctggccctggtgggcgtgctgcagttcgcccggtggttcacgtctctggagctcaccaagatcgcagtcaccgtggcggtctgtagtgtgcccctgctgttgcgctggtggaccaaggccagcttctctgtggtggggatggtgaagtccctgacgcggagctccatggtcaagctcatcctggtgtggctcacggccatcgtgctgttctgctggttctatgtgtaccgctcagagggcatgaaggtctacaactccacactgacctggcagcagtatggtgcgctgtgcgggccacgcgcctggaaggagaccaacatggcgcgcacccagatcctctgcagccacctggagggccacagggtcacgtggaccggccgcttcaagtacgtccgcgtgactgacatcgacaacagcgccgagtctgccatcaacatgctcccgttcttcatcggcgactggatgcgctgcctctacggcgaggcctaccctgcctgcagccctggcaacacctccacggccgaggaggagctctgtcgccttaagctgctggccaagcacccctgccacatcaagaagttcgaccgctacaagtttgagattaccgtgggcatgccattcagcagcggcgctgacggctcgcgcagccgcgaggaggacgacgtcaccaaggacatcgtgctgcgggccagcagcgagttcaagagcgtgctgctcagcctgcgccagggcagcctcatcgagttcagcaccatcctggagggccgcctgggcagcaagtggcctgtcttcgagctcaaggccatcagctgcctcaactgcatggcccagctctcacccaccaggcggcacgtgaagatcgagcacgactggcgcagcaccgtgcatggcgccgtgaagttcgccttcgacttctttttcttcccattcctgtcggcggcctgaggatggtccgccacgaggagcttccagtgcatgttgccatgaggcctttccccagtgtggccccagcccgacaggcatgcaccagtgccgcctgtgcccacgtgtgcagactgtggctgcagagaccttgcgaccatgtgtagattgcgtggaccccgacaaagggaaggctgctgtgtagctctgtccactctgaataccaagtgtgttgggaattgcatgccatctccaccctgagcctgacctttctgagtgacatgggtgtgccaggctagactaggaggttccggtgtctggaaaagcactttacagatgagattccctctcctcccccaccttcaagcaccctgttccctctttctttcttttgtgttggatttgtttaaaaaccaaataagcatctgtgtaacctccacagtagcatttcttatttgtttggtcactgctacaccttagcagctcttcccctttcctgggggatgtgcacggcagcttgagcctgtcacgtggtcaaggcccggccccatcagaggctgggggaggcggcacattggcagtgtgtcacactgagctgggcaccacaggctgcctcatgaccctcctgtccagcaggtagtgggtgaatgtgtgaaggtcttgcctgaatccatcaggacttgggaaacagagaaccctgtgggggcggctgtgggggaggtccctgccagtgtttagaagagcctgactgtgttcagtgccttggagcagaaagccagggtcctgagtggctgaaataaaagcctctggtggaacctgcag

SEQ ID NO: 2513 - protein, 594 aa, Homosapiens; identical to SEQ ID NO: 2511

SEQ ID NO: 2514 - DNA, 1411 bp, Homosapiens
aacttcggctggaaccacctggagccctatgcccatttcctgctctctgtcttcttcgtcatcttctccttccccatcgccagcaaggactgcatcccctgctcggagctggctgtcatcaccggcttctttaccgtgaccagctacctgagcctgagcacccatgcagagccctacacgcgcagggccctggccaccgaggtcaccgccggcctgctatcgctgctgccctccatgcccttgaattggccctacctgaaggtccttggccagaccttcatcaccgtgcctgtcggccacctggtcgtcctcaacgtcagcgtcccgtgcctgctctatgtctacctgctctatctcttcttccgcatggcacagctgaggaatttcaagggcacctactgctaccttgtgccctacctggtgtgcttcatgtggtgtgagctctccgtggtcatcctgctggagtccaccggcctggggctgctccgcgcctccatcggctacttcctcttcctctttgccctccccatcctggtggccggcctggccctggtgggcgtgctgcagttcgcccggtggttcacgtctctggagctcaccaagatcgcagtcaccgtggcggtctgtagtgtgcccctgctgttgcgctggtggaccaaggccagcttctctgtggtggggatggtgaagtccctgacgcggagctccatggtcaagctcatcctggtgtggctcacggccatcgtgctgttctgctggttctatgtgtaccgctcagagggcatgaaggtctacaactccacatctgaataccaagtgtgttgggaattgcatgccatctccaccctgagcctgacctttctgagtgacatgggtgtgccaggctagactaggaggttccggtgtctggaaaagcactttacagatgagattccctctcctcccccaccttcaagcaccctgttccctctttctttcttttgtgttggatttgtttaaaaaccaaataagcatctgtgtaacctccacagtagcatttcttatttgtttggtcactgctacaccttagcagctcttcccctttcctgggggatgtgcacggcagcttgagcctgtcacgtggtcaaggcccggccccatcagaggctgggggaggcggcacattggcagtgtgtcacactgagctgggcaccacaggctgcctcatgaccctcctgtccagcaggtagtgggtgaatgtgtgaaggtcttgcctgaatccatcaggacttgggaaacagagaaccctgtgggggcggctgtgggggaggtccctgccagtgtttagaagagcctgactgtgttcagtgccttggagcagaaagccagggtcctgagtggctgaaataaaagcctctggtggaacctgcag

SEQ ID NO: 2515 - protein, 217 aa, Homosapiens
MPLNWPYLKVLGQTFITVPVGHLVVLNVSVPCLLYVYLLYLFFRMAQLRNFKGTYCYLVPYLVCFMWCELSVVILLESTGLGLLRASIGYFLFLFALPILVAGLALVGVLQFARWFTSLELTKIAVTVAVCSVPLLLRWWTKASFSVVGMVKSLTRSSMVKLILVWLTAIVLFCWFYVYRSEGMKVYNSTSEYQVCWELHAISTLSLTFLSDMGVPG

SEQ ID NO: 2516 - DNA, 1748 bp, Homosapiens
gtggtgtgagctctccgtggtcatcctgctggagtccaccggcctggggctgctccgcgcctccatcggctacttcctcttcctctttgccctccccatcctggtggccggcctggccctggtgggcgtgctgcagttcgcccggtggttcacgtctctggagctcaccaagatcgcagtcaccgtggcggtctgtagtgtgcccctgctgttgcgctggtggaccaaggccagcttctctgtggtggggatggtgaagtccctgacgcggagctccatggtcaagctcatcctggtgtggctcacggccatcgtgctgttctgctggttctatgtgtaccgctcagagggcatgaaggtctacaactccacactgacctggcagcagtatggtgcgctgtgcgggccacgcgcctggaaggagaccaacatggcgcgcacccagatcctctgcagccacctggagggccacagggtcacgtggaccggccgcttcaagtacgtccgcgtgactgacatcgacaacagcgccgagtctgccatcaacatgctcccgttcttcatcggcgactggatgcgctgcctctacggcgaggcctaccctgcctgcagccctggcaacacctccacggccgaggaggagctctgtcgccttaagctgctggccaagcacccctgccacatcaagaagttcgaccgctacaagtttgagattaccgtgggcatgccattcagcagcggcgctgacggctcgcgcagccgcgaggaggacgacgtcaccaaggacatcgtgctgcgggccagcagcgagttcaagagcgtgctgctcagcctgcgccagggcagcctcatcgagttcagcaccatcctggagggccgcctgggcagcaagtggcctgtcttcgagctcaaggccatcagctgcctcaactgcatggcccagctctcacccaccaggcggcacgtgaagatcgagcacgactggcgcagcaccgtgcatggcgccgtgaagttcgccttcgacttctttttcttcccattcctgtcggcggcctgaggatggtccgccacgaggagcttccagtgcatgttgccatgaggcctttccccagtgtggccccagcccgacaggcatgcaccagtgccgcctgtgcccacgtgtgcagactgtggctgcagagaccttgcgaccatgtgtagattgcgtggaccccgacaaagggaaggctgctgtgtagctctgtccactctgaataccaagtgtgttgggaattgcatgccatctccaccctgagccctgttccctctttctttcttttgtgttggatttgtttaaaaaccaaataagcatctgtgtaacctccacagtagcatttcttatttgtttggtcactgctacaccttagcagctcttcccctttcctgggggatgtgcacggcagcttgagcctgtcacgtggtcaaggcccggccccatcagaggctgggggaggcggcacattggcagtgtgtcacactgagctgggcaccacaggctgcctcatgaccctcctgtccagcaggtagtgggtgaatgtgtgaaggtcttgcctgaatccatcaggacttgggaaacagagaaccctgtgggggcggctgtgggggaggtccctgccagtgtttagaagagcctgactgtgttcagtgccttggagcagaaagccagggtcctgagtggctgaaataaaagcctctggtggaacctgcag

SEQ ID NO: 2517 - protein, 268 aa, Homosapiens
MVKSLTRSSMVKLILVWLTAIVLFCWFYVYRSEGMKVYNSTLTWQQYGALCGPRAWKETNMARTQILCSHLEGHRVTWTGRFKYVRVTDIDNSAESAINMLPFFIGDWMRCLYGEAYPACSPGNTSTAEEELCRLKLLAKHPCHIKKFDRYKFEITVGMPFSSGADGSRSREEDDVTKDIVLRASSEFKSVLLSLRQGSLIEFSTILEGRLGSKWPVFELKAISCLNCMAQLSPTRRHVKIEHDWRSTVHGAVKFAFDFFFFPFLSAA

SEQ ID NO: 2518 - DNA, 1258 bp, Homosapiens
gagggcatgaaggtctacaactccacactgacctggcagcagtatggtgcgctgtgcgggccacgcgcctggaaggagaccaacatggcgcgcacccagatcctctgcagccacctggagggccacagggtcacgtggaccggccgcttcaagtacgtccgcgtgactgacatcgacaacagcgccgagtctgccatcaacatgctcccgttcttcatcggcgactggatgcgctgcctctacggcgaggcctaccctgcctgcagccctggcaacacctccacggccgaggaggagctctgtcgccttaagctgctggccaagcacccctgccacatcaagaagttcgaccgctacaagtttgagattaccgtgggcatgccattcagcagcggcgctgacggctcgcgcagccgcgaggaggacgacgtcaccaaggacatcgtgctgcgggccagcagcgagttcaagagcgtgctgctcagcctgcgccagggcagcctcatcgagttcagcaccatcctggagggccgcctgggcagcaagtggcctgtcttcgagctcaaggccatcagctgcctcaactgcatggcccagctctcacccaccaggcggcacgtgaagatcgagcacgactggcgcagcaccgtgcatggcgccgtgaagttcgccttcgacttctttttcttcccattcctgtcggcggcctgaggatggtccgccacgaggagcttccagtgcatgttgccatgaggcctttccccagtgtggccccagcccgacaggcatgcaccagtgccgcctgtgcccacgtgtgcagactgtggctgcagagaccttgcgaccatgtgtagattgcgtggaccccgacaaagggaaggctgctgtgtagctctgtccactctgaataccaagtgtgttgggaattgcatgccatctccaccctgagcctgacctttctgagtgacatgggtgtgccaggctagactaggaggttccggtgtctggaaaagcactttacagatgagattccctctcctcccccaccttcaagcacccctcctgtccagcaggtagtgggtgaatgtgtgaaggtcttgcctgaatccatcaggacttgggaaacagagaaccctgtgggggcggctgtgggggaggtccctgccagtgtttagaagagcctgactgtgttcagtgccttggagcagaaagccagggtcctgagtggctgaaataaaagcctctggtggaacctgca

SEQ ID NO: 2519 - protein, 234 aa, Homosapiens
MKVYNSTLTWQQYGALCGPRAWKETNMARTQILCSHLEGHRVTWTGRFKYVRVTDIDNSAESAINMLPFFIGDWMRCLYGEAYPACSPGNTSTAEEELCRLKLLAKHPCHIKKFDRYKFEITVGMPFSSGADGSRSREEDDVTKDIVLRASSEFKSVLLSLRQGSLIEFSTILEGRLGSKWPVFELKAISCLNCMAQLSPTRRHVKIEHDWRSTVHGAVKFAFDFFFFPFLSAA

SEQ ID NO: 2520 - DNA, 4091 bp, Homosapiens
acatgcaaaaagtggggcctggagatggggctgtcttttttctccaaacacttgcccatccaggaaggccagccctgggcattgaagactccagctgacatcatctctaccgttgagttcaaccacacgggagagctgctggccacaggtgacaagggcggccgggtcgtcatcttccagcgggaaccagagagtaaaaatgcgccccacagccagggcgaatacgacgtgtacagcactttccagagccacgagccggagtttgactatctcaagagcctggagatagaggagaagatcaacaagatcaagtggctcccacagcagaacgccgcccactcactcctgtccaccaacgataaaactatcaaattatggaagattaccgaacgagataaaaggcccgaaggatacaacctgaaggatgaagaggggaaacttaaggacctgtccacggtgacgtcactgcaggtgccagtgctgaagcccatggatctgatggtggaggtgagccctcggaggatctttgccaatggccacacctaccacatcaactccatctccgtcaacagtgactgcgagacctacatgtcggcggatgacctgcgcatcaacctctggcacctggccatcaccgacaggagcttcaacatcgtggacatcaagccggccaacatggaggaccttacggaggtgatcacagcatctgagttccatccgcaccactgcaacctcttcgtctacagcagcagcaagggctccctgcggctctgcgacatgcgggcagctgccctgtgtgacaagcattccaagctctttgaagagcctgaggaccccagtaaccgctcattcttctcggaaatcatctcctccgtgtccgacgtgaagttcagccacagcggccgctacatgctcacccgggactaccttacagtcaaggtctgggacctgaacatggaggcaagacccatagagacctaccaggtccatgactaccttcggagcaagctctgttccctgtacgagaacgactgcattttcgacaagtttgaatgtgcctggaacgggagcgacagcgtcatcatgaccggggcctacaacaacttcttccgcatgttcgatcggaacaccaagcgggacgtgaccctggaggcctcgagggaaagcagcaagccccgggctgtgctcaagccacggcgcgtgtgcgtggggggcaagcgccggcgtgatgacatcagtgtggacagcttggacttcaccaagaagatcctgcacacggcctggcacccggctgagaacatcattgccatcgccgccaccaacaacctgtacatcttccaggacaaggtaaactctgacatgcactaggtatgtgcagttcccggcccctgccacccagcctcatgcaagtcatccccgacatgaccttcacgaccgcaatgcaaggaggggaagaaagtcacagcactgatgaggacagctgcagaggtggcagtgtgtggacacaggaagtttgggccccctccctgccccagctttcctaggccagaattgtgtttggcagtaattgtctgtttaaaaaaataaaaaggaaaggaagcgttcaccgccacaaatcataaaatggacatgactgtggagtcttacagttcagggttctttcattcacgtcccttcctgtctcggtctgcggtctttaccacatcaataggactttttatgcgtccgggttaatttttcactccagtgcgtcctgttgcagggaccggagctgatgggagctgcttctcccccatgcctcactggtcccagatcagggctccagggacagatgatgagtctcaaacgagccagccaggggttcttttggttataaatggggcaattcgccctgtctcagagctgatgacctcaccgttgttttttggatggtgaattcatgctgagaatttgcagatgcaagctcctctcctaggtcttctgaatgtcttgaaacatcccaggtcccaggtctggtgcggtttcccgagaggagcggagtggggtttgtcttctgtgtgcctgtgtcctcatctgattcacctgccatttgctgagcctctgctgtgtaccaggcgtggtgctcagccctagaggcagttgacttaccctctgcagccctccctgccgcctcacccttcagcattcactgggcaccttcccggagcggacactgactcccatgcacgattttttggaatcttcctcctgactgtgaggtgggtgttcattcatttcctccataaacaccaacttctcgaagcgtgccaggctctgggctggatgctggggataagcgggaacccttaggatcccctctgtccacgagaagaagctgaggctctgagcggatgcacaggtcacccatggcaggtgccgtgcagtggtgtcaggaacccgtccgggtcttcacacaaggttctctccagtccatctcgtgggcggctcatgttagagcgacattcaaatggaaggtttggaaaggaatgcctctgtcttgtgaagtaggacatggcagacttggcgacgacaagggtccaggagaactgagacgcaggatggaagacagagaagaccccccggagctcctcgctctgcttggtggcttcaggagtgtggccctccccaggactccacttcatcctgggcttgcaccctccttgagccaatgcactgaactgcctttgaaaggaaattgcatgttctgaccattttaggatacctttactttaaggaccacacagtcccagaggacacatccctcgggaactctgcccctctgacaatgagggccacagagaaggtggtgtttccatggtagatgctcctgttctggtgataccaaacctgcccacccctctgagtcgtctttgctcatggacttgcagcagagccacgtagtttggcattttgattcagaaagtggggagcagagacccagccaaatccaaactttttttttggttttgttttgttttgttttttacaagatataacataacccaggaaacagacccagctgaggttattctcagtggattacagtatacttttgtgtgtgtaaaagcacaaagtgcatgtgtactcacttctggccatataacatttacacagggaaatggatcattgatttttttttaatcaacgtgaatgaagaatgtttgtttatatatcactataaaatccagttgacctggacagtattatatgtacatatctattctaattaaatttaacaatcaaaggattggattacttttttcccccttgtaaagaggttcgagaatgtggtcaattgtatagatagcgtgttaaagccaaaacccagctctgagggccttacccattacttggatatttgctacgatccatctccctttgtgagtcaaatgttaagagaagaaacttgtatttgcagctagaggttactgtcacatcatagatttaacatttaccatcttcaaagtacaaatcttacatgtccttcaaaaggaggtcttaatacagttcctagttccttacttctgttttaaactttgggtaccaaaccaaaaagaagaaaaaagaaaggaaaagatcttctttgaagaaaagtatgtctctggatccctggaaaataatgatgtccaaagcaaattgtgaagatcaaatgtgtgttaagaaaaggtgtcgaggggagggacaaaaccagaaacggtggaaggaccagtgtaatagtcacagacttgcatcctggctctgcttacatttcctggtactctcgaatgtacgggcgttcacatagtcattgtgaagttgttggggtttttttggttttgtttttaatttagctcttctctgaggacgaagctgttggtggtggtggtggtgggggtggtggtgtgggatacatggtggtcaagttgtcagccctgatcagtttggactctgtaactcataggtgcattctttttttctttggtgtctcacaaattacccaattgttgaataaaactataaatatgttaataccagctttttccaataaaataacaaatgttacatcaaaaacg

SEQ ID NO: 2521 - protein, 447 aa, Homosapiens; identical to SEQ ID NO: 289

SEQ ID NO: 2522 - DNA, 4437 bp, Homosapiens
cggcttggtcggcgcagcgcagcgccgcgcgcgtcccctcgccgccgtcgccgcagccaggcgcaccggcaccaggccccgccgccgggcgcacggacgcagcgcgcacgggccggccgggatgcgcgcctgggccccggcccgcccgaacccgcggccgccgcccgcccaccgcgcgctcgcttgaccgcggcgcccgcccccggccgcccccgcccgtccccctgccgcgatgccctcccttcggggccccggcggcccgcgcccctgctaggctgcggcggcatggcccgcgcgcccggcgcgacctctgcggattgcatcggtgtgtggcggcggggcatgcccagagcaccgggcacggccttcaatgggcgaggacacggacacgcggaaaattaaccacagcttcctgcgggaccacagctatgtgactgaagctgacatcatctctaccgttgagttcaaccacacgggagagctgctggccacaggtgacaagggcggccgggtcgtcatcttccagcgggaaccagagagtaaaaatgcgccccacagccagggcgaatacgacgtgtacagcactttccagagccacgagccggagtttgactatctcaagagcctggagatagaggagaagatcaacaagatcaagtggctcccacagcagaacgccgcccactcactcctgtccaccaacgataaaactatcaaattatggaagattaccgaacgagataaaaggcccgaaggatacaacctgaaggatgaagaggggaaacttaaggacctgtccacggtgacgtcactgcaggtgccagtgctgaagcccatggatctgatggtggaggtgagccctcggaggatctttgccaatggccacacctaccacatcaactccatctccgtcaacagtgactgcgagacctacatgtcggcggatgacctgcgcatcaacctctggcacctggccatcaccgacaggagcttcaacatcgtggacatcaagccggccaacatggaggaccttacggaggtgatcacagcatctgagttccatccgcaccactgcaacctcttcgtctacagcagcagcaagggctccctgcggctctgcgacatgcgggcagctgccctgtgtgacaagcattccaagctctttgaagagcctgaggaccccagtaaccgctcattcttctcggaaatcatctcctccgtgtccgacgtgaagttcagccacagcggccgctacatgctcacccgggactaccttacagtcaaggtctgggacctgaacatggaggcaagacccatagagacctaccaggtccatgactaccttcggagcaagctctgttccctgtacgagaacgactgcattttcgacaagtttgaatgtgcctggaacgggagcgacagcgtcatcatgaccggggcctacaacaacttcttccgcatgttcgatcggaacaccaagcgggacgtgaccctggaggcctcgagggaaagcagcaagccccgggctgtgctcaagccacggcgcgtgtgcgtggggggcaagcgccggcgtgatgacatcagtgtggacagcttggacttcaccaagaagatcctgcacacggcctggcacccggctgagaacatcattgccatcgccgccaccaacaacctgtacatcttccaggacaaggtaaactctgacatgcactaggtatgtgcagttcccggcccctgccacccagcctcatgcaagtcatccccgacatgaccttcacgaccgcaatgcaaggaggggaagaaagtcacagcactgatgaggacagctgcagaggtggcagtgtgtggacacaggaagtttgggccccctccctgccccagctttcctaggccagaattgtgtttggcagtaattgtctgtttaaaaaaataaaaaggaaaggaagcgttcaccgccacaaatcataaaatggacatgactgtggagtcttacagttcagggttctttcattcacgtcccttcctgtctcggtctgcggtctttaccacatcaataggactttttatgcgtccgggttaatttttcactccagtgcgtcctgttgcagggaccggagctgatgggagctgcttctcccccatgcctcactggtcccagatcagggctccagggacagatgatgagtctcaaacgagccagccaggggttcttttggttataaatggggcaattcgccctgtctcagagctgatgacctcaccgttgttttttggatggtgaattcatgctgagaatttgcagatgcaagctcctctcctaggtcttctgaatgtcttgaaacatcccaggtcccaggtctggtgcggtttcccgagaggagcggagtggggtttgtcttctgtgtgcctgtgtcctcatctgattcacctgccatttgctgagcctctgctgtgtaccaggcgtggtgctcagccctagaggcagttgacttaccctctgcagccctccctgccgcctcacccttcagcattcactgggcaccttcccggagcggacactgactcccatgcacgattttttggaatcttcctcctgactgtgaggtgggtgttcattcatttcctccataaacaccaacttctcgaagcgtgccaggctctgggctggatgctggggataagcgggaacccttaggatcccctctgtccacgagaagaagctgaggctctgagcggatgcacaggtcacccatggcaggtgccgtgcagtggtgtcaggaacccgtccgggtcttcacacaaggttctctccagtccatctcgtgggcggctcatgttagagcgacattcaaatggaaggtttggaaaggaatgcctctgtcttgtgaagtaggacatggcagacttggcgacgacaagggtccaggagaactgagacgcaggatggaagacagagaagaccccccggagctcctcgctctgcttggtggcttcaggagtgtggccctccccaggactccacttcatcctgggcttgcaccctccttgagccaatgcactgaactgcctttgaaaggaaattgcatgttctgaccattttaggatacctttactttaaggaccacacagtcccagaggacacatccctcgggaactctgcccctctgacaatgagggccacagagaaggtggtgtttccatggtagatgctcctgttctggtgataccaaacctgcccacccctctgagtcgtctttgctcatggacttgcagcagagccacgtagtttggcattttgattcagaaagtggggagcagagacccagccaaatccaaactttttttttggttttgttttgttttgttttttacaagatataacataacccaggaaacagacccagctgaggttattctcagtggattacagtatacttttgtgtgtgtaaaagcacaaagtgcatgtgtactcacttctggccatataacatttacacagggaaatggatcattgatttttttttaatcaacgtgaatgaagaatgtttgtttatatatcactataaaatccagttgacctggacagtattatatgtacatatctattctaattaaatttaacaatcaaaggattggattacttttttcccccttgtaaagaggttcgagaatgtggtcaattgtatagatagcgtgttaaagccaaaacccagctctgagggccttacccattacttggatatttgctacgatccatctccctttgtgagtcaaatgttaagagaagaaacttgtatttgcagctagaggttactgtcacatcatagatttaacatttaccatcttcaaagtacaaatcttacatgtccttcaaaaggaggtcttaatacagttcctagttccttacttctgttttaaactttgggtaccaaaccaaaaagaagaaaaaagaaaggaaaagatcttctttgaagaaaagtatgtctctggatccctggaaaataatgatgtccaaagcaaattgtgaagatcaaatgtgtgttaagaaaaggtgtcgaggggagggacaaaaccagaaacggtggaaggaccagtgtaatagtcacagacttgcatcctggctctgcttacatttcctggtactctcgaatgtacgggcgttcacatagtcattgtgaagttgttggggtttttttggttttgtttttaatttagctcttctctgaggacgaagctgttggtggtggtggtggtgggggtggtggtgtgggatacatggtggtcaagttgtcagccctgatcagtttggactctgtaactcataggtgcattctttttttctttggtgtctcacaaattacccaattgttgaataaaactataaatatgttaataccagctttttccaataaaataacaaatgttacatcaaaaacg

SEQ ID NO: 2523 - protein, 447 aa, Homosapiens; identical to SEQ ID NO: 287

SEQ ID NO: 2524 - DNA, 1662 bp, Homosapiens
ccataaacaccaacttctcgaagcgtgccaggctctgggctggatgctggggataagcgggaacccttaggatcccctctgtccacgagaagaagctgaggctctgagcggatgcacaggtcacccatggcaggtgccgtgcagtggtgtcaggaacccgtccgggtcttcacacaaggttctctccagtccatctcgtgggcggtctgcttggtggcttcaggagtgtggccctccccaggactccacttcatcctgggcttgcaccctccttgagccaatgcactgaactgcctttgaaaggaaattgcatgttctgaccattttaggatacctttactttaaggaccacacagtcccagaggacacatccctcgggaactctgcccctctgacaatgagggccacagagaaggtggtgtttccatggtagatgctcctgttctggtgataccaaacctgcccacccctctgagtcgtctttgctcatggacttgcagcagagccacgtagtttggcattttgattcagaaagtggggagcagagacccagccaaatccaaactttttttttggttttgttttgttttgttttttacaagatataacataacccaggaaacagacccagctgaggttattctcagtggattacagtatacttttgtgtgtgtaaaagcacaaagtgcatgtgtactcacttctggccatataacatttacacagggaaatggatcattgatttttttttaatcaacgtgaatgaagaatgtttgtttatatatcactataaaatccagttgacctggacagtattatatgtacatatctattctaattaaatttaacaatcaaaggattggattacttttttcccccttgtaaagaggttcgagaatgtggtcaattgtatagatagcgtgttaaagccaaaacccagctctgagggccttacccattacttggatatttgctacgatccatctccctttgtgagtcaaatgttaagagaagaaacttgtatttgcagctagaggttactgtcacatcatagatttaacatttaccatcttcaaagtacaaatcttacatgtccttcaaaaggaggtcttaatacagttcctagttccttacttctgttttaaactttgggtaccaaaccaaaaagaagaaaaaagaaaggaaaagatcttctttgaagaaaagtatgtctctggatccctggaaaataatgatgtccaaagcaaattgtgaagatcaaatgtgtgttaagaaaaggtgtcgaggggagggacaaaaccagaaacggtggaaggaccagtgtaatagtcacagacttgcatcctggctctgcttacatttcctggtactctcgaatgtacgggcgttcacatagtcattgtgaagttgttggggtttttttggttttgtttttaatttagctcttctctgaggacgaagctgttggtggtggtggtggtgggggtggtggtgtgggatacatggtggtcaagttgtcagccctgatcagtttggactctgtaactcataggtgcattctttttttctttggtgtctcacaaattacccaattgttgaataaaactataaatatgttaataccagctttttccaataaaataacaaatgttacatcaaaaa

SEQ ID NO: 2525 - protein, 54 aa, Homosapiens
MHRSPMAGAVQWCQEPVRVFTQGSLQSISWAVCLVASGVWPSPGLHFILGLHPP

SEQ ID NO: 2526 - DNA, 6087 bp, Homosapiens
gagatggagtcttgctctgtcacccagtctggagtgcagtggcgcgatctcagctcactgcaacctctgcctccccagtcaagcgattctcctgcctcagcctcccaagtagctgggatttcaggcatgtgccaccacgcctggctaatttttttttattttttatttttagtagagacggggttttggtatgttggtcaggctggtctcgaactcctgagctcaggtgacctgctcgccttgacctcccaaagtgctgggattacaggtgtgagctctggtgcctggcctcctacatactttgaaaagttctgaaacatccccaggtgggaaaggaaagagcgtttgggtggacactgaacctgtcagggggctcacgttttgcagtggtagcaaacaacctgaaggtctccaaggcctcaaacacccacttcacacctcccactcacgctgcaagtgtggccgtcacaggctggctttggtgcgatctcattgcggagggaacagtgtcacagcagaccacgtgctggctctcaaaacttcagcctggaggtgacatgcctcacttgtctattcattggcagaagcaaccagcctctggccactctgggttctgaaaggccgaaggagaggtctccccttgggagagaacctggaatgttcagagaaccccctgggtgtcagcatttgacttcatcccaccgagtcctcctgcacccactgcgccccatgagttataaccccaggaaatacaacgagaatgagtgtcctgatgacgcaaacagaactcctgtgggactcacgttcctgggcgcttctgttgccaccaagcctcctgtggcttttgtgtgtctcagggtgtgcagagagaatgtagcccctctctgccctgcctctctactgcacattatccatgggccgtcgcactaatgtgcgtgacatttcatcagtggccgcactttttctctggatcccactttagtgaagttcagtaaggacctgagagctgctccgagcgggcagcgtgtcctggaaagccatgggaggcattcggcctgggagggctgggctgccaggtggacgctggagaaatcagcatggcaggaggagggctcttttcttgcttggccttcagtatcatttttcattatttaatcgctgcttcttttcatactggaaaactgtagtttcctgggaaaccagccaggcagtgatgccttaactcatttttccctctctttctatttttatgtgattctcagtttgtggttaatgacgtgcttccgggaagcaagatttgagcacgagcacagagacccttttaggtgctttctgactgcacagatcagccatttttttccctggcattttataaaccctcgggtttagagaggtcagaaaatactgcttgcttgctttttttttgacagagtcttgccctgtcaccaggctggaatataatggtgcgatctcggctaactgcaacatccacctcccaggttcacgtgattcccctgcctcagcctcctgattagctgggactacaggcatacgccactactaatttttttttagtagagatggggttttgcaatgttggtcaggcttgtctccaactaatttctttttgtattttagtagagacggggttttactgtgttggccagaatggtctcgatctcctgacctcgtgatccgcccgcctcggcctcccaaagtgctgggattacaaatactgctttcttactgagagaggcagcagcttgggtggaggaagagggagggcagatggatttcagagtttcagtcagtattttccagatagaaaataataaaaatggaaactgacattcattgagctctgcaacgcatcaggcagtgtgtgaagggctttgcctctgatgatcttcacagcgaagtgataaggctatactgctgactcattttacagatgaggaagctgaggcatggatagctgggaactcactcagggtcacacagccaggaggtgacagagctgggattcaaaccccagaccttccaactccagggctcacatgcacctgaagagtcagagggaacagaccgtgcaaagccccatgcagggccggggagaccggagcctgaggtcattgctgtgagaggggagagggcctttctgtcagggtgatgggtgggatctgaagctggaaagccggagagaagctcgggggtgccagtccttgcatgctccaagagattctgatctgctgctgggcagcagggaagggataggaaaagagcaggtgctggggccggggaggttgtgaggctgaatccagccttaccaatcacacctgggccaccccggacgagttgctcatcttctctgtgctctagtgtaacagtcagggatactgcctttgcaagcagcaaagttcttgactctaaacaaaaaatggacatttattggctcccacatttagcagtctggggggaatggcttcaggtgcagcttgatccaggattccaatggcatcaccagatctttctctgcactctttccactgtctgccccaccctcaagctccagggtttctccttgtcctggcagcagatagaagctccttctttctacaccacccagcacagcaggggtgaccaagctacatcgtggacatcaagccggccaacatggaggaccttacggaggtgatcacagcatctgagttccatccgcaccactgcaacctcttcgtctacagcagcagcaagggctccctgcggctctgcgacatgcgggcagctgccctgtgtgacaagcattccaagctctttgaagagcctgaggaccccagtaaccgctcattcttctcggaaatcatctcctccgtgtccgacgtgaagttcagccacagcggccgctacatgctcacccgggactaccttacagtcaaggtctgggacctgaacatggaggcaagacccatagagacctaccaggtccatgactaccttcggagcaagctctgttccctgtacgagaacgactgcattttcgacaagtttgaatgtgcctggaacgggagcgacagcgtcatcatgaccggggcctacaacaacttcttccgcatgttcgatcggaacaccaagcgggacgtgaccctggaggcctcgagggaaagcagcaagccccgggctgtgctcaagccacggcgcgtgtgcgtggggggcaagcgccggcgtgatgacatcagtgtggacagcttggacttcaccaagaagatcctgcacacggcctggcacccggctgagaacatcattgccatcgccgccaccaacaacctgtacatcttccaggacaaggtaaactctgacatgcactaggtatgtgcagttcccggcccctgccacccagcctcatgcaagtcatccccgacatgaccttcacgaccgcaatgcaaggaggggaagaaagtcacagcactgatgaggacagctgcagaggtggcagtgtgtggacacaggaagtttgggccccctccctgccccagctttcctaggccagaattgtgtttggcagtaattgtctgtttaaaaaaataaaaaggaaaggaagcgttcaccgccacaaatcataaaatggacatgactgtggagtcttacagttcagggttctttcattcacgtcccttcctgtctcggtctgcggtctttaccacatcaataggactttttatgcgtccgggttaatttttcactccagtgcgtcctgttgcagggaccggagctgatgggagctgcttctcccccatgcctcactggtcccagatcagggctccagggacagatgatgagtctcaaacgagccagccaggggttcttttggttataaatggggcaattcgccctgtctcagagctgatgacctcaccgttgttttttggatggtgaattcatgctgagaatttgcagatgcaagctcctctcctaggtcttctgaatgtcttgaaacatcccaggtcccaggtctggtgcggtttcccgagaggagcggagtggggtttgtcttctgtgtgcctgtgtcctcatctgattcacctgccatttgctgagcctctgctgtgtaccaggcgtggtgctcagccctagaggcagttgacttaccctctgcagccctccctgccgcctcacccttcagcattcactgggcaccttcccggagcggacactgactcccatgcacgattttttggaatcttcctcctgactgtgaggtgggtgttcattcatttcctccataaacaccaacttctcgaagcgtgccaggctctgggctggatgctggggataagcgggaacccttaggatcccctctgtccacgagaagaagctgaggctctgagcggatgcacaggtcacccatggcaggtgccgtgcagtggtgtcaggaacccgtccgggtcttcacacaaggttctctccagtccatctcgtgggcggctcatgttagagcgacattcaaatggaaggtttggaaaggaatgcctctgtcttgtgaagtaggacatggcagacttggcgacgacaagggtccaggagaactgagacgcaggatggaagacagagaagaccccccggagctcctcgctctgcttggtggcttcaggagtgtggccctccccaggactccacttcatcctgggcttgcaccctccttgagccaatgcactgaactgcctttgaaaggaaattgcatgttctgaccattttaggatacctttactttaaggaccacacagtcccagaggacacatccctcgggaactctgcccctctgacaatgagggccacagagaaggtggtgtttccatggtagatgctcctgttctggtgataccaaacctgcccacccctctgagtcgtctttgctcatggacttgcagcagagccacgtagtttggcattttgattcagaaagtggggagcagagacccagccaaatccaaactttttttttggttttgttttgttttgttttttacaagatataacataacccaggaaacagacccagctgaggttattctcagtggattacagtatacttttgtgtgtgtaaaagcacaaagtgcatgtgtactcacttctggccatataacatttacacagggaaatggatcattgatttttttttaatcaacgtgaatgaagaatgtttgtttatatatcactataaaatccagttgacctggacagtattatatgtacatatctattctaattaaatttaacaatcaaaggattggattacttttttcccccttgtaaagaggttcgagaatgtggtcaattgtatagatagcgtgttaaagccaaaacccagctctgagggccttacccattacttggatatttgctacgatccatctccctttgtgagtcaaatgttaagagaagaaacttgtatttgcagctagaggttactgtcacatcatagatttaacatttaccatcttcaaagtacaaatcttacatgtccttcaaaaggaggtcttaatacagttcctagttccttacttctgttttaaactttgggtaccaaaccaaaaagaagaaaaaagaaaggaaaagatcttctttgaagaaaagtatgtctctggatccctggaaaataatgatgtccaaagcaaattgtgaagatcaaatgtgtgttaagaaaaggtgtcgaggggagggacaaaaccagaaacggtggaaggaccagtgtaatagtcacagacttgcatcctggctctgcttacatttcctggtactctcgaatgtacgggcgttcacatagtcattgtgaagttgttggggtttttttggttttgtttttaatttagctcttctctgaggacgaagctgttggtggtggtggtggtgggggtggtggtgtgggatacatggtggtcaagttgtcagccctgatcagtttggactctgtaactcataggtgcattctttttttctttggtgtctcacaaattacccaattgttgaataaaactataaatatgttaataccagctttttccaataaaataacaaatgttacatcaaaaa

SEQ ID NO: 2527 - protein, 230 aa, Homosapiens
MEDLTEVITASEFHPHHCNLFVYSSSKGSLRLCDMRAAALCDKHSKLFEEPEDPSNRSFFSEIISSVSDVKFSHSGRYMLTRDYLTVKVWDLNMEARPIETYQVHDYLRSKLCSLYENDCIFDKFECAWNGSDSVIMTGAYNNFFRMFDRNTKRDVTLEASRESSKPRAVLKPRRVCVGGKRRRDDISVDSLDFTKKILHTAWHPAENIIAIAATNNLYIFQDKVNSDMH

SEQ ID NO: 2528 - DNA, 1620 bp, Homosapiens
acatgcaaaaagtggggcctggagatggggctgtcttttttctccaaacacttgcccatccaggaaggccagccctgggcattgaagactccagctgacatcatctctaccgttgagttcaaccacacgggagagctgctggccacaggtgacaagggcggccgggtcgtcatcttccagcgggaaccagagagtaaaaatgcgccccacagccagggcgaatacgacgtgtacagcactttccagagccacgagccggagtttgactatctcaagagcctggagatagaggagaagatcaacaagatcaagtggctcccacagcagaacgccgcccactcactcctgtccaccaacgataaaactatcaaattatggaagattaccgaacgagataaaaggcccgaaggatacaacctgaaggatgaagaggggaaacttaaggacctgtccacggtgacgtcactgcaggtgccagtgctgaagcccatggatctgatggtggaggtgagccctcggaggatctttgccaatggccacacctaccacatcaactccatctccgtcaacagtgactgcgagacctacatgtcggcggatgacctgcgcatcaacctctggcacctggccatcaccgacaggagcttcaacatcgtggacatcaagccggccaacatggaggaccttacggaggtgatcacagcatctgagttccatccgcaccactgcaacctcttcgtctacagcagcagcaagggctccctgcggctctgcgacatgcgggcagctgccctgtgtgacaagcattccaagctctttgaagagcctgaggaccccagtaaccgctcattcttctcggaaatcatctcctccgtgtccgacgtgaagttcagccacagcggccgctacatgctcacccgggactaccttacagtcaaggtctgggacctgaacatggaggcaagacccatagagacctaccaggtccatgactaccttcggagcaagctctgttccctgtacgagaacgactgcattttcgacaagtttgaatgtgcctggaacgggagcgacagcgtcatcatgaccggggcctacaacaacttcttccgcatgttcgatcggaacaccaagcgggacgtgaccctggaggcctcgagggaaagcagcaagccccgggctgtgctcaagccacggcgcgtgtgcgtggggggcaagcgccggcgtgatgacatcagtgtggacagcttggacttcaccaagaagatcctgcacacggcctggcacccggctgagaacatcattgccatcgccgccaccaacaacctgtacatcttccaggacaaggtaaactctgacatgcactaggtatgtgcagttcccggcccctgccacccagcctcatgcaagtcatccccgacatgaccttcacgaccgcaatgcaaggaggggaagaaagtcacagcactgatgaggacagctgcagaggtggcagtgtgtggacacaggaagtttgggccccctccctgccccagctttcctaggccagaattgtgtttggcagtaattgtctgtttaaaaaaataaaaaggaaaggaagcgttcaccgccacaaatcat

SEQ ID NO: 2529 - protein, 447 aa, Homosapiens; identical to SEQ ID NO: 289

SEQ ID NO: 2530 - DNA, 1828 bp, Homosapiens
atgtgttttgggggaaacagagagaaaggtgtggcctctccacttctgtggacaccccaaataggaagaagggtgcacacaaagcaccgcttcctccacgaagccctcctcaggcacatcgaggagaaccagctgcccaagctcttggctgctgcccttctgaggcctgcctgatttgggccacatagatctggttttggccattgactggcaacatggcagtagccaactgcagagccaccagggagcagcctcattctgattgagtataacgaagacgctgatgggaaagagagacacggctgacatcatctctaccgttgagttcaaccacacgggagagctgctggccacaggtgacaagggcggccgggtcgtcatcttccagcgggaaccagagagtaaaaatgcgccccacagccagggcgaatacgacgtgtacagcactttccagagccacgagccggagtttgactatctcaagagcctggagatagaggagaagatcaacaagatcaagtggctcccacagcagaacgccgcccactcactcctgtccaccaacgataaaactatcaaattatggaagattaccgaacgagataaaaggcccgaaggatacaacctgaaggatgaagaggggaaacttaaggacctgtccacggtgacgtcactgcaggtgccagtgctgaagcccatggatctgatggtggaggtgagccctcggaggatctttgccaatggccacacctaccacatcaactccatctccgtcaacagtgactgcgagacctacatgtcggcggatgacctgcgcatcaacctctggcacctggccatcaccgacaggagcttcaacatcgtggacatcaagccggccaacatggaggaccttacggaggtgatcacagcatctgagttccatccgcaccactgcaacctcttcgtctacagcagcagcaagggctccctgcggctctgcgacatgcgggcagctgccctgtgtgacaagcattccaagctctttgaagagcctgaggaccccagtaaccgctcattcttctcggaaatcatctcctccgtgtccgacgtgaagttcagccacagcggccgctacatgctcacccgggactaccttacagtcaaggtctgggacctgaacatggaggcaagacccatagagacctaccaggtccatgactaccttcggagcaagctctgttccctgtacgagaacgactgcattttcgacaagtttgaatgtgcctggaacgggagcgacagcgtcatcatgaccggggcctacaacaacttcttccgcatgttcgatcggaacaccaagcgggacgtgaccctggaggcctcgagggaaagcagcaagccccgggctgtgctcaagccacggcgcgtgtgcgtggggggcaagcgccggcgtgatgacatcagtgtggacagcttggacttcaccaagaagatcctgcacacggcctggcacccggctgagaacatcattgccatcgccgccaccaacaacctgtacatcttccaggacaaggtaaactctgacatgcactaggtatgtgcagttcccggcccctgccacccagcctcatgcaagtcatccccgacatgaccttcacgaccgcaatgcaaggaggggaagaaagtcacagcactgatgaggacagctgcagaggtggcagtgtgtggacacaggaagtttgggccccctccctgccccagctttcctaggccagaattgtgtttggcagtaattgtctgtttaaaaaaataaaaaggaaaggaagcgttcaccgccacaaatcat

SEQ ID NO: 2531 - protein, 430 aa, Homosapiens
MGKRDTADIISTVEFNHTGELLATGDKGGRVVIFQREPESKNAPHSQGEYDVYSTFQSHEPEFDYLKSLEIEEKINKIKWLPQQNAAHSLLSTNDKTIKLWKITERDKRPEGYNLKDEEGKLKDLSTVTSLQVPVLKPMDLMVEVSPRRIFANGHTYHINSISVNSDCETYMSADDLRINLWHLAITDRSFNIVDIKPANMEDLTEVITASEFHPHHCNLFVYSSSKGSLRLCDMRAAALCDKHSKLFEEPEDPSNRSFFSEIISSVSDVKFSHSGRYMLTRDYLTVKVWDLNMEARPIETYQVHDYLRSKLCSLYENDCIFDKFECAWNGSDSVIMTGAYNNFFRMFDRNTKRDVTLEASRESSKPRAVLKPRRVCVGGKRRRDDISVDSLDFTKKILHTAWHPAENIIAIAATNNLYIFQDKVNSDMH

SEQ ID NO: 2532 - DNA, 1966 bp, Homosapiens
cggcttggtcggcgcagcgcagcgccgcgcgcgtcccctcgccgccgtcgccgcagccaggcgcaccggcaccaggccccgccgccgggcgcacggacgcagcgcgcacgggccggccgggatgcgcgcctgggccccggcccgcccgaacccgcggccgccgcccgcccaccgcgcgctcgcttgaccgcggcgcccgcccccggccgcccccgcccgtccccctgccgcgatgccctcccttcggggccccggcggcccgcgcccctgctaggctgcggcggcatggcccgcgcgcccggcgcgacctctgcggattgcatcggtgtgtggcggcggggcatgcccagagcaccgggcacggccttcaatgggcgaggacacggacacgcggaaaattaaccacagcttcctgcgggaccacagctatgtgactgaagctgacatcatctctaccgttgagttcaaccacacgggagagctgctggccacaggtgacaagggcggccgggtcgtcatcttccagcgggaaccagagagtaaaaatgcgccccacagccagggcgaatacgacgtgtacagcactttccagagccacgagccggagtttgactatctcaagagcctggagatagaggagaagatcaacaagatcaagtggctcccacagcagaacgccgcccactcactcctgtccaccaacgataaaactatcaaattatggaagattaccgaacgagataaaaggcccgaaggatacaacctgaaggatgaagaggggaaacttaaggacctgtccacggtgacgtcactgcaggtgccagtgctgaagcccatggatctgatggtggaggtgagccctcggaggatctttgccaatggccacacctaccacatcaactccatctccgtcaacagtgactgcgagacctacatgtcggcggatgacctgcgcatcaacctctggcacctggccatcaccgacaggagcttcaacatcgtggacatcaagccggccaacatggaggaccttacggaggtgatcacagcatctgagttccatccgcaccactgcaacctcttcgtctacagcagcagcaagggctccctgcggctctgcgacatgcgggcagctgccctgtgtgacaagcattccaagctctttgaagagcctgaggaccccagtaaccgctcattcttctcggaaatcatctcctccgtgtccgacgtgaagttcagccacagcggccgctacatgctcacccgggactaccttacagtcaaggtctgggacctgaacatggaggcaagacccatagagacctaccaggtccatgactaccttcggagcaagctctgttccctgtacgagaacgactgcattttcgacaagtttgaatgtgcctggaacgggagcgacagcgtcatcatgaccggggcctacaacaacttcttccgcatgttcgatcggaacaccaagcgggacgtgaccctggaggcctcgagggaaagcagcaagccccgggctgtgctcaagccacggcgcgtgtgcgtggggggcaagcgccggcgtgatgacatcagtgtggacagcttggacttcaccaagaagatcctgcacacggcctggcacccggctgagaacatcattgccatcgccgccaccaacaacctgtacatcttccaggacaaggtaaactctgacatgcactaggtatgtgcagttcccggcccctgccacccagcctcatgcaagtcatccccgacatgaccttcacgaccgcaatgcaaggaggggaagaaagtcacagcactgatgaggacagctgcagaggtggcagtgtgtggacacaggaagtttgggccccctccctgccccagctttcctaggccagaattgtgtttggcagtaattgtctgtttaaaaaaataaaaaggaaaggaagcgttcaccgccacaaatcat

SEQ ID NO: 2533 - protein, 447 aa, Homosapiens; identical to SEQ ID NO: 287

SEQ ID NO: 2534 - DNA, 6055 bp, Homosapiens
gccggatgcataaaagactggctgcggtggctcagagcgccgagtcctaggccaggtctggggtaacctggaacttccacctgggctctgcgctaggtctctgtttcactccctccccgcggggcgcgcagctcgcgggtctttggacaccaccggtcctgagtccgcggactgccattttcattaagaactgccacttagaggtaccaaaataaagggtatttgctacctttaatacttgccagttcaggttggaggcacaggcagcagcaagaatggaaagaaatgttcttacaacattttcacaggaaatgtcccagttaattttgaatgaaatgccaaaagctgaatattccagtttattcaatgattttgttgaatctgaattttttttgattgatggggattcattacttatcacatgtatctgtgagatatcatttaagcctgggcagaacctccatttcttctatctggttgaacgctatcttgtggatcttattagcaaaggaggacaattcaccatagttttcttcaaggatgccgagtatgcgtatttcaacttccctgaacttctttctttgagaactgctttaattcttcatcttcagaagaataccaccattgatgttcgaacaacattttcgagatgcttatcaaaagagtggggaagtttcttggaagagagttacccatatttcctgatagttgcagacgaaggcctgaacgatctacaaacacagcttttcaactttttaatcattcattcttgggcaaggaaggtcaacgttgtactttcctcagggcaagaatctgatgttctttgcctttatgcataccttcttccaagcatgtacagacaccagattttttcctggaagaataagcagaacattaaagatgcttatacaaccctgcttaaccagttggaaagatttaagctttcagcattagcacctctttttggaagtttaaaatggaataatattacggaagaggcacacaagactgtatctctgcttacacaagtctggccagaaggatctgacattcggcgtgtcttttgtgttacttcatgctcattatctttgagaatgtaccatcgctttttaggaaacagagagccctcctctggtcaggaaactgagatccaacaggtgaacagtaattgcttaaccctgcaggagatggaagatttgtgtaaactgcattgtctcactgtggtttttctactccatctgcctctttctcaaagagcttgtgctagagtcatcacttcccattgggctgaggacatgaagcctttattacaaatgaaaaagtggtgtgaatatttcatcttaagaaatatacatacttttgaattttggaatctgaatttaattcacctttctgacttaaatgatgagcttttgttgaagaatattgctttttactatgaaaatgaaaatgtaaaaggcctacatttgaatttgggagataccattatgaaagattatgaatatctctggaataccgtatcaaagttggtcagagactttgaggttggacagccatttcctctgagaacaacaaaagtttgttttcttgaaaagaaaccatcaccaatcaaagacagctccaatgaaatggtgcccaatttgggttttattccaacgtcatcttttgtggttgataaatttgctggagatattttgaaagatttgccttttctaaagagtgatgatcctattgttacttcactggttaaacaaaaggaatttgatgaacttgtgcactggcattctcataaacccctgagtgatgattatgacaggtccaggtgtcagtttgatgaaaaatctagagaccctcgtgttcttagatctgtgcaaaagtatcatgttttccaacggttttatgggaattcattagaaacagtctcttcgaaaatcatcgtgactcaaactattaagtcaaagaaggattttagtgggcccaagagcaaaaaggcacacgagaccaaggctgaaataattgctagagagaataagaaaaggttatttgccagggaagaacaaaaggaagagcaaaagtggaatgctttgtcattttctattgaagagcaattgaaagaaaatttacactctggaataaagagcctggaagattttttgaaatcctgtaaaagtagctgtgtgaaacttcaggttgaaatggtggggttaactgcttgcttgaaagcctggaaagaacattgccgaagtgaagaaggtaaaaccacgaaagatttaagtatagctgttcaggtgatgaaaaggatccactccttgatggaaaaatactcagaacttttacaagaagatgatcggcaactcatagccagatgccttaagtatttaggatttgatgagttggcaagttctttacatccagcccaggatgcagaaaatgatgtaaaagtgaagaaaaggaataaatattcagttggcattgggccagctcggttccaactgcaatacatgggccattatttgatacgagatgagagaaaagacccagatcccagggtccaggattttattcccgacacatggcagcgagagctccttgatgttgtggataagaatgagtcagcagtgattgttgccccaacgtcctcaggcaaaacctatgcctcctactactgtatggagaaagtgctgaaggagagcgacgacggggtggtcgtgtacgttgcacccacaaaggcccttgttaatcaagtggcagcaactgttcagaatcgttttacgaaaaatctgccaagtggtgaagttctctgtggtgttttcaccagggagtatcgtcatgatgccttaaactgtcaggtacttattacagtgcctgcctgctttgaaattctgctgcttgctcctcatcgccaaaactgggtgaaaaagatcagatatgttatatttgatgaggttcattgtcttggtggagaaattggagcagaaatctgggaacatctccttgtcatgatccgatgtccctttttggctctttcagctaccataagtaatcctgaacatctcaccgagtggctacaatcggtaaaatggtactggaaacaagaagacaaaataattgaaaataataccgcttctaaaagacatgtgggtcgtcaggccggctttcccaaagactacttgcaagtaaaacaatcgtataaagttagacttgtgctctatggagagaggtataatgatctagagaagcatgtatgttcaataaaacatggtgacattcattttgatcattttcacccatgtgctgcactaacaacagatcatattgaaaggtatggattccctcctgatcttaccctttcacctcgagaaagcatccagctgtatgatgccatgtttcaaatttggaaaagttggcctcgggcccaggaactgtgcccagaaaacttcattcattttaacaataaattagtcattaaaaagatggatgctaggaaatatgaagagagtctaaaggcagaattaacaagttggattaaaaatggcaacgtagagcaggccagaatggtacttcagaatcttagtcctgaagcagatttgagtccagaaaacatgatcaccatgtttccacttctagttgaaaaactaaggaaaatggagaagttacctgcactattttttttattcaagttaggagctgtagaaaacgcagctgaaagtgtgagcactttcctaaagaaaaagcaggagacaaaaaggcctcccaaagctgataaagaagcccatgtcatggctaacaaacttcgaaaagttaaaaaatccatagagaaacaaaagatcatagatgaaaagagccagaaaaaaaccagaaatgtggatcaaagcctaatacatgaagctgaacatgataatctagtgaagtgtctagagaagaacctggaaatcccacaggactgcacatatgctgatcaaaaagcagtggacactgagactttgcagaaggtatttggtcgagtaaaatttgaaagaaaaggtgaagaattgaaagccttggcagaaaggggtattggatatcatcacagtgctatgagtttcaaagaaaaacaattagttgaaatcctctttagaaaaggatatcttagggtggtgacagctactggaacacttgctttaggtgtcaacatgccttgtaaatctgtggtttttgctcaaaactcagtctatctggatgcgttgaattatagacagatgtctggccgtgctggaagaagaggtcaagacctgatgggagatgtatatttctttgatattccattccccaaaataggaaaactcataaaatccaatgttcctgagctgagaggacacttccctctcagcataaccctggtcctgcgactcatgctgctggcttccaagggagatgacccagaggatgccaaggcaaaggtgctatcagtgctaaagcattcattgctgtccttcaagcaacccagagtcatggacatgttaaaactttacttcctgttttctttgcagttcctggtgaaagagggctatttagatcaagaaggtaatcctatggggtttgctggacttgtatcacatttgcattatcatgaaccttctaatcttgtttttgtcagttttcttgtaaatggactcttccatgatctctgtcagccaaccaggaaaggctcaaaacatttttctcaagacgttatggaaaagctagtattagtattggcacatctctttggaagaagatattttccaccaaagttccaagatgcacacttcgagttttatcaatcaaaggtgttccttgatgatctccctgaggattttagtgatgctttagatgaatataacatgaaaattatggaggactttaccactttcctacgaattgtttccaaactggctgatatgaatcaggaatatcaactcccattgtcaaaaatcaaattcacaggtaaagaatgtgaagactctcaactcgtatctcatttgatgagctgcaaggaaggaagagtagcaatttcaccatttgtttgtctgtctgggaactttgatgatgatttgcttcgactagaaactccaaaccatgttactctaggcacaatcggtgtcaatcgctctcaggctccagtgctgttgtcacagaaatttgataaccgaggaaggaaaatgtcgcttaatgcctatgcactggatttctacaaacatggttccttgataggattagtccaggataacaggatgaatgaaggagatgcttattatttgttgaaggattttgcactcaccattaaatctatcagtgtttccttgcgtgagctatgtgaaaatgaagacgacaacgttgtcttagcctttgaacaactgagtacaactttttgggaaaagttaaacaaagtctaaaaacaaagtctatgcaaaccacttaaaaataattccatagtagtttttcaggtcacgtttttgattcttatgcttcttgccagaaatacattatgataaagtggaaatacattacgatgaagtggaaagagcaaacactttggaatcaaacagagttgcaatcaaacctgccatgttctgtcatgaatactcacaaattatttagtatacctgaatcttggtttctttttataactgagtaataatggttacatctcaggtagtttgaggattgactaaaaaaatgcgagaatgttgtatgtgactgaataacaatttttactctgcgaagccaaagtaaatataatattatcagtaactttatccccagtgtcagtatttataaaatgtttattaaggctagaaaaaatgaatacaatatcctgaaggtgaaatatattctcttcaattagcataaatatgatttacataagttagctatacagctattgagatagtactttctagtaaacttaaactactttttaaacatacattttgtgatgatttaacaaaaatatagagaatgatttgctttattgtaattgtatataagtgactggaaaagcacaaagaaataaagtgggttcgatctgtttacc

SEQ ID NO: 2535 - protein, 1712 aa, Homosapiens
MERNVLTTFSQEMSQLILNEMPKAEYSSLFNDFVESEFFLIDGDSLLITCICEISFKPGQNLHFFYLVERYLVDLISKGGQFTIVFFKDAEYAYFNFPELLSLRTALILHLQKNTTIDVRTTFSRCLSKEWGSFLEESYPYFLIVADEGLNDLQTQLFNFLIIHSWARKVNVVLSSGQESDVLCLYAYLLPSMYRHQIFSWKNKQNIKDAYTTLLNQLERFKLSALAPLFGSLKWNNITEEAHKTVSLLTQVWPEGSDIRRVFCVTSCSLSLRMYHRFLGNREPSSGQETEIQQVNSNCLTLQEMEDLCKLHCLTVVFLLHLPLSQRACARVITSHWAEDMKPLLQMKKWCEYFILRNIHTFEFWNLNLIHLSDLNDELLLKNIAFYYENENVKGLHLNLGDTIMKDYEYLWNTVSKLVRDFEVGQPFPLRTTKVCFLEKKPSPIKDSSNEMVPNLGFIPTSSFVVDKFAGDILKDLPFLKSDDPIVTSLVKQKEFDELVHWHSHKPLSDDYDRSRCQFDEKSRDPRVLRSVQKYHVFQRFYGNSLETVSSKIIVTQTIKSKKDFSGPKSKKAHETKAEIIARENKKRLFAREEQKEEQKWNALSFSIEEQLKENLHSGIKSLEDFLKSCKSSCVKLQVEMVGLTACLKAWKEHCRSEEGKTTKDLSIAVQVMKRIHSLMEKYSELLQEDDRQLIARCLKYLGFDELASSLHPAQDAENDVKVKKRNKYSVGIGPARFQLQYMGHYLIRDERKDPDPRVQDFIPDTWQRELLDVVDKNESAVIVAPTSSGKTYASYYCMEKVLKESDDGVVVYVAPTKALVNQVAATVQNRFTKNLPSGEVLCGVFTREYRHDALNCQVLITVPACFEILLLAPHRQNWVKKIRYVIFDEVHCLGGEIGAEIWEHLLVMIRCPFLALSATISNPEHLTEWLQSVKWYWKQEDKIIENNTASKRHVGRQAGFPKDYLQVKQSYKVRLVLYGERYNDLEKHVCSIKHGDIHFDHFHPCAALTTDHIERYGFPPDLTLSPRESIQLYDAMFQIWKSWPRAQELCPENFIHFNNKLVIKKMDARKYEESLKAELTSWIKNGNVEQARMVLQNLSPEADLSPENMITMFPLLVEKLRKMEKLPALFFLFKLGAVENAAESVSTFLKKKQETKRPPKADKEAHVMANKLRKVKKSIEKQKIIDEKSQKKTRNVDQSLIHEAEHDNLVKCLEKNLEIPQDCTYADQKAVDTETLQKVFGRVKFERKGEELKALAERGIGYHHSAMSFKEKQLVEILFRKGYLRVVTATGTLALGVNMPCKSVVFAQNSVYLDALNYRQMSGRAGRRGQDLMGDVYFFDIPFPKIGKLIKSNVPELRGHFPLSITLVLRLMLLASKGDDPEDAKAKVLSVLKHSLLSFKQPRVMDMLKLYFLFSLQFLVKEGYLDQEGNPMGFAGLVSHLHYHEPSNLVFVSFLVNGLFHDLCQPTRKGSKHFSQDVMEKLVLVLAHLFGRRYFPPKFQDAHFEFYQSKVFLDDLPEDFSDALDEYNMKIMEDFTTFLRIVSKLADMNQEYQLPLSKIKFTGKECEDSQLVSHLMSCKEGRVAISPFVCLSGNFDDDLLRLETPNHVTLGTIGVNRSQAPVLLSQKFDNRGRKMSLNAYALDFYKHGSLIGLVQDNRMNEGDAYYLLKDFALTIKSISVSLRELCENEDDNVVLAFEQLSTTFWEKLNKV

SEQ ID NO: 2536 - DNA, 1833 bp, Homosapiens
tttcaccctccccctttgataatggtcaaattatctctttaataattttttttgtggtttttacctatgcctctcaatttcattatgattaatacaatagaatgcttaactgggagtgcatttggcagataaattaactgccatggacagaccactattaaagtttgagttaattcttttatgtttatgtttttatactttttaattaagaaatgttgttctctttaggatgcgtatgggacagcttttaaagtgtttgaaagattttgcattcaacattcaggctatcagtgactccttgagtgaactatgtgaaaataagcgtgacaatgtagtcctggcatttaaacaattgagtcaaaccttttatgagaaacttcaagaaatgcaaattcaaatgagtcaaaatcatttagaataacaccatggaaaactttcaagtctgattatgtggtatttatccctttgcaaggagagatataattaagcttacacaatgaaatggaaaaaatgtttgtcttggagtcaaacagaattaaactcagatatcagctctgctattttctaactgaatgactttaagttatgtaatatatctgagctttaacttcatttttggcaaaaccggagtaaaaatgaatacctctagttgttttgaggattaaatgagataatgtaagaaaagtgattgggattgggtggtgacttaatgaacggtagtggtttttttagtagttaatgtatagcaaaattagtttcacattgtcaagttttcaatacatccccaagttaattgaattttaaattaatgatcaataaatcacaaaggacccaaatcaattctgaacaacaatttagttatgtaagaagacttctgagattacaagaaactcactgctgtggactggatgtttgtgccctcccctccaaaatttttatattgaaattctaaccctcaatgtgatggtattaggagatgataggtcatgagggtggagctccttggatgtaattagtgcctttaacagagagacaagagagcttgttctccaatctctgctcactaccactggatgatacaatgggaagatggccatctgcagaccaagaagcaagccctcaacagaactgaatctacttacaccatgatcttgaactttccagcctccaggattgtgagaaatacatgtttgttgtttagccatctagtctgtggttttctgttgaagcagtctgaattgactaaaacagtcacttggagtagttataaaccactttcctgttgaaagcagaacatgctgattcaactgttttgttcaatagcaatgatagattttgtttaagtcccctacactttcttatttctaaatgatcaagagtacacttcctggcagtgattaaggagtgtgtatctaacagaaaaaatatatataccctgtgaacccgaatatggaattcagattgtttctgccctcagtatcatacttaaaaaacaagcatacaaacaaacataagggaacaaacagcaaccataacaaaaacaaacctttaaaggtgcgtttttgctgtgataaatgaatacggtactctgaaggagaaaaaagtttctcaaatgagcttaaactgcaagtgatttaaaaattagagaatataattcttaaagctattgaaagtttcaaccagaaaacctcaagtgaattttgtatgtaaatgaaatcttgaatgtaagttctgtgattctttaagcaaacaattagctgaaaacttggtattgttgtagtttatgtagtaagtgacttggcacccatcagaaaataaagggcattaaattga

SEQ ID NO: 2537 - protein, 63 aa, Homosapiens
MRMGQLLKCLKDFAFNIQAISDSLSELCENKRDNVVLAFKQLSQTFYEKLQEMQIQMSQNHLE

SEQ ID NO: 2538 - DNA, 3509 bp, Homosapiens
acaagtctttaggatccaaactttccctcatcttcctgtcttcttctgagccctccacaaaattccaacctctgtccactatgcagttccaaaatcgcttccacattttcagatatctttatagcagtgccccactcctcagtatcaacttcctgtattagttcattctcacgctgctatacagagacacttgagactgggtaatttataaagaaaagacattttattggcttatggttctgcaggctgtacaggaagcataagtagcttctgcttctgggtaggcctcaggaaactttcaatcatgtcagaaagtgaagcagaagtaggccgtgtgttacatgcatggctggagcaggaggaagagaggtagaggggaggtgctacacacttttaaacaaccagatctcatgataactcactatcatgagaacagcaccagaggggaaattcacctccatgatccaatcacctccaatcaggccccacctccaacactggggattacaatttgacatgaaatttgggtgatgacacagatccaaatatttccattctgttgactgcaatctacctaattccattaggtttaatgggataactcaagattcagaacaatataattactctatttacctttagaatggcctaagacaactaatcttgtaagccggattggctttcatacttcattttttcaggccactattggtcaccactgtttcagggatttagcagattatttgccagtctgggttatgtataacagttctgctttatatgatgtatttaattcaaggaagcatgtgccatgtgaagatacaatcaaagagataatatgaaatcaaatgaaatttactttcacgtaagatctggtaaccttatctatatagtatgtatgtgtactatttattacatatcagtatttacaaatactgtttaaaactagataaattaaagtactcttcttttataggtgttgtcagtgctaaagcattcattgctgtcttttaagagacgaagagccatggagactttgaaactttactttttgttttccttgcagctccttatcaaagaggactatttaaataaaaagggtaatccaaagaaatttgcaggacttgcatcatatttgcatggtcatgaaccttcaaatcttgtttttgtaaattttctcaagagaggccttttccataatctctgtaagccagcctggaaaggctcacaacaattttcccaagatgtgatggaaaagctcgtgttagtattggcaaatttgtttggaagaaaatatattccagcaaaattccaaaatgctaatttaagtttttctcagtcaaagacacaacaacaaaataataacaagcaaacagaacccaagaaaatgtgcattagaacctgggaatgtagaagaagcttgtttctatccagtaaccctagtgaatagagaacaaaaaggtgatccttgccgaactcccggaggattttaaagctgctttatatgagtataacctggcagtaatgaaggattttgcctccttcctgctgattgcttccaagtcggtgaacatgaaaaaagagcatcaactccctttgtcaagaatcaaattcacaggtaaagaatgtgaagactcccaactcgtgtctcacttgatgagctgcaagaaaggaagagtagccatttcaccatttgtttgtctttcggggaacacagataatgatttgcttcgaccagagactatcaaccaggtcatcctgcgcacagtcggtgttagtggcactcaggctcctctgctgtggccatggaaattagataaccgaggaaggagaatgccactaaatgcatatgtgctcaatttctataaacacaactgcttgacaagattagaccaaaaaaatgggatgcgtatgggacagcttttaaagtgtttgaaagattttgcattcaacattcaggctatcagtgactccttgagtgaactatgtgaaaataagcgtgacaatgtagtcctggcatttaaacaattgagtcaaaccttttatgagaaacttcaagaaatgcaaattcaaatgagtcaaaatcatttagaataacaccatggaaaactttcaagtctgattatgtggtatttatccctttgcaaggagagatataattaagcttacacaatgaaatggaaaaaatgtttgtcttggagtcaaacagaattaaactcagatatcagctctgctattttctaactgaatgactttaagttatgtaatatatctgagctttaacttcatttttggcaaaaccggagtaaaaatgaatacctctagttgttttgaggattaaatgagataatgtaagaaaagtgattgggattgggtggtgacttaatgaacggtagtggtttttttagtagttaatgtatagcaaaattagtttcacattgtcaagttttcaatacatccccaagttaattgaattttaaattaatgatcaataaatcacaaaggacccaaatcaattctgaacaacaatttagttatgtaagaagacttctgagattacaagaaactcactgctgtggactggatgtttgtgccctcccctccaaaatttttatattgaaattctaaccctcaatgtgatggtattaggagatgataggtcatgagggtggagctccttggatgtaattagtgcctttaacagagagacaagagagcttgttctccaatctctgctcactaccactggatgatacaatgggaagatggccatctgcagaccaagaagcaagccctcaacagaactgaatctacttacaccatgatcttgaactttccagcctccaggattgtgagaaatacatgtttgttgtttagccatctagtctgtggttttctgttgaagcagtctgaattgactaaaacagtcacttggagtagttataaaccactttcctgttgaaagcagaacatgctgattcaactgttttgttcaatagcaatgatagattttgtttaagtcccctacactttcttatttctaaatgatcaagagtacacttcctggcagtgattaaggagtgtgtatctaacagaaaaaatatatataccctgtgaacccgaatatggaattcagattgtttctgccctcagtatcatacttaaaaaacaagcatacaaacaaacataagggaacaaacagcaaccataacaaaaacaaacctttaaaggtgcgtttttgctgtgataaatgaatacggtactctgaaggagaaaaaagtttctcaaatgagcttaaactgcaagtgatttaaaaattagagaatataattcttaaagctattgaaagtttcaaccagaaaacctcaagtgaattttgtatgtaaatgaaatcttgaatgtaagttctgtgattctttaagcaaacaattagctgaaaacttggtattgttgtagtttatgtagtaagtgacttggcacccatcagaaaataaagggcattaaattga

SEQ ID NO: 2539 - protein, 190 aa, Homosapiens; identical to SEQ ID NO: 299

SEQ ID NO: 2540 - DNA, 2783 bp, Homosapiens
atgagaataagagaaggtggttgtccagagtacgtagtgacagctactgaaacacttgccttagggatccacatgccatgcaaatctgttgtttttgcccaagactcagtctatctggatgctttaaattacagacagatgtctggtcgtgctggaagaagaggtcaagacctgcttggaaatgtgtatttctttgatatcccattgcccaaaataaaaagactccttgcatccagtgttcctgagctgagaggacagttccctctcagcataaccctggtcctgcgactcatgctgctggcttccaagggagatgacccagaggatgccaaggcaaaggtgttgtcagtgctaaagcattcattgctgtcttttaagagacgaagagccatggagactttgaaactttactttttgttttccttgcagctccttatcaaagaggactatttaaataaaaagggtaatccaaagaaatttgcaggacttgcatcatatttgcatggtcatgaaccttcaaatcttgtttttgtaaattttctcaagagaggccttttccataatctctgtaagccagcctggaaaggctcacaacaattttcccaagatgtgatggaaaagctcgtgttagtattggcaaatttgtttggaagaaaatatattccagcaaaattccaaaatgctaatttaagtttttctcagtcaaaggtgatccttgccgaactcccggaggattttaaagctgctttatatgagtataacctggcagtaatgaaggattttgcctccttcctgctgattgcttccaagtcggtgaacatgaaaaaagagcatcaactccctttgtcaagaatcagtaagcagattttagttccattccggaacaatttaaagagtaaacaatcttggttaagaaagcctctggatattggatgcttcaaagctgaattcacaggtaaagaatgtgaagactcccaactcgtgtctcacttgatgagctgcaagaaaggaagagtagccatttcaccatttgtttgtctttcggggaacacagataatgatttgcttcgaccagagactatcaaccaggtcatcctgcgcacagtcggtgttagtggcactcaggctcctctgctgtggccatggaaattagataaccgaggaaggagaatgccactaaatgcatatgtgctcaatttctataaacacaactgcttgacaagattagaccaaaaaaatggtgactccttgagtgaactatgtgaaaataagcgtgacaatgtagtcctggcatttaaacaattgagtcaaaccttttatgagaaacttcaagaaatgcaaattcaaatgagtcaaaatcatttagaataacaccatggaaaactttcaagtctgattatgtggtatttatccctttgcaaggagagatataattaagcttacacaatgaaatggaaaaaatgtttgtcttggagtcaaacagaattaaactcagatatcagctctgctattttctaactgaatgactttaagttatgtaatatatctgagctttaacttcatttttggcaaaaccggagtaaaaatgaatacctctagttgttttgaggattaaatgagataatgtaagaaaagtgattgggattgggtggtgacttaatgaacggtagtggtttttttagtagttaatgtatagcaaaattagtttcacattgtcaagttttcaatacatccccaagttaattgaattttaaattaatgatcaataaatcacaaaggacccaaatcaattctgaacaacaatttagttatgtaagaagacttctgagattacaagaaactcactgctgtggactggatgtttgtgccctcccctccaaaatttttatattgaaattctaaccctcaatgtgatggtattaggagatgataggtcatgagggtggagctccttggatgtaattagtgcctttaacagagagacaagagagcttgttctccaatctctgctcactaccactggatgatacaatgggaagatggccatctgcagaccaagaagcaagccctcaacagaactgaatctacttacaccatgatcttgaactttccagcctccaggattgtgagaaatacatgtttgttgtttagccatctagtctgtggttttctgttgaagcagtctgaattgactaaaacagtcacttggagtagttataaaccactttcctgttgaaagcagaacatgctgattcaactgttttgttcaatagcaatgatagattttgtttaagtcccctacactttcttatttctaaatgatcaagagtacacttcctggcagtgattaaggagtgtgtatctaacagaaaaaatatatataccctgtgaacccgaatatggaattcagattgtttctgccctcagtatcatacttaaaaaacaagcatacaaacaaacataagggaacaaacagcaaccataacaaaaacaaacctttaaaggtgcgtttttgctgtgataaatgaatacggtactctgaaggagaaaaaagtttctcaaatgagcttaaactgcaagtgatttaaaaattagagaatataattcttaaagctattgaaagtttcaaccagaaaacctcaagtgaattttgtatgtaaatgaaatcttgaatgtaagttctgtgattctttaagcaaacaattagctgaaaacttggtattgttgtagtttatgtagtaagtgacttggcacccatcagaaaataaagggcattaaattga

SEQ ID NO: 2541 - protein, 456 aa, Homosapiens
MRIREGGCPEYVVTATETLALGIHMPCKSVVFAQDSVYLDALNYRQMSGRAGRRGQDLLGNVYFFDIPLPKIKRLLASSVPELRGQFPLSITLVLRLMLLASKGDDPEDAKAKVLSVLKHSLLSFKRRRAMETLKLYFLFSLQLLIKEDYLNKKGNPKKFAGLASYLHGHEPSNLVFVNFLKRGLFHNLCKPAWKGSQQFSQDVMEKLVLVLANLFGRKYIPAKFQNANLSFSQSKVILAELPEDFKAALYEYNLAVMKDFASFLLIASKSVNMKKEHQLPLSRISKQILVPFRNNLKSKQSWLRKPLDIGCFKAEFTGKECEDSQLVSHLMSCKKGRVAISPFVCLSGNTDNDLLRPETINQVILRTVGVSGTQAPLLWPWKLDNRGRRMPLNAYVLNFYKHNCLTRLDQKNGDSLSELCENKRDNVVLAFKQLSQTFYEKLQEMQIQMSQNHLE

SEQ ID NO: 2542 - DNA, 3399 bp, Homosapiens
atgaaagtcaatgttgtgctttcatcagggcatgaatctgatactctcagattttatgcatatactatggaaagcacagacagaaaccaaactttttccaaggagaatgaaacagtgattcagagtgcatataaaagcctcatacaacacttggaagaaataagggttttagtattagcaactcattttgaacatttgaaatggaatgatatgatggaagaggcgtatcagactctatttctgcttcagcacctatggtcagaaggatcggacatccagcgtgttctctgtgtcacttcatgttcactatccttgagaatgtaccatcgtgtcttagtgcacagtaattgcctatccctgcaggaggtggaagatttctgcagactgcgttgcctctgtgtggcttttcaactccacttacccctttctcagagagcttgttctcgagtcatcacatgctcttggattaggaacagtgattctttcttaaaaatgaacaagtggtgtgaatatttcattttaagcaacttaaacgtttttggatgctggaatctgaatttaaatcatgtttctgacttgtatgatgagcaattgttaaagaatatagccttctactatgaatttgaaagtactcaagaaccacatttgaatttgggagattccattaggagggattatgaagacctgtggaatgttgtgtcacacctggttaaagaatttaacgttggaaagtcttttcctctgagaacaacaagaagacattttcttagacaagagaaatcggtcattcaagaaatctccttggaaaagatgcctagtgtgggctttattccaatgacatctgctgtaattgatgagtttgttggagatatgatgaaggatttgcctattctaaagagtgatgatccggttgttccttcactgtttaaacaaaagacatctgatgaacttttgcactggcatgctcaaagactccttagtgacgactatgacaggatcaaatgtcatgttgatgaacaatctagagatcctcatgttcttgatttcctgaaaaagattcaggattatcagcaattttatgggaaatcgttagaatcaatctctacgaaagtcattgtgactcaaactactcggccaaaggaggattccagtggtgccagtggtgaaatattacagaataccaaaccccaccaaattaccaaaaagagtaagaaaaagtcatttctcaaagaagatcagaacaaagctcagcaaaacgatgatctgctgttttctattgaagaggagatgaagaacaatttacattctggaataaggaaattggaagattatttgacatcatgtgcaagtaattcagtgaaatttggagttgaaatgttaggattaattgcctgctttaaagcatggaaaaaacattgccgaggtgaaggcaaaatttcgaaagatttaagtatagctgttcaaatgatgaaaaggattcattcactcctggagagatacccagaaattttggaagcagaacatcatcaatatatagctaaatgccttaaatatttaggctttaatgatctggcaaactctttggatccaactctgataggagatgacaaaaataagaagaaatattcgattgacattggaccagctcggtttcaactgcaatacatgggccattacttgataagagatgaaagaaaagatcgggatcccagggtccaggattttattcccaacgcatggcagcaggaactcctggatgtggtagataagaatgagtcagcagtgattgttgccccaacgtcctcaggcaaaacctatgcttcctactactgcatggagaaagtgctgagggagagcgatgtcggggtggttgtgtacgttgcacccgcaaagtcccttgttggtcaagtggctgcaactgttgagaatcgttttactaaaacgttgcctgccggcagaactctatgcggtgcttttacaagagattattgtcacaatgtactaaactgtcaggtacttattacagtgccggaatgttttgaaatcctgttgcttgctcctcatcgccaaaaatgggtggaaaggatcagatatgttatatttgatgaggtccattatcttggcagagaagttggagcaaaattttgggagctcctccttgtcattattcgatgtccctttttggttctttcagctaccataaataacccaaatcttctcaccaagtggctgcaatcagtaaaacagtactggaaacaggcagacaagattatggaagagaaatgtatttctgaaaaacaggctgacaaatgtctcaactttctccaagaccattcatataaaaatcaatcatatgaagttagacttgtgctctatggagagagatacaatgatttagagaagcatatatgttcagtaaaacatgatgatgtttattttgatcattttcatccctgtgctgcgctaacgacagatattattgaaaagtatggattcccacctgatcttaccctcacccctcaagaaagcatccagctttatgataccatggctcaagtctgggaaacttggcccagggctcaggaattgtgtccagaggaattcattctttttaagaataagatagtcattaagaagttggatgctagaaaatatgaagaaaacttaaaggcagaattgacaaattggattaaaaatggccaagtgaagaaggtcaaaagagtactgaagaaccttagtccggattcattgtctagttcaaaagatatggtgaaaatgtttcctcttcttgttgaaaagttaagacaaatggataagttgcctgcaatattttttttgtttaagaatgatgatgtgggaaaaagagctggaagtgtgtgcacttttctggagaagacagagacaaaaagccatccccacactgaatgtcatagttatgtctttgcaatagatgaagtacttgaaaaagtgaggaagacacagaaaaggatcactaaaaaaaacccaaagaaggctgaaaaactggaaagaaaaaaagtgtatagagctgaatatattaatttcctggagaatctgaagattctggaaatttctgaggactgcacgtatgctgatgtcaaagccctacacactgaaattaccaggaataaagactcagtacgtcagagaattattaatataatacgttacagttgtgacattttatcatagtgatcgtttaatatctttgaacactgaaatgacttgtgtaatacctttgaaatatgattatctctgtgtgtgattttgtttgttttgcaatgattatcccaatttaatgtgctaaagttctataagtgactcttccttgctcagtgtgaatgtcagcctcttattttatttcactctattatcctggat

SEQ ID NO: 2543 - protein, 1069 aa, Homosapiens
MKVNVVLSSGHESDTLRFYAYTMESTDRNQTFSKENETVIQSAYKSLIQHLEEIRVLVLATHFEHLKWNDMMEEAYQTLFLLQHLWSEGSDIQRVLCVTSCSLSLRMYHRVLVHSNCLSLQEVEDFCRLRCLCVAFQLHLPLSQRACSRVITCSWIRNSDSFLKMNKWCEYFILSNLNVFGCWNLNLNHVSDLYDEQLLKNIAFYYEFESTQEPHLNLGDSIRRDYEDLWNVVSHLVKEFNVGKSFPLRTTRRHFLRQEKSVIQEISLEKMPSVGFIPMTSAVIDEFVGDMMKDLPILKSDDPVVPSLFKQKTSDELLHWHAQRLLSDDYDRIKCHVDEQSRDPHVLDFLKKIQDYQQFYGKSLESISTKVIVTQTTRPKEDSSGASGEILQNTKPHQITKKSKKKSFLKEDQNKAQQNDDLLFSIEEEMKNNLHSGIRKLEDYLTSCASNSVKFGVEMLGLIACFKAWKKHCRGEGKISKDLSIAVQMMKRIHSLLERYPEILEAEHHQYIAKCLKYLGFNDLANSLDPTLIGDDKNKKKYSIDIGPARFQLQYMGHYLIRDERKDRDPRVQDFIPNAWQQELLDVVDKNESAVIVAPTSSGKTYASYYCMEKVLRESDVGVVVYVAPAKSLVGQVAATVENRFTKTLPAGRTLCGAFTRDYCHNVLNCQVLITVPECFEILLLAPHRQKWVERIRYVIFDEVHYLGREVGAKFWELLLVIIRCPFLVLSATINNPNLLTKWLQSVKQYWKQADKIMEEKCISEKQADKCLNFLQDHSYKNQSYEVRLVLYGERYNDLEKHICSVKHDDVYFDHFHPCAALTTDIIEKYGFPPDLTLTPQESIQLYDTMAQVWETWPRAQELCPEEFILFKNKIVIKKLDARKYEENLKAELTNWIKNGQVKKVKRVLKNLSPDSLSSSKDMVKMFPLLVEKLRQMDKLPAIFFLFKNDDVGKRAGSVCTFLEKTETKSHPHTECHSYVFAIDEVLEKVRKTQKRITKKNPKKAEKLERKKVYRAEYINFLENLKILEISEDCTYADVKALHTEITRNKDSVRQRIINIIRYSCDILS

SEQ ID NO: 2544 - DNA, 2652 bp, Homosapiens
acctcctccccgcggggcgtgcagctccgaagctctttggacctagcaggttcggcggccgggtttgctaaagctgccataacaaaatattatagagtggtggcttaaacaacagaaatttatttctcactattctggaggctgtgaagtacaagatcaagattctggctgattgagtttctggtgagaggtgccattcacatcaaatgtagccattttagaggtgtcaaaataaatcagccatatttaataaattccagctctactcttctaccctgtagcccaagaagcagcaacgatggggtcaaaggatcatgcagtatttttcagggaaatgacacagttaattttgaatgaaatgccaaaagctgggtattccagcatattaaatgattttgtggaatctaatttttttgtgattgatggagattccttgcttgtcacatgcctgggtgtaaaatcattcaagtggggacagaatctccactttttctatctggttgaatgctatcttgtggatcttctgagtaacggaggacaattcaccatagttttctttaagatggagtttcgctctttttgcacaggctgaagtgcaatgccgtgatctcggctcactgcaacctccacctcctaggttcaagtgattctactctctcagcctcccaagtagctgggattacaggcgcgtgccaccatgctcagctaatttttgtatttttagtagagacagggtttcatcatattggtcaggctggtgtcgaacacctgacctgaggcaatccacccgccttggtctcccaaagttctagaacttttaataaatagaattttacagtatgaactctttgtataaacctttcattcaacataatatttttgagaggcatccattttgttgtgtgcagtggtattttgttccttttatcacttttgagtaaggttttattgtagaaatgtgccacggtttgtttacccattttcttgttgagtggacactttcctgttgagcaatctctttcaatatcttgcctagatgaataaagctactatgtgcattcacatgcaagtcttcgtgtggacgtaagtttttattttccttgtgcatgtatctgtggttgaaatatatgttttataaaactgccaaagcttttcctaaggtagttgtgcccctttacactcactccagcaatgaataacagttctggtgccctgtgtagttgcaaacatttgtatttggtcagtccagccattctggtggatgtgtagtgttatgtccctgtgttttaattggtatttatcaaatggctaatgatgttgcctactttttcaagtgcttattgttcatttgtatactatgacttgtgaagcatctgctcgtatcttttgaccattttaaattgggttctttatctttttaatattgagttgtagtagttcttgatatattctgtatacaacctcttgtcatgtatattattgcaaatatattttcccagtctgtggcttgtcacttcattttgagacagagtctcgctctgtcacgtaggctggagtgcagtggcgcaatcttggctcactgcaacctctgcctcccgggttcatgccattctcctgcctcagcctcctaagtacttggaactacaggcatgcactaccatgcccggctaatttttttgtatttttagtagacatggggtttcatcgtgttagcaggatggtctcaatctccggacctcgtgatctacccgcctctgcctcccaaagtgctgggattacaggcatcagccaccgtgcccggctgccacttcgttttcttagtactatctttggatgaccagatattttaattttggtgaaatctaacttattattctttaatggttattgtgcctgtatcctgataagaatcattgcctatctcttagtcacaaagatattttcctatatttattaataattctagaagtatgtagtttcagcttttgcattttggtctatgatatttcttgaattaatttttgtgtgtttgtggtgtgaatgggggattgaggttgatttgttccagcatccattgttgagaacatttttcttccaccagtggattgctttggtttcttcatcaaaaaatcaaatgattatatatgtgtaggtccatttctgggctttctactatgttccatcaaaggatttaacaaattaccagtaccacaatgtcctgatttgtgtaattttatagtaaatcttgaagcccactttgttcttctttgtttaactttggctattctaggttctctgcatttccacacgaattttagaatcagcttgccaatttctatttaaaaagaacgatgggattttaatgatattcattaaatttgtagaccaatatagtctttcagttagtgaacacaatatgtatctctgttttttaagatctctaatttgttttatcagttttgtagtcttcagtgtggaggcgttgcacatcttttgctaaatctatttcaagatatttcatgttttgatcttaccgtaaattgaatttttaaaaataattttttagtttttgctgcttgtatatagaagtagaattgatttttgtttgttaactggtatcctgcaatcttattaaaacaacttattaatttc

SEQ ID NO: 2545 - protein, 97 aa, Homosapiens; identical to SEQ ID NO: 301

SEQ ID NO: 2546 - DNA, 822 bp, Homosapiens
tccacctcctccccgcggggcgtgcagctccgaagctctttggacctagcaggttcggcggccgggaggtgccattcacatcaaatgtagccattttagaggtgtcaaaataaatcagccatatttaataaattccagctctactcttctaccctgtagcccaagaagcagcaacgatggggtcaaaggatcatgcagtatttttcagggaaatgacacagttaattttgaatgaaatgccaaaagctgggtattccagcatattaaatgattttgtggaatctaatttttttgtgattgatggagattccttgcttgtcacatgcctgggtgtaaaatcattcaagtggggacagaatctccactttttctatctggttgaatgctatcttgtggatcttctgagtaacggaggacaattcaccatagttttctttaagatggagtttcgctctttttgcacaggctgaagtgcaatgccgtgatctcggctcactgcaacctccacctcctaggttcaagtgattctactctctcagcctcccaagtagctgggattacaggcgcgtgccaccatgctcagctaatttttgtatttttagtagagacagggtttcatcatattggtcaggctggtgtcgaacacctgacctgaggcaatccacccgccttggtctcccaaagttctagaacttttaataaatagaattttacagtatgaactctttgtataaacctttcattcaacataatatttttgagaggcatccattttgttgtgtgcagtggtattttgttccttttatcacttttgagtaaggt

SEQ ID NO: 2547 - protein, 97 aa, Homosapiens; identical to SEQ ID NO: 301

SEQ ID NO: 2548 - DNA, 745 bp, Homosapiens
tgcgttgtgtggaaggtgtcttgctttccctttgccttccgccataattagctcagccatccaggtgaaggtacagagatagatgatcccagtttgacatgcagtgctcttggtaattctatgccggtgtgatagacacagaagatgaaatagactaaaaagacccactaatactgctgttaatgagtgaagaggaaatgaggtaaacaccaacgccattaaagtggttctactttacgtcaaccaccaggaaacaaggatcacggagcatgtgagaaaatggtaattgagaaggctgatcaaggaacacactaaaattggaggcatgaaacacttgcagaattgtcccaatggtccatctggggatcctgggaacaagtgtctttcaagccacgaccagtctttctacttcttcctcatactttgtatctggcttgtgtacatgtcacagaatcaggtactaaaacaagaggtgatacagaaataagctatcccaaatatagcattaagtgaaacaaacacatcgtatactagttattatatccggaagtttgcattttatatgcctcatggagatacttagcgatattcagcaaccttgcaaatggagtggtctctgccagacagctactaacagctgtagaacaatttcagaagctgcttacccaagaagtctaatgtggaaggacatggctgtcactgcctggggaagcaaataggaaagaatatgacaaaggaggaaatc

SEQ ID NO: 2549 - protein, 53 aa, Homosapiens
MKHLQNCPNGPSGDPGNKCLSSHDQSFYFFLILCIWLVYMSQNQVLKQEVIQK

SEQ ID NO: 2550 - DNA, 594 bp, Homosapiens
tctgactttgagccaggacttgaagcagacactatggctcatgcagaaaagaaacttcttcccacaagactgccagcgaaattttgcagactcaagatgttcggagagtttggacaatcatcacagtttttggacgcctatctgagaccatcttctgtgaagtttattcagctcataagtgtgaataaaaaattgctaaatgtgaactcaaagagacagtgcagttttacatctgagtccactgaatgcatcacagaagcagcatgtgcagcaacaggagtccaatagcgtcaaccaccaggaaacaaggatcacggagcatgtgagaaaatggtaattgagaaggctgatcaaggaacacactaaaattggaggcatgaaacacttgcagaattgtcccaatggtccatctggggatcctgggaacaagtgtctttcaagccacgaccagtctttctacttcttcctcatactttgtatctggcttgtgtacatgtcacagaatcaggtactaaaacaagaggtgatacagaaataagctatcccaaatatagcattaagtgaaacaaacacatcgtatactagttattatat

SEQ ID NO: 2551 - protein, 84 aa, Homosapiens
MAHAEKKLLPTRLPAKFCRLKMFGEFGQSSQFLDAYLRPSSVKFIQLISVNKKLLNVNSKRQCSFTSESTECITEAACAATGVQ

SEQ ID NO: 2552 - DNA, 5789 bp, Homosapiens
gtgaccacggaccaggcagtctctaatgaataggcaaggccacaacctccattctcccagaaaagaagaaatgctcatctgaaattcatcacctctctggagtcttcaaactgaccaagcattgaaaagaacacagtttcagaaaacagtttccagtgcctctggccttcctactgaaagcagacacagagtgcatgaagaccgttcaaatatgtcagggacctcctcccatgagtccttctatgactccctctcagacatgcaggaagaaagcaagaatactgacttcttcccgggcctttctgctttcctcagccaggaagagataaacaagagtcttgacctggcccggagagccatagccgactccgaaacagaagattttgactcggaaaaggagatctcgcagattttcagtacttctcctgcaagcctctgtgaacatccttcccataaggagaccaaattgggtgaacacgcctcgaggagacctcaggataacaggtcaacacctgtccagcctctggcagagaaacaaactaagagtatctcttcacctgtttcaaagaggaaacctgccatgtcacccctgctcaccaggcccagctacatccggagcctccgaaaggctgaaaagcgtggtgcaaaaactcccagcacaaacgtaaagcccaaaacgccacatcaaagaaagggtggcccccagagccagctgtgtgacaaggcagctaatttaattgaggagctaacatccatatttaaagccgcaaagccaagaaacagaagcccaaatggggagtcctcgtcaccagacagtgggtacctgtctcctaaaaatcagccgtcagccctgctgagtgcctcagccagccagagccctatggaagaccaaggggagatggaaagagaggtcaagtcccctggggccaggcattgctaccaggacaaccaggacttggcagtgccacacaaccgcaagtctcacccacagccccacagcgccctccacttcccagctgcacctcgattcatccaaaagctgaggagccaagaagtagcagaagggagccgagtttatctggagtgtagagtcactggaaaccccactcctcgagtcagatggttctgtgaagggaaagaactgcacaacactcctgatattcaaatccactgtgagggaggggacctccataccctgatcatagcagaggcctttgaggacgacacaggtcgctacacctgtttggctacgaatcccagcggctcagacacaacatctgctgaggtgttcattgaaggtgccagttcaacagattctgacagtgaaagtttagctttcaaatcaagagctggagctatgccacaagctcaaaagaaaacaacttctgtttccttgacaataggatcatcatctccaaagacaggggtgaccacagctgtgattcaaccactgtctgtccctgtgcaacaggttcacagtccaacttcatatctctgccgacctgatggaaccactactgcctactttcctcctgtttttacaaaggaactgcaaaacacagccgtggcggaaggccaggtggtggttctggagtgccgggtccgtggggcaccccctctgcaggtccagtggtttcggcaagggagtgaaatccaagactctccagatttccgaattctacagaaaaaacctagatctacagctgaacctgaggagatttgcaccctagttatcgctgagactttccctgaagatgcagggatctttacatgttcagcaagaaatgattatggatcagcaaccagcactgcccagctggttgtcacctcagccaacactgaaaactgtagttacgagtcaatgggagaatccaacaatgaccacttccaacactttccacctccccctccaatcttggagacaagttccttggagttggcttcaaagaaaccatctgagatccagcaggtgaacaaccctgagttaggcctgagcagggcagcccttcaaatgcaattcaatgctgctgagagggaaacgaacggagtccatcccagccgtggagtaaatggactgattaacggcaaagctaacagtaataaatctcttccaacaccagctgtcctgctttcacccactaaggagccaccacctctgcttgccaaaccaaaactaggatttccaaagaaggccagtagaactgctagaatagcctccgatgaggaaattcaaggcacaaaggatgctgttattcaagacctggaacgaaaacttcgcttcaaggaggacctcctgaacaatggccagccgaggttaacatacgaagaaagaatggctcgtcgactgctaggtgctgacagtgcaactgtctttaatattcaggagccagaagaggaaacagctaatcaggaatacaaagtctccagctgtgaacagagactcatcagtgaaatagagtacaggctagaaaggtctcctgtggatgaatcaggtgatgaagttcagtatggagatgtgcctgtggaaaatggaatggcaccattctttgagatgaagctgaaacattacaagatctttgagggaatgccagtaactttcacatgtagagtggctggaaatccaaagccaaagatctattggtttaaagatgggaagcagatctctccaaagagtgatcactacaccattcaaagagatctcgatgggacctgctccctccataccacagcctccaccctagatgatgatgggaattatacaattatggctgcaaaccctcagggccgcatcagttgtactggacggctaatggtacaggctgtcaaccaaagaggtcgaagtccccggtctccctcaggccatcctcatgtcagaaggcctcgttctagatcaagggacagtggagacgaaaatgaaccaattcaggagcgattcttcagacctcacttcttgcaggctcctggagatctgactgttcaagaaggaaaactctgcagaatggactgcaaagtcagtgggttaccaaccccagatctaagctggcaactagatggaaagcccgtacgccctgacagtgctcacaagatgctggtgcgtgagaacggggtgcactctctgatcatagagccagtcacgtcacgtgatgccggcatctacacatgtatagctaccaaccgagcaggacagaactcattcagcctggagcttgtggttgctgctaaagaagcacacaaaccccctgtgtttattgagaagctccaaaacacaggagttgctgatgggtacccagtgcggctggaatgtcgtgtattgggagtgccaccacctcagatattttggaagaaagaaaatgaatcactcactcacagcactgaccgagtgagcatgcaccaggacaaccacggctacatctgcctgctcattcagggagccacaaaagaagatgctgggtggtatactgtgtcagccaagaatgaagcagggattgtgtcctgtactgccaggctggacgtttacatttctcgacattaatagtgaaccacaccaggagaacaaatacccaacccagtggcatcagcagtcacagagcaccaagccaaaaaaagtacggccctcagccagtcgctatgcagcactttcggaccagggactagacatcaaagcagcgttccaacctgaggccaacccatctcacctgacactgaatactgccttggtagaaagtgaggacctgtaatccagcattcttgttaaagctgaaacactgaaacagccattgccttgaccaacatattcctttgtcacattatgtaaaaggcagaaacatacctttgactataagaaattaaaaaaaaaacaccaaaataatatttttcttacttgatataccaaacttagtttaagtagataatgctaatacaaatatacacattgcacagaaaatacacatttactgtccaatttaaaactttggaattgctgtgattaaagtgatcaaaatgccaaaatactaaaggaaatcaattgttcacaggtaactacaatttgtattatctacaagtgcctttaaacacaagatataggtgctgtgtagcctgatagtgtgaaatgtttaatgagggagttgtaccacaaacagtactacaatgattctgaagcacagtgtattcagacagatacagtgaaccaagtgcaatatgtaaggatgaaagaagaagagatgacaaagaaatccaagtaaatgccttgtctttgcaaatgtttttatattaaatcataaggaaggaactacttgccttaaatgttaatatcaaaagagttttctaacaaggttaataccttagttcttaacattttttttctttatgtgtagtgttttcatgctaccttggtaggaaacttatttacaaaccatattaaaaggctaatttaaatataaataatataaagtgctctgaataaagcagaaatatattacagttcattccacagaaagcatccaaaccacccaaatgaccaaggcatatatagtatttggaggaatcaggggtttggaaggagtagggaggagaatgaaggaaaatgcaaccagcatgattatagtgtgttcatttagataaaagtagaaggcacaggagaggtagcaaaggccaggcttttctttggttttcttcaaacataggtgaaaaaaacactgccattcacaagtcaaggaacccagggccagctggaagtgtggagcacacatgctgtggagcacacatgctgtggagattgcagtgtgtctgaggtttgtgtagtagtggaagattttaggtatgtagagcaagttgaaaatggattgagactgcatggtggcataaatgagaaattgcctgtagcatctagtctacttgaaggaagtggagacataaggagagacaaaaacaggtttgtgccataaagtattttttcaaagacaccaagatgtggtaaatgaaaattattagttcacttccctgctgccatgaaactttgccttaagaaggtgctggattccaaggtttgtaaaggcatctcggtaaagactgctttttgaatgcatatgattttgcatcagctagactgagttgattctgaccagacttgatggttttaagtcggaaccgataaattttaaaaaggagaaaaaataatttgacctagtagtataaaacatgaggctttaatggtactttgctatgaaaagaaaacactgtattccttatgcaaaacacatgtatctttcattatttataagtggcctctcttagctcagttactcaattcatacgtagtattttttaaaataattttatatctgtgtaccaccccatatatttcatattactgtttcacatgtacagctttctacttctttgtaagaacaccaaccaaccaaggtttaagtgattaataggcttgagcaccgggtggcagatgttctatgcagtgtggttcaagtttctttgaccgcacttatatgcattgctaatatggaatttaagataccatacacagtctctcatggacctatctctattgtagaattatgacttatgtcttacttgccaaatttttctgaatgtgacctttttttgctgatttgctgggtttgggattaactagcattattttgccacctttatattgtatttataaaaaaaaaagtactatcaatcaatcatactactttggattgttgtgctggtgtaatgtggatttaacatcaataaatatttgacaaataatagttgcagttttgtgaagc

SEQ ID NO: 2553 - protein, 1106 aa, Homosapiens
MSGTSSHESFYDSLSDMQEESKNTDFFPGLSAFLSQEEINKSLDLARRAIADSETEDFDSEKEISQIFSTSPASLCEHPSHKETKLGEHASRRPQDNRSTPVQPLAEKQTKSISSPVSKRKPAMSPLLTRPSYIRSLRKAEKRGAKTPSTNVKPKTPHQRKGGPQSQLCDKAANLIEELTSIFKAAKPRNRSPNGESSSPDSGYLSPKNQPSALLSASASQSPMEDQGEMEREVKSPGARHCYQDNQDLAVPHNRKSHPQPHSALHFPAAPRFIQKLRSQEVAEGSRVYLECRVTGNPTPRVRWFCEGKELHNTPDIQIHCEGGDLHTLIIAEAFEDDTGRYTCLATNPSGSDTTSAEVFIEGASSTDSDSESLAFKSRAGAMPQAQKKTTSVSLTIGSSSPKTGVTTAVIQPLSVPVQQVHSPTSYLCRPDGTTTAYFPPVFTKELQNTAVAEGQVVVLECRVRGAPPLQVQWFRQGSEIQDSPDFRILQKKPRSTAEPEEICTLVIAETFPEDAGIFTCSARNDYGSATSTAQLVVTSANTENCSYESMGESNNDHFQHFPPPPPILETSSLELASKKPSEIQQVNNPELGLSRAALQMQFNAAERETNGVHPSRGVNGLINGKANSNKSLPTPAVLLSPTKEPPPLLAKPKLGFPKKASRTARIASDEEIQGTKDAVIQDLERKLRFKEDLLNNGQPRLTYEERMARRLLGADSATVFNIQEPEEETANQEYKVSSCEQRLISEIEYRLERSPVDESGDEVQYGDVPVENGMAPFFEMKLKHYKIFEGMPVTFTCRVAGNPKPKIYWFKDGKQISPKSDHYTIQRDLDGTCSLHTTASTLDDDGNYTIMAANPQGRISCTGRLMVQAVNQRGRSPRSPSGHPHVRRPRSRSRDSGDENEPIQERFFRPHFLQAPGDLTVQEGKLCRMDCKVSGLPTPDLSWQLDGKPVRPDSAHKMLVRENGVHSLIIEPVTSRDAGIYTCIATNRAGQNSFSLELVVAAKEAHKPPVFIEKLQNTGVADGYPVRLECRVLGVPPPQIFWKKENESLTHSTDRVSMHQDNHGYICLLIQGATKEDAGWYTVSAKNEAGIVSCTARLDVYISRH

SEQ ID NO: 2554 - DNA, 2320 bp, Homosapiens
aagaatactgacttcttcccgggcctttctgctttcctcagccaggaagagataaacaagagtcttgacctggcccggagagccatagccgactccgaaacagaagattttgactcggaaaaggagatctcgcagattttcagtacttctcctgcaagcctctgtgaacatccttcccataaggagaccaaattgggtgaacacgcctcgaggagacctcaggataacaggtcaacacctgtccagcctctggcagagaaacaaactaagagtatctcttcacctgtttcaaagaggaaacctgccatgtcacccctgctcaccaggcccagctacatccggagcctccgaaaggctgaaaagcgtggtgcaaaaactcccagcacaaacgtaaagcccaaaacgccacatcaaagaaagggtggcccccagagccagctgtgtgacaaggcagctaatttaattgaggagctaacatccatatttaaagccgcaaagccaagaaacagaagcccaaatggggagtcctcgtcaccagacagtgggtacctgtctcctaaaaatcagccgtcagccctgctgagtgcctcagccagccagagccctatggaagaccaaggggagatggaaagagaggtcaagtcccctggggccaggcattgctaccaggacaaccaggacttggcagtgccacacaaccgcaagtctcacccacagccccacagcgccctccacttcccagctgcacctcgattcatccaaaagctgaggagccaagaagtagcagaagggagccgagtttatctggagtgtagagtcactggaaaccccactcctcgagtcagatggttctgtgaagggaaagaactgcacaacactcctgatattcaaatccactgtgagggaggggacctccataccctgatcatagcagaggcctttgaggacgacacaggtcgctacacctgtttggctacgaatcccagcggctcagacacaacatctgctgaggtgttcattgaaggtgccagttcaacagattctgacagtgaaagtttagctttcaaatcaagagctggagctatgccacaagctcaaaagaaaacaacttctgtttccttgacaataggatcatcatctccaaagacaggggtgaccacagctgtgattcaaccactgtctgtccctgtgcaacaggttcacagtccaacttcatatctctgccgacctgatggaaccactactgcctactttcctcctgtttttacaaaggaactgcaaaacacagccgtggcggaaggccaggtggtggttctggagtgccgggtccgtggggcaccccctctgcaggtccagtggtttcggcaagggagtgaaatccaagactctccagatttccgaattctacagaaaaaacctagatctacagctgaacctgatgtcttatacgtctttgttcgagtgagatgccaccagatgaaaattcagtattacaacctggctcatctcatttcctcatggctttcttcatttttataatgtcagaaccatacaagctatgatgcttctttctctcaacaaaatgtgagcctcttgtcactgttggatgaacttttctttgagaagaaaagctgaggaacctgtgggacattgtattcaaattttatctagttaaaaaaaaattatctagcaaaaattgctgtgacatttcaatgcatgaggatcactaaaagaacatcctagtgtttattttttatttttctatttttgttctttaattctgtaatttttctaaatgttccacgtgaactatatacaggcatataccttatttatgcatggaagtattcctataaaatcatacacaatgaattctgctcaatcaactttgaaacacacaaaggaagcttgtaggaaaattggtcttactgagaattcctttagaaaatagtctttttacaaagcaagtgtttttttccttcatctaaatttcatgcatgcatttatttaaacataattatagggagcctaccatgtgtgagatgctaagaatatggccatgaacaaaaattgtttctgcactcagaggttatatttcagcgaaccagaaactaacaaactaattacacaataaattatttagcagggtgaggtggcacatagtcccagctacccaggaggctgaggcaggaggattgcttgagcccaggagttcaaggctgcagtgagctatgatcatgccacttcactccagcctgggcaacagtgaaacccctgtttctaaaaaaaagattttaaaaataaaataaaacaaaattgc

SEQ ID NO: 2555 - protein, 410 aa, Homosapiens
MSPLLTRPSYIRSLRKAEKRGAKTPSTNVKPKTPHQRKGGPQSQLCDKAANLIEELTSIFKAAKPRNRSPNGESSSPDSGYLSPKNQPSALLSASASQSPMEDQGEMEREVKSPGARHCYQDNQDLAVPHNRKSHPQPHSALHFPAAPRFIQKLRSQEVAEGSRVYLECRVTGNPTPRVRWFCEGKELHNTPDIQIHCEGGDLHTLIIAEAFEDDTGRYTCLATNPSGSDTTSAEVFIEGASSTDSDSESLAFKSRAGAMPQAQKKTTSVSLTIGSSSPKTGVTTAVIQPLSVPVQQVHSPTSYLCRPDGTTTAYFPPVFTKELQNTAVAEGQVVVLECRVRGAPPLQVQWFRQGSEIQDSPDFRILQKKPRSTAEPDVLYVFVRVRCHQMKIQYYNLAHLISSWLSSFL

SEQ ID NO: 2556 - DNA, 617 bp, Homosapiens
atgctgatttagcagacttgggatggggcttgggaatccttatttttctcaagcaccctacctgctcatttcattgattttgaagcaaatgcttagggatttgcctcccacttgagaaataccatatgggattccaatcagaaaccaggagtagagaggccgaggtatgagaaaacctggtgaactcaggcaaggacacagagaaagaggactacttataggaatataagttaatacaagccttacagaagtctgactttgagccaggacttgaagcagacactatggctcatgcagaaaagaaacttcttcccacaagactgccagcgaaattttgcagactcaagatgttcggagagtttggacaatcatcacagtttttggacgcctatctgagagactggattctctgttgggaatatctaggtatcagatggtgccaagacttcagaggagggggacattccctgtttattagagggaaaagaatctggagcttctgcaatccaggataaaagagaaagctgagaagaaagggcagtttggagagagagaccatcttctgtgaagtttattcagctcataagtgtgaataaaaaattgctaaatgtgaactc

SEQ ID NO: 2557 - protein, 76 aa, Homosapiens
MAHAEKKLLPTRLPAKFCRLKMFGEFGQSSQFLDAYLRDWILCWEYLGIRWCQDFRGGGHSLFIRGKRIWSFCNPG

SEQ ID NO: 2558 - DNA, 3021 bp, Homosapiens
aagagggaggggtctgtgcgcccgcagagtcgccaggcgccctgcgagttgtctccgctgggaggggcgaggctgtcacttgccagggcgcgaggagcctcagcgcggcttggagaacttggccccgcgcagcgtctggtcactcgctctcctctggggactgcagagaagcaggacctcgggccatggattctactgaagaaaggtagccatggaagagaatatggaagagggacagacacaaaaagggtgttttgaatgctgtatcaaatgcctggggggcattccctatgcctctctgattgccaccatcctgctctatgcgggtgttgccctgttctgtggctgcggtcatgaagcgctttctggaactgtcaacattctgcaaacctactttgagatggcaagaactgctggagacacactggatgtttttaccatgattgacatctttaagtatgtgatctacggcatcgcagctgcgttctttgtgtatggcattttgctgatggtggaaggtttcttcacaactggggccatcaaagatctctatggggatttcaaaatcaccacttgtggcagatgtgtgagcgcttggttcattatgctgacatatcttttcatgttggcctggctgggagtcacggctttcacctcactgccagtttacatgtacttcaatctgtggaccatctgccggaacaccacattagtggagggagcaaatctctgcttggaccttcgtcagtttggaattgtgacaattggagaggaaaagaaaatttgtactgtctctgagaatttcttgaggatgtgcgaatctactgagctgaacatgaccttccacttgtttattgtggcacttgctggagctggggcagcagtcattgctatggttcactaccttatggttctgtctgccaactgggcctatgtgaaagacgcctgccggatgcagaagtatgaagacatcaagtcgaaggaagagcaagagcttcatgacatccactctactcgctccaaagagcggctcaatgcatacacataaatgcatcttcctgttctttctaccatttgaatgcattggtgtttaactaagggccatccaaccatccaacctttaaaaaacaaaacgaaagtgcttctcatcaatgatatgtaaggtgacttatgaatcacctgagtacaattctttgttgtttagcacttaaatttcccaatttattaaattgatgtaaatcagatcttttctacaagctcctatccagccttttttttgaaatttctcaaactcatttactagttctgtaaaatcaaagatactaacattgtcaaatgcaaagatttgtttgatttttaaccacttcccatgtgttatacataacaccttttgcattatttcttatgttttgaaaagaaaatagctttttatactttttagttttgatttcggtaactagtttaactacaggtaaccttcaaagggaccattgtacattatgaacaatagatagagattacatcttgatgactcttgaaatatggaaattttgtctgaagatcagtggccatattactgtaggccctggttcatgttttcatcaatctaaggtgcaatttctaaatttgtaagagtaggtttaaaaaaaaaagtgcttcttatctttgttaacattgtacttttccttgatgttcttaaaaggtatttccctcagattactcatgtttatgttgtgagcatgtagaaacagtaatgctaatgcatggctagttgcctttttaagattgtgacaccaggcttaccttttaaagtttagtatatagagacaattttaatggaaataactactgtagactattgaagaatgatctctttgtgatttaagaagtggctggattggaacttttaatatgctaatgtggaaaattaattacctttatgaaggtggtttattacaaataagcacactaacccctcggaagttgttttacctactttaaaagttttaatggattgcacctctgtaaactattcctaaaatgtgtatgatatatttgaaaaggcttccattaatataatagctttgcttgcagccttccaatctatgttggtttacctgtagtgttttataaagtgtggtcagaggcccctatagaatgtattgtttgaaagtgtagtgatatatttgtgtttttatttcaagtaagtcattttaaccgaatgttcattcatattcatttataaaaagtacctgtatcaaaggaattttaacaaagagcaatcagtattattggaccaaatttggtgtttgttttcaccttgacgctcttcttttcattatttctaatgctacaagaatgctgtaaagtgtcttctaaaatgatgtagcctgacaagacatttttttcagtgtataaaactaggtagtattgtgcactgatttgaccattgtgaaatcctttctcagtgtaactgcatttctaataaaaatttattgagtgaaacaatctttgtacaatgactagtcatgcatcatcagtaattttacaagttcttgtagtaggtagggggtactactagggatatctgtggcatgattatgcattccgtagtattatttaattaatttggggttcattttgcttccttttctttatgcttagattatcttactggttcaacatttttctgatatatgcagtattacagatattcagcaaaagtattaatgggcttctttaaattctatattatagtatttcagttccgtgtcttaacagtttgtgataatttctaaaactgtcttttcaacttatgtaatgatgttgacacttttggcttttatttctggtattagagtttgtattttcacagagtgctttgtagcaggcattacaattaatctgttttgtacataaatgtgccaacagcttgatggtggcgtttttgaaatgtagaacagagtgcttgcaaaatgtaataaatacacttgtgtactttgtgtacttattattagcttc

SEQ ID NO: 2559 - protein, 278 aa, Homosapiens; identical to SEQ ID NO: 307

SEQ ID NO: 2560 - DNA, 3609 bp, Homosapiens
atctctcaggcttagagctttatactcactcctttgacagccacgcttctatttctttttaaatctcaaaggtgtgggattacaagtcctgtcttagtaataaacttttgcagataaaccctgagatggtataactgcatcctttcttggcaccttaaatcaaattaactaaatacttagtgaggagagaaaaggaaaacacagtttttttgcaacgtatctgactgggtgagaagccactgctgcagcataaagaaccgacgggaatctgggctttcccactctggaatgaaggggggaattacgggttggtggtcggcttcatgttaggaggacacccctccatctgttcacagctcagcctgtttccaatttaaagcccagatttcaatacaaacctcaatttcttttccccattttaaatgcaaagcaagacttgtgaatcatagtgtctctgctcctgggattcagaccaaatttccccccaaaattctcaggctatttgtttgaatacctgcttacagtggtacacaatgggcagctttgagaagaaaaattgataatcttcacggaagagtaatttgaatgaaattacacttgacagcctgtctccaagcaaacaagaggaacgagggagcctgagctaagctctgaggacttgcccaagccactgctgttggagcttcccaggaaaaaaaaaaaaaaaaaaaaaaaaaaaaaaaaaaaaaaacccccagtttttccaacatctaattgagcttttgattaattccgtgtaccagattctactgaagaaaggtagccatggaagagaatatggaagagggacagacacaaaaagggtgttttgaatgctgtatcaaatgcctggggggcattccctatgcctctctgattgccaccatcctgctctatgcgggtgttgccctgttctgtggctgcggtcatgaagcgctttctggaactgtcaacattctgcaaacctactttgagatggcaagaactgctggagacacactggatgtttttaccatgattgacatctttaagtatgtgatctacggcatcgcagctgcgttctttgtgtatggcattttgctgatggtggaaggtttcttcacaactggggccatcaaagatctctatggggatttcaaaatcaccacttgtggcagatgtgtgagcgcttggttcattatgctgacatatcttttcatgttggcctggctgggagtcacggctttcacctcactgccagtttacatgtacttcaatctgtggaccatctgccggaacaccacattagtggagggagcaaatctctgcttggaccttcgtcagtttggaattgtgacaattggagaggaaaagaaaatttgtactgtctctgagaatttcttgaggatgtgcgaatctactgagctgaacatgaccttccacttgtttattgtggcacttgctggagctggggcagcagtcattgctatggttcactaccttatggttctgtctgccaactgggcctatgtgaaagacgcctgccggatgcagaagtatgaagacatcaagtcgaaggaagagcaagagcttcatgacatccactctactcgctccaaagagcggctcaatgcatacacataaatgcatcttcctgttctttctaccatttgaatgcattggtgtttaactaagggccatccaaccatccaacctttaaaaaacaaaacgaaagtgcttctcatcaatgatatgtaaggtgacttatgaatcacctgagtacaattctttgttgtttagcacttaaatttcccaatttattaaattgatgtaaatcagatcttttctacaagctcctatccagccttttttttgaaatttctcaaactcatttactagttctgtaaaatcaaagatactaacattgtcaaatgcaaagatttgtttgatttttaaccacttcccatgtgttatacataacaccttttgcattatttcttatgttttgaaaagaaaatagctttttatactttttagttttgatttcggtaactagtttaactacaggtaaccttcaaagggaccattgtacattatgaacaatagatagagattacatcttgatgactcttgaaatatggaaattttgtctgaagatcagtggccatattactgtaggccctggttcatgttttcatcaatctaaggtgcaatttctaaatttgtaagagtaggtttaaaaaaaaaagtgcttcttatctttgttaacattgtacttttccttgatgttcttaaaaggtatttccctcagattactcatgtttatgttgtgagcatgtagaaacagtaatgctaatgcatggctagttgcctttttaagattgtgacaccaggcttaccttttaaagtttagtatatagagacaattttaatggaaataactactgtagactattgaagaatgatctctttgtgatttaagaagtggctggattggaacttttaatatgctaatgtggaaaattaattacctttatgaaggtggtttattacaaataagcacactaacccctcggaagttgttttacctactttaaaagttttaatggattgcacctctgtaaactattcctaaaatgtgtatgatatatttgaaaaggcttccattaatataatagctttgcttgcagccttccaatctatgttggtttacctgtagtgttttataaagtgtggtcagaggcccctatagaatgtattgtttgaaagtgtagtgatatatttgtgtttttatttcaagtaagtcattttaaccgaatgttcattcatattcatttataaaaagtacctgtatcaaaggaattttaacaaagagcaatcagtattattggaccaaatttggtgtttgttttcaccttgacgctcttcttttcattatttctaatgctacaagaatgctgtaaagtgtcttctaaaatgatgtagcctgacaagacatttttttcagtgtataaaactaggtagtattgtgcactgatttgaccattgtgaaatcctttctcagtgtaactgcatttctaataaaaatttattgagtgaaacaatctttgtacaatgactagtcatgcatcatcagtaattttacaagttcttgtagtaggtagggggtactactagggatatctgtggcatgattatgcattccgtagtattatttaattaatttggggttcattttgcttccttttctttatgcttagattatcttactggttcaacatttttctgatatatgcagtattacagatattcagcaaaagtattaatgggcttctttaaattctatattatagtatttcagttccgtgtcttaacagtttgtgataatttctaaaactgtcttttcaacttatgtaatgatgttgacacttttggcttttatttctggtattagagtttgtattttcacagagtgctttgtagcaggcattacaattaatctgttttgtacataaatgtgccaacagcttgatggtggcgtttttgaaatgtagaacagagtgcttgcaaaatgtaataaatacacttgtgtactttgtgtacttattatta

SEQ ID NO: 2561 - protein, 278 aa, Homosapiens; identical to SEQ ID NO: 307

SEQ ID NO: 2562 - DNA, 2957 bp, Homosapiens
aagagggaggggtctgtgcgcccgcagagtcgccaggcgccctgcgagttgtctccgctgggaggggcgaggctgtcacttgccagggcgcgaggagcctcagcgcggcttggagaacttggccccgcgcagcgtctggtcactcgctctcctctggggactgcagagaagcaggacctcgggccatggggtgttttgaatgctgtatcaaatgcctggggggcattccctatgcctctctgattgccaccatcctgctctatgcgggtgttgccctgttctgtggctgcggtcatgaagcgctttctggaactgtcaacattctgcaaacctactttgagatggcaagaactgctggagacacactggatgtttttaccatgattgacatctttaagtatgtgatctacggcatcgcagctgcgttctttgtgtatggcattttgctgatggtggaaggtttcttcacaactggggccatcaaagatctctatggggatttcaaaatcaccacttgtggcagatgtgtgagcgcttggttcattatgctgacatatcttttcatgttggcctggctgggagtcacggctttcacctcactgccagtttacatgtacttcaatctgtggaccatctgccggaacaccacattagtggagggagcaaatctctgcttggaccttcgtcagtttggaattgtgacaattggagaggaaaagaaaatttgtactgtctctgagaatttcttgaggatgtgcgaatctactgagctgaacatgaccttccacttgtttattgtggcacttgctggagctggggcagcagtcattgctatggttcactaccttatggttctgtctgccaactgggcctatgtgaaagacgcctgccggatgcagaagtatgaagacatcaagtcgaaggaagagcaagagcttcatgacatccactctactcgctccaaagagcggctcaatgcatacacataaatgcatcttcctgttctttctaccatttgaatgcattggtgtttaactaagggccatccaaccatccaacctttaaaaaacaaaacgaaagtgcttctcatcaatgatatgtaaggtgacttatgaatcacctgagtacaattctttgttgtttagcacttaaatttcccaatttattaaattgatgtaaatcagatcttttctacaagctcctatccagccttttttttgaaatttctcaaactcatttactagttctgtaaaatcaaagatactaacattgtcaaatgcaaagatttgtttgatttttaaccacttcccatgtgttatacataacaccttttgcattatttcttatgttttgaaaagaaaatagctttttatactttttagttttgatttcggtaactagtttaactacaggtaaccttcaaagggaccattgtacattatgaacaatagatagagattacatcttgatgactcttgaaatatggaaattttgtctgaagatcagtggccatattactgtaggccctggttcatgttttcatcaatctaaggtgcaatttctaaatttgtaagagtaggtttaaaaaaaaaagtgcttcttatctttgttaacattgtacttttccttgatgttcttaaaaggtatttccctcagattactcatgtttatgttgtgagcatgtagaaacagtaatgctaatgcatggctagttgcctttttaagattgtgacaccaggcttaccttttaaagtttagtatatagagacaattttaatggaaataactactgtagactattgaagaatgatctctttgtgatttaagaagtggctggattggaacttttaatatgctaatgtggaaaattaattacctttatgaaggtggtttattacaaataagcacactaacccctcggaagttgttttacctactttaaaagttttaatggattgcacctctgtaaactattcctaaaatgtgtatgatatatttgaaaaggcttccattaatataatagctttgcttgcagccttccaatctatgttggtttacctgtagtgttttataaagtgtggtcagaggcccctatagaatgtattgtttgaaagtgtagtgatatatttgtgtttttatttcaagtaagtcattttaaccgaatgttcattcatattcatttataaaaagtacctgtatcaaaggaattttaacaaagagcaatcagtattattggaccaaatttggtgtttgttttcaccttgacgctcttcttttcattatttctaatgctacaagaatgctgtaaagtgtcttctaaaatgatgtagcctgacaagacatttttttcagtgtataaaactaggtagtattgtgcactgatttgaccattgtgaaatcctttctcagtgtaactgcatttctaataaaaatttattgagtgaaacaatctttgtacaatgactagtcatgcatcatcagtaattttacaagttcttgtagtaggtagggggtactactagggatatctgtggcatgattatgcattccgtagtattatttaattaatttggggttcattttgcttccttttctttatgcttagattatcttactggttcaacatttttctgatatatgcagtattacagatattcagcaaaagtattaatgggcttctttaaattctatattatagtatttcagttccgtgtcttaacagtttgtgataatttctaaaactgtcttttcaacttatgtaatgatgttgacacttttggcttttatttctggtattagagtttgtattttcacagagtgctttgtagcaggcattacaattaatctgttttgtacataaatgtgccaacagcttgatggtggcgtttttgaaatgtagaacagagtgcttgcaaaatgtaataaatacacttgtgtactttgtgtacttattatta

SEQ ID NO: 2563 - protein, 267 aa, Homosapiens; identical to SEQ ID NO: 311

SEQ ID NO: 2564 - DNA, 2666 bp, Homosapiens
ctccagcctgggtgacagagtgagactccgtctcaaacaaaacaaaacaaaccatgaaaataaaacaacaataacaaaaacaactaaagagcagaaaatgctaaaatcttaggtattagaatgtcctgaaaatgttttatcatgcctgtatgtgtttagcacttcaagagttcagaaaataaaattaaagagccatgctcagatgaacttggttacttttgctctctaagatgagacaaagaggcgtgccagtgaattgcctctgtgctcgttttaaaaatgcagtgttctaggcctaatattcatagattcccatctatcagttttgtgttagagtctaaaaatacatatttttgacaacttcctaggtgattctaatgctgttggtctatgaaccaactggaacaagggtaaatagaagcgaaatggcaacttttcatttcctgttactaatagcattgtttgcaatattggcagaaaaaaaagtactcctttgggcagtatgcttttagagattaacagaagcactgcaccagctgaacaaatttagatcctgacttcagcacagtctggggcatagttaacaaaataattgtgatgcctatactatcacattaatgggccaaaccaataaactggctataattgagtctggaaattctggtggtgagattcaattgaattcagattgaaattatttaaattgcttgagggctaaatagtcttgcatattatattcataattctatgcatagttattatccacaatgaaagctagattatttttccactgtaacataacataagataaaatggaacttgcttagatttgattagcaaaaactcatttttttctctcttggctcttcaaaacatttatactgctaaactgtcatttcccacacattgtaggaattgtgacaattggagaggaaaagaaaatttgtactgtctctgagaatttcttgaggatgtgcgaatctactgagctgaacatgaccttccacttgtttattgtggcacttgctggagctggggcagcagtcattgctatggttcactaccttatggttctgtctgccaactgggcctatgtgaaagacgcctgccggatgcagaagtatgaagacatcaagtcgaaggaagagcaagagcttcatgacatccactctactcgctccaaagagcggctcaatgcatacacataaatgcatcttcctgttctttctaccatttgaatgcattggtgtttaactaagggccatccaaccatccaacctttaaaaaacaaaacgaaagtgcttctcatcaatgatatgtaaggtgacttatgaatcacctgagtacaattctttgttgtttagcacttaaatttcccaatttattaaattgatgtaaatcagatcttttctacaagctcctatccagccttttttttgaaatttctcaaactcatttactagttctgtaaaatcaaagatactaacattgtcaaatgcaaagatttgtttgatttttaaccacttcccatgtgttatacataacaccttttgcattatttcttatgttttgaaaagaaaatagctttttatactttttagttttgatttcggtaactagtttaactacaggtaaccttcaaagggaccattgtacattatgaacaatagatagagattacatcttgatgactcttgaaatatggaaattttgtctgaagatcagtggccatattactgtaggccctggttcatgttttcatcaatctaaggtgcaatttctaaatttgtaagagtaggtttaaaaaaaaaagtgcttcttatctttgttaacattgtacttttccttgatgttcttaaaaggtatttccctcagattactcatgtttatgttgtgagcatgtagaaacagtaatgctaatgcatggctagttgcctttttaagattgtgacaccaggcttaccttttaaagtttagtatatagagacaattttaatggaaataactactgtagactattgaagaatgatctctttgtgatttaagaagtggctggattggaacttttaatatgctaatgtggaaaattaattacctttatgaaggtggtttattacaaataagcacactaacccctcggaagttgttttacctactttaaaagttttaatggattgcacctctgtaaactattcctaaaatgtgtatgatatatttgaaaaggcttccattaatataatagctttgcttgcagccttccaatctatgttggtttacctgtagtgttttataaagtgtggtcagaggcccctatagaatgtattgtttgaaagtgtagtgatatatttgtgtttttatttcaagtaagtcattttaaccgaatgttcattcatattcatttataaaaagtacctgtatcaaaggaattttaacaaagagcaatcagtattattggaccaaatttggtgtttgttttcaccttgacgctcttcttttcattatttctaatgctacaagaatgctgtaaagtgtcttctaaaatgatgtagcctgacaagacatttttttcagtgtataaaactaggtagtattgtgcactgatttgaccattgtgaaatcctttctcagtgtaactgcatttctaataaaaatttattgagtgaaac

SEQ ID NO: 2565 - protein, 78 aa, Homosapiens
MCESTELNMTFHLFIVALAGAGAAVIAMVHYLMVLSANWAYVKDACRMQKYEDIKSKEEQELHDIHSTRSKERLNAYT

SEQ ID NO: 2566 - DNA, 3099 bp, Homosapiens
atctctcaggcttagagctttatactcactcctttgacagccacgcttctatttctttttaaatctcaaaggtgtgggattacaagtcctgtcttagtaataaacttttgcagataaaccctgagatggtataactgcatcctttcttggcaccttaaatcaaattaactaaatacttagtgaggagagaaaaggaaaacacagtttttttgcaacgtatctgactgggtgagaagccactgctgcagcataaagaaccgacgggaatctgggctttcccactctggaatgaaggggggaattacgggttggtggtcggcttcatgttaggaggacacccctccatctgttcacagctcagcctgtttccaatttaaagcccagatttcaatacaaacctcaatttcttttccccattttaaatgcaaagcaagacttgtgaatcatagtgtctctgctcctgggattcagaccaaatttccccccaaaattctcaggctatttgtttgaatacctgcttacagtggtacacaatgggcagctttgagaagaaaaattgataatcttcacggaagagtaatttgaatgaaattacacttgacagcctgtctccaagcaaacaagaggaacgagggagcctgagctaagctctgaggacttgcccaagccactgctgttggagcttcccaggaaaaaaaaaaaaaaaaaaaaaaaaaaaaaaaaaaaaaaacccccagtttttccaacatctaattgagcttttgattaattccgtgtaccagattctactgaagaaaggtagccatggaagagaatatggaagagggacagacacaaaaagggtgttttgaatgctgtatcaaatgcctggggggcattccctatgcctctctgattgccaccatcctgctctatgcgggtgttgccctgttctgtggctgcggtcatgaagcgctttctggaactgtcaacattctgcaaacctactttgagatggcaagaactgctggagacacactggatgtttttaccatgattgacatctttaagtatgtgatctacggcatcgcagctgcgttctttgtgtatggcattttgctgatggtggaaggtttcttcacaactggggccatcaaagatctctatggggatttcaaaatcaccacttgtggcagatgtgtgagcgcttggttcattatgctgacatatcttttcatgttggcctggctgggagtcacggctttcacctcactgccagtttacatgtacttcaatctgtggaccatctgccggaacaccacattagtggagggagcaaatctctgcttggaccttcgtcagtttggaattgtgacaattggagaggaaaagaaaatttgtactgtctctgagaatttcttgaggatgtgcgaatctactgagctgaacatgaccttccacttgtttattgtggcacttgctggagctggggcagcagtcattgctatggttcactaccttatggttctgtctgccaactgggcctatgtgaaagacgcctgccggatgcagaagtatgaagacatcaagtcgaaggaagagcaagagcttcatgacatccactctactcgctccaaagagcggctcaatgcatacacataaatgcatcttcctgttctttctaccatttgaatgcattggtgtttaactaagggccatccaaccatccaacctttaaaaaacaaaacgaaagtgcttctcatcaatgatatgtaaggtgacttatgaatcacctgagtacaattctttgttgtttagcacttaaatttcccaatttattaaattgatgtaaatcagatcttttctacaagctcctatccagccttttttttgaaatttctcaaactcatttactagttctgtaaaatcaaagatactaacattgtcaaatgcaaagatttgtttgatttttaaccacttcccatgtgttatacataacaccttttgcattatttcttatgttttgaaaagaaaatagctttttatactttttagttttgatttcggtaactagtttaactacaggtaaccttcaaagggaccattgtacattatgaacaatagatagagattacatcttgatgactcttgaaatatggaaattttgtctgaagatcagtggccatattactgtaggccctggttcatgttttcatcaatctaaggtgcaatttctaaatttgtaagagtaggtttaaaaaaaaaagtgcttcttatctttgttaacattgtacttttccttgatgttcttaaaaggtatttccctcagattactcatgtttatgttgtgagcatgtagaaacagtaatgctaatgcatggctagttgcctttttaagattgtgacaccaggcttaccttttaaagtttagtatatagagacaattttaatggaaataactactgtagactattgaagaatgatctctttgtgatttaagaagtggctggattggaacttttaatatgctaatgtggaaaattaattacctttatgaaggtggtttattacaaataagcacactaacccctcggaagttgttttacctactttaaaagttttaatggattgcacctctgtaaactattcctaaaatgtgtatgatatatttgaaaaggcttccattaatataatagctttgcttgcagccttccaatctatgttggtttacctgtagtgttttataaagtgtggtcagaggcccctatagaatgtattgtttgaaagtgtagtgatatatttgtgtttttatttcaagtaagtcattttaaccgaatgttcattcatattcatttataaaaagtacctgtatcaaaggaattttaacaaagagcaatcagtattattggaccaaatttggtgtttgttttcaccttgacgctcttcttttcattatttctaatgctacaagaatgctgtaaagtgtcttctaaaatgatgtagcctgacaagacatttttttcagtgtataaaactaggtagtattgtgcactgatttgaccattgtgaaatcctttctcagtgtaactgcatttctaataaaaatttattgagtgaaac

SEQ ID NO: 2567 - protein, 278 aa, Homosapiens; identical to SEQ ID NO: 307

SEQ ID NO: 2568 - DNA, 2447 bp, Homosapiens
aagagggaggggtctgtgcgcccgcagagtcgccaggcgccctgcgagttgtctccgctgggaggggcgaggctgtcacttgccagggcgcgaggagcctcagcgcggcttggagaacttggccccgcgcagcgtctggtcactcgctctcctctggggactgcagagaagcaggacctcgggccatggggtgttttgaatgctgtatcaaatgcctggggggcattccctatgcctctctgattgccaccatcctgctctatgcgggtgttgccctgttctgtggctgcggtcatgaagcgctttctggaactgtcaacattctgcaaacctactttgagatggcaagaactgctggagacacactggatgtttttaccatgattgacatctttaagtatgtgatctacggcatcgcagctgcgttctttgtgtatggcattttgctgatggtggaaggtttcttcacaactggggccatcaaagatctctatggggatttcaaaatcaccacttgtggcagatgtgtgagcgcttggttcattatgctgacatatcttttcatgttggcctggctgggagtcacggctttcacctcactgccagtttacatgtacttcaatctgtggaccatctgccggaacaccacattagtggagggagcaaatctctgcttggaccttcgtcagtttggaattgtgacaattggagaggaaaagaaaatttgtactgtctctgagaatttcttgaggatgtgcgaatctactgagctgaacatgaccttccacttgtttattgtggcacttgctggagctggggcagcagtcattgctatggttcactaccttatggttctgtctgccaactgggcctatgtgaaagacgcctgccggatgcagaagtatgaagacatcaagtcgaaggaagagcaagagcttcatgacatccactctactcgctccaaagagcggctcaatgcatacacataaatgcatcttcctgttctttctaccatttgaatgcattggtgtttaactaagggccatccaaccatccaacctttaaaaaacaaaacgaaagtgcttctcatcaatgatatgtaaggtgacttatgaatcacctgagtacaattctttgttgtttagcacttaaatttcccaatttattaaattgatgtaaatcagatcttttctacaagctcctatccagccttttttttgaaatttctcaaactcatttactagttctgtaaaatcaaagatactaacattgtcaaatgcaaagatttgtttgatttttaaccacttcccatgtgttatacataacaccttttgcattatttcttatgttttgaaaagaaaatagctttttatactttttagttttgatttcggtaactagtttaactacaggtaaccttcaaagggaccattgtacattatgaacaatagatagagattacatcttgatgactcttgaaatatggaaattttgtctgaagatcagtggccatattactgtaggccctggttcatgttttcatcaatctaaggtgcaatttctaaatttgtaagagtaggtttaaaaaaaaaagtgcttcttatctttgttaacattgtacttttccttgatgttcttaaaaggtatttccctcagattactcatgtttatgttgtgagcatgtagaaacagtaatgctaatgcatggctagttgcctttttaagattgtgacaccaggcttaccttttaaagtttagtatatagagacaattttaatggaaataactactgtagactattgaagaatgatctctttgtgatttaagaagtggctggattggaacttttaatatgctaatgtggaaaattaattacctttatgaaggtggtttattacaaataagcacactaacccctcggaagttgttttacctactttaaaagttttaatggattgcacctctgtaaactattcctaaaatgtgtatgatatatttgaaaaggcttccattaatataatagctttgcttgcagccttccaatctatgttggtttacctgtagtgttttataaagtgtggtcagaggcccctatagaatgtattgtttgaaagtgtagtgatatatttgtgtttttatttcaagtaagtcattttaaccgaatgttcattcatattcatttataaaaagtacctgtatcaaaggaattttaacaaagagcaatcagtattattggaccaaatttggtgtttgttttcaccttgacgctcttcttttcattatttctaatgctacaagaatgctgtaaagtgtcttctaaaatgatgtagcctgacaagacatttttttcagtgtataaaactaggtagtattgtgcactgatttgaccattgtgaaatcctttctcagtgtaactgcatttctaataaaaatttattgagtgaaac

SEQ ID NO: 2569 - protein, 267 aa, Homosapiens; identical to SEQ ID NO: 311

SEQ ID NO: 2570 - DNA, 709 bp, Homosapiens
gggaggagacccacagtgaaggggaggaaaacgggcttctcgcagaggaggcaggtggaaagagggaggggtctgtgcgcccgcagagtcgccaggcgccctgcgagttgtctccgctgggaggggcgaggctgtcacttgccagggcgcgaggagcctcagcgcggcttggagaacttggccccgcgcagcgtctggtcactcgctctcctctggggactgcagagaagcaggacctcgggccatggggtgttttgaatgctgtatcaaatgcctggggggcattccctatgcctctctgattgccaccatcctgctctatgcgggtgttgccctgttctgtggctgcggtcatgaagcgctttctggaactgtcaacattctgcaaacctactttgagatggcaagaactgctggagacacactggatgtttttaccatgattgacatctttaagtatgtgatctacggcatcgcagctgcgttctttgtgtatggcattttgctgatggtggaaggtttcttcacaactggggccatcaaagatctctatggggatttcaaaatcaccacttgtggcagatgtgtgagcgcttggttcattatgctgacatatcttttcatgttggcctggctgggagtcacggctttcacctcactgccagtttacatgtacttcaatctgtggaccatctgccggaacaccaca

SEQ ID NO: 2571 - protein, 154 aa, Homosapiens
MGCFECCIKCLGGIPYASLIATILLYAGVALFCGCGHEALSGTVNILQTYFEMARTAGDTLDVFTMIDIFKYVIYGIAAAFFVYGILLMVEGFFTTGAIKDLYGDFKITTCGRCVSAWFIMLTYLFMLAWLGVTAFTSLPVYMYFNLWTICRNT

SEQ ID NO: 2572 - DNA, 1212 bp, Homosapiens
ggcatttcaatacagtgacccaattactttctgtcaacaaattcaccagcaaaataaaggggctaacacattaatgagatttcctgagactgccctgtagagatgcttgcaatcctttgctctggagaagccaggcaccatggcatgaggcagccctgtggagaggttcatgtggtacaggaccaggcctgcagcatcacttgagagaggcaacataactcttttactgactatcacagataggaccacaaaacagccttgtaaactcatcctagaggatctaaaagagaaccccctcataacagaatggcattcccagcttgcaggctctgagactccattgagtcatgccacatgtatggaaaatgatttttggagtgttattctatctaaggaaaaacaaagcaaattttccactttcaagattaaaggacattctgtctacattaagacaagcaggtacaaagaagtaagttactgttggattaagaatatccaagacaatggtcacaacttgaaagcacatggaaaaacatgaattatttttataatgtcagctaatccacagctgtgccacctgttagtatggatgctatccaaaaggatttttgaaaccttgttatccaaatgcagaaatggcagctgaagagatgatttgtgacagcatttgctgagacgaagtctgtccactagatggataaaatcagttcccttttcatagcttgatcatctacatctgctagtgacccagtccctgagagtcaccaagaattgattccactgaggcgatggcaggcggggctttggtgttggaaaagtcagtggttgatatggacagcacagactcacataagctgctggtttattacactagaaaaataagggatcccttgacccagctcggcaagtgtgaaatcacgaaataaatgaaggttaacaaagactggtctaaggaatagttcactacaataccgcaatgctcttctcactaatactcgactctgcatttcggtacttatatctgaaagatttgcaaataatgacaacattcgtgccagacattactgcaagtgaggaacagactaaaggagaggaaggaacaaaatgccttccaagagagaaacattcattagccttactggcaagtgtctaaagcaaacaaggaaactgcaaaataattacttagttacaaataaacgcttttagcacagt

SEQ ID NO: 2573 - protein, 122 aa, Homosapiens
MWYRTRPAASLERGNITLLLTITDRTTKQPCKLILEDLKENPLITEWHSQLAGSETPLSHATCMENDFWSVILSKEKQSKFSTFKIKGHSVYIKTSRYKEVSYCWIKNIQDNGHNLKAHGKT

SEQ ID NO: 2574 - DNA, 7373 bp, Homosapiens
gcggggagggtccgcgcgttggtggtgctcgcctcgcagctgcgcccgccggcttcagcaccttccgctgtccgccgctgcagccgcctcctcctccaggtgctgactattctgatgccgagtttccaattgccttgattaaagtagaaacattctatggcttggatgacttacatttcaaattggtttgagcaagatgattggtatgaaggactacaaagagcaaacatgtcccaggtaaggcaagtgggattgctggctgctggatgtcagccatggaacaaggatgtatgtgctgccagtggagacaggtttgcatattgtgcgaccctggctatctatatttatcagttggatcaccgttataatgaattcaaacttcacgcaattatgtctgaacataaaaaaacaatcacagcaatttcttggtgtccacataatcctgatctgtttgcaagtggcagtactgataatttagtgatcatttggaatgttgcagaacaaaaagtcattgctaaactcgacagtacaaaagggatccctgcttctcttagttggtgctggaatgcagaggatgtggtggcatttgtttcccacagaggcccactgttcatttggaccatctcaggaccagatagtggagtgattgtacacaaagatgctcatagcttcttgtctgatatctgtatgttcagatggcatacacaccaaaaggggaaagttgtgtttggtcatattgatggaagtctatcaatttttcatccaggtaataaaaatcagaaacatgttttgagaccagaatctcttgaagggacagatgaagaggatccagttacggccttggaatgggacccactatctactgattatcttctagtggttaatttgcattatggaattcgcctggtagattctgaatcactttcttgcataacaacatttaatcttcccagtgcagcagcttctgtacagtgcttagcctgggttcccagtgctcctgggatgtttataactggagattctcaagtgggtgttttacgcatttggaatgtttcaagaacaacacctattgataatcttaaattaaagaaaacaggatttcactgcttacatgtacttaattctcctccaagaaaaaagttttcagtccaatctccaaccaaaaatcattatacatcctcaacaagcgaagcagttccacccccaactttaacacagaatcaagcattttctcttcctcctggtcatgcagtgtgttgtttcttggatggtggagttggactttatgatatgggagctaagaagtgggattttcttagagacttgggacatgtggaaactatctttgactgcaaattcaaacctgacgatcctaatcttttagcaacagcttcatttgatggcactataaaagtctgggatataaacacattaacagcagtgtacacatccccgggtaatgaaggtgttatttattccctttcttgggctccaggtggtttaaattgtattgctgggggaacttcccgaaatggtgcttttatttggaatgttcaaaagggcaaaattatacaacgatttaatgagcatggaacaaatggaatattctgcattgcctggagtcataaagattctaaaagaatagcaacctgcagcagtgatggtttctgtattattcgaacaattgatggtaaagtgctacacaaatataaacatccagctgcagtgtttggttgtgattggagccaaaacaataaagacatgatagccactggctgtgaagacacaaatgttcgtgtttattatgtagccaccagctcagatcaaccattgaaagtatttagtgggcatacagcaaaagtgtttcatgttaaatggtctcctctgagagagggaattctttgcagtggttctgatgatggtaccgttcgaatctgggattatactcaggatgcttgcatcaatattcttaatggacacactgcacctgtgagaggattaatgtggaatactgagattccatatctgctcatatctggcagctgggactatactataaaagtatgggacactcgagaaggaacttgtgtggatactgtgtatgatcacggtgcagatgtatatggtttaacctgccatcccagtcgccccttcactatggcctcttgctcccgtgactctacagtgagactctggtcattaacagccttagtcactcctgtacaaataaatattctggcagacagatcttgggaagaaattattgggaacactgattatgctatagaaccaggcactcctcctctactgtgtggtaaagtgtcaagagatattagacaggaaatagaaaaactaactgctaattctcaagtgaaaaaactaagatggttctcagaatgtttatctcctccaggtggcagtgacaatttatggaacttggttgctgtgataaaaggacaggatgatagcttacttcctcagaactactgcaaaggaataatgcacttgaaacatctgattaaatttagaacatctgaagctcaagaactaacaacagtcaagatgtctaaatttggtggtggtattggtgtacctgctaaagaggaaagactgaaggaagctgctgaaatccacttgagattaggacaaattcagagatactgtgaacttatggttgaacttggagagtgggacaaagccctgtcaattgcaccaggagtctctgtgaaatactggaagaagttaatgcagaggagagctgaccaattaatccaggaagataaggatgatgtcattccatactgcatagccattggtgatgtgaaaaagctagtccattttttcatgtcaagaggtcagcttaaagaagctctgcttgttgcacaggctgcttgtgaaggaaatatgcagcccttacatgtttccgtgcctaaaggagcttcatattctgatgatatctacaaggaagactttaatgaactcctgcacaaagtcagtaaagaactggcagaatggtattttcaagatggtcgagcagtactagccgcatgttgccatcttgccatagataatattgagcttgctatggcatacctgattcgcggaaatgaactggagttggcagtctgtgtgggcacagtactaggagagtctgcagcaccagcaacccactatgccttagaattactggcgagaaagtgcatgatgatttcagtatgctttccatgtgttggatacagtgtccccttttgttacgttaacaggaatttggcagctgatcttcttctgatgattcctgataatgaactacatttaataaaactctgtgctttctacccaggatgtactgaagagataaatgaccttcatgataagtgtaagctacccacagtggaagaatgtatgcagttagctgagacagcccgtgcagatgacaatatatttgaaactgtaaaatattacttgttaagtcaagaacctgaaaaagcccttcctattggtattagctttgttaaagaatacatcagtagctcagactggactttggataccatataccctgttcttgacctactgagctatattcgtactgaaaaattactcttgcatacgtgtactgaagctcgaaatgagttgctgatattatgtggttacattggtgcattactggctatcagaagacagtaccaaagcattgttccagcactttatgagtacacaagtcagctattaaaacgtcgggaggtgtcagtacctttaaaaattgaatatctttctgaggaattggatgcatggagagcttgcacacagtccaccaacagatcattagaagactctccgtatacacccccttctgattcacaaagaatgatttatgcaactttattaaagagactaaaagaagagtcactgaaaggaattattggaccagattatgtgactggatcaaatcttccaagtcattctgatattcacatttcttgtcttacgggattaaaaatccagggccctgtgtttttccttgaagacgggaaatctgctatctccttgaatgatgctttgatgtgggcaaaggtgaatccattctcacctttagggactggaatacgactcaatccattctgatagaagatttttgtccatgcttgatttttttttttaaagaaaaactttcatgggttagcattaccttaatctttgttgctcaagtgccagaggttgggagaaggattgcaggttgggagaggtgggaaatagcagtgaattttagtcattaacttcaaaatatatatatatatataatttaaaggaaaaataggtgcctcctttataaacagtaatagctacgtttgggaaggaggaaacatttaaattataaaggactgaataatctaaaaagcatataaaagtttcacacagcataaaagataccaaaatatcatatggttgaaatattgaaacatattaaattgtgcaacacctagaatagtgctagacatacagtaagtacttaatggatatttgaatgattgaatatcttgaaatgttgaaatgtaaggtgtgcacagtgatcttcaacttaacaaacacttacgttctcctttataaaatgcatagtaaaccactaacgttagctgttttaataaaagttttcagttataagtttagtaaatattaataaatggatacacattcaaaatacttttaaaaaaaagaaaatgttaccagtttttttatctgaagtttaactgtcccattgtaaaggtgtaagttatataggcttgaaaaaaattggcgggtaaaaatcacaaaatgcagtcgaatatatatatgaaaacttgcattaggtgataaagtgactattttaagagattcagcatgcatggatattagttttgattaatgtgtacaataatttacacagtatactctagtcaatttatgttaactttatttaaaacacaatttatttggccgggcacggtggctcacacctgtaatctcagcactttggcaggccaaggcaggtggatcacctgaggtcaggagttcatgaccagcctggccagcatggtaaaaccctgtctccactaaaaatacaaaaattagccaggcatggtggcgggcacctgtaatcccagttacttgggaagctgaggcaggagaatcccttgaacctgggaggcagaggttccagtgagccaagatcgcaccactgcactccagcctgggcaacaaagagcgaaactctgtctcaaaaaacaaaccaacaaaaaccacaattgatttgatgaaaattagttttaagtaaatgtttgtaaatagatattggttgaatttttggatatattatgttgatttaacttttaaaatgttgtttaaaagtgtgaagctatgaaaagcctgataatgtgactacagatatttcagttggactagaattctgactttgaaacttattaaattaatgcatactggaagtactttgatactcaagttgtttcacaagatttataatatagatggttttgtttgactaaagaataatctcatataactagaatacttgtggcttttattatctttaaacttgttgcatttaaaatatttttaaaaccttcttaacaaaacttcttaaaactggaaaaaatatatattatgtatctatgtatcatatttatcacatgaccacttttgattccttaaaaagacattacaggcttaaattccattttattaaaaaaaaaaaattgcctgtaatcccagcacttcaggaggccgagatgggcagatcttgaggtcggtagatggagaccatcctggccaacatggtgaaaccctgtctctactaaaaatacaaaaattagctgggtgtggtggtgtgtacctgtagtcccagctacccaggaagctaaggcaggagaatcgcttgaatccaggaggcggaggttgcagtgagctgagatcgcactactgcactccagcctgggcgacagagcaagaccaccatctccaaaaattatatatataaaaataattaatattatagaagagaatatacacaactcagagatgcaatggataatataaaaagagtacctgagatgtatttttttaaactcttagagatatctgtaactcaaatttttcttaggtgaggaggattattaactggcacatatgtactaaaaacccctcacttaaaaatggcagtctcaatcctactgtcattctttttattttaaaataaataaataagcctatctttttgtgcttacatacttaaaaggatatcattaagtatataaacaatcattacttctgtatttttaatgaatgcaggaaaataatatttttatgtataaaagatgaagaaaaaattttgcaagtctttaagcacataaatacaacagaatagccacccaatttctgtctgaaatctaaattggatggatttgaccatcattctattatctttgatttctacaatgtctatatcttattacctataactattaatttttcatagaattataaatgtcatttgactatgtcaatctgtatatattgtaccttaatatgaaaaacaaattttttaattcataaaagtatttttattagatttcatatgcatgaaacccaagcaaattatatgaatttattttactatttgaaaatgttcatattaccaataatgtggacaaattactttgcaggtttaaatatgcctctgtaaaggaagagtctcattagacaatgatttttaaagcattggaaaaatattttgcctgtaaaagttagtaactaggtggttcacaaaattacaacatcaaaatagttacatcttgtgaaaatatatgatttttatgtcaatcaagacaaatgaaatatatatgtatgtgtatatatatacatgtatgtatgaaatatatatatgtgcgtgtgtgtgtgtatatatatatatatatatatatatttctatgaaattgtccagatgtgttcaggaacatgattgcattagagcaatgactgtattttgttgtccttataacatttatattatttcagttttaagtcaaaaggtattctgaatataataaaagcctcacaaattatttgtaaaatttagtagttcatatttagtatatcagtaatatagaagacatctttatagtcaactcttaattaatgcttattgtaccaaatctttgagatatttgtacataaatgaaatatgtactttcatgctaaaattatatatcatgactgtgctataatttggcatgtcattatctagatttatatgtatgtacgtatttcaggtccttgaaattttaataaatattacagttaaatcctgatatgacatagtt

SEQ ID NO: 2575 - protein, 1322 aa, Homosapiens; identical to SEQ ID NO: 313

SEQ ID NO: 2576 - DNA, 1789 bp, Homosapiens
gcggggagggtccgcgcgttggtggtgctcgcctcgcagctgcgcccgccggcttcagcaccttccgctgtccgccgctgcagccgcctcctcctccaggcaaacatgtcccaggtaaggcaagtgggattgctggctgctggatgtcagccatggaacaaggatgtatgtgctgccagtggagacaggtttgcatattgtgcgaccctggctatctatatttatcagttggatcaccgttataatgaattcaaacttcacgcaattatgtctgaacataaaaaaacaatcacagcaatttcttggtgtccacataatcctgatctgtttgcaagtggcagtactgataatttagtgatcatttggaatgttgcagaacaaaaagtcattgctaaactcgacaagcaagaccaccatctccaaaaattatatatataaaaataattaatattatagaagagaatatacacaactcagagatgcaatggataatataaaaagagtacctgagatgtatttttttaaactcttagagatatctgtaactcaaatttttcttaggtgaggaggattattaactggcacatatgtactaaaaacccctcacttaaaaatggcagtctcaatcctactgtcattctttttattttaaaataaataaataagcctatctttttgtgcttacatacttaaaaggatatcattaagtatataaacaatcattacttctgtatttttaatgaatgcaggaaaataatatttttatgtataaaagatgaagaaaaaattttgcaagtctttaagcacataaatacaacagaatagccacccaatttctgtctgaaatctaaattggatggatttgaccatcattctattatctttgatttctacaatgtctatatcttattacctataactattaatttttcatagaattataaatgtcatttgactatgtcaatctgtatatattgtaccttaatatgaaaaacaaattttttaattcataaaagtatttttattagatttcatatgcatgaaacccaagcaaattatatgaatttattttactatttgaaaatgttcatattaccaataatgtggacaaattactttgcaggtttaaatatgcctctgtaaaggaagagtctcattagacaatgatttttaaagcattggaaaaatattttgcctgtaaaagttagtaactaggtggttcacaaaattacaacatcaaaatagttacatcttgtgaaaatatatgatttttatgtcaatcaagacaaatgaaatatatatgtatgtgtatatatatacatgtatgtatgaaatatatatatgtgcgtgtgtgtgtgtatatatatatatatatatatatatttctatgaaattgtccagatgtgttcaggaacatgattgcattagagcaatgactgtattttgttgtccttataacatttatattatttcagttttaagtcaaaaggtattctgaatataataaaagcctcacaaattatttgtaaaatttagtagttcatatttagtatatcagtaatatagaagacatctttatagtcaactcttaattaatgcttattgtaccaaatctttgagatatttgtacataaatgaaatatgtactttcatgctaaaattatatatcatgactgtgctataatttggcatgtcattatctagatttatatgtatgtacgtatttcaggtccttgaaattttaataaatattacagttaaatcctgatatgacatagttaccggctaa

SEQ ID NO: 2577 - protein, 110 aa, Homosapiens
MSQVRQVGLLAAGCQPWNKDVCAASGDRFAYCATLAIYIYQLDHRYNEFKLHAIMSEHKKTITAISWCPHNPDLFASGSTDNLVIIWNVAEQKVIAKLDKQDHHLQKLYI

SEQ ID NO: 2578 - DNA, 2364 bp, Homosapiens
gagatattagacaggaaatagaaaaactaactgctaattctcaagtgaaaaaactaagatggttctcagaatgtttatctcctccaggtggcagtgacaatttatggaacttggttgctgtgataaaaggacaggatgatagcttacttcctcagaactactgcaaaggaataatgcacttgaaacatctgattaaatttagaacatctgaagctcaagaactaacaacagtcaagatgtctaaatttggtggtggtattggtgtacctgctaaagaggaaagactgaaggaagctgctgaaatccacttgagattaggacaaattcagagatactgtgaacttatggttgaacttggagagtgggacaaagccctgtcaattgcaccaggagtctctgtgaaatactggaagaagttaatgcagaggagagctgaccaattaatccaggaagataaggatgatgtcattccatactgcatagccattggtgatgtgaaaaagctagtccattttttcatgtcaagaggtcagcttaaagaagctctgcttgttgcacaggctgcttgtgaaggaaatatgcagcccttacatgtttccgtgcctaaaggagcttcatattctgatgatatctacaaggaagactttaatgaactcctgcacaaagtcagtaaagaactggcagaatggtattttcaagatggtcgagcagtactagccgcatgttgccatcttgccatagataatattgagcttgctatggcatacctgattcgcggaaatgaactggagttggcagtctgtgtgggcacagtactaggagagtctgcagcaccagcaacccactatgccttagaattactggcgagaaagtgcatgatgatttcagtatggaatttggcagctgatcttcttctgatgattcctgataatgaactacatttaataaaactctgtgctttctacccaggatgtactgaagagataaatgaccttcatgataagtgtaagctacccacagtggaagaatgtatgcagttagctgagacagcccgtgcagatgacaatatatttgaaactgtaaaatattacttgttaagtcaagaacctgaaaaagcccttcctattggtattagctttgttaaagaatacatcagtagctcagactggactttggataccatataccctgttcttgacctactgagctatattcgtactgaaaaattactcttgcatacgtgtactgaagctcgaaatgagttgctgatattatgtggttacattggtgcattactggctatcagaagacagtaccaaagcattgttccagcactttatgagtacacaagtcagctattaaaacgtcgggaggtgtcagtacctttaaaaattgaatatctttctgaggaattggatgcatggagagcttgcacacagtccaccaacagatcattagaagactctccgtatacacccccttctgattcacaaagaatgatttatgcaactttattaaagagactaaaagaagagtcactgaaaggaattattggaccagattatgtgactggatcaaatcttccaagtcattctgatattcacatttcttgtcttacgggattaaaaatccagggccctgtgtttttccttgaagacgggaaatctgctatctccttgaatgatgctttgatgtgggcaaaggtgaatccattctcacctttagggactggaatacgactcaatccattctgatagaagatttttgtccatgcttgatttttttttttaaagaaaaactttcatgggttagcattaccttaatctttgttgctcaagtgccagaggttgggagaaggattgcaggttgggagaggtgggaaatagcagtgaattttagtcattaacttcaaaatatatatatatatataatttaaaggaaaaataggtgcctcctttataaacagtaatagctacgtttgggaaggaggaaacatttaaattataaaggactgaataatctaaaaagcatataaaagtttcacacagcataaaagataccaaaatatcatatggttgaaatattgaaacatattaaattgtgcaacacctagaatagtgctagacatacagtaagtacttaatggatatttgaatgattgaatatcttgaaatgttgaaatgtaaggtgtgcacagtgatcttcaacttaacaaacacttacgttctcctttataaaatgcatagtaaaccactaacgttagctgttttaataaaagttttcagttataagtttagtaaatattaataaatggatacacattcaaaatacttttaaaaaaaagaaaatgttaccagttttttt

SEQ ID NO: 2579 - protein, 526 aa, Homosapiens
MHLKHLIKFRTSEAQELTTVKMSKFGGGIGVPAKEERLKEAAEIHLRLGQIQRYCELMVELGEWDKALSIAPGVSVKYWKKLMQRRADQLIQEDKDDVIPYCIAIGDVKKLVHFFMSRGQLKEALLVAQAACEGNMQPLHVSVPKGASYSDDIYKEDFNELLHKVSKELAEWYFQDGRAVLAACCHLAIDNIELAMAYLIRGNELELAVCVGTVLGESAAPATHYALELLARKCMMISVWNLAADLLLMIPDNELHLIKLCAFYPGCTEEINDLHDKCKLPTVEECMQLAETARADDNIFETVKYYLLSQEPEKALPIGISFVKEYISSSDWTLDTIYPVLDLLSYIRTEKLLLHTCTEARNELLILCGYIGALLAIRRQYQSIVPALYEYTSQLLKRREVSVPLKIEYLSEELDAWRACTQSTNRSLEDSPYTPPSDSQRMIYATLLKRLKEESLKGIIGPDYVTGSNLPSHSDIHISCLTGLKIQGPVFFLEDGKSAISLNDALMWAKVNPFSPLGTGIRLNPF

SEQ ID NO: 2580 - DNA, 1233 bp, Homosapiens
gcgctgaggtctcgccccataagactccgccccgccccacgagaccgcgccgccagcaataaggcccagccccgccttctgctgttgccgcagcaacccagaaagcgtcatggctgccgccggccaggaaaaagggtatttgacacagactgcggcagccctagacaagtcaccgtcactttcgccacagctagcagctcccatccgagggaggcctaagaagtgtctggtctatccgcatgcgccgaagagctcccgcttgtctcgttccgttctgcgttggcttcagggtctggatctcagcttcttccccaggaacatcaacagagatttttcaaatggcttcctaattgcagaaatattctgtatatattacccctgggaacttgaattatcatcctttgaaaacgggacctctttaaaagtcaagttggataactgggcacagttggagaagttcctggcaagaaaaaaatttaaattacctaaagaactaatccatggaacaattcattgtaaagctggagtgcctgaaatattgatagaagaggtttacactttattaacacatcgagaaattaaaagtatccaggatgactttgtgaatttcacggactatagctaccagatgcgtttacccctggtttccaggtctacagtttcgaagtctattaaagataacattaggttatcagaattactaagcaatcccaacatgctgaccaatgaacttaaagcggagttcctcatccttttacatatgttgcaaagaaaattaggcagaaaattgaatccagaatggtttgatgtgaaaccaacagtgggagaagttactctcaatcaccttcctgcccaagcctctgggcgcagatataatttaaaagttaaaagaggaagagttgtccctgttttaccaaatataggtagtggtggcagttcacatagagaaatacatgtgaagcaagctggacaacattcttattactctgctatgaaacctatcagaaacatggacaagaaaccttgaaaagcacctgtcaaatggctttgaagaagtgatgccaccatctctagccataataaagaaacagaatcacctagtattggatgtatttcaataataaatagagtggtgtcttttccataattgtgttaaagaacatttcttttccattcaatttgtttattaaactcctatgccaggcattgttgaaaatacaaaattaaataaat

SEQ ID NO: 2581 - protein, 305 aa, Homosapiens; identical to SEQ ID NO: 317

SEQ ID NO: 2582 - DNA, 2111 bp, Homosapiens
ctgtaatcccagctactggggaggctgcaggcaggagaatgcttgaacccgggaggcggaggttgctgtgagtcgagattatgccgctgcactccagcctaggtggcagggtaagactctgtctcaaaaaaaaaaaaaaaaaaaaaaaaaaaaaatactggtaaggatcagtttaccctttgtcggagatggcatctagtttgagagttaccaacaagtttttaaagttgctgcttaattgtaggcactttgtatgtaactggcagctaatatttgctctgggaatgcaaactaaattctataaaaaggcaatgaatcttttgcagaactctggtttaaagtagtctctccttatcagagaggcataggttccaagatccccagtggatggcaactgtggatactacagaaccctctgtcagaacacatttctgtttatgtcttccatccacaaatttaatgcctttttaaaaatcttaactaagcacttatcacacactgtggctgaaagtttttcagtttgaggtgtgatgccgaaactatcaagaatttctttttcttcatatttcaggaatatgattcattcctaccattgtaaccattcttacaactttctattaagtcaagaactttcatcttttcacctaaaggaataattttatggtttctctctggcatatctgaatcaccagcatcactgctcttgcactttgcacacaagcgcaccacactgtacagttgatctgatgactaaaaggtgactgatgtctacaacgtggagactctggacaaagggaggactcacatcctaggcaacacagagcaggcagggaggtttcatcagactgcccagaacagagtacaatttaaaagttacaaattatttcttgaattttccatttaatattttccgactgtgattgacccaaggtaactgaaactgcagaaagcaaaactgcagataagcgggggactagtttactaatttgtcttcagtattacttacaaccatgcctctgaaattttaaagtgcatatgaatcacctggggatcttcttgaaatgcggattcaatacaaattaacagtttgggttcatcaaaagaacaccaaagcctttgaaacgtagataatcttagcaaaattccacagtaggttctccttagagcaacgatccaacaacactcactttacaagatacttttagtatggaatattagactagtattaattataaaataatacaaactgcataattaactacactttatttcatttcctaattgccacggatcagagatttttcaaatggcttcctaattgcagaaatattctgtatatattacccctgggaacttgaattatcatcctttgaaaacgggacctctttaaaagtcaagttggataactgggcacagttggagaagttcctggcaagaaaaaaatttaaattacctaaagaactaatccatggaacaattcattgtaaagctggagtgcctgaaatattgatagaagaggtttacactttattaacacatcgagaaattaaaagtatccaggatgactttgtgaatttcacggactatagctaccagatgcgtttacccctggtttccaggtctacagtttcgaagtctattaaagataacattaggttatcagaattactaagcaatcccaacatgctgaccaatgaacttaaagcggagttcctcatccttttacatatgttgcaaagaaaattaggcagaaaattgaatccagaatggtttgatgtgaaaccaacagtgggagaagttactctcaatcaccttcctgcccaagcctctgggcgcagatataatttaaaagttaaaagaggaagagttgtccctgttttaccaaatataggtagtggtggcagttcacatagagaaatacatgtgaagcaagctggacaacattcttattactctgctatgaaacctatcagaaacatggacaagaaaccttgaaaagcacctgtcaaatggctttgaagaagtgatgccaccatctctagccataataaagaaacagaatcacctagtattggatgtatttcaataataaatagagtggtgtcttttcc

SEQ ID NO: 2583 - protein, 132 aa, Homosapiens
MRLPLVSRSTVSKSIKDNIRLSELLSNPNMLTNELKAEFLILLHMLQRKLGRKLNPEWFDVKPTVGEVTLNHLPAQASGRRYNLKVKRGRVVPVLPNIGSGGSSHREIHVKQAGQHSYYSAMKPIRNMDKKP

SEQ ID NO: 2584 - DNA, 1095 bp, Homosapiens
gccgccagcaataaggcccagccccgccttctgctgttgccgcagcaacccagaaagcgtcatggctgccgccggccaggaaaaagggtatttgacacagactgcggcagccctagacaagtcaccgtcactttcgccacagctagcagctcccatccgagggaggcctaagaagtgtctggtctatccgcatgcgccgaagagctcccgcttgtctcgttccgttctgcgttggcttcagggtctggatctcagcttcttccccaggaacatcaacagagatttttcaaatggcttcctaattgcagaaatattctgtatatattacccctgggaacttgaattatcatcctttgaaaacgggacctctttaaaagtcaagttggataactgggcacagttggagaagttcctggcaagaaaaaaatttaaattacctaaagaactaatccatggaacaattcattgtaaagctggagtgcctgaaatattgatagaagaggtttacactttattaacacatcgagaaattaaaagtatccaggatgactttgtgaatttcacggactatagctaccagatgcgtttacccctggtttccaggtctacagtttcgaagtctattaaagataacattaggttatcagaattactaagcaatcccaacatgctgaccaatgaacttaaagcggagttcctcatccttttacatatgttgcaaagaaaattaggcagaaaattgaatccagaatggtttgatgtgaaaccaacagtgggagaagttactctcaatcaccttcctgcccaagcctctgggcgcagatataatttaaaagttaaaagaggaagagttgtccctgttttaccaaatataggtagtggtggcagttcacatagagaaatacatgtgaagcaagctggacaacattcttattactctgctatgaaacctatcagaaacatggacaagaaaccttgaaaagcacctgtcaaatggctttgaagaagtgatgccaccatctctagccataataaagaaacagaatcacctagtattggatgtatttcaataataaatagagtggtgtcttttcc

SEQ ID NO: 2585 - protein, 305 aa, Homosapiens; identical to SEQ ID NO: 317

SEQ ID NO: 2586 - DNA, 2953 bp, Homosapiens
agacctcatctgccctcactcactatcactaggccaacagatttaggtactcatgtttaagtaaagtagaataaaaaataaaatggagcaagaactgggctcagatatgactcctaaaggttgtatgagggcacggccttgtaaagaaacccaaagcagcacagcctctgagaactgaataatggccccttccagatgcctctttgcaatggtggaaatttggcagtaacaggttcctgggcagatcgatcaccactacatgaagcagcaagtcaaggtcgccttcttgctctgagaacattattatcacagggttataatgtaaatgcagtaaccttagaccatgtcaccccattgcacgaagcctgccttggagatcacgtggcatgtgccagaactctgctggaagcaggagctaatgtaaatgcaatcacgatagatggcgtgactccgttattcaacgcatgctcccaaggcagtccaagctgtgcagagctgcttctggagtatggtgccaaagcccagctggagtcatgtcttccatccccaacgcatgaggccgccagtaaaggtcaccatgaatgtcttgacatcctgatatcctggggcatagatgttgaccaagaaattcctcatttgggaactcctctctatgtagcttgtatgtcacagcaattccattgcatctggaagcttctttatgctggtgctgacgtacagaaaggcaaatattgggatactccattacatgctgctgctcaacaatccagcacagaaattgtaaacttactgctagaatttggagcagatatcaatgccaaaaatacagagcttctgcgacctatagatgtagctacgtctagcagtatggtggaaaggatattgcttcaacatgaagctaccccaagctctctttaccaactttgccgactctgtatccgaagctacataggaaaaccaagattgcaccttatcccacaactccagctgccaacgttactgaagaatttcttacagtatcgataaaacagtaaagtaattctaaataccttgaaaatcaaaatttctatttcttttgcttaaggaatagttcatataaaaatatgctaaagataggataaaagtgagtgtgagatcacccagggaagcagtaaaatatcaattttcattttaagtgtattagtactattgttttatcatttatgctgtctttggattatagcatatttataatatctattttttgttatttcaatataccctcctgtttattcaggaaaaaataataaagtcactatcttatgttttcttttggattggaaagaaataaagctcctagtaaagttattcatattatatttaaaaaggtctatgttcttcaactaatgggttaactttttaattttggctattgtaattggctaacttgttactgatattgacataaaatatgaatatggcttagcaaagagcaactaatatgttttctgaaaccaggatgatgctcattcaggaaatccactatgttgaatgtccactggtcattagaatgaacacttcataaagataaattgcccccctctcccccacttacccctggcaaaggactcacaagtcacttctcttctccatagtacatggacttgttacagaaaagtgataggatgaaaggtcaatactgccctctcaccctgagatatttagaacattacacaccttctaaggctatgttaagactgcctccttctcaggagtagcccctgatgatctcttatcaaggcggttatatgcatattactccagccttcttccatttcagaaattgtcaatagctagtgatacttggacttaagaaaatgaactatatatctaattaacaaacaggccctggatcatattccggggatcatcacatcagtccaaggatataaaaaaatggaagattaaaaactcaaattgtggagtttttaaagagtgggtgccacttaacacattggagaccttaaaaaatgtatatagagaacttaatcgcactgtttctaattctttttacacaaaacaagggcttagagtatactgtatttgcaagtaatagcaagagagtattgtataaaagaagatattactaagctagtcctctgcaagggtaaatactacgtttattctcttcagctttaactatacttgagtgcaataaaaaacttaataaaattttatgcctgttttgtaattcagggcctattatgattttagaaataagataatcaacgtacaactctttgtaaaacaaaagcaactttgggtgagttttatagatttattaaattttgataaagtaaatattttgaccactattttcaacaacccagggcttattttcttctgacttcttggctaacttccagactatgggaaaataaattatgattgtatgtgacccccagatcactaagcttgcattttggcagaaagaaaaaaaatcagttgtgatttaaaacgtttgttgagattttcaaacatagaaataaagctgtagcatattcactaaacaatgttttatatgaggatagggacctttaaatatgtgttttatagaatatctcacacatttgtaatggataacgtgcattaaaatggagttcttattatagaataacctggttaaacagatattaaagctgcttttgggtaaaacaggtttccaccagtattttccctgagctagaggagaagtcttagattttaagagtaatacaacccatctatcttattagtcttgtgccaataagagaagtaaatatcaaacattaaaatggtcactttacaatttcagtatgtctgtaccttgtatcttagcttgagtatgattgtcttatcaaagtagtgttctaactttaatgtattgtatgtttgttattatattaaagtgtgattattattcattggaataaaa

SEQ ID NO: 2587 - protein, 276 aa, Homosapiens
MPLCNGGNLAVTGSWADRSPLHEAASQGRLLALRTLLSQGYNVNAVTLDHVTPLHEACLGDHVACARTLLEAGANVNAITIDGVTPLFNACSQGSPSCAELLLEYGAKAQLESCLPSPTHEAASKGHHECLDILISWGIDVDQEIPHLGTPLYVACMSQQFHCIWKLLYAGADVQKGKYWDTPLHAAAQQSSTEIVNLLLEFGADINAKNTELLRPIDVATSSSMVERILLQHEATPSSLYQLCRLCIRSYIGKPRLHLIPQLQLPTLLKNFLQYR

SEQ ID NO: 2588 - DNA, 3031 bp, Homosapiens
accagctgatattttctttcctcaggaccagctgttcaggagcatcccggacgagagccaggcacatttgagacttggatccaactaaagaccgccgcagattcttctgcagcaatgtcggtgttagaagaaaatcggccgtttgctcaacaattatccaatgtctactttacaatactttcgctgttctgttttaagctttttgtgaaaatcagccttgccatcctcagtcatttctacatagtgaaaggcaaccgcaaggaagcggcaaggatagcagctgaattttatggagtaacccaaggacaaggttcctgggcagatcgatcaccactacatgaagcagcaagtcaaggtcgccttcttgctctgagaacattattatcacagggttataatgtaaatgcagtaaccttagaccatgtcaccccattgcacgaagcctgccttggagatcacgtggcatgtgccagaactctgctggaagcaggagctaatgtaaatgcaatcacgatagatggcgtgactccgttattcaacgcatgctcccaaggcagtccaagctgtgcagagctgcttctggagtatggtgccaaagcccagctggagtcatgtcttccatccccaacgcatgaggccgccagtaaaggtcaccatgaatgtcttgacatcctgatatcctggggcatagatgttgaccaagaaattcctcatttgggaactcctctctatgtagcttgtatgtcacagcaattccattgcatctggaagcttctttatgctggtgctgacgtacagaaaggcaaatattgggatactccattacatgctgctgctcaacaatccagcacagaaattgtaaacttactgctagaatttggagcagatatcaatgccaaaaatacagagcttctgcgacctatagatgtagctacgtctagcagtatggtggaaaggatattgcttcaacatgaagctaccccaagctctctttaccaactttgccgactctgtatccgaagctacataggaaaaccaagattgcaccttatcccacaactccagctgccaacgttactgaagaatttcttacagtatcgataaaacagtaaagtaattctaaataccttgaaaatcaaaatttctatttcttttgcttaaggaatagttcatataaaaatatgctaaagataggataaaagtgagtgtgagatcacccagggaagcagtaaaatatcaattttcattttaagtgtattagtactattgttttatcatttatgctgtctttggattatagcatatttataatatctattttttgttatttcaatataccctcctgtttattcaggaaaaaataataaagtcactatcttatgttttcttttggattggaaagaaataaagctcctagtaaagttattcatattatatttaaaaaggtctatgttcttcaactaatgggttaactttttaattttggctattgtaattggctaacttgttactgatattgacataaaatatgaatatggcttagcaaagagcaactaatatgttttctgaaaccaggatgatgctcattcaggaaatccactatgttgaatgtccactggtcattagaatgaacacttcataaagataaattgcccccctctcccccacttacccctggcaaaggactcacaagtcacttctcttctccatagtacatggacttgttacagaaaagtgataggatgaaaggtcaatactgccctctcaccctgagatatttagaacattacacaccttctaaggctatgttaagactgcctccttctcaggagtagcccctgatgatctcttatcaaggcggttatatgcatattactccagccttcttccatttcagaaattgtcaatagctagtgatacttggacttaagaaaatgaactatatatctaattaacaaacaggccctggatcatattccggggatcatcacatcagtccaaggatataaaaaaatggaagattaaaaactcaaattgtggagtttttaaagagtgggtgccacttaacacattggagaccttaaaaaatgtatatagagaacttaatcgcactgtttctaattctttttacacaaaacaagggcttagagtatactgtatttgcaagtaatagcaagagagtattgtataaaagaagatattactaagctagtcctctgcaagggtaaatactacgtttattctcttcagctttaactatacttgagtgcaataaaaaacttaataaaattttatgcctgttttgtaattcagggcctattatgattttagaaataagataatcaacgtacaactctttgtaaaacaaaagcaactttgggtgagttttatagatttattaaattttgataaagtaaatattttgaccactattttcaacaacccagggcttattttcttctgacttcttggctaacttccagactatgggaaaataaattatgattgtatgtgacccccagatcactaagcttgcattttggcagaaagaaaaaaaatcagttgtgatttaaaacgtttgttgagattttcaaacatagaaataaagctgtagcatattcactaaacaatgttttatatgaggatagggacctttaaatatgtgttttatagaatatctcacacatttgtaatggataacgtgcattaaaatggagttcttattatagaataacctggttaaacagatattaaagctgcttttgggtaaaacaggtttccaccagtattttccctgagctagaggagaagtcttagattttaagagtaatacaacccatctatcttattagtcttgtgccaataagagaagtaaatatcaaacattaaaatggtcactttacaatttcagtatgtctgtaccttgtatcttagcttgagtatgattgtcttatcaaagtagtgttctaactttaatgtattgtatgtttgttattatattaaagtgtgattattattcattggaataaaa

SEQ ID NO: 2589 - protein, 329 aa, Homosapiens; identical to SEQ ID NO: 319

SEQ ID NO: 2590 - DNA, 1256 bp, Homosapiens
gcagattcttctgcagcaatgtcggtgttagaagaaaatcggccgtttgctcaacaattatccaatgtctactttacaatactttcgctgttctgttttaagctttttgtgaaaatcagccttgccatcctcagtcatttctacatagtgaaaggcaaccgcaaggaagcggcaaggatagcagctgaattttatggagtaacccaaggacaaggttcctgggcagatcgatcaccactacatgaagcagcaagtcaaggtcgccttcttgctctgagaacattattatcacagggttataatgtaaatgcagtaaccttagaccatgtcaccccattgcacgaagcctgccttggagatcacgtggcatgtgccagaactctgctggaagcaggagctaatgtaaatgcaatcacgatagatggcgtgactccgttattcaacgcatgctcccaaggcagtccaagctgtgcagagctgcttctggagtatggtgccaaagcccagctggagtcatgtcttccatccccaacgcatgaggccgccagtaaaggtcaccatgaatgtcttgacatcctgatatcctggggcatagatgttgaccaagaaattcctcatttgggaactcctctctatgtagcttgtatgtcacagcaattccattgcatctggaagcttctttatgctggtgctgacgtacagaaaggcaaatattgggatactccattacatgctgctgctcaacaatccagcacagaaattgtaaacttactgctagaatttggagcagatatcaatgccaaaaatacagagcttctgcgacctatagatgtagctacgtctagcagtatggtggaaaggatattgcttcaacatgaagctaccccaagctctctttaccaactttgccgactctgtatccgaagctacataggaaaaccaagattgcaccttatcccacaactccagctgccaacgttactgaagaatttcttacagtatcgataaaacagtaaagtaattctaaataccttgaaaatcaaaatttctatttcttttgcttaaggaatagttcatataaaaatatgctaaagataggataaaagtgagtgtgagatcacccagggaagcagtaaaatatcaattttcattttaagtgtattagtactattgttttatcatttatgctgtctttggattatagcatatttataatatctattttttgttatttcaatataccctcctgtttattc

SEQ ID NO: 2591 - protein, 329 aa, Homosapiens; identical to SEQ ID NO: 319

SEQ ID NO: 2592 - DNA, 651 bp, Homosapiens
accagctgatattttctttcctcaggaccagctgttcaggagcatcccggacgagagccaggcacatttgagacttggatccaactaaagaccgccgcagattcttctgcagcaatgtcggtgttagaagaaaatcggccgtttgctcaacaattatccaatgtctactttacaatactttcgctgttctgttttaagctttttgtgaaaatcagccttgccatcctcagtcatttctacatagtgaaaggcaaccgcaaggaagcggcaaggatagcagctgaattttatggagtaacccaaggacaaggttcctgggcagatcgatcaccactacatgaagcagcaagtcaaggtcgccttcttgctctgagaacattattatcacaggtaatatattacatatagtttaaaatataccccctttccatgtgcacagaacatggtcaaaaccaatcaatgcaaatatgataaaaccacttacattttacttctgcccttttattttaactcatgtcagagaagtcaatagtttctcacttatctttgaaacttcttttataaatattttgatataattgtatgtcttagtatttcagatttctcagacagcatatttgttcatcgatagacatttaaagaagtaatgat

SEQ ID NO: 2593 - protein, 97 aa, Homosapiens
MSVLEENRPFAQQLSNVYFTILSLFCFKLFVKISLAILSHFYIVKGNRKEAARIAAEFYGVTQGQGSWADRSPLHEAASQGRLLALRTLLSQVIYYI

SEQ ID NO: 2594 - DNA, 220 bp, Homosapiens
ttttatttctctaaattctctattgccttgacaattatgctccagttggatgttccttctccattcttgtgtaaatattccaaagccgaaagaacaaatgtccaaaagtcattgtcacacaattctcagttggaaatgcagaaatcaccgtcttctgtgtcaatcatgctgggagctgcagactggagctgttcctattcgaccatcttggaactggaaa

SEQ ID NO: 2595 - protein, 60 aa, Homosapiens
MLQLDVPSPFLCKYSKAERTNVQKSLSHNSQLEMQKSPSSVSIMLGAADWSCSYSTILEL

SEQ ID NO: 2596 - DNA, 1759 bp, Homosapiens
aagagagagaagagaggaggagagagggggagagagggaaggaaggaaatagggagaggagggtcacagagtgaccgtggaggatggggcttctcggttctagatatttctgggattggagactgtttgctagtggggagactccagctccggcagccagttcgggagcggcaaagtaaaatggacagcgacagacagacgttccagccacctctccgccgccgggagatcctggagctgctttcaggccaactccagtttcccagctggagcttctgaacgcgctggactgcgagagcccagggagcgcctgaaagctgctcctcggagatacccttcgccgaagcagtaagaacttcctgcttgggtctctgcattcccttcctccgaaacttcccaggagaagggcggaagaccccaggggaaggggcgaggcgaatcttcgcgctgctttttcttccctcccccttcccgcgccgggcgcgcaggcatggatgtgctcagccctggtcagggcaacaacaccacatcaccaccggctccctttgagaccggcggcaacactactggtatctccgacgtgaccgtcagctaccaagtgatcacctctctgctgctgggcacgctcatcttctgcgcggtgctgggcaatgcgtgcgtggtggctgccatcgccttggagcgctccctgcagaacgtggccaattatcttattggctctttggcggtcaccgacctcatggtgtcggtgttggtgctgcccatggccgcgctgtatcaggtgctcaacaagtggacactgggccaggtaacctgcgacctgttcatcgccctcgacgtgctgtgctgcacctcatccatcttgcacctgtgcgccatcgcgctggacaggtactgggccatcacggaccccatcgactacgtgaacaagaggacgccccggcgcgccgctgcgctcatctcgctcacttggcttattggcttcctcatctctatcccgcccatgctgggctggcgcaccccggaagaccgctcggaccccgacgcatgcaccattagcaaggatcatggctacactatctattccacctttggagctttctacatcccgctgctgctcatgctggttctctatgggcgcatattccgagctgcgcgcttccgcatccgcaagacggtcaaaaaggtggagaagaccggagcggacacccgccatggagcatctcccgccccgcagcccaagaagagtgtgaatggagagtcggggagcaggaactggaggctgggcgtggagagcaaggctgggggtgctctgtgcgccaatggcgcggtgaggcaaggtgacgatggcgccgccctggaggtgatcgaggtgcaccgagtgggcaactccaaagagcacttgcctctgcccagcgaggctggtcctaccccttgtgcccccgcctctttcgagaggaaaaatgagcgcaacgccgaggcgaagcgcaagatggccctggcccgagagaggaagacagtgaagacgctgggcatcatcatgggcaccttcatcctctgctggctgcccttcttcatcgtggctcttgttctgcccttctgcgagagcagctgccacatgcccaccctgttgggcgccataatcaattggctgggctactccaactctctgcttaaccccgtcatttacgcatacttcaacaaggactttcaaaacgcgtttaagaagatcattaagtgtaagttctgccgccagtga

SEQ ID NO: 2597 - protein, 422 aa, Homosapiens; identical to SEQ ID NO: 321

SEQ ID NO: 2598 - DNA, 1727 bp, Homosapiens
aaccggcatcgccgccgccggagccgcagcgagtcctcagagcctggctgctggcggccgggagcgccgggacggggcgcgaagccggaggctccgggacgtggatacagatgaaaagaagcaaagaattgataactaaaaatcatagtcaagaggaaacaagtattcttcgttgttggaaatgtagaaaatgtatagcaagctctggttgttttatggagtatcttgagaatcaagtgattaaggataaagatgattcagttgatgctcaaaatatttgtcatgtgtggcacatgaatgtagaagcccttccagaatggataagctgcctaatccaaaaagcccagtggacagttggaaaactgaattgtcctttctgtggggcccgtttagggggctttaattttgtcagcactccaaaatgttcctgtggccagcttgcagctgtacatctctccaagagccggactgattatcagccaacacaggcaggcagactaatgagaccatcagtgaaatacttgtcacatcctagagttcagtcaggttgtgacaaggaagctctgctgacaggtggtggctctgaaaacagaaatcacaggcttttaaacatggcccgaaataataatgaccctggaagattaacagaagcactctgcctggaggtgcgaccaacatattttgagatgaagaacgaaaaactgctgtccaaagcatcagaaccaaaataccagctttttgttccccagcttgtgactggcagatgcgctacaagagcttttcatagaaaatcacatagtttggatctgaacatcagtgagaaactgactttattacccactttatatgaaatacatagtaagactactgcctattccagactaaatgaaacacagcctattgacctttcaggcttgcctttacaatctagtaaaaatagctattcctttcagaatccatccagttttgatcctagtatgctgctgcaaagattttcagtggccccccatgagacccagacacaaagaggaggagaatttcagtgtggtctagaagctgcttcagtgtattctgaccatactaatactaacaatctgactttcctgatggacctgccctcagctggcaggagcatgccggaggcctcagaccaggaagagcacctctcccctctggacttcctgcactcagccaatttttcattgggcagcattaatcagaggcttaataagagagaaaggagcaagttgaagaatctaagaaggaaacaacgaaggcgtgaaagatggctacagaagcagggtaaatactcaggagtgggattgctggatcatatggtaagtatatatttacttatatgagaaattgtcaaattgttttccagaatggctgtaccattttgcattccaagcagcaaagacttccattttctgtgcgtccttgaaagcaagcactggtattctcagtgttttaaaattttagtcattcaaatacatagacagttgtatcacatcatgactttaatttgcttttccttaaggatgctgaacatatgtgcttattttacatttgtatatattctttagttaagtgtcttcaaatcttttgggctggtgtggcagcttatgtctataatcccagcacttttgagaggccaaggcaggaggattgcttgagttcaggagttcaagaccagcctgggcaacatagcaaaaccttatctctac

SEQ ID NO: 2599 - protein, 416 aa, Homosapiens; identical to SEQ ID NO: 323

SEQ ID NO: 2600 - DNA, 4904 bp, Homosapiens
agagcctggctgctggcggccgggagcgccgggacggggcgcgaagccggaggctccgggacgtggatacagatgaaaagaagcaaagaattgataactaaaaatcatagtcaagaggaaacaagtattcttcgttgttggaaatgtagaaaatgtatagcaagctctggttgttttatggagtatcttgagaatcaagtgattaaggataaagatgattcagttgatgctcaaaatatttgtcatgtgtggcacatgaatgtagaagcccttccagaatggataagctgcctaatccaaaaagcccagtggacagttggaaaactgaattgtcctttctgtggggcccgtttagggggctttaattttgtcagcactccaaaatgttcctgtggccagcttgcagctgtacatctctccaagagccggactgattatcagccaacacaggcaggcagactaatgagaccatcagtgaaatacttgtcacatcctagagttcagtcaggttgtgacaaggaagctctgctgacaggtggtggctctgaaaacagaaatcacaggcttttaaacatggcccgaaataataatgaccctggaagattaacagaagcactctgcctggaggtgcgaccaacatattttgagatgaagaacgaaaaactgctgtccaaagcatcagaaccaaaataccagctttttgttccccagcttgtgactggcagatgcgctacaagagcttttcatagaaaatcacatagtttggatctgaacatcagtgagaaactgactttattacccactttatatgaaatacatagtaagactactgcctattccagactaaatgaaacacagcctattgacctttcaggcttgcctttacaatctagtaaaaatagctattcctttcagaatccatccagttttgatcctagtatgctgctgcaaagattttcagtggccccccatgagacccagacacaaagaggaggagaatttcagtgtggtctagaagctgcttcagtgtattctgaccatactaatactaacaatctgactttcctgatggacctgccctcagctggcaggagcatgccggaggcctcagaccaggaagagcacctctcccctctggacttcctgcactcagccaatttttcattgggcagcattaatcagaggcttaataagagagaaaggagcaagttgaagaatctaagaaggaaacaacgaaggcgtgaaagatggctacagaagcagggtaaatactcaggagtgggattgctggatcatatgactttgaataatgagatgagtacagatgaagacaatgaatatgcagaagaaaaggatagctacatctgtgcagtgtgtctggacgtttatttcaacccttatatgtgttacccttgccatcacatcttctgtgagccctgcttacggactctggccaaagacaatccttcaagcactccatgcccattgtgtcggacaattatttctagagtctttttccaaacagaattgaacaatgccacaaaaactttctttactaaagaatatttgaaaataaaacaaagctttcagaaatccaactctgcaaaatggcccctaccaagctgcagaaaagcatttcatctttttggaggtttccgcagacatgcagctccagttacaagaaggcagttcccacacggtgcacacaggatggattacctgcactttgaggatgatagccgtggatggtggtttgacatggatatggtgatcatatatatttattcagtgaactgggtcattggattcattgttttctgctttctttgctattttttctttccgttttaggaatttcataccttactacaattgaccaatcataaatgatgtaaataacaattgcttaaacatttttaaatgtgctttgaagtttttttaatgttgcattatacaaattgttgatgtttatagaaagcctgagaataatgaatttatttattaatgtttttcatgtaacaaactaaactttattcaagagctaacctacccagcacttagcaacaatgcactattaatttcatagttgttcttgggttaggatttggggctctgattttataatatcactttaatacttattttgattgtaaaaaactgaagttttctctccacttaaaaatagtaaaaatacaaaaagaaatgataatctaggtagatattatctttactgataaaatatttagtcaatcaccacttattctcaggcaaattatatgtattaaagataaaccatattctctgggaactaatctagcagggtatattcagttttggtttctaattgtcactacttatatccctttctagtaccaagaaaactgactattctttttgtacagatctaattagtacaacattttaaattattataaacagaatactaaatacaaatcatgagactaatccctaccaataaacactttagctagctataaacactttccagattgaaggattaatcaccagaagacatgaaaaatttaccgacttttagtagtctaaaagagcaatgcatggtccaaaatgtaatttagtgattcatttaagtaggagatggtcaaatatattgtaaatgtgcaataaagagtggcttttaatttttttaatgtctgaataaagtattgttataaataggcttatcgattttagaaagaaaacctgacatttttaattacagtaatcattaatttttttcattattaaaatttaaaaataagagaactgaatcattagaacatggaattggggcaggtaacccaattcaaaaaaggaaaaactggagcagagacttaagcttatttattcagttattctggtggtctttgtgaaacctgggacaaagtttttattatgaattactaatccagtattactacactatgatgtcatatatctggtaattcaataagcaaacttttacataaaataggtgactctctcgtggcactaaaaatactaccactatccaaaaacattgggatcaactgggctttaacagtttcaatctatgaaaagccaaaatttaagctaattgctactaactgtatttcaataaaagcacttgactgttggtatgtgatgttctaagaaaactagaagaatggtactgatttctattctaatgctgttcttattattgtgttttaaattatatctattacagaaaatagtatacactagacatcaaatccagaaatcagaacactaagtacaatttagaaacacagataaatttatacttataaatggatatttataattactaattgctcaaagtaaacataagggaaaatatcagctctcttaaaatatatagcaagattgaaaacacacatatgaggagttgcattattttaagaactttaaattgcagccatttcctaggcaacttctggtttatacactctagaaaatatatcttgattcattcctaaatcacaataaaggttttaattatgtataaactaaataagtattattatagatacagatctctcataggaacaaagttgattcccaatatatatttgttaggtcagtgatacatatcagtttatagatctcagtctactaaatatttatgatacccttaaataaacatgaacctttaaatgaagaaagcataatctggaaaagcattcaaaatggattgagtatatttatcttgactaataacttgatctgaaaattatagaatattaaaagaagtaaattcataaaattataaattactaatctttaaaatattcttaaattttgtaaaagtggagataaaaactgctaaatattaagaagtatagcatttcctagatctaccagcttataagaagccagataaaatctcagatggaaagaaaccagtttcttctggtatgtagcacacagtagccattcaaaataaaatacatggatgagctttagagtaaaacaaaaaattataatgctcttcctaagcatctctcacagtaaaaactcactgtccaataaagagccaaagaaaggaaaagaagaaaaatgttaaagttaatgaagcatagtacttgtcccaagtaatattatttaataagcttaattttatgagttatcattatcaataatttctatttctaccaagcttaattatggtaaaggttaattttaaacatgttcacacattcttttttaaaaaaatgccctaattgaggtatatttctgaatagtttcagcaggttattttttaattttaaaaaagcaaattcacaaacctagacccatttattttatactcagcagaagacagggaaatttaaattagacaaagttgaaaaagaatcagaatttatattttacaaagcttctaccactctgaatcaacaaaatcaggaatggaaaaaaaaatttctgtatctgctgaattattaatgccactatagtattatatgctaaatatgaaagcagtgctgccatcagtttcacttctgccttggaatcttgctcctaagttagctctgtggcataacaaaattccagttaataaaattttcatttaaatgtcttttgtatggctaaatgaatatacagattcttaaacatctaatttttatatggatttctcaaagaatgccttacagaagagcattctctgattaaatgcaattacagttggagtctttgattcttcacagaattctgtagttgaagccagaaaacactgtcatttaggaaagtgttcctaaaggtttgaatgctttaacatgctcaactcttacttcttgaagtgtttgattgtcagtaaattttcgaagaacattaaagttctaccaatgtagaagcatgaggaataaaagatggtctggatcaag

SEQ ID NO: 2601 - protein, 592 aa, Homosapiens
MKRSKELITKNHSQEETSILRCWKCRKCIASSGCFMEYLENQVIKDKDDSVDAQNICHVWHMNVEALPEWISCLIQKAQWTVGKLNCPFCGARLGGFNFVSTPKCSCGQLAAVHLSKSRTDYQPTQAGRLMRPSVKYLSHPRVQSGCDKEALLTGGGSENRNHRLLNMARNNNDPGRLTEALCLEVRPTYFEMKNEKLLSKASEPKYQLFVPQLVTGRCATRAFHRKSHSLDLNISEKLTLLPTLYEIHSKTTAYSRLNETQPIDLSGLPLQSSKNSYSFQNPSSFDPSMLLQRFSVAPHETQTQRGGEFQCGLEAASVYSDHTNTNNLTFLMDLPSAGRSMPEASDQEEHLSPLDFLHSANFSLGSINQRLNKRERSKLKNLRRKQRRRERWLQKQGKYSGVGLLDHMTLNNEMSTDEDNEYAEEKDSYICAVCLDVYFNPYMCYPCHHIFCEPCLRTLAKDNPSSTPCPLCRTIISRVFFQTELNNATKTFFTKEYLKIKQSFQKSNSAKWPLPSCRKAFHLFGGFRRHAAPVTRRQFPHGAHRMDYLHFEDDSRGWWFDMDMVIIYIYSVNWVIGFIVFCFLCYFFFPF

SEQ ID NO: 2602 - DNA, 1244 bp, Homosapiens
tcgcacctgaggctctcggagcggcctcggggcgcgcccacctggaggttggaattacacagggtcgaaaaagctgagtcctggaggcgaggcgctgtagatgaaaagaagcaaagaattgataactaaaaatcatagtcaagaggaaacaagtattcttcgttgttggaaatgtagaaaatgtatagcaagctctggttgttttatggagtatcttgagaatcaagtgattaaggataaagatgattcagttgatgctcaaaatatttgtcatgtgtggcacatgaatgtagaagcccttccagaatggataagctgcctaatccaaaaagcccagtggacagttggaaaactgaattgtcctttctgtggggcccgtttagggggctttaattttgtcagcactccaaaatgttcctgtggccagcttgcagctgtacatctctccaagagccggactgattatcagccaacacaggcaggcagactaatgagaccatcagtgaaatacttgtcacatcctagagttcagtcaggttgtgacaaggaagctctgctgacaggtggtggctctgaaaacagaaatcacaggcttttaaacatggcccgaaataataatgaccctggaagattaacagaagcactctgcctggaggtgcgaccaacatattttgagatgaagaacgaaaaactgctgtccaaagcatcagaaccaaaataccagctttttgttccccagcttgtgactggcagatgcgctacaagagcttttcatagaaaatcacatagtttggatctgaacatcagtgagaaactgactttattacccactttatatgaaatacatagtaagactactgcctattccagactaaatgaaacacagcctattgacctttcaggcttgcctttacaatctagtaaaaatagctattcctttcagaatccatccagttttgatcctagtatgctgctgcaaagattttcagtggccccccatgagacccagacacaaagaggaggagaatttcagtgtggtctagaagctgcttcagtgtattctgaccatactaatactaacaatctgactttcctgatggacctgccctcagctggcaggagcatgccggaggcctcagaccaggaagagcacctctcccctctggacttcctgcactcagccaatttttcattgggcagcattaatcagaggcttaataagagagaaaggagcaagttgaaga

SEQ ID NO: 2603 - protein, 380 aa, Homosapiens
MKRSKELITKNHSQEETSILRCWKCRKCIASSGCFMEYLENQVIKDKDDSVDAQNICHVWHMNVEALPEWISCLIQKAQWTVGKLNCPFCGARLGGFNFVSTPKCSCGQLAAVHLSKSRTDYQPTQAGRLMRPSVKYLSHPRVQSGCDKEALLTGGGSENRNHRLLNMARNNNDPGRLTEALCLEVRPTYFEMKNEKLLSKASEPKYQLFVPQLVTGRCATRAFHRKSHSLDLNISEKLTLLPTLYEIHSKTTAYSRLNETQPIDLSGLPLQSSKNSYSFQNPSSFDPSMLLQRFSVAPHETQTQRGGEFQCGLEAASVYSDHTNTNNLTFLMDLPSAGRSMPEASDQEEHLSPLDFLHSANFSLGSINQRLNKRERSKL

SEQ ID NO: 2604 - DNA, 4268 bp, Homosapiens
atgagttctgcaccgaatgggcgcaaaaagcgccccagccggtccacccgctcctcgatcttccagatcagcaagcccccgctgcagagcggagattgggagcgcaggggcagcggctccgagagcgcccacaaaacccaacgagccctggacgactgcaagatgcttgtccaagagttcaacacacaagtggccctgtaccgagagctggtcatttctattggggatgtctcggtcagctgcccctcactccgggcggaaatgcacaagacaagaaccaaaggctgtgaaatggcccgtcaggcacaccaaaaattggctgccatctcaggcccggaagatggtgagatccatccagaaatctgtcggctttacatccagctgcagtgctgcttagaaatgtataccacagagatgctaaaatccatatgtctgctggggtctcttcagtttcatcgaaaaggaaaggaacctggcgggggaaccaagagtttggattgcaaaattgaggagagtgctgaaacacctgccctagaagactcctcatcatcccccgtagatagtcagcaacattcctggcaggtttccacagacattgagaacactgaaagagacatgagagaaatgaaaaaccttttaagcaaactcagggaaactatgcctttaccattgaaaaatcaagatgacagcagccttctgaatctaactccctaccccctggtgagaagacggaagagaaggttctttgggctgtgttgtctcatctcaagctaggtggctcctcctggaaacccactgagaacatctgaaaaaaaatcacaaaacccgaggacctccagacagctgaaccacacagttattggtttttgactatgttttctatgcttccttattacttttatctgcctccccctgcccttttaaatgattttacacttgaaagcagctgccgtcaagaaaaaaaagaacagattcaaaaaccaggctgtttttaaaagggaattttaaagctgacattgtgcatgtctgctccaaaccacgccatgacagatgcaagaattatgatttttaaattatttaaaggttttttaaatgtattatacagaggaaaaatatttcacatataatagtatatctatagctcttgctgatctcatgttaaaatttatcgtatatgaaagaagtctttaaacatagaaatctatttaaaactgaaaaactgtgttcaaaaatccaatctatcaatatcattagaaataatattataagcaaacatataccacctcacctattgctttctctgcactcatttacatttagtcttccattctgtcagaatctaagagcttcaacataaaagtatcttaatttataaagcaacaaaaaccacatatgaaaagtactaaaattttgtaaatacacaataatcctaataccttcgtacaaatgcatatgggcaactaatttctttttgatccaatgatgtctttttcagcttcttggagaatgaagtaatccagttaggaaatggtgtagtaacatatacaattgccctcaaatgtaaaatcaaatattattacattttgttctaattgaaatctgaagcatggtgtctgcacatcagcatagtgttaaatcttatagggcatgctggaattagctcagattataaaaatatttaacattttacattgttaataaagttttttagttaagctaagcttgtctcattttagatgactatgcagataagatttttccaacgtgtacttggtgtcttgtcttatgcttagactcttgaaagcaggacacattaagcaatactatattttagaaaggaggaagccacatgctttgtttttctgctcacagctttgttgtgatcttccttcactaaacttgtaacatggtacaaattttgttataccgtctcctgttcttcctttggcccatttcccagacagaatttcccatgggttgagagatcaagtctttgcactttttttcttgttttccatagtctgaaaaaccttcaagtcagacaggaggcaccagtgtccagtacaatagaaggatgagctagatgccgataagtggtttatccaagacacatctttagtcccaaccctgttctttaccaatacttatgtgcacaggcatttatatgtataccaatatttttacctaaaaactaaatatattaaggccttttgctttagtgaagatgaactactgtaataattattgtattaggttgaattatatgaaatttcctatatgtgactgttttgacctacaaaatggcaatttcttatagttcaccctaatatccaatgtggaaattatacttggaattgtcttctagctcttttgattgaaagtgaaagaattaaagggttggaagagaacgttatacaggtctctatttagatcataccagctggtttttggccttattctttgaatctagagttgtgttccaaggaaccagtaattaatgcatggttataggtatacctggcttcaaaaaaaagaagtagccgtggaaagctatatgagaaaatcacaattttctgaatcaaatatttgtaaaacaatttggctatttaaagactcttagggtaaatactccctggaaaagcaagcaatccagacttatctggtctgcaaaccttgatttcagcttaatatcctttcctgaatctaattcattttcacccactaaggtcatttcatttaagatccattgtttttgaaattttgaagtagcccagtttggcagctctcagcacctgcctctgccctctcctatacttcaactatattgaactctagcttcaatctagttcctactaatccatgcaaaagttattaactgataagcccaatcttgttcagcacgttcttctaaatgcctgacctaaataacttctgcttggttaacttgtgttcattctcaccttagcctcagtgtgaaagtaacacttaccttctgtgcaattgtcctttgtacaactgaagactgttaataaattcaggtctcacctccatgtctgaaaaggctatagtagctattcatggagatgggaatttgtctaattacctagccagagtttgcatatttaaggtaatatattcagctaccgtatcttttattcatagtgcctgttttccagcctttgatcagttttgtagttcccgtggataaactccaagatctaaagatcctctttcagtagcatatactaaaattaagtttagtgctcaaaaccctggtaacctacactggcccaaggttacagtaggtaattcaccgtctcacattagacaggccaatgcatcccttaggagctgccccactctcctctcacctaccaaaggattttctcaggtgtggttccaagcgataaagttctactgtctcggcttcctgctggtaattcgctttcagattagcaataacactgagctgatctctagggttaagaagagaacattgaactcattttgtcgcatgtacccacaggcttgaaacagaaaatgatgtaaacttttgtggcatacattcacccattttcccaccatatctttactatcctgtgttgatttttttttcaaattacaaagacaatacatgttctttgtgggaaatctgaaaaatactaccaaatagaaaataaaaatcacctgaattccaccacgaccacattgtttaaaaccacatttctgggttttaaatcagtcagtggctgggcccaaaggcacttttgggtaagataagtgaagaaatgcccacaaggccaaggtgtcacttaaaaaaacaaacaaaaaaaacaagccagaaaaaaaaaattctgtccgctaatgttttgcacgcatctaggagcagactcactgcaaacctctggttatgccattattcaggggtataaagaaagctttagaagtagcatagtcctgatgcctcctctaatgagttaaagctcttgggggaaattctaaaattgccagaccattttgtttctctgtgctcctacgaaaccagtcgggatactgagtgtttggcaatactgccacctactgaaagctgagcttcagagtgaggtgaaataaagacagaatgtaaaagcatctactttgttttaaacagcaaacaaatggaccagattaacaatgatcccatctggaatttaaaactctgaaagtgtcaacattgaaaggattaagcatatcatccggtcaaacttcccaccctacccacataccca

SEQ ID NO: 2605 - protein, 257 aa, Homosapiens; identical to SEQ ID NO: 325

SEQ ID NO: 2606 - DNA, 2638 bp, Homosapiens
acacactctgctacattgaaactgctccctgaatcttttcctccggtaaattgtgcttcctgggaaactaagggtttcagacccaaagtttacgcctatcagacctacacagaaaatcgcatctttggagaggaatagtcagcatcaccttgattgaagggagagacctcaaggccatggattccaacgggttgagcgatccctacgtgaagttccggcttgggcatcagaagtacaagagcaagattatgccaaaaacgttgaatcctcagtggagggaacaatttgattttcacctttatgaagaaagaggaggagtcattgatatcactgcatgggacaaagatgctgggaaaagggatgatttcattggcaggtgccaggtcgacctgtcagccctcagtagggaacagacgcacaagctggagttgcagctggaagagggtgagggacacctggtgctgctggtcactctgacagcatcagccacagtcagcatctctgacctgtctgtcaactccctggaggaccagaaggaacgagaggagatattaaagagatatagcccattgaggatatttcacaacctgaaagatgtgggatttctccaggtgaaagtcatcagagcggaagggttaatggctgccgacgtcactggaaaaagtgacccattttgtgtggtagaactgaacaacgatagactgctaacacatactgtctacaaaaatctcaatcctgagtggaataaagtcttcacgttcaacattaaagatatccattcagttcttgaagtgacagtttatgatgaagatcgggatcgaagtgctgactttctgggcaaagttgctataccattgctgtctattcaaaatggtgaacagaaagcctacgtcttgaaaaacaagcagctgacagggccaacaaagggggtcatctatcttgaaatagatgtgatttttaatgctgtgaaagccagcttacgaacattaatacccaaagaacagaagtacattgaagaggaaaacagactctctaaacagctgctactaagaaactttatcagaatgaaacgttgtgtcatggtgctggtaaatgctgcatactacgttaatagttgctttgattgggattcacccccaaggagtctcgctgcttttgtgctctttctctttgttgtctggaactttgagctctacatgataccactggttttgttgttactattgacatggaactacttcttgataatatcagggaaagataacaggcaacgtgatacagtagtggaggacatgctagaggacgaggaagaagaagatgacaaagatgacaaggacagtgaaaaaaagggatttataaataaaatctatgccatccaggaggtatgtgtcagtgtccagaacatcctagatgaagtggcttcctttggcgaaaggataaagaatactttcaactggactgtcccattcttaagctggctggccattgtagccctctgtgtgttcacagccatcctgtactgcattccgctgagatacattgtccttgtctggggcatcaataaatttacaaaaaagcttcggagtccatatgcaattgataacaatgaactacttgacttcctttccagagtcccttcagatgtacaagtggtgcaataccaagaactgaaaccagatccttctcatagcccatataaaagaaagaaaaacaatcttggctagccagctcccagcactgaggagaccagcatctgtttgggaagataaaagaaaaagccctcagcctcagcagcatttcctttctttctgctttttatttattttgcctttttatcatgatcgagagaatctgtaaatagtgtacaaaggcatatgtctttgaatatatacttctattgtacagactcaacttgataaaggttttgctactgctgtgtcaaaaccttgttagctgtggataataatataacacactgaaagaacaaatataagaatgataacactggaagatatattcttatctaattactagtggattaaatactcacctgtgctctgattaaatctacatcaattgtaaatgtcgatttgattttaaagtttttttttaatgcgactattttttatctgaaaagtaatccattacacttttctatgttttatacatttcaaaagggagggaaattccaaagcctgaataatggaatggatacatttcaatttaacatatattctggctttagatcccgacattcactcctgtgcaaattacttaggtatgacttaggctaattttaagctaataagtgaaggtacattcactccctcaagagaatcaatactcagaaggttacaaagttttctttatagaatttcaatcaatcattccatctaaaaccttaaaatctctacaggactacataacataaatactgccagtttataaacgattgcctatctgaatttttatacctaccactactttaatttatacagttagttagcaaattagcaacccagtaagtacagttatcaaaaatactaggaaactatatccatatcgcttttggtgtcagattgtatctgtgcatctaaaaatattttaataaatactcaagtgctctcagagaaaaaaa

SEQ ID NO: 2607 - protein, 515 aa, Homosapiens
MDSNGLSDPYVKFRLGHQKYKSKIMPKTLNPQWREQFDFHLYEERGGVIDITAWDKDAGKRDDFIGRCQVDLSALSREQTHKLELQLEEGEGHLVLLVTLTASATVSISDLSVNSLEDQKEREEILKRYSPLRIFHNLKDVGFLQVKVIRAEGLMAADVTGKSDPFCVVELNNDRLLTHTVYKNLNPEWNKVFTFNIKDIHSVLEVTVYDEDRDRSADFLGKVAIPLLSIQNGEQKAYVLKNKQLTGPTKGVIYLEIDVIFNAVKASLRTLIPKEQKYIEEENRLSKQLLLRNFIRMKRCVMVLVNAAYYVNSCFDWDSPPRSLAAFVLFLFVVWNFELYMIPLVLLLLLTWNYFLIISGKDNRQRDTVVEDMLEDEEEEDDKDDKDSEKKGFINKIYAIQEVCVSVQNILDEVASFGERIKNTFNWTVPFLSWLAIVALCVFTAILYCIPLRYIVLVWGINKFTKKLRSPYAIDNNELLDFLSRVPSDVQVVQYQELKPDPSHSPYKRKKNNLG

SEQ ID NO: 2608 - DNA, 2966 bp, Homosapiens
gccggtattcagtgaagaaagcaagtctaaatatgcagttctctcactggagtgaaagatgttttgttcatttctaatcaactatgctagacagctgcaagctgaaaagtgcctgcaatttgccatttatttgtaataagaagtttttagaagtaagataatacacaagaacctcaaccctgtgtgggaagaaaaagcttgtattctggttgatcatcttagggagccattgtatataaaggtatttgactatgattttggactacaggatgactttatgggctcagcctttctggatctgacacaattggagttaaacaggcccacagatgtgacccttactctgaaagatcctcattatcctgaccatgatcttggaatcattttgctctcagtcatccttacccctaaagaaggagagtccagggatgtgacaatgctaatgaggaagagttggaaaagatcaagtaaggaactttcagaaaatgaagtggttggatcttatttctctgtgaagtctctcttttggaggacgtgcggcaggccagctcttcctgtcctgggcttctgcagagcagagcttcagaatccttattgcaaaaatgtacaatttcagacccaaagtttacgcctatcagacctacacagaaaatcgcatctttggagaggaatagtcagcatcaccttgattgaagggagagacctcaaggccatggattccaacgggttgagcgatccctacgtgaagttccggcttgggcatcagaagtacaagagcaagattatgccaaaaacgttgaatcctcagtggagggaacaatttgattttcacctttatgaagaaagaggaggagtcattgatatcactgcatgggacaaagatgctgggaaaagggatgatttcattggcaggtgccaggtcgacctgtcagccctcagtagggaacagacgcacaagctggagttgcagctggaagagggtgagggacacctggtgctgctggtcactctgacagcatcagccacagtcagcatctctgacctgtctgtcaactccctggaggaccagaaggaacgagaggagatattaaagagatatagcccattgaggatatttcacaacctgaaagatgtgggatttctccaggtgaaagtcatcagagcggaagggttaatggctgccgacgtcactggaaaaagtgacccattttgtgtggtagaactgaacaacgatagactgctaacacatactgtctacaaaaatctcaatcctgagtggaataaagtcttcacgttcaacattaaagatatccattcagttcttgaagtgacagtttatgatgaagatcgggatcgaagtgctgactttctgggcaaagttgctataccattgctgtctattcaaaatggtgaacagaaagcctacgtcttgaaaaacaagcagctgacagggccaacaaagggggtcatctatcttgaaatagatgtgatttttaatgctgtgaaagccagcttacgaacattaatacccaaagaacagaagtacattgaagaggaaaacagactctctaaacagctgctactaagaaactttatcagaatgaaacgttgtgtcatggtgctggtaaatgctgcatactacgttaatagttgctttgattgggattcacccccaaggagtctcgctgcttttgtgctctttctctttgttgtctggaactttgagctctacatgataccactgtggcttcctttggcgaaaggataaagaatactttcaactggactgtcccattcttaagctggctggccattgtagccctctgtgtgttcacagccatcctgtactgcattccgctgagatacattgtccttgtctggggcatcaataaatttacaaaaaagcttcggagtccatatgcaattgataacaatgaactacttgacttcctttccagagtcccttcagatgtacaagtggtgcaataccaagaactgaaaccagatccttctcatagcccatataaaagaaagaaaaacaatcttggctagccagctcccagcactgaggagaccagcatctgtttgggaagataaaagaaaaagccctcagcctcagcagcatttcctttctttctgctttttatttattttgcctttttatcatgatcgagagaatctgtaaatagtgtacaaaggcatatgtctttgaatatatacttctattgtacagactcaacttgataaaggttttgctactgctgtgtcaaaaccttgttagctgtggataataatataacacactgaaagaacaaatataagaatgataacactggaagatatattcttatctaattactagtggattaaatactcacctgtgctctgattaaatctacatcaattgtaaatgtcgatttgattttaaagtttttttttaatgcgactattttttatctgaaaagtaatccattacacttttctatgttttatacatttcaaaagggagggaaattccaaagcctgaataatggaatggatacatttcaatttaacatatattctggctttagatcccgacattcactcctgtgcaaattacttaggtatgacttaggctaattttaagctaataagtgaaggtacattcactccctcaagagaatcaatactcagaaggttacaaagttttctttatagaatttcaatcaatcattccatctaaaaccttaaaatctctacaggactacataacataaatactgccagtttataaacgattgcctatctgaatttttatacctaccactactttaatttatacagttagttagcaaattagcaacccagtaagtacagttatcaaaaatactaggaaactatatccatatcgcttttggtgtcagattgtatctgtgcatctaaaaatattttaataaatactcaagtgctctcagagaaaaaaa

SEQ ID NO: 2609 - protein, 496 aa, Homosapiens
MGSAFLDLTQLELNRPTDVTLTLKDPHYPDHDLGIILLSVILTPKEGESRDVTMLMRKSWKRSSKELSENEVVGSYFSVKSLFWRTCGRPALPVLGFCRAELQNPYCKNVQFQTQSLRLSDLHRKSHLWRGIVSITLIEGRDLKAMDSNGLSDPYVKFRLGHQKYKSKIMPKTLNPQWREQFDFHLYEERGGVIDITAWDKDAGKRDDFIGRCQVDLSALSREQTHKLELQLEEGEGHLVLLVTLTASATVSISDLSVNSLEDQKEREEILKRYSPLRIFHNLKDVGFLQVKVIRAEGLMAADVTGKSDPFCVVELNNDRLLTHTVYKNLNPEWNKVFTFNIKDIHSVLEVTVYDEDRDRSADFLGKVAIPLLSIQNGEQKAYVLKNKQLTGPTKGVIYLEIDVIFNAVKASLRTLIPKEQKYIEEENRLSKQLLLRNFIRMKRCVMVLVNAAYYVNSCFDWDSPPRSLAAFVLFLFVVWNFELYMIPLWLPLAKG

SEQ ID NO: 2610 - DNA, 3156 bp, Homosapiens
attccaagtcgctgctgtgcagagcagcaagtgctccgtgcagggctgttgctatcacttggaggtgaacagcctcttttgccggtattcagtgaagaaagcaagtctaaatatgcagttctctcactggagtgaaagatgttttgttcatttctaatcaactatgctagacagctgcaagctgaaaagtgcctgcaatttgccatttatttgtaataagaaaataataaacactgctggaaccagtaatgcagaagtccccttggctgatcccggaatgtaccagctggacattacattaagaaggggtcaaagtttagctgctcgagatcgaggagggacgagtgatccatatgtgaagtttaaaatcggaggaaaagaagtttttagaagtaagataatacacaagaacctcaaccctgtgtgggaagaaaaagcttgtattctggttgatcatcttagggagccattgtatataaaggtatttgactatgattttggactacaggatgactttatgggctcagcctttctggatctgacacaattggagttaaacaggcccacagatgtgacccttactctgaaagatcctcattatcctgaccatgatcttggaatcattttgctctcagtcatccttacccctaaagaaggagagtccagggatgtgacaatgctaatgaggaagagttggaaaagatcaagtaagtttcagacccaaagtttacgcctatcagacctacacagaaaatcgcatctttggagaggaatagtcagcatcaccttgattgaagggagagacctcaaggccatggattccaacgggttgagcgatccctacgtgaagttccggcttgggcatcagaagtacaagagcaagattatgccaaaaacgttgaatcctcagtggagggaacaatttgattttcacctttatgaagaaagaggaggagtcattgatatcactgcatgggacaaagatgctgggaaaagggatgatttcattggcaggtgccaggtcgacctgtcagccctcagtagggaacagacgcacaagctggagttgcagctggaagagggtgagggacacctggtgctgctggtcactctgacagcatcagccacagtcagcatctctgacctgtctgtcaactccctggaggaccagaaggaacgagaggagatattaaagagatatagcccattgaggatatttcacaacctgaaagatgtgggatttctccaggtgaaagtcatcagagcggaagggttaatggctgccgacgtcactggaaaaagtgacccattttgtgtggtagaactgaacaacgatagactgctaacacatactgtctacaaaaatctcaatcctgagtggaataaagtcttcacgttcaacattaaagatatccattcagttcttgaagtgacagtttatgatgaagatcgggatcgaagtgctgactttctgggcaaagttgctataccattgctgtctattcaaaatggtgaacagaaagcctacgtcttgaaaaacaagcagctgacagggccaacaaagggggtcatctatcttgaaatagatgtgatttttaatgctgtgaaagccagcttacgaacattaatacccaaagaacagaagtacattgaagaggaaaacagactctctaaacagctgctactaagaaactttatcagaatgaaacgttgtgtcatggtgctggtaaatgctgcatactacgttaatagttgctttgattgggattcacccccaaggagtctcgctgcttttgtggtagtggaggacatgctagaggacgaggaagaagaagatgacaaagatgacaaggacagtgaaaaaaagggatttataaataaaatctatgccatccaggaggtatgtgtcagtgtccagaacatcctagatgaagtggcttcctttggcgaaaggataaagaatactttcaactggactgtcccattcttaagctggctggccattgtagccctctgtgtgttcacagccatcctgtactgcattccgctgagatacattgtccttgtctggggcatcaataaatttacaaaaaagcttcggagtccatatgcaattgataacaatgaactacttgacttcctttccagagtcccttcagatgtacaagtggtgcaataccaagaactgaaaccagatccttctcatagcccatataaaagaaagaaaaacaatcttggctagccagctcccagcactgaggagaccagcatctgtttgggaagataaaagaaaaagccctcagcctcagcagcatttcctttctttctgctttttatttattttgcctttttatcatgatcgagagaatctgtaaatagtgtacaaaggcatatgtctttgaatatatacttctattgtacagactcaacttgataaaggttttgctactgctgtgtcaaaaccttgttagctgtggataataatataacacactgaaagaacaaatataagaatgataacactggaagatatattcttatctaattactagtggattaaatactcacctgtgctctgattaaatctacatcaattgtaaatgtcgatttgattttaaagtttttttttaatgcgactattttttatctgaaaagtaatccattacacttttctatgttttatacatttcaaaagggagggaaattccaaagcctgaataatggaatggatacatttcaatttaacatatattctggctttagatcccgacattcactcctgtgcaaattacttaggtatgacttaggctaattttaagctaataagtgaaggtacattcactccctcaagagaatcaatactcagaaggttacaaagttttctttatagaatttcaatcaatcattccatctaaaaccttaaaatctctacaggactacataacataaatactgccagtttataaacgattgcctatctgaatttttatacctaccactactttaatttatacagttagttagcaaattagcaacccagtaagtacagttatcaaaaatactaggaaactatatccatatcgcttttggtgtcagattgtatctgtgcatctaaaaatattttaataaatactcaagtgctctcagagaaaaaaa

SEQ ID NO: 2611 - protein, 692 aa, Homosapiens
MLDSCKLKSACNLPFICNKKIINTAGTSNAEVPLADPGMYQLDITLRRGQSLAARDRGGTSDPYVKFKIGGKEVFRSKIIHKNLNPVWEEKACILVDHLREPLYIKVFDYDFGLQDDFMGSAFLDLTQLELNRPTDVTLTLKDPHYPDHDLGIILLSVILTPKEGESRDVTMLMRKSWKRSSKFQTQSLRLSDLHRKSHLWRGIVSITLIEGRDLKAMDSNGLSDPYVKFRLGHQKYKSKIMPKTLNPQWREQFDFHLYEERGGVIDITAWDKDAGKRDDFIGRCQVDLSALSREQTHKLELQLEEGEGHLVLLVTLTASATVSISDLSVNSLEDQKEREEILKRYSPLRIFHNLKDVGFLQVKVIRAEGLMAADVTGKSDPFCVVELNNDRLLTHTVYKNLNPEWNKVFTFNIKDIHSVLEVTVYDEDRDRSADFLGKVAIPLLSIQNGEQKAYVLKNKQLTGPTKGVIYLEIDVIFNAVKASLRTLIPKEQKYIEEENRLSKQLLLRNFIRMKRCVMVLVNAAYYVNSCFDWDSPPRSLAAFVVVEDMLEDEEEEDDKDDKDSEKKGFINKIYAIQEVCVSVQNILDEVASFGERIKNTFNWTVPFLSWLAIVALCVFTAILYCIPLRYIVLVWGINKFTKKLRSPYAIDNNELLDFLSRVPSDVQVVQYQELKPDPSHSPYKRKKNNLG

SEQ ID NO: 2612 - DNA, 1681 bp, Homosapiens
ccagaattgtgggtatccttttttcctccccagtcttacatctcaattacggaaatggtgaagtcctgggggcagatatttggaagaacagaaatgataagaccctttggcagacatatgggtggacgctttggagaaccatcaagatggtgaattctttggatccatggaaggatttgaggggtttaggaagctggtttttcagtgactctctggggctccagggttcaactgcagctcaaataagtgaaaatcaaccacttatgggagcactaatttcagatttccttcacagctgccaaaaacaattcatttgatagaaaaggagttggggaagaaatcctctataagaactaagagtacctctttgcctcatcatattcttatatgcatctctggagaactgagcaaggtgggaagaattcaggaagatggtggaggctaaaatatgagagtaactggaaacaacctctagggcaactaccactaactttaaactggaagtctctcttctgagtcctaatagatctaaagcaagaagtgtgcattccagttggactgcagtttgagaattgagtaaaaggatagccaataaactcaaaaagtattaaaaccaaacatggagttactaagtgaaagcaacagactgaggcgtgaagaacaaacagtggccacaggtcttcttttcccagggtgaaaggcccctcttccagcacctttctcaggtgggtcatagccctcatggctggacagccacttcctcatcgacgccaaccggcttgcctacaagtctgctgtgccagtggaggagccccgaagaccatcccaggatgatgcaccccataagagtacagccttgcaggggctacagccacccacagtgcacctgtgtctttgccagccccctgcagctgcatagacaccatgcatcacactcagacctcaaactcttcatgtgcggcaccttgggcaaggatttcaagctcttccaccacgctgcacatctgtcctcagtgctcacgtgacttccaggcctctgccaagttccagaccctgcctgcactgcccttctccaggccaccacatctatcccatgctgtgccattcccacacacgctctgtgagtactggctttgcggatattactgccttattctgggcctgagtttctccatctgtccaaaggcagaagcatcactcctttttcctcttttccagttgtgtcatgaagacaaaaggggttgccttccctgagcctgtggactgggtgaataggagttaaagcagggaacacaggcctgtgagccagctgtgcttcccatccagctgtgctgtgctagcttttgcaagtggcttggtttcctgctctcccaagtggcgagcaattgctgtccagaagaaagtgataacaaaagagtatggccatggtctggttcatttctgtttcctcacccttagcccactactcccaccttttgctcaataaacactgcatactccaaaacaaacaaaagcaaaacaacaacaacaacaacatacacataaacaatcctgttggaatattggagggatgaagctgaaactatggtttaagtggggcctgctccttatgggtcttctatgcttgaagatgttggggaatacctttatttcagaactgtcaccttcctacaggtctgga

SEQ ID NO: 2613 - protein, 109 aa, Homosapiens
MHHTQTSNSSCAAPWARISSSSTTLHICPQCSRDFQASAKFQTLPALPFSRPPHLSHAVPFPHTLCEYWLCGYYCLILGLSFSICPKAEASLLFPLFQLCHEDKRGCLP

SEQ ID NO: 2614 - DNA, 1163 bp, Homosapiens
gcttgcctacaagtctgctgtgccagtggaggagccccgaagaccatcccaggatgatgcaccccataagagtacagccttgcaggggctacagccacccacagtgcacctgtgtctttgccagccccctgcagctgcatagacaccatgcatcacactcagacctcaaactcttcatgtgcggcaccttgggcaaggatttcaagctcttccaccacgctgcacatctgtcctcagtgctcacgtgacttccaggcctctgccaagttccagaccctgcctgcactgcccttctccaggccaccacatctatcccatgctgtgccattcccacacacgctctgtgagtactggctttgcggatattactgccttattctgggcctgagtttctccatctgtccaaaggcagaagcatcactcctttttcctcttttccagttgtgtcatgaagacaaaaggggttgccttccctgagcctgtggactgggtgaataggagttaaagcagggaacacaggcctgtgagccagctgtgcttcccatccagctgtgctgtgctagcttttgcaagtggcttggtttcctgctctcccaagtggcgagcaattgctgtccagaagaaagtgataacaaaagagtatggccatggtctggttcatttctgtttcctcacccttagcccactactcccaccttttgctcaataaacactgcatactccaaaacaaacaaaagcaaaacaacaacaacaacaacatacacataaacaatcctgttggaatattggagggatgaagctgaaactatggtttaagtggggcctgctccttatgggtcttctatgcttgaagatgttggggaatacctttatttcagaactgtcaccttcctacaggtctggagtgatcgtgttggaaaactaaaggtctggttcttttcatggtcctcctcagattttttcaagctgatgaccttttgaaaaaaactgagaaaactgctgttgaaataagcacgaagaagaaaagagtgatcatccatttttagatgtgtttacaggctgtatgactcagtgttgcttctgctaagagcactgaatatgtggtcttttttggtactgagatgcaaacacaggaaacttgtggtctatgctgctttcagtga

SEQ ID NO: 2615 - protein, 45 aa, Homosapiens
MLEDVGEYLYFRTVTFLQVWSDRVGKLKVWFFSWSSSDFFKLMTF

SEQ ID NO: 2616 - DNA, 2173 bp, Homosapiens
attccaagtcgctgctgtgcagagcagcaagtgctccgtgcagggctgttgctatcacttggaggtgaacagcctcttttgccggtattcagtgaagaaagcaagtctaaatatgcagttctctcactggagtgaaagatgttttgttcatttctaatcaactatgctagacagctgcaagctgaaaagtgcctgcaatttgccatttatttgtaataagaaaataataaacactgctggaaccagtaatgcagaagtccccttggctgatcccggaatgtaccagctggacattacattaagaaggggtcaaagtttagctgctcgagatcgaggagggacgagtgatccatatgtgaagtttaaaatcggaggaaaagaagtttttagaagtaagataatacacaagaacctcaaccctgtgtgggaagaaaaagcttgtattctggttgatcatcttagggagccattgtatataaaggtatttgactatgattttggactacaggatgactttatgggctcagcctttctggatctgacacaattggagttaaacaggcccacagatgtgacccttactctgaaagatcctcattatcctgaccatgatcttggaatcattttgctctcagtcatccttacccctaaagaaggagagtccagggatgtgacaatgctaatgaggaagagttggaaaagatcaagtaaggaactttcagaaaatgaagtggttggatcttatttctctgtgaagtctctcttttggaggacgtgcggcaggccagctcttcctgtcctgggcttctgcagagcagagcttcagaatccttattgcaaaaatgtacaatttcagacccaaagtttacgcctatcagacctacacagaaaatcgcatctttggagaggaatagtcagcatcaccttgattgaagggagagacctcaaggccatggattccaacgggttgagcgatccctacgtgaagttccggcttgggcatcagaagtacaagagcaagattatgccaaaaacgttgaatcctcagtggagggaacaatttgattttcacctttatgaagaaagaggaggagtcattgatatcactgcatgggacaaagatgctgggaaaagggatgatttcattggcaggtgccaggtcgacctgtcagccctcagtagggaacagacgcacaagctggagttgcagctggaagagggtgagggacacctggtgctgctggtcactctgacagcatcagccacagtcagcatctctgacctgtctgtcaactccctggaggaccagaaggaacgagaggagatattaaagagatatagcccattgaggatatttcacaacctgaaagatgtgggatttctccaggtgaaagtcatcagagcggaagggttaatggctgccgacgtcactggaaaaagtgacccattttgtgtggtagaactgaacaacgatagactgctaacacatactgtctacaaaaatctcaatcctgagtggaataaagtcttcacgttcaacattaaagatatccattcagttcttgaagtgacagtttatgatgaagatcgggatcgaagtgctgactttctgggcaaagttgctataccattgctgtctattcaaaatggtgaacagaaagcctacgtcttgaaaaacaagcagctgacagggccaacaaagggggtcatctatcttgaaatagatgtgatttttaatgctgtgaaagccagcttacgaacattaatacccaaagaacagaagtacattgaagaggaaaacagactctctaaacagctgctactaagaaactttatcagaatgaaacgttgtgtcatggtgctggtaaatgctgcatactacgttaatagttgctttgattgggattcacccccaaggagtctcgctgcttttgtggccttgtatgggactttcattaatgtctgagcacatggaacaaagagtgtctacgtccctttgtgttgtaagttaccagaaagttaggcagcctgcttcccatagacgtgttgttgtctccctaaagaaagcaattgtcattatcgttaagttttagaaaaaaaatctctctctctctgtctctctcagtattctttttgtagctctttcttataataaatatatggtggtactatt

SEQ ID NO: 2617 - protein, 600 aa, Homosapiens
MLDSCKLKSACNLPFICNKKIINTAGTSNAEVPLADPGMYQLDITLRRGQSLAARDRGGTSDPYVKFKIGGKEVFRSKIIHKNLNPVWEEKACILVDHLREPLYIKVFDYDFGLQDDFMGSAFLDLTQLELNRPTDVTLTLKDPHYPDHDLGIILLSVILTPKEGESRDVTMLMRKSWKRSSKELSENEVVGSYFSVKSLFWRTCGRPALPVLGFCRAELQNPYCKNVQFQTQSLRLSDLHRKSHLWRGIVSITLIEGRDLKAMDSNGLSDPYVKFRLGHQKYKSKIMPKTLNPQWREQFDFHLYEERGGVIDITAWDKDAGKRDDFIGRCQVDLSALSREQTHKLELQLEEGEGHLVLLVTLTASATVSISDLSVNSLEDQKEREEILKRYSPLRIFHNLKDVGFLQVKVIRAEGLMAADVTGKSDPFCVVELNNDRLLTHTVYKNLNPEWNKVFTFNIKDIHSVLEVTVYDEDRDRSADFLGKVAIPLLSIQNGEQKAYVLKNKQLTGPTKGVIYLEIDVIFNAVKASLRTLIPKEQKYIEEENRLSKQLLLRNFIRMKRCVMVLVNAAYYVNSCFDWDSPPRSLAAFVALYGTFINV

SEQ ID NO: 2618 - DNA, 875 bp, Homosapiens
attccaagtcgctgctgtgcagagcagcaagtgctccgtgcagggctgttgctatcacttggaggtgaacagcctcttttgccggtattcagtgaagaaagcaagtctaaatatgcagttctctcactggagtgaaagatgttttgttcatttctaatcaactatgctagacagctgcaagctgaaaagtgcctgcaatttgccatttatttgtaataagaaaataataaacactgctggaaccagtaatgcagaagtccccttggctgatcccggaatgtaccagctggacattacattaagaaggggtcaaagtttagctgctcgagatcgaggagggacgagtgatccatatgtgaagtttaaaatcggaggaaaagaagtttttagaagtaagataatacacaagaacctcaaccctgtgtgggaagaaaaagcttgtattctggttgatcatcttagggagccattgtatataaaggtatttgactatgattttggactacaggatgactttatgggctcagcctttctggatctgacacaattggagttaaacaggcccacagatgtgacccttactctgaaagatcctcattatcctgaccatgatcttggaatcattttgctctcagtcatccttacccctaaagaaggagagtccagggatgtgacaatgctaatgaggaagagttggaaaagatcaagtaaggtaattcttagcttgtgatctttcagcttttcttgttgagcagaactatcatctgctttcccagatctctctcatctcttcaaagtatgctaccagatttcatactattcaattgttacttttccccataaatttaagccaaccatgtgatgttttttaaata

SEQ ID NO: 2619 - protein, 188 aa, Homosapiens [sequence omitted]

SEQ ID NO: 2620 - DNA, 527 bp, Homosapiens
aaagttctaatcaaacaattttcctactctccaggttaagaggccttcatctggcctctttatggacatggggatttcagaatttatactgacaagtaacttgtgccccccatgatttctaccattgtatgttggatgtgtatagggagactgtaggcagattcttagttccgagggctacaaggaaccacattcagacctgacagagaatatccttttattcagagatcctgaacttagagctgtatacggtgatcagatgggactttgactgtttctcttggagaagagtgaatgtcttctatatgcaggaagagtgaaacatatttggtgaccagaggtagagtatagccaagaatgctactgcttggcaatatgagctatagcttccggcctcctttaaaattaggagtggtcaattggctgcattctggtcaactgaatataaatgcaaaaggtttaaaggaaatgattacagttgccaccatctccttgattattaattaaaggcttttcttcaattatca

SEQ ID NO: 2621 - protein, 49 aa, Homosapiens
MLLLGNMSYSFRPPLKLGVVNWLHSGQLNINAKGLKEMITVATISLIIN

SEQ ID NO: 2622 - DNA, 843 bp, Homosapiens
ctgtgcagagcagcaagtgctccgtgcagggctgttgctatcacttggaggtgaacagcctcttttgccggtattcagtgaagaaagcaagtctaaatatgcagttctctcactggagtgaaagatgttttgttcatttctaatcaactatgctagacagctgcaagctgaaaagtgcctgcaatttgccatttatttgtaataagaaaataataaacactgctggaaccagtaatgcagaagtccccttggctgatcccggaatgtaccagctggacattacattaagaaggggtcaaagtttagctgctcgagatcgaggagattgtcccgctattacaattcctctagaaaatactctcagaagaaaggcacgatggctcacacctgtaatccaagcactttgggaagctgaggtgggaggattgcttgaggccagaagttagagaccagcctgggcaacacagcaacatcccatctctacaaattaaaaataattttgtttttttaaaaaaatgaaaatactctttgatatggtttggctatgtccccacccaaacctcatcttgaattatagttcccataatccccacttgtcatgggagggagcaggtggagatagttgaatcatgggggtggtttcccccatccagttctcatgatatgagttagttctcgcaagatctgatagttttagaaggggcttccccctctgctggactctcattctctctctcctgccaccctgtgaagaggtgccttctgccataattgtaagttatctgagacctccccagccatgtggaactgtgagtcgagtcaattaaaactcatttctttata

SEQ ID NO: 2623 - protein, 98 aa, Homosapiens
MLDSCKLKSACNLPFICNKKIINTAGTSNAEVPLADPGMYQLDITLRRGQSLAARDRGDCPAITIPLENTLRRKARWLTPVIQALWEAEVGGLLEARS

SEQ ID NO: 2624 - DNA, 927 bp, Homosapiens
attccaagtcgctgctgtgcagagcagcaagtgctccgtgcagggctgttgctatcacttggaggtgaacagcctcttttgccggtattcagtgaagaaagcaagtctaaatatgcagttctctcactggagtgaaagatgttttgttcatttctaatcaactatgctagacagctgcaagctgaaaagtgcctgcaatttgccatttatttgtaataagaaaataataaacactgctggaaccagtaatgcagaagtccccttggctgatcccggaatgtaccagctggacattacattaagaaggggtcaaagtttagctgctcgagatcgaggaggtaagagcataagagcaatatcacctagaagcttttttatgtgtttatgacaaactttgttttccacgtgattgcctgagttataaaaaattaactagaatataatttttagaagcttgaattcaaagacacagtttgacacattacttgactcctgtgaccatggtggaagacgttttgatgcaagttccaaaactctgacttattctcaacccagacagcaaagtccctatcaaactgctgacaaattagactctatatcatatgtaattactgacataattggttacataagtgaggcatatatttgaagccatgtcagaacttaccttttggtagacctgaaattctttttgctatatacatttgctcagttgaatctgctcacattgcaggacccaggactaatatctctccaaaacttcagagattcctaagaagtgatcttttgaggcctggtcagatctggcagtagtctcatggtggattaaacacattttgtagggcatgacgaaggataagataaggcaaatactcttaagttcccggattccaaatcccaatgcaatctcttgatgaacgaggatag

SEQ ID NO: 2625 - protein, 74 aa, Homosapiens
MLDSCKLKSACNLPFICNKKIINTAGTSNAEVPLADPGMYQLDITLRRGQSLAARDRGGKSIRAISPRSFFMCL

SEQ ID NO: 2626 - DNA, 837 bp, Homosapiens
atggagccccgggctgccgcggcgggcgagccagagccgccggcggcgtcctcctccttccaggcccggctctggaagaacctgcagctgggggtgggcaggagcaagggcggcgggggcgggcgcgctgggggtccagagcgccgcactgcggacaccccgtcgccctccccgccacccccggtgggcacagggaatgcaccggccagggggagtggtgcaggcagcaggtggagcggcttcaagaagcggaagcaagtgctggaccgagtcttctcctcctcgcagcccaacctgtgctgctcgtcgccggagcccctggagcccggcggcgccggcagagccgagcaggggtccacgctacgccgccggatccgcgagcatttgctccccgccgtaaaggggcccgcggcggcctcgggagcagcgggagggacgcctcctggcggacgctcccccgactcagctccttcctcttcctccgcctcatcctccctgtcctcctcgccccagcctcccccgaggggggaccgcgcccgagatgagggtgcacggcgtcagggccccggggcgcacttgtgccaccagaagagctcctctctgccgggcaccgcctgcctggagcagctgctggagccgccgcctcctcccgcagagccggcgcggagtcccgcggagtctcgggccccggagacgggcgaggagcacggcagcagccagcctgaaccaccttcacttgcctcgccagctctgctggagtggaatttggcaatccctagtacaattgacctagtgaatcagcattgtaaaacagttcaggggaagactactcaataa

SEQ ID NO: 2627 - protein, 278 aa, Homosapiens
MEPRAAAAGEPEPPAASSSFQARLWKNLQLGVGRSKGGGGGRAGGPERRTADTPSPSPPPPVGTGNAPARGSGAGSRWSGFKKRKQVLDRVFSSSQPNLCCSSPEPLEPGGAGRAEQGSTLRRRIREHLLPAVKGPAAASGAAGGTPPGGRSPDSAPSSSSASSSLSSSPQPPPRGDRARDEGARRQGPGAHLCHQKSSSLPGTACLEQLLEPPPPPAEPARSPAESRAPETGEEHGSSQPEPPSLASPALLEWNLAIPSTIDLVNQHCKTVQGKTTQ

SEQ ID NO: 2628 - DNA, 1576 bp, Homosapiens
gtcacccttgggaagaggccccagaaacaggaagaccttagttaggatgcaattacaattccttggtacattggcttcctcagaaaaaagaaaaaaatcacagagattgtttttcaaaaatatcaaatctacaaaaaataaagctggaaaagcaagcatcatgagttcagatacaaatgtaaacaaaagtgcctctccaactgcgactgcagaggaacagccagttgaacctgatggcccccttcctggctcagacaataaccaagaaaagaaagcaaattatctccagccaaaatgtcaaccaagaattctacagatctagttgaatatgttgacaagagtcatgcttttctccccatcattccaaacacccagagaggtcagctagaagacagactgaacaaccaggcgcgtaccatagctttccttcttgaacaagccttccgcatcaaggaggacatctctgcttgcctgcaggggacccatggctttcgaaaagaggaatcgctcgccaggaagttactggaaagccacatccagaccatcaccagcatcgtcaaaaaactcagccaaaatattgagattttagaagaccaaataagagctcgagatcaggcggccacaggaactaactttgcagtacacgagataaacatcaaacacctacaaggagttggagatcttcgaggaagagtagccagatgtgattcaagcattgtgaagctttctggagacattcacttattcaggcaagagcaccggcaaattgagaaagccattcaagaattcgtgcccgccctggaaactctttccaagaacttggacatgaaggtgatgcagctcttaggaaagatagaaactgccagtcctgagcaaacctcgaatttaaagatggtccagggggattatcgccacgaaatgaaccttttggaattcaaatttcattcactttcaagtaatctgtacgaagaagttgagaataataaaaaatggacagaaaaccaatttctcaaatatagaaaagaccacctgggccatataaatgaatgtctgaaggtcctacaggagaaactggaaaagtctgaaaataaaatggaagaaaaactgctgcagctttcaagcaaagtagagaatttcattaacacacagaaacaggaaacacaactaagtaaagtaaagcatatggaaaataaattgtccaaaaagatggaacaaatggaaaagcagatctggggtgaattagagacaatgcagaatgaatatcaatcaggatttaaatcaattcatgactctctcagctccctccaacaaatacagaaaacaaagatggatttagagaaatataaagtacagaaagacctaaagaaattacagcgcaagatagtggaactccaggaagtataaaccttttcagtcatcttctttttcatcagccaatggagtgatttgttggaaaaagttctgaagaagaaagttactatctctgggatgtttactgcttctaatgtctccttttaaggagacgaatgtaccagaaaaataataaagcaaagaagcttcggatgtcttgaattta

SEQ ID NO: 2629 - protein, 369 aa, Homosapiens
MSTKNSTDLVEYVDKSHAFLPIIPNTQRGQLEDRLNNQARTIAFLLEQAFRIKEDISACLQGTHGFRKEESLARKLLESHIQTITSIVKKLSQNIEILEDQIRARDQAATGTNFAVHEINIKHLQGVGDLRGRVARCDSSIVKLSGDIHLFRQEHRQIEKAIQEFVPALETLSKNLDMKVMQLLGKIETASPEQTSNLKMVQGDYRHEMNLLEFKFHSLSSNLYEEVENNKKWTENQFLKYRKDHLGHINECLKVLQEKLEKSENKMEEKLLQLSSKVENFINTQKQETQLSKVKHMENKLSKKMEQMEKQIWGELETMQNEYQSGFKSIHDSLSSLQQIQKTKMDLEKYKVQKDLKKLQRKIVELQEV

SEQ ID NO: 2630 - DNA, 671 bp, Homosapiens
agatacaaatgtaaacaaaagtgcctctccaactgcgactgcagaggaacagccagttgaacctgatggcccccttcctggctcagacaataaccaagaaaagaaagcaaattatctccagccaaaatgtcaaccaagaattctacagatctagttgaatatgttgacaagagtcatgcttttctccccatcattccaaacacccagagaggtcagctagaagacagactgaacaaccaggcgcgtaccatagctttccttcttgaacaagccttccgcatcaaggaggacatctctgcttgcctgcaggggacccatggctttcgaaaagaggaatcgctcgccaggaagttactggaaagccacatccagaccatcaccagcatcgtcaaaaaactcagccaaaatattgagattttagaagaccaaataagagctcgagatcaggcggccacaggaactaactttgcagtacacgagataaacatcaaacacctacaaggagttggagatcttcgaggaagagtagccaggacctccctccttgcccgcttatacctgagagaaactggctgaagtgcgacaggctgaggaaggagagagatttgatactgcaagcctgaatagaggatgctatctaccagccaccaaacacactcactgatcctctg

SEQ ID NO: 2631 - protein, 149 aa, Homosapiens
MSTKNSTDLVEYVDKSHAFLPIIPNTQRGQLEDRLNNQARTIAFLLEQAFRIKEDISACLQGTHGFRKEESLARKLLESHIQTITSIVKKLSQNIEILEDQIRARDQAATGTNFAVHEINIKHLQGVGDLRGRVARTSLLARLYLRETG

SEQ ID NO: 2632 - DNA, 1032 bp, Homosapiens
gcgactgcagaggaacagccagttgaacctgatggcccccttcctggctcagacaataaccaagaaaagaaagcaaattatctccagccaaaatgtcaaccaagaattctacagatctagttgaatatgttgacaatgccatacctggagctcccccaggaaaggtgtaccacagagggacaactccaggcacttggaaatagagtaacacactgttaacacatgcacattgtccaaaatacccaaggatgccagtgatgaaggtggcattgcaaaggcaatgcatattaatttgagttgttttctattccatatgtcaaagcaggatttggtctaatgctgtcattcatgttttcagggcactggggatttagtgtcagtccttctactactttgctgtgtaacaccagtcagttccataatgtctctgggctttagttttttcatttgaaaaacaaagaggttggactagaaactactgcagctttaaaataattctgattttaataatcatgaccacagaagaaaaaaatagccaaatgaatgaaatgagttcatgtgaagagaaaaatctaaatacaccttgaacttcgattttttaaaaattatctttaacaattaagatgataagatttcttcactaatttttactgcatttttttcacaagaattcccctgtcccttggccagttaaatttaatacattccaaatagttcaatcacagtatgttagcgttagccccttttttcatgttccacataacttgtatttgtttatatgactatgagtctatgatttagaaaaaaataaaactaagcatgggaaaaatatttttaaatgtttaaaaaatgcaatatttggacagatgacttttcttctgagttaaggacaatgaatgtagtatgcacaaaaataattattataaataaatgtattagctaaccttatcttccaaggagaaaagggaaacttgtccccacctgactctctacatgacaaatggaaaataaaaatcattcttctgatccgtc

SEQ ID NO: 2633 - protein, 36 aa, Homosapiens
MSTKNSTDLVEYVDNAIPGAPPGKVYHRGTTPGTWK

SEQ ID NO: 2634 - DNA, 362 bp, Homosapiens
ccagttgaacctgatggcccccttcctggctcagacaataaccaagaaaagaaagcaaattatctccagccaaaatgtcaaccaagaattctacagatctagttgaatatgttgacaaccctcccaagctatctcttgtcccaggccaacgcagccatctgattcaggttgggttgcccagggaacagactctgagatggagattggcgaatagaaggcttattacagagcacactgggatcaacacctgtggaagggaagggaaatgaatggaactgaacagaaggaatagttgaactatatgaagtgaacttctctttccagtgatcttcacaacataatttgctaccattcagaggcgg

SEQ ID NO: 2635 - protein, 64 aa, Homosapiens
MSTKNSTDLVEYVDNPPKLSLVPGQRSHLIQVGLPREQTLRWRLANRRLITEHTGINTCGREGK

SEQ ID NO: 2636 - DNA, 5707 bp, Homosapiens
atgagtcctgggaaaggcgcatgcgctctcattgcagcctcggcgtttgtagaagaggagcatctgctccagatggaaaatgggtaaggaacaatcaaattcaattcgggaagaatatagaggtggtaataattggtaaaagtctgcagggttttttttaaccaaaggaaactggtttgagaaaattgtgaaatcagcattgaaatttgttacctactccaatcaagatttgcaaactacaaaaaaatcattctgaagctttcacctataaatatataccaagataatttcagataagaatgtccagcaaggaagtgaagactgctctaaaaagtgctagagatgcaatcagaaacaaagaatacaaagaagctttgaaacactgtaagacagtgttaaagcaagagaaaaataactataatgcctgggtttttattggcgttgctgcagctgaactagaacaacctgatcaggcccagagtgcctataaaaaagctgctgaattagagccagaccaattactagcttggcaggggttagcaaacttgtatgagaaatataatcacataaatgctaaggatgacttgcctggtgtttaccaaaagctcctggatctttatgagagtgttgacaagcagaagtggtgtgatgtctgcaagaaacttgtggatctatattaccaagaaaagaaacacctagaggtggctcgaacatggcacaagttgataaaaacacggcaggaacaaggtgcagaaaatgaagagcttcatcaactatggagaaaattgactcagttcctggctgaaagtacagaggaccagaataatgaaactcagcaattgctttttactgcttttgagaatgcactgggattatcagataagattcctagtgaagatcaccaagtactttataggcatttcattcagagtttatccaaatttcctcatgagtctgctagattgaagaaggcctgtgaaggaatgataaacatctatcctactgtacagtatccattagaagtgctttgtttgcatttaattgaatcaggaaatcttactgatgaggggcagcagtattgttgtagattagtggaaatggattcaaaaagtggtccaggcctcattggcttaggcattaaagcattacaagacaaaaagtatgaagatgctgttaggaacctaacagaagggttaaaggaaagccctgtctgcacaagtggatggtatcatctggcagaagcccaagtcaaaatgcatagacctaaagaagctgttctttcatgcagtcaagctctgaagatcgtagataatcttggtgcgtctggtaacagtctttatcagaggaatctttgtcttcatttgaaagcagaggctttgattaaactctcagattatgactcttcagaggaagcaattcgtacgcttgatcagatttctgatgcagataatatcccaggacttttggttctcaaaagcttggcctatcggaacaaaggttcatttgatgaagctgcaaagattatggaagaccttctctcttcttaccctgacctagctgaagttcatgcccttgaggctttgattcatttcaccaaaaaggactatctacaagcagaaaaatgttttcagagagctcttgagaaagataccgaagttgcagaatatcattaccaacttggattaacatactggttcatgggtgaagagacaagaaaagataaaacaaaggctcttacccactttctgaaggctgcaagactggatacatatatgggcaaagttttctgctatttaggtcattattatagagacgtagtgggagataaaaacagagctcgtggatgttataggaaagcctttgaattagatgacactgatgctgaatctggagctgcagcagttgacctaagtgtggagcttgaagatatggaaatggctttagctatcctaacaacagtaactcaaaaggcaagtgctggaacggcaaaatgggcctggcttaggcgaggactatactatttgaaagctggtcagcattctcaagcagtggctgatttacaggcagcattaagagcagacccaaaggacttcaattgttgggaatcgttaggagaagcatacttaagcagaggaggctacacaacagccttgaagtccttcacaaaagccagtgagctgaacccagaatccatatacagtgtgtttaaggttgcagcaatacagcaaatcctaggcaaatataaggaggctgtagctcaataccagatgatcattaaaaagaaagaagattatgtgcctgctttaaaaggtttgggtgaatgccatcttatgatggcaaaagcagctctagttgattatcttgatggaaaagccgtagactacatagaaaaagcactggaatattttacttgtgctctacagcatcgagctgatgtgtcctgcctctggaagctagctggggatgcttgtacctgtctgtatgctgtcgcaccatctaaagtgaatgttcatgttttaggagtccttctaggtcagaaagaaggaaaacaagtattaaagaaaaatgagctcctccaccttggaggaaggtgttatggtcgtgcattaaaactgatgtctacatctaatacatggtgtgaccttggaattaattattatcgccaagcacaacatctagcagaaacaggcagcaacatgaatgatcttaaggagttgctggagaaatctttacattgtctgaaaaaagcagtgagactcgacagtaataatcacttatactggaatgctcttggtgtggttgcatgttacagtggtattggaaattatgcccttgctcagcactgtttcatcaaatcaatccagtcagaacaaattaatgctgttgcatggaccaacttgggagtgttatacctcacaaatgaaaacattgagcaagctcatgaggctttcaaaatggctcaatcccttgatccatcttatttaatgtgctggattggacaagctcttattgctgaggcagttggaagttatgacaccatggatctcttcaggcacactacagaactaaatatgcatactgaaggagcattaggttatgcgtattgggtctgcacaacattgcaagataaaagcaacagagaaacagagctgtaccagtacaacatcctccagatgaatgctattccagcagcacaagttattttgaataaatatgtagaaagaattcagaattatgccccagctttcacaatgttgggttacttaaacgaacatctacaactgaaaaaggaagcagcaaatgcataccaaagggcaattttgttgttacagactgcagaagaccaagatacttacaatgttgcaataagaaattacggcagattgttatgttccactggtgaatatgataaagctatccaggcttttaagtcaacaccccttgaagtgttagaagacatcataggttttgcattggctttattcatgaaggggctttataaagagagcagcaaagcctatgagagagccttgtctattgttgaatcggagcaagacaaagcccatatcttgacagctctggcaataactgaatataaacaaggaaaaacggatgtagccaagacattgctatttaaatgctctatcttaaaggaaccaaccacagaaagccttcaagccctgtgtgctctagggttggcaatgcaggatgctacactgtcaaaagcagcacttaatgagttactgaagcacatcaaacacaaagacagtaattatcagaggtgccttcttacatcagcgatttatgcactccaaggccgcagtgtggctgtgcaaaaacaaatatctaaagctgttcacagcaaccctggtgaccctgctctttggtctctgttgtctcgagttgttgcacagtatgctcaacgaaatgcaaagggaggtgttgtagcaggaaatgtggctcatattctggactcaaatcatggaaagaaggcattactgtacactgcggtaaatcagttggctatgggaagcagttcagcagaagatgaaaaaaatactgcactaaagaccattcagaaggcagctctcctttctccaggtgatcctgctatctgggctgggctaatggcagcctgtcacgctgatgataaactggccttagtgaacaacactcagccaaagaggatagatttatacttggcactgttatctgctgtttctgcttcaattaaagacgaaaaattctttgaaaattacaaccagtcccttgaaaagtggtctctctcacaagctgtcactggtctaatagacacaggaagaatatctgaagctgaaactctctgcacaaagaatttaaaaagtaaccctgatcagccagccgttatcttacttttgagacaagttcagtgtaaaccactcctggagtcacaaaagccactcccagatgctgtacttgaagaactacaaaaaacagtcatgtccaactcaacctctgttccagcttggcagtggctggcacatgtgtatcaatcccaaggaatgatgagagctgcagagatgtgttacagaaagagtctacaattggcatcccaacggggcagttggagtgggaagctctcaagtctgttgagactagcactacttgcattaaaagtctgtatggctaacatttccaatgatcactggccatctttggttcaagaggctacaactgaggccttgaagctttgcttttgtccactggctgttcttttacaagctttgttacaattcaaacgcaaaatgggggcaagagagacacggcgtcttttggaaagagtggtatatcagcctgggtatcccaaatctattgcatcaactgcacgttggtacctactgagacacttatatgccaaagatgactatgagcttattgacgtgctggtaaacaatgccaaaactcatggagatacaagagcattggaactgaatcagagattgtcctcacaataacattggattattttatagtaaggaagcaaagaaaaagctgtaagaatgaagcaatgaatcaagacttctacccaaagcaacatttttttaaactatatttattccttttctaaaggaatctagagaagttgaagtttttaagttaggaatgcaattttctgttaactccaaacctgattttaatctgaaaaaaaaaaaatttaatttgggaaaaccagaatgaaaggaaaaccattattgccttggttgcttaacattatttgtaaaccattattttctgcatcttgcatggtgcacaatagaatatcttttactgtaatcccttacaataaagccttaatagccattttctatgtaatatgcaaaagtagattagcacaatgcacaattttcttttgttaaaaatcaaattcaaagatttaattcttgctatgaattctaaagttcggcaaaccaattcatcataaaatccaaataatcttgtaacctatttatctagtgattcatctccaattctgttgaaaaagcataatataaatgttgatgagactagactctaatggatatgtttatataattccaaacactcaggtgtgtgaatgcatttaaaaacattaatggaaaataatgctgataatatttaattgatcatgcaattccttcaattatgatggaaagacttgaactttctgaaataaaacaaaaatacagca

SEQ ID NO: 2637 - protein, 1564 aa, Homosapiens; identical to SEQ ID NO: 333

SEQ ID NO: 2638 - DNA, 557 bp, Homosapiens
tcttggtgtggttgcatgttacagtggtgagaattgagtaacacttcaatatttttagaagattgtgtatttcaaacaaagttcagtttcatcaggttttgtatttttcaggtattggaaattatgcccttgctcagcactgtttcatcaaatcaatccagtcagaacaaattaatgctgttgcatggaccaacttgggagtgttatacctcacaaatgaaaacattgagcaagctcatgaggctttcaaaatggctcaatcccttgatccatcttatttaatgtgctggattggacaagctcttattgctgaggcagttggaagttatgacaccatggatctcttcaggcacactacagaactaaatatgcatgtaagaatctgaacattcttcttgaggattcattaatgagaaaagtgttatccttgttaagggaatgaatagatattgggctaggcatagtggcttatgcctgtaatcccagtgatttgggatgccaaggcaggaggattgcttgaggccagcctggacaatatagcaagaccctgtctctta

SEQ ID NO: 2639 - protein, 52 aa, Homosapiens
MPLLSTVSSNQSSQNKLMLLHGPTWECYTSQMKTLSKLMRLSKWLNPLIHLI

SEQ ID NO: 2640 - DNA, 681 bp, Homosapiens
atgagtcctgggaaaggcgcatgcgctctcattgcagcctcggcgtttgtagaagaggagcatctgctccagatggaaaatgggtaaggaacaatcaaattcaattcgggaagaatatagaggtggtaataattggtaaaagtctgcagggttttttttaaccaaaggaaactggtttgagaaaattgtgaaatcagcattgaaatttgttacctactccaatcaagatttgcaaactacaaaaaaatcattctgaagctttcacctataaatatataccaagataatttcagataagaatgtccagcaaggaagtgaagactgctctaaaaagtgctagagatgcaatcagaaacaaagaatacaaagaagctttgaaacactgtaagacagtgttaaagcaagagaaaaataactataatgcctgggtttttattggcgttgctgcagctgaactagaacaacctgatcaggcccagagtgcctataaaaaagctgctgaattagagccagaccaattactagcttggcaggggttagcaaacttgtatgagaaatataatcacataaatgctaaggatgacttgcctggtgtttaccaaaagctcctggatctttatgagagtgttgacaagcagaagtggtgtgatgtctgcaagaaacttgtggatctatattacc

SEQ ID NO: 2641 - protein, 126 aa, Homosapiens
MSSKEVKTALKSARDAIRNKEYKEALKHCKTVLKQEKNNYNAWVFIGVAAAELEQPDQAQSAYKKAAELEPDQLLAWQGLANLYEKYNHINAKDDLPGVYQKLLDLYESVDKQKWCDVCKKLVDLY

SEQ ID NO: 2642 - DNA, 781 bp, Homosapiens
cggcgttactatcaagcaaccaaactgcaagctttgggagttgttcgctgtccctgccctgctctgctagggagagaacgccagagggaggcggctggcccggcggcaggctctcagaaccgctaccggcgatgctactgctgtgggtgtcggtggtcgcagccttggcgctggcggtactggcccccggagcaggggagcagaggcggagagcagccaaagcgcccaatgtggtgctggtcgtgagcgactccttcgatggaaggttaacatttcatccaggaagtcaggtagtgaaacttccttttatcaactttatgaagacacgtgggacttcctttctgaatgcctacacaaactctccaatttgttgcccatcacgcgcagtaatcgtgtggaagcgtggacaagagatgttgctttcttactcagacaagaaggcaggcccatggttaatcttatccgtaacaggactaaagtcagagtgatggaaagggattggcagaatacagacaaagcagtaaactggttaagaaaggaagcaattaattacactgaaccatttgttatttacttgggattaaatttaccacacccttacccttcaccatcttctggagaaaattttggatcttcaacatttcacacatctctttattggcttgaaaaagtgtctcatgatgccatcaaaatcccaaagtggtcacctttgtcagaaatgcaccctgtagattattactcttcttatacaaaaaactgcactggaagatttacaaaaaaa

SEQ ID NO: 2643 - protein, 118 aa, Homosapiens
MLLLWVSVVAALALAVLAPGAGEQRRRAAKAPNVVLVVSDSFDGRLTFHPGSQVVKLPFINFMKTRGTSFLNAYTNSPICCPSRAVIVWKRGQEMLLSYSDKKAGPWLILSVTGLKSE

SEQ ID NO: 2644 - DNA, 1655 bp, Homosapiens
cggcgttactatcaagcaaccaaactgcaagctttgggagttgttcgctgtccctgccctgctctgctagggagagaacgccagagggaggcggctggcccggcggcaggctctcagaaccgctaccggcgatgctactgctgtgggtgtcggtggtcgcagccttggcgctggcggtactggcccccggagcaggggagcagaggcggagagcagccaaagcgcccaatgtggtgctggtcgtgagcgactccttcgatggaaggttaacatttcatccaggaagtcaggtagtgaaacttccttttatcaactttatgaagacacgtgggacttcctttctgaatgcctacacaaactctccaatttgttgcccatcacgcgcagcaatgtggagtggcctcttcactcacttaacagaatcttggaataattttaagggtctagatccaaattatacaacatggatggatgtcatggagaggcatggctaccgaacacagaaatttgggaaactggactatacttcaggacatcactccattaggcacagtgaacgtgggtcaactaatcaaagaagtgaaaaagtttgagaaagtaatcgtgtggaagcgtggacaagagatgttgctttcttactcagacaagaaggcaggcccatggttaatcttatccgtaacaggactaaagtcagagtgatggaaagggattggcagaatacagacaaagcagtaaactggttaagaaaggaagcaattaattacactgaaccatttgttatttacttgggattaaatttaccacacccttacccttcaccatcttctggagaaaattttggatcttcaacatttcacacatctctttattggcttgaaaaagtgtctcatgatgccatcaaaatcccaaagtggtcacctttgtcagaaatgcaccctgtagattattactcttcttatacaaaaaactgcactggaagatttacaaaaaaagaaattaagaatattagagcattttattatgctatgtgtgctgagacagatgccatgcttggtgaaattattttggcccttcatcaattagatcttcttcagaaaactattgtcatatactcctcagaccatggagagctggccatggaacatcgacagttttataaaatgagcatgtacgaggctagtgcacatgttccgcttttgatgatgggaccaggaattaaagccggcctacaagtatcaaatgtggtttctcttgtggatatttaccctaccatgcttgatattgctggaattcctctgcctcagaacctgagtggatactctttgttgccgttatcatcagaaacatttaagaatgaacataaagtcaaaaacctgcatccaccctggattctgagtgaattccatggatgtaatgtgaatgcctccacctacatgcttcgaactaaccactggaaatatatagcctattcggatggtgcatcaatattgcctcaactctttgatctttcctcggatccagatgaattaacaaatgttgctgtaaaatttccagaaattacttattctttggatcagaagcttcattccattataaactaccctaaagtttctgcttctgtccaccagtataataaagagcagtttatcaagtgg

SEQ ID NO: 2645 - protein, 331 aa, Homosapiens
MVNLIRNRTKVRVMERDWQNTDKAVNWLRKEAINYTEPFVIYLGLNLPHPYPSPSSGENFGSSTFHTSLYWLEKVSHDAIKIPKWSPLSEMHPVDYYSSYTKNCTGRFTKKEIKNIRAFYYAMCAETDAMLGEIILALHQLDLLQKTIVIYSSDHGELAMEHRQFYKMSMYEASAHVPLLMMGPGIKAGLQVSNVVSLVDIYPTMLDIAGIPLPQNLSGYSLLPLSSETFKNEHKVKNLHPPWILSEFHGCNVNASTYMLRTNHWKYIAYSDGASILPQLFDLSSDPDELTNVAVKFPEITYSLDQKLHSIINYPKVSASVHQYNKEQFIK

SEQ ID NO: 2646 - DNA, 2394 bp, Homosapiens
cggcgttactatcaagcaaccaaactgcaagctttgggagttgttcgctgtccctgccctgctctgctagggagagaacgccagagggaggcggctggcccggcggcaggctctcagaaccgctaccggcgatgctactgctgtgggtgtcggtggtcgcagccttggcgctggcggtactggcccccggagcaggggagcagaggcggagagcagccaaagcgcccaatgtggtgctggtcgtgagcgactccttcgatggaaggttaacatttcatccaggaagtcaggtagtgaaacttccttttatcaactttatgaagacacgtgggacttcctttctgaatgcctacacaaactctccaatttgttgcccatcacgcgcagcaatgtggagtggcctcttcactcacttaacagaatcttggaataattttaagggtctagatccaaattatacaacatggatggatgtcatggagaggcatggctaccgaacacagaaatttgggaaactggactatacttcaggacatcactccattagtaatcgtgtggaagcgtggacaagagatgttgctttcttactcagacaagaaggcaggcccatggttaatcttatccgtaacaggactaaagtcagagtgatggaaagggattggcagaatacagacaaagcagtaaactggttaagaaaggaagcaattaattacactgaaccatttgttatttacttgggattaaatttaccacacccttacccttcaccatcttctggagaaaattttggatcttcaacatttcacacatctctttattggcttgaaaaagtgtctcatgatgccatcaaaatcccaaagtggtcacctttgtcagaaatgcaccctgtagattattactcttcttatacaaaaaactgcactggaagatttacaaaaaaagaaattaagaatattagagcattttattatgctatgtgtgctgagacagatgccatgcttggtgaaattattttggcccttcatcaattagatcttcttcagaaaactattgtcatatactcctcagaccatggagagctggccatggaacatcgacagttttataaaatgagcatgtacgaggctagtgcacatgttccgcttttgatgatgggaccaggaattaaagccggcctacaagtatcaaatgtggtttctcttgtggatatttaccctaccatgcttgatattgctggaattcctctgcctcagaacctgagtggatactctttgttgccgttatcatcagaaacatttaagaatgaacataaagtcaaaaacctgcatccaccctggattctgagtgaattccatggatgtaatgtgaatgcctccacctacatgcttcgaactaaccactggaaatatatagcctattcggatggtgcatcaatattgcctcaactctttgatctttcctcggatccagatgaattaacaaatgttgctgtaaaatttccagaaattacttattctttggatcagaagcttcattccattataaactaccctaaagtttctgcttctgtccaccagtataataaagagcagtttatcaagtggaaacaaagtataggacagaattattcaaacgttatagcaaatcttaggtggcaccaagactggcagaaggaaccaaggaagtatgaaaatgcaattgatcagtggcttaaaacccatatgaatccaagagcagtttgaacaaaaagtttaaaaatagtgttctagagatacatataaatatattacaagatcataattatgtattttaaatgaaacagttttaataattaccaagttttggccgggcacagtggctcacacctgtaatcccaggactttgggaggctgaggaaagcagatcacaaggtcaagagattgagaccatcctggccaacatggtgaaaccctgtctctactaaaaatacaaaaattagctgggcgcggtggtgcacacctatagtctcagctactcagaggctgaggcaggaggatcgcttgaacccgggaggcagcagttgcagtgagctgagattgcgccactgtactccagcctggcaacagagtgagactgtgtcgcaaaaaaataaaaataaaataataataattaccaatttttcattattttgtaagaatgtagtgtattttaagataaaatgccaatgattataaaatcacatattttcaaaaatggttattatttaggcctttgtacaatttctaacaatttagtggaagtatcaaaagaattgaagcaaatactgtaacagttatgttcctttaaataatagagaatataaaatattgtaataatatgtatcataaaatagttgtatgtgagcatttgatggtg

SEQ ID NO: 2647 - protein, 536 aa, Homosapiens; identical to SEQ ID NO: 335

SEQ ID NO: 2648 - DNA, 3279 bp, Homosapiens
cggcgttactatcaagcaaccaaactgcaagctttgggagttgttcgctgtccctgccctgctctgctagggagagaacgccagagggaggcggctggcccggcggcaggctctcagaaccgctaccggcgatgctactgctgtgggtgtcggtggtcgcagccttggcgctggcggtactggcccccggagcaggggagcagaggcggagagcagccaaagcgcccaatgtggtgctggtcgtgagcgactccttcgatggaaggttaacatttcatccaggaagtcaggtagtgaaacttccttttatcaactttatgaagacacgtgggacttcctttctgaatgcctacacaaactctccaatttgttgcccatcacgcgcagcaatgtggagtggcctcttcactcacttaacagaatcttggaataattttaagggtctagatccaaattatacaacatggatggatgtcatggagaggcatggctaccgaacacagaaatttgggaaactggactatacttcaggacatcactccattagtaatcgtgtggaagcgtggacaagagatgttgctttcttactcagacaagaaggcaggcccatggttaatcttatccgtaacaggactaaagtcagagtgatggaaagggattggcagaatacagacaaagcagtaaactggttaagaaaggaagcaattaattacactgaaccatttgttatttacttgggattaaatttaccacacccttacccttcaccatcttctggagaaaattttggatcttcaacatttcacacatctctttattggcttgaaaaagtgtctcatgatgccatcaaaatcccaaagtggtcacctttgtcagaaatgcaccctgtagattattactcttcttatacaaaaaactgcactggaagatttacaaaaaaagaaattaagaatattagagcattttattatgctatgtgtgctgagacagatgccatgcttggtgaaattattttggcccttcatcaattagatcttcttcagaaaactattgtcatatactcctcagaccatggagagctggccatggaacatcgacagttttataaaatgagcatgtacgaggctagtgcacatgttccgcttttgatgatgggaccaggaattaaagccggcctacaagtatcaaatgtggtttctcttgtggatatttaccctaccatgcttgatattgctggaattcctctgcctcagaacctgagtggatactctttgttgccgttatcatcagaaacatttaagaatgaacataaagtcaaaaacctgcatccaccctggattctgagtgaattccatggatgtaatgtgaatgcctccacctacatgcttcgaactaaccactggaaatatatagcctattcggatggtgcatcaatattgcctcaactctttgatctttcctcggatccagatgaattaacaaatgttgctgtaaaatttccagaaattacttattctttggatcagaagcttcattccattataaactaccctaaagtttctgcttctgtccaccagtataataaagagcagtttatcaagtggaaacaaagtataggacagaattattcaaacgttatagcaaatcttaggtggcaccaagactggcagaaggaaccaaggaagtatgaaaatgcaattgatcagtggcttaaaacccatatgaatccaagagcagtttgaacaaaaagtttaaaaatagtgttctagagatacatataaatatattacaagatcataattatgtattttaaatgaaacagttttaataattaccaagttttggccgggcacagtggctcacacctgtaatcccaggactttgggaggctgaggaaagcagatcacaaggtcaagagattgagaccatcctggccaacatggtgaaaccctgtctctactaaaaatacaaaaattagctgggcgcggtggtgcacacctatagtctcagctactcagaggctgaggcaggaggatcgcttgaacccgggaggcagcagttgcagtgagctgagattgcgccactgtactccagcctggcaacagagtgagactgtgtcgcaaaaaaataaaaataaaataataataattaccaatttttcattattttgtaagaatgtagtgtattttaagataaaatgccaatgattataaaatcacatattttcaaaaatggttattatttaggcctttgtacaatttctaacaatttagtggaagtatcaaaagaattgaagcaaatactgtaacagttatgttcctttaaataatagagaatataaaatattgtaataatatgtatcataaaatagttgtatgtgagcatttgatggtgctcgatgagttacttgtatttgatgggattgtttggatgtatttaatgggagtatttggagtatttaacgggatgtaaaccctggatgtacctgattttgttactgttttattttaataggtaatatatatacagggtaaaagcttcaaatggtacaaaagggttaacagtgatcgtgaagtctctgtcctttccctcttccctgccatccagttccccctccaagaagcaagtaccgaaaccacctgcttacgcatttttagagattggccacaaatttataaacaaatgtatatattcctttccccctacacaaacggtaacatactgcacacattgttctgcatgttgcttctttttccttttttttttcacttaacagtagatatctagaggtgaaattactgagtcaagactatatttagcaaaattacactagatactacaaattacctctaaagaaggtatactaactgataatctcaccatcaatgcatgtcttcttatcctttgccaacctaacagataaaaatgttctatttttatttttctttttatgagtaacgtagagcatattttcatgtatttaacagccactggaatctgctttaccatggcctttcctatttctattctttgcctatttttctgttggttgttggtctttgttttgtattacaggtgtgctttagatattagctttttgtaagagatcctgcaaatatcttctttccagtttgtcattgtcatttgtcttttgactttgttctggtattttttgatatgtagaaatttttattttcatgtaagcaaatttatgaatctttgtacaccataagtatatacaattatgatttgtcaattaaaaatattagtacaaaattt

SEQ ID NO: 2649 - protein, 536 aa, Homosapiens; identical to SEQ ID NO: 335

SEQ ID NO: 2650 - DNA, 1093 bp, Homosapiens
ggcgttactatcaagcaaccaaactgcaagctttgggagttgttcgctgtccctgccctgctctgctagggagagaacgccagagggaggcggctggcccggcggcaggctctcagaaccgctaccggcgatgctactgctgtgggtgtcggtggtcgcagccttggcgctggcggtactggcccccggagcaggggagcagaggcggagagcagccaaagcgcccaatgtggtgctggtcgtgagcgactccttcattcctgatgattaaaattacatagtctggatgtgcccatgggattttttgaaaatattacttaaagttatctttgtgatttaaacttagagaatgggcagtactggaaattgactagatggcattttattacagagtgctcttgtaatcaaaggcaaatgaaggaagcaggattgtgcagaggagaagctgaattttgttgccatcttatgaatgacagttctcaaactagtatggtgcttcagagctgctttccaataggagtgaggagaacagacctttccacctgcatgttggatggccactggttgtgggctgctcctagaatggggcatggtgttgggcaaagcagctgtcttcagcagaggcaattgttcattcctaaaagggaatccgaatgtggatcacaacatcccagaaacttccaaagatgactgagatatataggtttgttattttttttagtgtagtatgaatgcatagatttttctatatttgtgcttaaattttttgcattcacggccgggcgcggtggctcacgcctgtaatcccagcactttgggaggccgaggtgggcggatcacgaggtcaagagatcaagaccatcctggctaacacagtgaaaccccgtctctactaaaaatacaaaaaaattagccgggcgtggtttcgggcgcctgtagtcccagctactcgggaggctgaagcaggagaatggcgtgaacctgggaggcggagcttgcagtgacctgatatcgcaccactgcactccagcctgggcgacggagcgagagtccgtctcgaaaaaaaaataaaaataaaaataaaaaaattttt

SEQ ID NO: 2651 - protein, 46 aa, Homosapiens
MLLLWVSVVAALALAVLAPGAGEQRRRAAKAPNVVLVVSDSFIPDD

SEQ ID NO: 2652 - DNA, 1625 bp, Homosapiens
cttcagtgtcactctctcacagactctcctgccccttgtgatctggacagaccctggcaggcctcgagttccctggaggttgcgccttagcgacagatgacccgtctctgaccaccaagcacctagaaggcactttcgcaggagcaaggcaggggtctggggcgcggagggggtgggcgcaagccgccctcgtccagcggttcccgccgagcatggtgataatgagggtggggccagcgttggcggtagagcgcctggtggccccggggcccctcctcgtcctccgcgcctccctgcggcgcgcagcacagagagcccagccgcttccgcagctgtcgccggagccggcagtcgcccgcctggaagaagaggtagacgaagggattgagagcgctgttggccatcgccaccacgcgcagcgccgccgacaggccctctccctcccagtctcccgcgggcccggacgaccacgcggccgccagccgggcggcaaagtagggcagctcgcagcccacgaacagcagcgccagcagcaggctcatcttcaggctctgcaccttggcgcggggcagcgcgctgggcgcaggggctcgacctgggctcgccgaccagggcgctgcagccgcgggggcctgcggccggtgccgccaccagacggagagtaggtggccgcaagcgacgcccaggaccgtaacaggcgcgacgaagcccgcgacggcctcgtagaacgcgtagacctgcaggtgccagcgcggcaggggcgcgaagatcccgtggcagcgacgctcccccggccaggcgcgggcggccgggggcgcgcctggctgcagggacgttggcggcggcggcggcggcagcggcgagggggagtccccgcgcaccacgaaggccgggggcagcgccagcagcagtgccagcagccagcccagggcggcgagggcacgcgcgggcagcggccggccgtgcggaagacgcaccgcgcgccggcgctcgagggcgatgagcaccacgaggtgggccgaggcgccccgcccggatgcctgcagcagctgcaggaagcggcacgccaggtcccccgtggccgcgcggggctcgcccagcagttcccaggccagctgtgacagcgccgtgcccccgcacgcgtacaggtccgccagggccagctgcaccagcaggaagtccatcttgcgacgcttggggcccgcccagggcccgccgccgccgcacaggcggcacagcactgtggtgttgcctgccaccgccaccaccaggatgacccccaggaacaccaggcggacgcggcggctgggcggcccagaggcaggggctccttgccccaaggtcaggttgagaccccagcccagcaagatgggcacggaaatgttgggcgccggcggcagaattgaggggctaaagagatcctccatccttgtcccggaggaagaggaggcaccgaagagggcgggcaggacgcgggaaaccaaagtggaggcgaggcggcgcggggagcgacgctgggtctatacgagttcccaaagttagttgaaaaggcacacgcacagagagggagatggattcgggcggctttgcgcttagttgtttttgtcgattgtcctcgtgatttg

SEQ ID NO: 2653 - protein, 180 aa, Homosapiens
MSTTRWAEAPRPDACSSCRKRHARSPVAARGSPSSSQASCDSAVPPHAYRSARASCTSRKSILRRLGPAQGPPPPHRRHSTVVLPATATTRMTPRNTRRTRRLGGPEAGAPCPKVRLRPQPSKMGTEMLGAGGRIEGLKRSSILVPEEEEAPKRAGRTRETKVEARRRGERRWVYTSSQS

SEQ ID NO: 2654 - DNA, 1546 bp, Homosapiens
gcagtagcgtcacgcggaggcggagcgaggactcggggacagttaccacctatttgcaattcaaggagaatataagacagagaagaaagctgtgaatgaatttcatttgattagcaatagattggacactctactgatcttgcctctctacaacctctcttccacctgacctctaaatgttgaagtgtttcaggaattgtcttagaccttcttccttatctacacttcctctccaacatgaatcttgatggctctgcacaagatcctgaaaagagggaatattcttctgtgtgtgtgggcagagaagatgacattaaaaaatctgaaagaatgacagctgttgtccatgatagagaagtggtcattttctaccacaagggagaatatcatgctatggatattcgctgttaccactcaggaggacctttacatttgggagatatagaggattttgatggacgaccgtgtatagtttgcccctggcataaatacaaaattactttggcaacaggagaaggtctgtaccagtctataaaccctaaagatccatcagcaaaacccaagtggtgctccaaaggaataaagcaaaggattcacacagtgacagtagacaacggaaatatttatgtgactctttctaatgaaccttttaagtgtgactctgatttttatgccactggagacttcaaagtaattaagagttcttcctgataaaaaatatatagaaatgaaaaatgttgtgtatgcttgaaaacatttttagaataactctgcttcagttttaaaggtgatgaaatttttcaacataggcacaactgtttaaaattcacatacatttgagaggtttaagagcacacatacttagtatgatgtaaggattatcatcaggatcaatagaatacattttatcgaatcttctggattaattagaaacctgaaggttataggtttgggatgttctgtttaagaaggataaaaataaatttggagtaaacaaataataggtaaaaattaaggattagtaagaaaaaattttttaatttaaaaaatttaatttttaaaataggaaaaaatccctgtttgatgtagcagacttaattctggaaaagttttagtatatacaaagtaaacagactatataatgaacttccatcactcagctttaacagttatcagcattcttccattcttgttttatttatacctctgtggatttgctacctctcctatttgattgttatttttacatttttaggaaagtttaaatacattgaaatgttcacctctgaactgtgcaaccttcctaaataacagactttttatacttaaaaaatgcctccaaaaatgagataggtttacctgctgaacttgaaaataagaaacttaaccactgttaagtgatctgtgatcaaggcagatcttgaagtaaggaagccagacacagctgctgcccagccatgagagatgtaaagtctcctattcagtgagccaatgttctttgaatgcctatatgaaattttcaaataaagatttttaaaaacgtttt

SEQ ID NO: 2655 - protein, 157 aa, Homosapiens; identical to SEQ ID NO: 339

SEQ ID NO: 2656 - DNA, 1642 bp, Homosapiens
agtagcgtcacgcggaggcggagcgaggactcggggacagttaccacctatttgcaattcaaggagaatataagacagagaagaaagctgtgaatgaatttcatttgattagcaatagattggacactctactgatcttgcctctctacaacctctcttccacctgacctctaaatgttgaagtgtttcaggaattgtcttagaccttcttccttatctacacttcctctccaatatggaattctcttccccaagctgttggcatgtctagttcatttgcattttgggcatttcagctcagctgtcatctcagtgaccagtttttatctgagcatgaatcttgatggctctgcacaagatcctgaaaagagggaatattcttctgtgtgtgtgggcagagaagatgacattaaaaaatctgaaagaatgacagctgttgtccatgatagagaagtggtcattttctaccacaagggagaatatcatgctatggatattcgctgttaccactcaggaggacctttacatttgggagatatagaggattttgatggacgaccgtgtatagtttgcccctggcataaatacaaaattactttggcaacaggagaaggtctgtaccagtctataaaccctaaagatccatcagcaaaacccaagtggtgctccaaaggaataaagcaaaggattcacacagtgacagtagacaacggaaatatttatgtgactctttctaatgaaccttttaagtgtgactctgatttttatgccactggagacttcaaagtaattaagagttcttcctgataaaaaatatatagaaatgaaaaatgttgtgtatgcttgaaaacatttttagaataactctgcttcagttttaaaggtgatgaaatttttcaacataggcacaactgtttaaaattcacatacatttgagaggtttaagagcacacatacttagtatgatgtaaggattatcatcaggatcaatagaatacattttatcgaatcttctggattaattagaaacctgaaggttataggtttgggatgttctgtttaagaaggataaaaataaatttggagtaaacaaataataggtaaaaattaaggattagtaagaaaaaattttttaatttaaaaaatttaatttttaaaataggaaaaaatccctgtttgatgtagcagacttaattctggaaaagttttagtatatacaaagtaaacagactatataatgaacttccatcactcagctttaacagttatcagcattcttccattcttgttttatttatacctctgtggatttgctacctctcctatttgattgttatttttacatttttaggaaagtttaaatacattgaaatgttcacctctgaactgtgcaaccttcctaaataacagactttttatacttaaaaaatgcctccaaaaatgagataggtttacctgctgaacttgaaaataagaaacttaaccactgttaagtgatctgtgatcaaggcagatcttgaagtaaggaagccagacacagctgctgcccagccatgagagatgtaaagtctcctattcagtgagccaatgttctttgaatgcctatatgaaattttcaaataaagatttttaaaaacgtttt

SEQ ID NO: 2657 - protein, 210 aa, Homosapiens
MLKCFRNCLRPSSLSTLPLQYGILFPKLLACLVHLHFGHFSSAVISVTSFYLSMNLDGSAQDPEKREYSSVCVGREDDIKKSERMTAVVHDREVVIFYHKGEYHAMDIRCYHSGGPLHLGDIEDFDGRPCIVCPWHKYKITLATGEGLYQSINPKDPSAKPKWCSKGIKQRIHTVTVDNGNIYVTLSNEPFKCDSDFYATGDFKVIKSSS

SEQ ID NO: 2658 - DNA, 1912 bp, Homosapiens
ggcgggaccagctgcttccggctgggctgcgggcgtggactcctcattccggctgtggccgcgccgctgcggggcctgaggccctcttgggttttggttcagcgttagttaacggttaacccgccaaggcgggcttccgcccaggcacaggagactcaccgagcttgttcaccttgaaacttgggccacacctgagacctgccacctaaggggggtacgcgggtcgtttttaacaagctttcatggcatttgtgccatgaaagctctaaagtatagaagctgctccagggcttccgcagccccggccgtcctggagatactcgcctcctggagtctgtgtcgagaatttgcagcacctggacagccacgtgcagtctcagaactgcaggcggtctttaccgaaatgttaaacacaacttgaagttaggcaggataactgccagagctggatggaccttagaggtgccagctaacgcgctgtgagcgttttctgcggttaggcctgctctaaacatttgacatgtgttaaagcatttatgtgctttacccacacccctatgtggcgggcccttcttaaagtaaaagaaactgcagcacagcgaagttaagcaacttgccccaaatcacgcagaactgggatgcaaacccaggtctagctcactcgtgatcacaattcaacatcatacgatggtgctgatttccagagcagctctgtgactttatataaaattattgggcaagcgttcaattgtaaacattcgtgaacatagctgttgcacattagcgttcctttttttttttaattcaggaccatctttggtgacaaatataaatatcaatactatatatatcaccaatatacatatttgctttgctaaaaggtttctgtgtcttcaggatagtttacttgcaagcctcatgtttttataaaaacgtgggtgctacctgaataaaactaatgcctacccgttggcggttttgtgaagactaatgaactattatattcaaagggtccaagcagtaggcatttactaaaggacagctagttttatctgttattattctgccattcagagagataccaaaactactctctaaggcatttctcttccctgcatgtaaaagcaagggtgtcatacttgagataagcattctgataatgtgtaggcaaagtttccacacttggtaaaagcatcttagtcatggttcaagacgagtgacaagttaccacctatttgcaattcaaggagaatataagacagagaagaaagctgtgaatgaatttcatttgattagcaatagattggacactctactgatcttgcctctctacaacctctcttccacctgacctctaaatgttgaagtgtttcaggaattgtcttagaccttcttccttatctacacttcctctccaacatgaatcttgatggctctgcacaagatcctgaaaagagggaatattcttctgtgtgtgtgggcagagaagatgacattaaaaaatctgaaagaatgacagctgttgtccatgatagagaagtggtcattttctaccacaagggagaatatcatgctatggatattcgctgttaccactcaggaggacctttacatttgggagatatagaggattttgatggacgaccgtgtatagtttgcccctggcataaatacaaaattactttggcaacaggagaaggtctgtaccagtctataaaccctaaagatccatcagcaaaacccaagtggtgctccaaaggaataaagcaaaggattcacacagtgacagtagacaacggaaatatttatgtgactctttctaatgaaccttttaagtgtgactctgatttttatgccactggagacttcaaagtaattaagagttcttcctgataaaaaatatatagaaatg

SEQ ID NO: 2659 - protein, 157 aa, Homosapiens; identical to SEQ ID NO: 339

SEQ ID NO: 2660 - DNA, 2728 bp, Homosapiens
ggcgggaccagctgcttccggctgggctgcgggcgtggactcctcattccggctgtggccgcgccgctgcggggcctgaggccctcttgggttttggttcagcgttagttaacggttaacccgccaaggcgggcttccgcccaggcacaggagactcaccgagcttgttcaccttgaaacttgggccacacctgagacctgccacctaaggggggtacgcgggtcgtttttaacaagctttcatggcatttgtgccatgaaagctctaaagtatagaagctgctccagggcttccgcagccccggccgtcctggagatactcgcctcctggagtctgtgtcgagaatttgcagcacctggacagccacgtgcagtctcagaactgcaggcggtctttaccgaaatgttaaacacaacttgaagttaggcaggataactgccagagctggatggaccttagaggtgccagctaacgcgctgtgagcgttttctgcggttaggcctgctctaaacatttgacatgtgttaaagcatttatgtgctttacccacacccctatgtggcgggcccttcttaaagtaaaagaaactgcagcacagcgaagttaagcaacttgccccaaatcacgcagaactgggatgcaaacccaggtctagctcactcgtgatcacaattcaacatcatacgatggtgctgatttccagagcagctctgtgactttatataaaattattgggcaagcgttcaattgtaaacattcgtgaacatagctgttgcacattagcgttcctttttttttttaattcaggaccatctttggtgacaaatataaatatcaatactatatatatcaccaatatacatatttgctttgctaaaaggtttctgtgtcttcaggatagtttacttgcaagcctcatgtttttataaaaacgtgggtgctacctgaataaaactaatgcctacccgttggcggttttgtgaagactaatgaactattatattcaaagggtccaagcagtaggcatttactaaaggacagctagttttatctgttattattctgccattcagagagataccaaaactactctctaaggcatttctcttccctgcatgtaaaagcaagggtgtcatacttgagataagcattctgataatgtgtaggcaaagtttccacacttggtaaaagcatcttagtcatggttcaagacgagtgacaagttaccacctatttgcaattcaaggagaatataagacagagaagaaagctgtgaatgaatttcatttgattagcaatagattggacactctactgatcttgcctctctacaacctctcttccacctgacctctaaatgttgaagtgtttcaggaattgtcttagaccttcttccttatctacacttcctctccaacatgaatcttgatggctctgcacaagatcctgaaaagagggaatattcttctgtgtgtgtgggcagagaagatgacattaaaaaatctgaaagaatgacagctgttgtccatgatagagaagtggtcattttctaccacaagggagaatatcatgctatggatattcgctgttaccactcaggaggacctttacatttgggagatatagaggattttgatggacgaccgtgtatagtttgcccctggcataaatacaaaattactttggcaacaggagaaggtctgtaccagtctataaaccctaaagatccatcagcaaaacccaagtggtgctccaaaggaataaagcaaaggattcacacagtgacagtagacaacggaaatatttatgtgactctttctaatgaaccttttaagtgtgactctgatttttatgccactggagacttcaaagtaattaagagttcttcctgataaaaaatatatagaaatgaaaaatgttgtgtatgcttgaaaacatttttagaataactctgcttcagttttaaaggtgatgaaatttttcaacataggcacaactgtttaaaattcacatacatttgagaggtttaagagcacacatacttagtatgatgtaaggattatcatcaggatcaatagaatacattttatcgaatcttctggattaattagaaacctgaaggttataggtttgggatgttctgtttaagaaggataaaaataaatttggagtaaacaaataataggtaaaaattaaggattagtaagaaaaaattttttaatttaaaaaatttaatttttaaaataggaaaaaatccctgtttgatgtagcagacttaattctggaaaagttttagtatatacaaagtaaacagactatataatgaacttccatcactcagctttaacagttatcagcattcttccattcttgttttatttatacctctgtggatttgctacctctcctatttgattgttatttttacatttttaggaaagtttaaatacattgaaatgttcacctctgaactgtgcaaccttcctaaataacagactttttatacttaaaaaatgcctccaaaaatgagataggtttacctgctgaacttgaaaataagaaacttaaccactgttaagtgatctgtgatcaaggcagatcttgaagtaaggaagccagacacagctgctgcccagccatgagagatgtaaagtctcctattcagtgagccaatgttctttgaatgcctatatgaaattttcaaataaagatttttaaaaacgtttt

SEQ ID NO: 2661 - protein, 157 aa, Homosapiens; identical to SEQ ID NO: 339

SEQ ID NO: 2662 - DNA, 593 bp, Homosapiens
atcttagtcatggttcaagacgagtgacaagttaccacctatttgcaattcaaggagaatataagacagagaagaaagctgtgaatgaatttcatttgattagcaatagattggacactctactgatcttgcctctctacaacctctcttccacctgacctctaaatgttgaagtgtttcaggaattgtcttagaccttcttccttatctacacttcctctccaagtgagtccatagaattctatgacctggaaactccccagtttttctctctagaaattctcgactttagtctcatatatctggttgttgacttgacatctctacttggatgtctctgagataccttaaactcaatatgtgtaaaatatatatagctcttgattttccattctgcaaaaataccattcatttcttggcctttctcctcacagtctttggcactacagttcacctagctgcacaaacctaaaacttgggagtcatctttatttatttttctgtagcatcttcattcaagttcatcaacccaacttctctgtactataaaattaaaataatacctttttagtaacatggaggattaaaggagt

SEQ ID NO: 2663 - protein, 46 aa, Homosapiens
MSLRYLKLNMCKIYIALDFPFCKNTIHFLAFLLTVFGTTVHLAAQT

SEQ ID NO: 2664 - DNA, 2169 bp, Homosapiens
agtaacaaagaattccagcagtgagctgtgagttctgtccttgctggctttcccaagtggaaggctaccctcatctttcactaatggcagactaggacaagcattacccaggcctgcaagcttgttaaggactaggaacccaagcaagaactcaccatgccaatcaaacctgttgggtggatatgtgggcaggtgttgaagaacttttctggaagaatcgaggggatccagaaagcaatcatggaccttgtagatgagtttaaagatgaatttcccaccatcctaagattatcacagtctaatcaggtcagaaagggttctttgtttgaaatcatctcctttccagcaaagactgctttaactagcataatatatgcttcatatgcagcactaatttatttggcagtctgtgttaatgctgtgctgaagaaggtaaagaacatcttccaggaagaagaatccataaggcaaaacagagaggagagtgaaaattgtagaaaagccttttctgagcctgtgctttcggagcctatgtttgctgaaggtgaaatcaaagcaaaaccttataggtcattgccggagaagccagacatttcagattaccccaagcttcttgctaataagcagagtaataacatccaagttttacattctgtgtttgaccaatcagctgaaatgaatgagcaaatctgaatacaggcattcaaagaacattggctcactgaataggagactttacatctctcatggctgggcagcagctgtgtctggcttccttacttcaagatctgccttgatcacagatcacttaacagtggttaagtttcttattttcaagttcagcaggggcaaactatacacggtcgtccatcaaaatcctggggaagagaataactcatttaatattctgacatgtcaaatgttcttgatagactctgaagagtctgctgcagaagaaccaggttaaaaaaacagtaggtctaaggggttggggtgacaagattctgcatgtctaagaagctcccatgtgacaccaaagttgctggtctatggacaacagtttgaggagcaaggtcttcaagctctcattatggactgaaactggagaaaattctatggaactattatcagctcacacatataaaaactggtcactgagatgacagctgagctgaaatgcccaaaatgcaaatgaactagacatgccaacagcttggggaagagaattccatactgaaagaagagcaaatacaaaagcctgaaggaaagaaaagtcttggtgaatgtgttccagaagactggaacataatatgcaagattggtaaacaggcaggagccaggttgtgcagtgctgtgtatggattttactctaagagcaaaggaaagccactgaagagtataaagcaggaaagtgtgaattgatttctttttgaaagaatgctcccggctctgtggagaatggattatagcaaaacaacaatggatgcccagaaatcagaaagctaggggtccatgaaaaaggtggtggcttgccgcagggggttgatgctgtaggggataaaaagtaataacaacagtagcagtagtagctacaattatattgtgttaactatgtgccaggcactattcaaaggctacatttatttattaactcctttaatcctccatgttactaaaaaggtattattttaattttatagtacagagaagttgggttgatgaacttgaatgaagatgctacagaaaaataaataaagatgactcccaagttttaggtttgtgcagctaggtgaactgtagtgccaaagactgtgaggagaaaggccaagaaatgaatggtatttttgcagaatggaaaatcaagagctatatatattttacacatattgagtttaaggtatctcagagacatccaagtagagatgtcaagtcaacaaccagatatatgagactaaagtcgagaatttctagagagaaaaactggggagtttccaggtcatagaattctatggactcacttggagaggaagtgtagataaggaagaaggtctaagacaattcctgaaacacttcaacatttagaggtcaggtggaagagaggttgtagagaggcaagatcagtagagtgtccaatctattgctaatcaaatgaaattcattcacagcttt

SEQ ID NO: 2665 - protein, 178 aa, Homosapiens
MPIKPVGWICGQVLKNFSGRIEGIQKAIMDLVDEFKDEFPTILRLSQSNQVRKGSLFEIISFPAKTALTSIIYASYAALIYLAVCVNAVLKKVKNIFQEEESIRQNREESENCRKAFSEPVLSEPMFAEGEIKAKPYRSLPEKPDISDYPKLLANKQSNNIQVLHSVFDQSAEMNEQI

SEQ ID NO: 2666 - DNA, 1610 bp, Homosapiens
ccagcagtgagctgtgagttctgtccttgctggctttcccaagtggaaggctaccctcatctttcactaatggcagactaggacaagcattacccaggcctgcaagcttgttaaggactaggaacccaagcaagaactcaccatgccaatcaaacctgttgggtggatatgtgggcaggtgttgaagaacttttctggaagaatcgaggggatccagaaagcaatcatggaccttgtagatgagtttaaagatgaatttcccaccatcctaagattatcacagtctaatcagaaaagagaacctgcgcagaaaacatccaaaatcaggatggctattgctttagctaagattaatcgagcaacattaattcgtggattaaacagcatatccagatcctccaaatcagtggccaaacttctgcatcctcagcttgcatgcagacttttagagctaagggacatatctggtcgtctgctgagggaagttaatgcgccgaggcaacccctatataacattcaggtcagaaagggttctttgtttgaaatcatctcctttccagcaaagactgctttaactagcataatatatgcttcatatgcagcactaatttatttggcagtctgtgttaatgctgtgctgaagaaggtaaagaacatcttccaggaagaagaatccataaggcaaaacagagaggagagtgaaaattgtagaaaagccttttctgagcctgtgctttcggagcctatgtttgctgaaggtgaaatcaaagcaaaaccttataggtcattgccggagaagccagacatttcagattaccccaagcttcttgctaataagcagagtaataacatccaagttttacattctgtgtttgaccaatcagctgaaatgaatgagcaaatctgaatacaggcattcaaagaacattggctcactgaataggagactttacatctctcatggctgggcagcagctgtgtctggcttccttacttcaagatctgccttgatcacagatcacttaacagtggttaagtttcttattttcaagttcagcaggggcaaactatacacggtcgtccatcaaaatcctggggaagagaataactcatttaatattctgacatgtcaaatgttcttgatagactctgaagagtctgctgcagaagaaccaggttaaaaaaacagtaggtctaaggggttggggtgacaagattctgcatgtctaagaagctcccatgtgacaccaaagttgctggtctatggacaacagtttgaggagcaaggtcttcaagctctcattatggactgaaactggagaaaattctatggaactattatcagctcacacatataaaaactggtcactgagatgacagctgagctgaaatgcccaaaatgcaaatgaactagacatgccaacagcttggggaagagaattccatactgaaagaagagcaaatacaaaagcctgaaggaaagaaaagtcttggtgaatgtgttccagaagactggaacataatatgcaagattggtaaacaggcaggagccaggttgtgcagtgctgtgtatggattttactctaagagcaaaggaaagccactgaaga

SEQ ID NO: 2667 - protein, 254 aa, Homosapiens; identical to SEQ ID NO: 341

SEQ ID NO: 2668 - DNA, 1345 bp, Homosapiens
ggaccagaaatagctaaaatgagtagatgatgaattcagagtgagaagaactgtcaagattggaacctagtctcaaagcacagtagtatttttaaaggaatagaattaagaatctaaatctaatacttaacattctaaggagccgacctggactctttctcttggttattataaaaatagtaaatgagtaaggtccgtatagtaaagactctgcttacttacctttactacatattattacacttccttttctgttggagtttggatagcatgagtagcacttggtcctcatttctcagacaaccaacgaaccagacttgggctttttatagatactgtttgtggtagcagctacttactaagtacagaaaatgtactatctctcaggaaggtacatcccagtctattctatcatgtgataatccttcaatgcccagtcaggtcttaacacatgtccagaatataaagtgtacagaagaaatcaaagtactttcttcaggcaaaaactagccctggtttgcaggaataattacagaaatattttctcataggagccactggcaataatgagtagtgtgcacttgatttttcattctaaatttgtatctctaaatctagaaataaaaatcatatcatgtactgtcttcatatacagaaatcttctcatcacattgactttgcttatacttacatgtgcaatgaaaggacatcaacatatcagtaagaatttagtaagctactatcagtggtttctgagcaaatatgtgatccactgtcccctccaaatatgccactcagtactttaaggagaggagtgtcaaaaataaaacagagaaaaataacttcagaaattcagaaccactaaggactgcattaattaaacttactctgtaagtttactaatgatgaagatgatgatgatgctgagtattcaaggcacgcggtgagaacggaaaattcatgaaatatgagaagacttaaaccagtttatttcaccgaagaaatgcctcaaggaagtcacctgcctcactggtattctcagccatataatagagagttttggtagagctatttaaggtgctccagctacaaatgcattttttcatcatttgtcatccacaaaacagtgaccagacagaacacatccagaagatatttgaaagacaccttcagagccctctccccagaagtagagtggtgaaaaatgacagacggtgatggagtaagaaaatctcaccctgcagcacttacattatgaccttataatattttggtttgtgtttaattatcttcttatgccaataatcttatgcatcttatgttatttcagataataaacttagac

SEQ ID NO: 2669 - protein, 79 aa, Homosapiens
MSSVHLIFHSKFVSLNLEIKIISCTVFIYRNLLITLTLLILTCAMKGHQHISKNLVSYYQWFLSKYVIHCPLQICHSVL

SEQ ID NO: 2670 - DNA, 692 bp, Homosapiens
gtcagaaagggttctttgtttgaaatcatctcctttccagcaaagactgctttaactagcataatatatgcttcatatgcagcactaatttatttggcagtctgtgttaatgctgtgctgaagaaggtaaagaacatcttccaggaagaagaatccataaggcaaaacagagaggagagtgaaaattgtagaaaagccttttctgagcctgtgctttcggagcctatgtttgctgaaggtgaaatcaaagcaaaaccttataggtcattgccggagaagccagacatttcagattaccccaagcttcttgctaataagcagagtaataacatccaagttttacattctgtgtttgaccaatcagctgaaatgaatgagcaaatctgaatacaggtatcactgaacagaacttaagagttatctatttaatggcacatttcatctgacaaaactcagagtctagtttacatattctgaattgctctgctttcttaaaaaaaagagaagggggctactattaaaatgtcattttctagtatttacatgatagagtaaataaaatgaatattgatgtggaatatatgtactgactacatacttttaatgaacaagaaaatccatcctctggtaggttagactttacactgtggtttataatataagcatatttataatacattaatgtttttatt

SEQ ID NO: 2671 - protein, 53 aa, Homosapiens [sequence omitted]

SEQ ID NO: 2672 - DNA, 1099 bp, Homosapiens
ccagcagtgagctgtgagttctgtccttgctggctttcccaagtggaaggctaccctcatctttcactaatggcagactaggacaagcattacccaggcctgcaagcttgttaaggactaggaacccaagcaagaactcaccatgccaatcaaacctgttgggtggatatgtgggcaggtgttgaagaacttttctggaagaatcgaggggatccagaaagcaatcatggaccttgtagatgagtttaaagatgaatttcccaccatcctaagattatcacagtctaatcagaaaagagaacctgcgcagaaaacatccaaaatcaggatggctattgctttagctaagattaatcgagcaacattaattcgtggattaaacagcatatccagatcctccaaatcagtggccaaacttctgcatcctcagcttgcatgcagacttttagagctaagggacatatctggtcgtctgctgagggaagttaatgcgccgaggcaacccctatataacattcaggtcagaaagggttctttgtttgaaatcatctcctttccagcaaagactgctttaactagcataatatatgcttcatatgcagcactaatttatttggcagtctgtgttaatgctgtgctgaagaaggtaaagaacatcttccaggaagaagaatccataaggcaaaacagagaggagagtgaaaattgtagaaaagccttttctgagcctgtgctttcggagcctatgtttgctgaaggtgaaatcaaagcaaaaccttataggtcattgccggagaagccagacatttcagattaccccaagcttcttgctaataagcagagtaataacatccaagttttacattctgtgtttgaccaatcagctgaaatgaatgagcaaatctgaatacaggtatcactgaacagaacttaagagttatctatttaatggcacatttcatctgacaaaactcagagtctagtttacatattctgaattgctctgctttcttaaaaaaaagagaagggggctactattaaaatgtcattttctagtatttacatgatagagtaaataaaatgaatattgatgtggaat

SEQ ID NO: 2673 - protein, 254 aa, Homosapiens; identical to SEQ ID NO: 341

SEQ ID NO: 2674 - DNA, 702 bp, Homosapiens
gcttggaagtctacagtggaagagtgagggaactttggtcagctgcttttcctctcctcagctctcctccctcatcggtttctgcttttggcctcttcaaagctgcaagagggaaggagaaaaggtcagaaagggttctttgtttgaaatcatctcctttccagcaaagactgctttaactagcataatatatgcttcatatgcagcactaatttatttggcagtctgtgttaatgctgtgctgaagaaggtaaagaacatcttccaggaagaagaatccataaggcaaaacagagaggagagtgaaaattgtagaaaagccttttctgagcctgtgctttcggagcctatgtttgctgaaggtgaaatcaaagcaaaaccttataggtcattgccggagaagccagacatttcagattaccccaagcttcttgctaataagcagagtaataacatccaagttttacattctgtgtttgaccaatcagctgaaatgaatgagcaaatctgaatacaggtatcactgaacagaacttaagagttatctatttaatggcacatttcatctgacaaaactcagagtctagtttacatattctgaattgctctgctttcttaaaaaaaagagaagggggctactattaaaatgtcattttctagtatttacatgatagagtaaataaaatgaatattgatgtggaa

SEQ ID NO: 2675 - protein, 53 aa, Homosapiens [sequence omitted]

SEQ ID NO: 2676 - DNA, 1044 bp, Homosapiens
agtaacaaagaattccagcagtgagctgtgagttctgtccttgctggctttcccaagtggaaggctaccctcatctttcactaatggcagactaggacaagcattacccaggcctgcaagcttgttaaggactaggaacccaagcaagaactcaccatgccaatcaaacctgttgggtggatatgtgggcaggtgttgaagaacttttctggaagaatcgaggggatccagaaagcaatcatggaccttgtagatgagtttaaagatgaatttcccaccatcctaagattatcacagtctaatcagaaaagagaacctgcgcagaaaacatccaaaatcaggatggctattgctttagctaagattaatcgagcaacattaattcgtggattaaacagcatatccagatcctccaaatcagtggccaaacttctgcatcctcagcttgcatgcagacttttagagctaagggacatatctggtcgtctgctgagggaagttaatgcgccgaggcaacccctatataacattcaggagaagaaaatggggctccaattgagttaaaccaaaaaagaagatgtattagctcccataaacaacccagagctgttgagattcccgacatggctggatacaggtcagaaagggttctttgtttgaaatcatctcctttccagcaaagactgctttaactagcataatatatgcttcatatgcagcactaatttatttggcagtctgtgttaatgctgtgctgaagaaggtaaagaacatcttccaggaagaagaatccataaggcaaaacagagaggagagtgaaaattgtagaaaagccttttctgagcctgtgctttcggagcctatgtttgctgaaggtgaaatcaaagcaaaaccttataggtcattgccggagaagccagacatttcagattaccccaagcttcttgctaataagcagagtaataacatccaagttttacattctgtgtttgaccaatcagctgaaatgaatgagcaaatctgaatacaggtatcactgaacag

SEQ ID NO: 2677 - protein, 135 aa, Homosapiens
MPIKPVGWICGQVLKNFSGRIEGIQKAIMDLVDEFKDEFPTILRLSQSNQKREPAQKTSKIRMAIALAKINRATLIRGLNSISRSSKSVAKLLHPQLACRLLELRDISGRLLREVNAPRQPLYNIQEKKMGLQLS

SEQ ID NO: 2678 - DNA, 523 bp, Homosapiens
tcccaccatcctaagattatcacagtctaatcagaaaagagaacctgcgcagaaaacatccaaaatcaggatggctattgctttagctaagattaatcgagcaacattaattcgtggattaaacagcatatccagatcctccaaatcagtggccaaacttctgcatcctcagcttgcatgcagacttttagagctaagggacatatctggtcgtctgctgagggaagttaatgcgccgaggcaacccctatataacattcaggtcagaaagggttctttgtttgaaatcatctcctttccagcaaagactgctttaactagcataatatatgcttcatatgcagcactaatttatttggaagaaattcttagccaggcatggtggtgtgtgcctataatccctgctactcaggaggctgacgggggaggctgaagcaggaggataccttgagcccaggagtttgagaccagcttgggcaaaatagtgagatccagtcttaaaataaataaaagcatatcataa

SEQ ID NO: 2679 - protein, 120 aa, Homosapiens
MAIALAKINRATLIRGLNSISRSSKSVAKLLHPQLACRLLELRDISGRLLREVNAPRQPLYNIQVRKGSLFEIISFPAKTALTSIIYASYAALIYLEEILSQAWWCVPIIPATQEADGGG

SEQ ID NO: 2680 - DNA, 688 bp, Homosapiens
ggggccttctatcttcctaagagtgttctctgacagggctgttccctgcccagtgaaacaaaggaccaaagattttctcaaaaatgtttaaaaatttgacccatgtaacgcggacactccacactcacggaagtgggcagaagggggagggggaaaaaaaaggaaagaaaagcttcttcagcctcagcgcggagcagctgctcttccttacccagacgggacagtcgtggaccaccagcttgacattcccaaacgcactggcctgatactcggtgaacaccggacgcgcgaccgtgctggccgcgttcagcaacaagctgctctcgtccccggagaccagagggcttctccccaggttcagccatttaggaaagattggtgacctatctgcatgatggcattaactacaaggatcatcgaagagccacagtcacaaagccagtctctgaatatggttcaaagaaatcttataactctctgaacaggacgtgtattcgtcaacactacttggagggccggtacttccaaggaagtcacctttgcagtcgatctatgtgcactgttctcagagccagctcgcacccatgaagaacaacacaacttaccggtcataggagcagaaagtgtcaaccttgcagcaggatttggacactctgggagccaaactggatgtggaagctccaaaggt

SEQ ID NO: 2681 - protein, 60 aa, Homosapiens [sequence omitted]

SEQ ID NO: 2682 - DNA, 1826 bp, Homosapiens
gcattgactaaacctaactagaagccagaggccaaaggaatctgtcgatatacaagctagcttcccagtggatggagcaggatggagaagaggaagaacgggcctggagggacaaacaaagggttaaaagaaaaggtccatccacatcgtggcgctggggaacgagggggacacattccaccaggacaaccggccgtcggggcttatccgcacttacctggggagaagccctctggtctccggggacgagagcagcttgttgctgaacgcggccagcacggtcgcgcgtccggtgttcaccgagtatcaggccagtgcgtttgggaatgtcaagctggtggtccacgactgtcccgtctgggacatatttgacagtgattggtacacttctcgaaatctaattgggggcgctgacatcattgtgatcaaatacaacgttaatgacaagttttcattccatgaagtaaaggataattatattccagtgataaaaagagcattaaattcagttccagtaattattgctgctgttggtaccagacaaaatgaagagttaccttgtacatgcccactatgtacctcagacagagggagctgtgttagtacaactgaagggatccaacttgcaaaagaactaggagcgacctatcttgaactccacagccttgatgacttctacataggaaagtattttggaggagtgttggagtattttatgattcaagccttaaatcagaagacaagtgaaaaaatgaagaaaagaaaaatgagcaactcctttcatggaattagaccacctcaacttgaacaaccagaaaaaatgcctgtcttaaaggctgaagcgtcacattataactctgacttaaataacttgctgttctgctgccagtgtgtggacgtggtattttacaaccccaatttaaagaaagttgtagaggcccacaagatcgttctctgcgctgtaagccatgttttcatgctgcttttcaatgtgaagagtcccactgacattcaggattccagtatcatccgaactacccaggatctttttgctataaacagagatactgcatttccaggtgctagccatgaatcttcaggcaacccaccattacgagtcattgttaaagacgccctcttctgttcttgtttatcagacatccttcgcttcatttattcaggtatcttgtcaagtggttctggttacttacaatctcataagctttggaaatgaaatgtgcctgtgacactcaagggtactggttagttttacagtggtctttacctaccatctgagattaagattatacatgaaatattatttgctttatatataagaattggtccaagctttctgttttccttacaaatgtacttgcctcatcttttccctatcaatttcattttattgtggtaaaatacatagaacataaattttaccatcttaaccatttttaagaacacagttcagtggaattaaacacattcataatgttgtgtaactatcaccaccatccgtgtccataattctttgcatcttataaaactgaaactctatacccattaaacgatgattccccattccgacctctttccagcccctgacagccaccattctactttctgtctctgtgattttaactctcctaagtgcctcatgtaagtggaatcatacagtatttgtcattttgtgattgatgtattttacttagcataatgtcttaaaggttcatccaagttgtggcatgtatcaggattttcttccttttaaggttgataatattctgtagtacatatagaccacattttgtttacccattcattca

SEQ ID NO: 2683 - protein, 172 aa, Homosapiens
MIQALNQKTSEKMKKRKMSNSFHGIRPPQLEQPEKMPVLKAEASHYNSDLNNLLFCCQCVDVVFYNPNLKKVVEAHKIVLCAVSHVFMLLFNVKSPTDIQDSSIIRTTQDLFAINRDTAFPGASHESSGNPPLRVIVKDALFCSCLSDILRFIYSGILSSGSGYLQSHKLWK

SEQ ID NO: 2684 - DNA, 1540 bp, Homosapiens
cctggctctggttacggccttgcgagttgaacaaacttgctgcaggcggattggcggctgggagctctcgggctggggcgttgtatttattaatttatattccgcggcgccccgcgcgggcggctcctttgtgtccagccgccgccaccggagctcccggggcctccgcggggagcgcgtcccccgcatccgcccgacccccggggctggcacgtgctgcgcccggtccgctgagggggcggaggccccgatctccccgaccccccttctctgcttagaggaggaggagcagcggcagcggcagcaggaggcgacagctgccagccgaggaggcgcggcggagaggggactgcggtcagctgcgtccacttggggctgtgcggcggtcccgcgcccggcgatgttcccgggcactccctgagtagcggcagcttatcccccgcccgctagcccgccctggtccccggctcgctcgctggctggcgcggccccggccccgctctgcgtcggccccgccgcggtggaggcgcgcgagggggacgcggccggggatgagcggattgcgggtgaactcgccgcccgggggccccgcgaagccgtgagccgctgcttttctccgagtcgccgccctgcccttggatttgagatcatgtccatccacatcgtggcgctggggaacgagggggacacattccaccaggacaaccggccgtcggggcttatccgcacttacctggggagaagccctctggtctccggggacgagagcagcttgttgctgaacgcggccagcacggtcgcgcgtccggtgttcaccgagtatcaggccagtgcgtttgggaatgtcaagctggtggtccacgactgtcccgtctgggtaaggaagagcagctgctccgcgctgaggctgaagaagcttttctttccttttttttccccctcccccttctgcccacttccgtgagtgtggagtgtccgcgttacatgggtcaaatttttaaacatttttgagaaaatctttggtcctttgtttcactgggcagggaacagccctgtcagagaacactcttaggaagatagaaggccccagtgggaatgtggagcacttactggtacacttcacgactgtgggttgacccttggtaggcagcagacagttgaatgtgccaactccaagggacggggtcactaagtttcatcagcaaaaagcagtgtttttttatgtctaccctatgggtgatagtgtaatattggtgttctaaaaatacatccctctcaaagctcaacacaggcaaaaatacttttcactgggacagttcagaaatagttcctctggaaagcggaggaaaagacagggactgggagttaattttaaatgactcatttatagcactattaattgatctctgaaaacttaattttaataatgcaaatactctttatgtgttagccatttgtcttagtgactcataaatcagaaataacattactaatgttgtttggaaaacttttaaaaaattaaaatttgtaataattgaac

SEQ ID NO: 2685 - protein, 104 aa, Homosapiens
MSIHIVALGNEGDTFHQDNRPSGLIRTYLGRSPLVSGDESSLLLNAASTVARPVFTEYQASAFGNVKLVVHDCPVWVRKSSCSALRLKKLFFPFFSPSPFCPLP

SEQ ID NO: 2686 - DNA, 5678 bp, Homosapiens
cctggctctggttacggccttgcgagttgaacaaacttgctgcaggcggattggcggctgggagctctcgggctggggcgttgtatttattaatttatattccgcggcgccccgcgcgggcggctcctttgtgtccagccgccgccaccggagctcccggggcctccgcggggagcgcgtcccccgcatccgcccgacccccggggctggcacgtgctgcgcccggtccgctgagggggcggaggccccgatctccccgaccccccttctctgcttagaggaggaggagcagcggcagcggcagcaggaggcgacagctgccagccgaggaggcgcggcggagaggggactgcggtcagctgcgtccacttggggctgtgcggcggtcccgcgcccggcgatgttcccgggcactccctgagtagcggcagcttatcccccgcccgctagcccgccctggtccccggctcgctcgctggctggcgcggccccggccccgctctgcgtcggccccgccgcggtggaggcgcgcgagggggacgcggccggggatgagcggattgcgggtgaactcgccgcccgggggccccgcgaagccgtgagccgctgcttttctccgagtcgccgccctgcccttggatttgagatcatgtccatccacatcgtggcgctggggaacgagggggacacattccaccaggacaaccggccgtcggggcttatccgcacttacctggggagaagccctctggtctccggggacgagagcagcttgttgctgaacgcggccagcacggtcgcgcgtccggtgttcaccgagtatcaggccagtgcgtttgggaatgtcaagctggtggtccacgactgtcccgtctgggacatatttgacagtgattggtacacttctcgaaatctaattgggggcgctgacatcattgtgatcaaatacaacgttaatgacaagttttcattccatgaagtaaaggataattatattccagtgataaaaagagcattaaattcagttccagtaattattgctgctgttggtaccagacaaaatgaagagttaccttgtacatgcccactatgtacctcagacagagggagctgtgttagtacaactgaagggatccaacttgcaaaagaactaggagcgacctatcttgaactccacagccttgatgacttctacataggaaagtattttggaggagtgttggagtattttatgattcaagccttaaatcagaagacaagtgaaaaaatgaagaaaagaaaaatgagcaactcctttcatggaattagaccacctcaacttgaacaaccagaaaaaatgcctgtcttaaaggctgaagcgtcacattataactctgacttaaataacttgctgttctgctgccagtgtgtggacgtggtattttacaaccccaatttaaagaaagttgtagaggcccacaagatcgttctctgcgctgtaagccatgttttcatgctgcttttcaatgtgaagagtcccactgacattcaggattccagtatcatccgaactacccaggatctttttgctataaacagagatactgcatttccaggtgctagccatgaatcttcaggcaacccaccattacgagtcattgttaaagacgccctcttctgttcttgtttatcagacatccttcgcttcatttattcaggtgcttttcagtgggaagaattggaagaagatatcaggaagaagttgaaagattctggggatgtttcaaatgtaatcgagaaagttaaatgcattttaaaaacaccaggaaagattaattgcctaaggaattgcaaaacctatcaagccagaaaacctttgtggttttataacacttccctcaagtttttccttaataagccgatgcttgccgatgttgtcttcgaaattcaaggtacgacagtgccagcccacagggccatcctggtggcccgttgtgaagtgatggcagccatgtttaatggtaattacatggaagcaaagagtgtcctgattcccgtttatggtgtttccaaagagactttcttgtcatttttagaatacctgtacacagactcctgctgcccagctggcatattccaggccatgtgtctcctgatctgtgccgagatgtaccaagtgtccagactgcagcacatctgtgagctgttcatcattacccagctgcagagcatgccaagcagggaactggcatccatgaaccttgatatagttgacctgcttaaaaaggccaagtttcaccactctgattgcctttcaacctggctacttcatttcattgctactaactacctcatcttcagtcaaaagcctgaatttcaggatctttcagtggaagaacgcagttttgttgaaaagcacagatggccgtcgaatatgtacttgaagcagcttgcggaatacaggaagtatattcactcccggaaatgtcgttgcttagtaatgtaacctggagcttttatacactacatttcttttttattattatgaagaatgggatacctccaggttccagtaaaattcttctgaccgaaaccaatgtgggtgttagaaaaattaccatatagcttaatatgtttattagttctctttggaaaaaaactaccactgtggtcttaaaagggaacaaaatataccataggctaaaactaaggctttcactctagaatgcaaagctgttttgcagctgttttcccttaaagatgtcctgttgctttagtgatatttagacccctctcagttaagaaatgcttagattaaaaaaaaaaaattacgtaggattaatacagaaatttaatcatgtctgattaattgctctattaaaataaggggcatttaaagacccagcataaccatttgtataatgagaaatctaggggaaaaccaatcagtccaacatgagattttaggaatagaaatttgccggccatttggaaagtgaaatgccacttagttctcaattgatgacagtgtttgaatcatcataaaaaaaatacctgcttttcatctggacaacccaattgagccactttatctccttttggcaatctgagtaggcggggaacctaggcagggctggctttcttagcgtgtaacttgtgtagcagcacagggcccacacttagaaggaccccacacttggttcaaggctctgctatagcggaaattcttaataatgtttgaagaagggccccatgatttcattttgtgctgagccctcaaaattatgtctgtttcgtggtgggaaatatcctatgttttcttgctcaaacacctttctctctgaaagcagaaaaaggcactgatataaagggaagagaaggaggctcaccggagggaagagaacatagtgaagattcccgcctttggggaggtctggaccacccagggcctccactgccaccttggctggcaagggagaaatgtgttgtgttgtcttagctttaaaacagtcacagttcttgctctatcatagatgaacaaatactttcttgatcattctgtaagaccaggaggttggtaagagtgactaaccagcctaactttaatacacatgtataaagatgttcacagagaaagatgctctgtagagaatttgctaccgaagttggctcaagaatttgtttttagtgttatttaccaagattaggacgtcagtggcttaaattctttgaattcttttcaaggactgcaagattatttgataaagagtagcatgaatcttgtgctctaatattacacagtaagttcaaagaaaggatgtaagtcaaagacttgttacatagagggaaaatggactgggatagaggacagactgatagtttctttctttcatatcacatgtatagagaaataattatatcagaaactcacaaacctagacatggaaaaacagattactgtctattgtcagcatcattttcatctgtaagtcactactggaatatatttttcttttaatttccagtgactttagaatacacacagtttttccgacttttcaaaaatttgattaaatggttttatagtataatattgggaccccataccgttagcccttgtatgtataccaacactgccaaagtaaaacattaggtcaggcatggtggctcaggcctgtaatcccagcattttgggaggctgaggcaagtggataacttgaggtcatgagttcgaaaccagcctggccaaaacagtgaaaccccgtctctactaaaaatacaaaattagccagatgtggtggcgcacacctgtaatcccagctactcaggaagctgaggcaggaaaatcgcttgaacctgggaggtggaagttgcagtgagccgagatcgcaccactgcactccagcctgggtgacaagagcgaaactccatctcaaaaaaaaaaaaaaaaccaaagtgaaacactaaaaattccctatagatatattccaggaaatattttaattgggctgattttaattaggctgtatcattgatgattactggaatcgattttatgtcttttgtattttaatcacttgagttaatcaaccactggcaaatcccatttgacaaagattagcattgtaaaaaacagatactgtggtagatttctagaaattcattcacatttaagacttctaaaatggaataatagccttttgtttttcatgagcatattcgcacccctatatgaattacagcatttaaagttcaaaatcagtaacttttaatctaggaaattgaaaaatattaagttgcaaagcaaaaaaaggtattttcttgaaaatactatttaatgtttaactagactataggtagttccttaaggttgtttgacctgaagtggagttgggtttggaagctggtgcccagttggtgtggagtgtgtagttttgttatgaaagttctctaccacctacctgtgtgagtgacaccaacatccagatgtcacagctctccagagctagtcagaagagaaatcaaattagtgtttaaacccatttgcatattgacttgtcagtacctttaactcaatttaatataacaagaaatcgtaaaatacttataacctatcttagagaaatgagtgctggttttgagagttgttttttaactgaaagattatttctagatgggtagtgctttgtgctggtttctgcttccatatatttcccagtcattttaattagagaagatactctatggtagaactaaggcctttcctttcttggccaaagtctttaccctatttaaccctttgtatatttctgactgctcactgttcatattataggggaccagatttgtaatatagaattctccataacatgaatgaaattaattctgtccaagccagcatggtggcttcatattaagtagtaacagaagtctgaacaattggataaatttgacttccaagacagctaaacttttcaactgcaattttaaaaactacactacactgttatagttaatctgacaaaaatgtcctcaaagagtactttattttatttaaagcatctgtttaattcaacctttaataattttgcaaagaagggtatgtgtgtattttaatatagcctgacctgaatttatatgtttttagctttagtatttaactttttgtaacaaataaaccttttttaaaacaagtttaa

SEQ ID NO: 2687 - protein, 611 aa, Homosapiens
MSIHIVALGNEGDTFHQDNRPSGLIRTYLGRSPLVSGDESSLLLNAASTVARPVFTEYQASAFGNVKLVVHDCPVWDIFDSDWYTSRNLIGGADIIVIKYNVNDKFSFHEVKDNYIPVIKRALNSVPVIIAAVGTRQNEELPCTCPLCTSDRGSCVSTTEGIQLAKELGATYLELHSLDDFYIGKYFGGVLEYFMIQALNQKTSEKMKKRKMSNSFHGIRPPQLEQPEKMPVLKAEASHYNSDLNNLLFCCQCVDVVFYNPNLKKVVEAHKIVLCAVSHVFMLLFNVKSPTDIQDSSIIRTTQDLFAINRDTAFPGASHESSGNPPLRVIVKDALFCSCLSDILRFIYSGAFQWEELEEDIRKKLKDSGDVSNVIEKVKCILKTPGKINCLRNCKTYQARKPLWFYNTSLKFFLNKPMLADVVFEIQGTTVPAHRAILVARCEVMAAMFNGNYMEAKSVLIPVYGVSKETFLSFLEYLYTDSCCPAGIFQAMCLLICAEMYQVSRLQHICELFIITQLQSMPSRELASMNLDIVDLLKKAKFHHSDCLSTWLLHFIATNYLIFSQKPEFQDLSVEERSFVEKHRWPSNMYLKQLAEYRKYIHSRKCRCLVM

SEQ ID NO: 2688 - DNA, 754 bp, Homosapiens
ctctcgtccccggagaccagagggcttctccccaggaagtgcgggggacagcgcgcggcgaggatgggcaccagcccctgtccctggggcgcacggcacgcgctggagagagacaatggcaggacggcggcgcgtacgtacatgatctcaaatccaagggcagggcggcgactcggagaaaagcagcggctcacggcttcgcggggcccccgggcggcgagttcacccgcaatccgctcatccccggccgcgtccccctcgcgcgcctccaccgcggcggggccgacgcagagcggggccggggccgcgccagccagcgagcgagccggggaccagggcgggctagcgggcgggggataagctgccgctactcagggagtgcccgggaacatcgccgggcgcgggaccgccgcacagccccaagtggacgcagctgaccgcagtcccctctccgccgcgcctcctcggctggcagctgtcgcctcctgctgccgctgccgctgctcctcctcctctaagcagagaaggggggtcggggagatcggggcctccgccccctcagcggaccgggcgcagcacgtgccagccccgggggtcgggcggatgcgggggacgcgctccccgcggaggccccgggagctccggtggcggcggctggacacaaaggagccgcccgcgcggggcgccgcggaatataaattaataaatacaacgccccagcccgagagctcccagccgccaatccgcctgcagc

SEQ ID NO: 2689 - protein, 98 aa, Homosapiens
MGTSPCPWGARHALERDNGRTAARTYMISNPRAGRRLGEKQRLTASRGPRAASSPAIRSSPAASPSRASTAAGPTQSGAGAAPASERAGDQGGLAGGG

SEQ ID NO: 2690 - DNA, 415 bp, Homosapiens
tatcactatgttgctcaagctagactcaaactcctggactcaagggatcctcccgcctcagccttccaagtcactgggattataagtgcatgccatcccacgcagctactctcttgaatactcgagaaagccaagcactacaattgtgtggctgcttcccaggtattttaggaaatgcaccattcttcgccaaattaagatttttttaaaagccactagtatataatctgcttgaaaggaagattaaatttctcttatccacctttctactcactgctcatcactataaatgaatgcaacaaaagtttctcacagtcatcgataatatcaatattgtgagtatatcttctttaacattgtaatattaatgtttctttatattattgggtgaataaaagccatttatatttgatgg

SEQ ID NO: 2691 - protein, 39 aa, Homosapiens [sequence omitted]

SEQ ID NO: 2692 - DNA, 2106 bp, Homosapiens
ctcaataccccaagcaatacctgcaactgaggattcttcccggggagaccgcagcccatcggcatggctcaagagtttgtgaactgcaaaatccagcctgggaaggtggttgtgttcatcaagcccacctgcccgtactgcaggagggcccaagagatcctcagtcaattgcccatcaaacaagggcttctggaatttgtcgatatcacagccaccaaccacactaacgagattcaagattatttgcaacagctcacgggagcaagaacggtgagtttcattttaaacggctagggaaaggctcccggattgccttttcttgtcagagctgtgcctttctttaggataaggctgcggctccgtacttcaaggcgtccagagggctgtgcggggcggggggtgtgggggagggcgccttagagaggatctcggtcacttgaatgagcggcggcactgcagccaaaggtcttcacggggcagaagagggagtacagctgatgtctgctgtgcggcagggtgcctcgagtctttattggtaaagattgtataggcggatgcagtgatctagtctctttgcaacagagtggggaactgctgacgcggctaaagcagattggagctctgcagtaaccacagtggagtctcactctgtcgtccaggctggaatgcagtggtgcgatcttggctcactgcaagctcctcctcctgggttcacgccattctcctgcctcagcctcctgaggagctgggagcacaggcgcccaccaccacgcccggctaattttttttgtattttttgtaaagacggggtttcaccgtgttagccaggatggtctcgatctcctgaccttgtgatccacctgcctcggccttccaaagtgctgggattacaggcatgagccgccacatccggcccattttaaccacttttaagtatatgattcattggcatgaagtacattcacactgctgtgcagtcatcaccaccaccatctccagaacatgtttcttcttcccaaactgaaactctgtacccaataaacactaactccctgtttccccctttccccagcccctggcaaccacccaatttggctgggggttttttcaatacttccctagaaatctggtttttcatgtaattctcgttcttatccctccttacattcttacattcttttgtagctatggaaccaagaacactgtgtatggtgaatatttaacataataacattacctgtcttctgtgatcttcccaatgcacagattccagtatctggcttaactttttgattattcattttgactcatttttccctaacacacttttgccaatttttaaaaatcctatcattattactgctttcctctgtaatattttctaattagcaaggtaaaacttaatattagcagcttcaattacttgagtgagaggatgactgaaaatcaaattttcctattactccaaatctggtcaatttgtaaatttaatatacagatttgccaacaatgaaataataaacaataagctttatttccaaaaagaacaaatgctttcatttttattaggcaaaaatactaagtctttttttgagacggagtctcactcggtcacccaagcttgagtgtggtggcgccatcttggctcactgcaacctctgcctcacaggttcaagcgattctcctgcctctgcctcccgtgtagctgggattacaggcacacgtcaccatgcccagctaatttttgtatttttagtagagacggggtttcaccatgttggtcaggctgtttttgaactgacttcaggtgatctgctcacctcagccttccaaagtgctcagattacaggcatgagctacggcacctggccgtaagtcagtctttaacactgacagaaacaactgcaactggctccaaaatactctacagaaagctgcaagcccagaattaatttaatcaacacaaatacatttgcttctttttgaacttctaaaatctttcactagagggctcatgacttgtttaaaacttatttcaatacccagtgtaagaaacctttccattctaaaaattaaagcagtgaatctgaagagaggtctggcttg

SEQ ID NO: 2693 - protein, 32 aa, Homosapiens
MSGGTAAKGLHGAEEGVQLMSAVRQGASSLYW

SEQ ID NO: 2694 - DNA, 377 bp, Homosapiens
catgtgtctcctgatctgtgccgagatgtaccaagtgtccagactgcagcacatctgtgagctgttctcccttttccctgcttggcagccagaaccctgaggatgaggcccaacccccagctgtgaagctggagagactgaatggctcaaaagaaaaggtgtccaggaaccaataattgggggatctcccagtgaggcaaccagatctgtacctgttcatttattctttaatttgttcactcaagaaagagcctactatctgccaagcagtcttgatgctgcagatacagcggtaaatagacaccaatccctgacctcaaggcacttatattctaatagtgaagagacagtaaactaaataaatcataccatatatt

SEQ ID NO: 2695 - protein, 32 aa, Homosapiens
MCLLICAEMYQVSRLQHICELFSLFPAWQPEP

SEQ ID NO: 2696 - DNA, 2572 bp, Homosapiens
ttgatgacagtgtttgaatcatcataaaaaaaatacctgcttttcatctggacaacccaattgagccactttatctccttttggcaatctgagtaggcggggaacctaggcagggctggctttcttagcgtgtaacttgtgtagcagcacagggcccacacttagaaggaccccacacttggttcaaggctctgctatagcggaaattcttaataatgtttgaagaagggccccatgatttcattttgtgctgagccctcaaaattatgtctgtttcgtggtgggaaatatcctatgttttcttgctcaaacacctttctctctgaaagcagaaaaaggcactgatataaagggaagagaaggaggctcaccggagggaagagaacatagtgaagattcccgcctttggggaggtctggaccacccagggcctccactgccaccttggctggcaagggagaaatgtgttgtgttgtcttagctttaaaacagtcacagttcttgctctatcatagatgaacaaatactttcttgatcattctgtaagaccaggaggttggtaagagtgactaaccagcctaactttaatacacatgtataaagatgttcacagagaaagatgctctgtagagaatttgctaccgaagttggctcaagaatttgtttttagtgttatttaccaagattaggacgtcagtggcttaaattctttgaattcttttcaaggactgcaagattatttgataaagagtagcatgaatcttgtgctctaatattacacagtaagttcaaagaaaggatgtaagtcaaagacttgttacatagagggaaaatggactgggatagaggacagactgatagtttctttctttcatatcacatgtatagagaaataattatatcagaaactcacaaacctagacatggaaaaacagattactgtctattgtcagcatcattttcatctgtaagtcactactggaatatatttttcttttaatttccagtgactttagaatacacacagtttttccgacttttcaaaaatttgattaaatggttttatagtataatattgggaccccataccgttagcccttgtatgtataccaacactgccaaaacagtgaaaccccgtctctactaaaaatacaaaattagccagatgtggtggcgcacacctgtaatcccagctactcaggaagctgaggcaggaaaatcgcttgaacctgggaggtggaagttgcagtgagccgagatcgcaccactgcactccagcctgggtgacaagagcgaaactccatctcaaaaaaaaaaaaaaaaccaaagtgaaacactaaaaattccctatagatatattccaggaaatattttaattgggctgattttaattaggctgtatcattgatgattactggaatcgattttatgtcttttgtattttaatcacttgagttaatcaaccactggcaaatcccatttgacaaagattagcattgtaaaaaacagatactgtggtagatttctagaaattcattcacatttaagacttctaaaatggaataatagccttttgtttttcatgagcatattcgcacccctatatgaattacagcatttaaagttcaaaatcagtaacttttaatctaggaaattgaaaaatattaagttgcaaagcaaaaaaaggtattttcttgaaaatactatttaatgtttaactagactataggtagttccttaaggttgtttgacctgaagtggagttgggtttggaagctggtgcccagttggtgtggagtgtgtagttttgttatgaaagttctctaccacctacctgtgtgagtgacaccaacatccagatgtcacagctctccagagctagtcagaagagaaatcaaattagtgtttaaacccatttgcatattgacttgtcagtacctttaactcaatttaatataacaagaaatcgtaaaatacttataacctatcttagagaaatgagtgctggttttgagagttgttttttaactgaaagattatttctagatgggtagtgctttgtgctggtttctgcttccatatatttcccagtcattttaattagagaagatactctatggtagaactaaggcctttcctttcttggccaaagtctttaccctatttaaccctttgtatatttctgactgctcactgttcatattataggggaccagatttgtaatatagaattctccataacatgaatgaaattaattctgtccaagccagcatggtggcttcatattaagtagtaacagaagtctgaacaattggataaatttgacttccaagacagctaaacttttcaactgcaattttaaaaactacactacactgttatagttaatctgacaaaaatgtcctcaaagagtactttattttatttaaagcatctgtttaattcaacctttaataattttgcaaagaagggtatgtgtgtattttaatatagcctgacctgaatttatatgtttttagctttagtatttaactttttgtaacaaataaaccttttttaaaacaagtttaa

SEQ ID NO: 2697 - protein, 55 aa, Homosapiens [sequence omitted]

SEQ ID NO: 2698 - DNA, 2089 bp, Homosapiens
ctttcttgatcattctgtaagaccaggaggttggtaagagtgactaaccagcctaactttaatacacatgtataaagatgttcacagagaaagatgctctgtagagaatttgctaccgaagttggctcaagaatttgtttttagtgttatttaccaagattaggacgtcagtggcttaaattctttgaattcttttcaaggactgcaagattatttgataaagagtagcatgaatcttgtgctctaatattacacagtaagttcaaagaaaggatgtaagtcaaagacttgttacatagagggaaaatggactgggatagaggacagactgatagtttctttctttcatatcacatgtatagagaaataattatatcagaaactcacaaacctagacatggaaaaacagattactgtctattgtcagcatcattttcatctgtaagtcactactggaatatatttttcttttaatttccagtgactttagaatacacacagtttttccgacttttcaaaaatttgattaaatggttttatagtataatattgggaccccataccgttagcccttgtatgtataccaacactgccaaagtaaaacattaggtcaggcatggtggctcaggcctgtaatcccagcattttgggaggctgaggcaagtggataacttgaggtcatgagttcgaaaccagcctggccaaaacagtgaaaccccgtctctactaaaaatacaaaattagccagatgtggtggcgcacacctgtaatcccagctactcaggaagctgaggcaggaaaatcgcttgaacctgggaggtggaagttgcagtgagccgagatcgcaccactgcactccagcctgggtgacaagagcgaaactccatctcaaaaaaaaaaaaaaaaccaaagtgaaacactaaaaattccctatagatatattccaggaaatattttaattgggctgattttaattaggctgtatcattgatgattactggaatcgattttatgtcttttgtattttaatcacttgagttaatcaaccactggcaaatcccatttgacaaagattagcattgtaaaaaacagatactgtggtagatttctagaaattcattcacatttaagacttctaaaatggaataatagccttttgtttttcatgagcatattcgcacccctatatgaattacagcatttaaagttcaaaatcagtaacttttaatctaggaaattgaaaaatattaagttgcaaagttgtttgacctgaagtggagttgggtttggaagctggtgcccagttggtgtggagtgtgtagttttgttatgaaagttctctaccacctacctgtgtgagtgacaccaacatccagatgtcacagctctccagagctagtcagaagagaaatcaaattagtgtttaaacccatttgcatattgacttgtcagtacctttaactcaatttaatataacaagaaatcgtaaaatacttataacctatcttagagaaatgagtgctggttttgagagttgttttttaactgaaagattatttctagatgggtagtgctttgtgctggtttctgcttccatatatttcccagtcattttaattagagaagatactctatggtagaactaaggcctttcctttcttggccaaagtctttaccctatttaaccctttgtatatttctgactgctcactgttcatattataggggaccagatttgtaatatagaattctccataacatgaatgaaattaattctgtccaagccagcatggtggcttcatattaagtagtaacagaagtctgaacaattggataaatttgacttccaagacagctaaacttttcaactgcaattttaaaaactacactacactgttatagttaatctgacaaaaatgtcctcaaagagtactttattttatttaaagcatctgtttaattcaacctttaataattttgcaaagaagggtatgtgtgtattttaatatagcctgacctgaatttatatgtttttagctttagtatttaactttttgtaacaaataaaccttttttaaaacaagtttaa

SEQ ID NO: 2699 - protein, 55 aa, Homosapiens [sequence omitted]

SEQ ID NO: 2700 - DNA, 629 bp, Homosapiens
tttgcaacagagtggggaactgctgacgcggctaaagcagattggagctctgcagtaaccacagatctcataggaaatgttcaacaattctgtgaaaggtcacaggacccaattggagaaatcatatgaaaagcatagttggtcttggtgtcatatggatcagaggcacaagtgcagaggctgtggtcatgcggaacactctgttatttaagatggctatccagataatcctgaacactgtgtatttattttatttagactaccagcaaagattaaagcatgaaatgtaaaacatctgataaaacttacagccccctacaccaagagtgtatctgtgaaagagctcctacactttgaaaacttaagaatcccttatcatgaagtttgcctgttctagaattgtaagattgttaatttccttcaatctctagtgacaacacttaatttcttttctaataaaaaaaacctatagatgattcagtgatttttgtccaattcatttgcatgttctcaagacattaaggaatgttatgcgaaatacactaacttaaaactgtgtttatatttggccctgccattataaataaagacacgtgctgctgtcactcactgagtacaaatggctgata

SEQ ID NO: 2701 - protein, 54 aa, Homosapiens
MKSIVGLGVIWIRGTSAEAVVMRNTLLFKMAIQIILNTVYLFYLDYQQRLKHEM

SEQ ID NO: 2702 - DNA, 3731 bp, Homosapiens
ccgcctcagcctcccaaagtgctgggattacaggcgtgagccacggcgcccggcctgatcctgcagtcttaattattctataaagtagctgtatctagtaggtaatcagcaggacatgattatggaaagttagtggcttcaatcaagccatgtacttggtaaaacctgtttttgttttgctatagtcacagctcctaaattagtgccttcatttatttctcctctaatgcacttttctttacatagatctgagtttctgaactatatcatttcccttctctctgaagaacttctttgggcatttcttgcaaggtgattccattggtaacacattccctcaagttttgtttaccttagaaagtatttctccttcgcatttgaatgatgattttactggatgcaacaaatatttttaagcacctactatgtaccagacacttttatgtacattggggaaaaaattctgccttttctgccatgaaaaaaacccttctgcctttgttgaacctatattctagtgggggagacaaacaaatacagtaataaaacagtatgttgggagttggtaagtggcacgtgctatgaggaaaagtaggaaaggtagggaggaagcatcagggtccagttttaaatggagccattgggtctcactgagaagggaacattcgagcagatatctataggagctgagggagatgggtgtacacaatttacaggtagagtgaatgcaaaggtcctggggtagacgtttgcctggcaggtttgtggaatagtaaggaagccagtatagttgcagcactgtgagccagtaggagagttagtggaggtgaggtctgagagctaataggagcttggaagaactgtgactggtactcggtgtgagatgagatgcccctggtgggtgctgagcagacgagtcacttgatctgaccccattttgaaagggccactctggcagctgtggggagaagagacagtagggcaaaggtgaaggttgaagctgggagacattgggaggctatagtagttattcaggtgacagatgaaggtggcttataccagggaggtagccgaggagtgttgagaaattgcttttgagtagttgcatttgtgtaaccctagctagcgtacaggagatgttgcctggctgaggctggggaaacctagtgcaggagaataagaaccacaggattaccaaactcgttttggggtggcagttctttcctctccttgacagtagcggactctcaagttcctctaaagaggaggctgggacgggaagggacaggaggggaagcagcacagggtatttcctcttctttgctcaactttatcaacagtacttcttgctttggtttcactgccacagcacccccgtgccgtctgtacagcctgccattcagctcccgttaggggtaccattcactgatacgatttatggcagttttgcagttgtccagactagaggatgggtgtgagggtaaaggagcctttcgcttctttgccagacactgagcacaaaactccacgctgggagcagcctggtcacatttcagggtcatctcaggaggctggggggcagctccagggctgtgggttttcaaagcctcagttatcctgtgagagcacagggaatagccatggaaatgtgcaagatttgtttttaatttttagactttatttttaatgcctaccttcacccagaccccctttttaataaaagtgctgtaagaacttatccacaataatgaagccccttttctcacctttctcactttttggacaatttgctccaattattatgctttctgaggaaagcccaaagctttgaaaaatagtctcattgctttctgcctccacctctccctcccctccagtgcgttcctggtactcggggagaggcccgctggctctgatgacgcggtgacctccatggggcttttttcttcactgccaggcagccttggtggaacactcctggcctataaattcagccacgttgagggtatttcctcctccctcgcgattctaaaagccctctggaattctggaatgtgtctgctcctagcagcagggaggaagtgtgtaactagagaggagcctattcagcaggtgtcatgactgtggcttggcgtgggtgacgcaccctcatccggggtgagttaaccatcttatgatggaccagcgattaaaggagactcaaacaccactacacccccctggttgaggacagagctcacttgtgttgctttgttttgctttctttgttttgctctgtcgtccaggtgtgagtgcaatggcaccatcacagcttactgcagcctcgacctcccgggccaaagcaatccttccacttcagcctcctgagtagctgggactacaggcatgcaccgccatgcctggctaatttttgtattttttgtagagacggggtctcacgatgttacctaggctagtcttgaactcctgggctcaagcgaccctcccacctcagcctcacaaaagtagtaggattacattcatgagccactgtgcctggccctcacctgtgttttaacaacacagagagatgattgtacttaataaaccatggacctgaaaaatcagagacgtaatgcaaatacttttccagctgtatttagaaacgaactccttccttcctgattgctgtgacccagtttacaatcttaggtgtggtccctgatgcagagaaagcagagttcaatctaggtggtctgactgcagccaatcagaattctccttctgaaacatgtttctgtagagtgaaatttttaaatccctttgacaagttggacaagctcatgcatagcacacaacttgaaaactcttctggcgtaaaaacattctcgagttaataatgttaccccttataacagaaaggaagtcctgtcctgtgagcatatacataaggaggttttaaagtgatttgaaaagtttggaatcacgggaaatatttagtggtaggatagaaatgttctgtctaatctagtaatgtagtaatgtcctgggtcgtgtgcttttttaggtgcctcgagtctttattggtaaagattgtataggcggatgcagtgatctagtctctttgcaacagagtggggaactgctgacgcggctaaagcagattggagctctgcagtaaccacagatctcataggaaatgttcaacaattctgtgaaaggtcacaggacccaattggagaaatcatatgaaaagcatagttggtcttggtgtcatatggatcagaggcacaagtgcagaggctgtggtcatgcggaacactctgttatttaagatggctatccagataatcctgaacactgtgtatttattttatttagactaccagcaaagattaaagcatgaaatgtaaaacatctgataaaacttacagccccctacaccaagagtgtatctgtgaaagagctcctacactttgaaaacttaagaatcccttatcatgaagtttgcctgttctagaattgtaagattgttaatttccttcaatctctagtgacaacacttaatttcttttctaataaaaaaaacctatagatgattcagtgatttttgtccaattcatttgcatgttctcaagacattaaggaatgttatgcgaaatacactaacttaaaactgtgtttatatttggccctgccattataaataaagacacgtgctgctgtcactcactgagtacaaatggctgata

SEQ ID NO: 2703 - protein, 72 aa, Homosapiens
MGVRVKEPFASLPDTEHKTPRWEQPGHISGSSQEAGGQLQGCGFSKPQLSCESTGNSHGNVQDLFLIFRLYF

SEQ ID NO: 2704 - DNA, 1769 bp, Homosapiens
ctcaataccccaagcaatacctgcaactgaggattcttcccggggagaccgcagcccatcggcatggctcaagagtttgtgaactgcaaaatccagcctgggaaggtggttgtgttcatcaagcccacctgcccgtactgcaggagggcccaagagatcctcagtcaattgcccatcaaacaagggcttctggaatttgtcgatatcacagccaccaaccacactaacgagattcaagattatttgcaacagctcacgggagcaagaacggtgagtttcattttaaacggctagggaaaggctcccggattgccttttcttgtcagagctgtgcctttctttaggataaggctgcggctccgtacttcaaggcgtccagagggctgtgcggggcggggggtgtgggggagggcgccttagagaggatctcggtcacttgaatgagcggcggcactgcagccaaaggtcttcacggggcagaagagggagtacagctgatgtctgctgtgcggcagggtgcctcgagtctttattggtaaagattgtataggcggatgcagtgatctagtctctttgcaacagagtggggaactgctgacgcggctaaagcagattggagctctgcagtaaccacagaacaggccccatgctgacgtccctcctcaagagctggatggcattgcaaatgatgacagcacttctggtggatgaatttgggggcacaaacagcttttttcctcttttggctcagtatttaaaagtggaccaacttgctcttaatcacagggccaagaaggttgacgggccatcttggttttcttctggatgtgctctttggttttcagaagactgtgacaagttctggcccaggattcgctcactgaccctcaattgtcctctttggcatgcgtttcttactgttctccatgtgtcggcatgtctctacctctaagccagtgtttttcaactatgtttatccagactccttctccacaatgatgaatccacagttggttatctgctactgcccattagctaaaatcattttgctgcttgactttatggagtttgtattatgaaatcagtgggtattttgaatgtgttctttctaactacatgcatctctccactcaactccaccccatcccatcccaccttgaaaatcactgctctgaaccagtgttctccaccttgtcctccacagatctcataggaaatgttcaacaattctgtgaaaggtcacaggacccaattggagaaatcatatgaaaagcatagttggtcttggtgtcatatggatcagaggcacaagtgcagaggctgtggtcatgcggaacactctgttatttaagatggctatccagataatcctgaacactgtgtatttattttatttagactaccagcaaagattaaagcatgaaatgtaaaacatctgataaaacttacagccccctacaccaagagtgtatctgtgaaagagctcctacactttgaaaacttaagaatcccttatcatgaagtttgcctgttctagaattgtaagattgttaatttccttcaatctctagtgacaacacttaatttcttttctaataaaaaaaacctatagatgattcagtgatttttgtccaattcatttgcatgttctcaagacattaaggaatgttatgcgaaatacactaacttaaaactgtgtttatatttggccctgccattataaataaagacacgtgctgctgtcactcactgagtacaaatggctgata

SEQ ID NO: 2705 - protein, 32 aa, Homosapiens; identical to SEQ ID NO: 2693

SEQ ID NO: 2706 - DNA, 1201 bp, Homosapiens
ctcaataccccaagcaatacctgcaactgaggattcttcccggggagaccgcagcccatcggcatggctcaagagtttgtgaactgcaaaatccagcctgggaaggtggttgtgttcatcaagcccacctgcccgtactgcaggagggcccaagagatcctcagtcaattgcccatcaaacaagggcttctggaatttgtcgatatcacagccaccaaccacactaacgagattcaagattatttgcaacagctcacgggagcaagaacggtgagtttcattttaaacggctagggaaaggctcccggattgccttttcttgtcagagctgtgcctttctttaggataaggctgcggctccgtacttcaaggcgtccagagggctgtgcggggcggggggtgtgggggagggcgccttagagaggatctcggtcacttgaatgagcggcggcactgcagccaaaggtcttcacggggcagaagagggagtacagctgatgtctgctgtgcggcagggtgcctcgagtctttattggtaaagattgtataggcggatgcagtgatctagtctctttgcaacagagtggggaactgctgacgcggctaaagcagattggagctctgcagtaaccacagatctcataggaaatgttcaacaattctgtgaaaggtcacaggacccaattggagaaatcatatgaaaagcatagttggtcttggtgtcatatggatcagaggcacaagtgcagaggctgtggtcatgcggaacactctgttatttaagatggctatccagataatcctgaacactgtgtatttattttatttagactaccagcaaagattaaagcatgaaatgtaaaacatctgataaaacttacagccccctacaccaagagtgtatctgtgaaagagctcctacactttgaaaacttaagaatcccttatcatgaagtttgcctgttctagaattgtaagattgttaatttccttcaatctctagtgacaacacttaatttcttttctaataaaaaaaacctatagatgattcagtgatttttgtccaattcatttgcatgttctcaagacattaaggaatgttatgcgaaatacactaacttaaaactgtgtttatatttggccctgccattataaataaagacacgtgctgctgtcactcactgagtacaaatggctgata

SEQ ID NO: 2707 - protein, 32 aa, Homosapiens; identical to SEQ ID NO: 2693

SEQ ID NO: 2708 - DNA, 1525 bp, Homosapiens
ggctcaataccccaagcaatacctgcaactgaggattcttcccggggagaccgcagcccatcggcatggctcaagagtttgtgaactgcaaaatccagcctgggaaggtggttgtgttcatcaagcccacctgcccgtactgcaggagggcccaagagatcctcagtcaattgcccatcaaacaagggcttctggaatttgtcgatatcacagccaccaaccacactaacgagattcaagattatttgcaacagctcacgggagcaagaacggtgcctcgagtctttattggtaaagattgtataggcggatgcagtgatctagtctctttgcaacagagtggggaactgctgacgcggctaaagcagattggagctctgcagtaaccacagaacaggccccatgctgacgtccctcctcaagagctggatggcattgcaaatgatgacagcacttctggtggatgaatttgggggcacaaacagcttttttcctcttttggctcagtatttaaaagtggaccaacttgctcttaatcacagggccaagaaggttgacgggccatcttggttttcttctggatgtgctctttggttttcagaagactgtgacaagttctggcccaggattcgctcactgaccctcaattgtcctctttggcatgcgtttcttactgttctccatgtgtcggcatgtctctacctctaagccagtgtttttcaactatgtttatccagactccttctccacaatgatgaatccacagttggttatctgctactgcccattagctaaaatcattttgctgcttgactttatggagtttgtattatgaaatcagtgggtattttgaatgtgttctttctaactacatgcatctctccactcaactccaccccatcccatcccaccttgaaaatcactgctctgaaccagtgttctccaccttgtcctccacagatctcataggaaatgttcaacaattctgtgaaaggtcacaggacccaattggagaaatcatatgaaaagcatagttggtcttggtgtcatatggatcagaggcacaagtgcagaggctgtggtcatgcggaacactctgttatttaagatggctatccagataatcctgaacactgtgtatttattttatttagactaccagcaaagattaaagcatgaaatgtaaaacatctgataaaacttacagccccctacaccaagagtgtatctgtgaaagagctcctacactttgaaaacttaagaatcccttatcatgaagtttgcctgttctagaattgtaagattgttaatttccttcaatctctagtgacaacacttaatttcttttctaataaaaaaaacctatagatgattcagtgatttttgtccaattcatttgcatgttctcaagacattaaggaatgttatgcgaaatacactaacttaaaactgtgtttatatttggccctgccattataaataaagacacgtgctgctgtcactcactgagtacaaatggctgata

SEQ ID NO: 2709 - protein, 106 aa, Homosapiens; identical to SEQ ID NO: 347

SEQ ID NO: 2710 - DNA, 1235 bp, Homosapiens
gtaagcactttatgcttccccagaggtgactaaactctgatcattgccaatgggcaggcactccccaaatgtccaaggacaacaaagatacccagagtgtctttcatagctaccaatgattaaatagcaagtattgcattcctgggcattgctaactagtgaagtataccagatggaaatgtcttcgaagctgtccctttaaaactcgagcaagctaccaggcaaactccgcctccagggaggttccttattaaataggagccaactggctgggtcggggctcaataccccaagcaatacctgcaactgaggattcttcccggggagaccgcagcccatcggcatggctcaagagtttgtgaactgcaaaatccagcctgggaaggtggttgtgttcatcaagcccacctgcccgtactgcaggagggcccaagagatcctcagtcaattgcccatcaaacaagggcttctggaatttgtcgatatcacagccaccaaccacactaacgagattcaagattatttgcaacagctcacgggagcaagaacggtgcctcgagtctttattggtaaagattgtataggcggatgcagtgatctagtctctttgcaacagagtggggaactgctgacgcggctaaagcagattggagctctgcagtaaccacagatctcataggaaatgttcaacaattctgtgaaaggtcacaggacccaattggagaaatcatatgaaaagcatagttggtcttggtgtcatatggatcagaggcacaagtgcagaggctgtggtcatgcggaacactctgttatttaagatggctatccagataatcctgaacactgtgtatttattttatttagactaccagcaaagattaaagcatgaaatgtaaaacatctgataaaacttacagccccctacaccaagagtgtatctgtgaaagagctcctacactttgaaaacttaagaatcccttatcatgaagtttgcctgttctagaattgtaagattgttaatttccttcaatctctagtgacaacacttaatttcttttctaataaaaaaaacctatagatgattcagtgatttttgtccaattcatttgcatgttctcaagacattaaggaatgttatgcgaaatacactaacttaaaactgtgtttatatttggccctgccattataaataaagacacgtgctgctgtcactcactgagtacaaatggctgata

SEQ ID NO: 2711 - protein, 106 aa, Homosapiens; identical to SEQ ID NO: 347

SEQ ID NO: 2712 - DNA, 3585 bp, Homosapiens
ccgcctcagcctcccaaagtgctgggattacaggcgtgagccacggcgcccggcctgatcctgcagtcttaattattctataaagtagctgtatctagtaggtaatcagcaggacatgattatggaaagttagtggcttcaatcaagccatgtacttggtaaaacctgtttttgttttgctatagtcacagctcctaaattagtgccttcatttatttctcctctaatgcacttttctttacatagatctgagtttctgaactatatcatttcccttctctctgaagaacttctttgggcatttcttgcaaggtgattccattggtaacacattccctcaagttttgtttaccttagaaagtatttctccttcgcatttgaatgatgattttactggatgcaacaaatatttttaagcacctactatgtaccagacacttttatgtacattggggaaaaaattctgccttttctgccatgaaaaaaacccttctgcctttgttgaacctatattctagtgggggagacaaacaaatacagtaataaaacagtatgttgggagttggtaagtggcacgtgctatgaggaaaagtaggaaaggtagggaggaagcatcagggtccagttttaaatggagccattgggtctcactgagaagggaacattcgagcagatatctataggagctgagggagatgggtgtacacaatttacaggtagagtgaatgcaaaggtcctggggtagacgtttgcctggcaggtttgtggaatagtaaggaagccagtatagttgcagcactgtgagccagtaggagagttagtggaggtgaggtctgagagctaataggagcttggaagaactgtgactggtactcggtgtgagatgagatgcccctggtgggtgctgagcagacgagtcacttgatctgaccccattttgaaagggccactctggcagctgtggggagaagagacagtagggcaaaggtgaaggttgaagctgggagacattgggaggctatagtagttattcaggtgacagatgaaggtggcttataccagggaggtagccgaggagtgttgagaaattgcttttgagtagttgcatttgtgtaaccctagctagcgtacaggagatgttgcctggctgaggctggggaaacctagtgcaggagaataagaaccacaggattaccaaactcgttttggggtggcagttctttcctctccttgacagtagcggactctcaagttcctctaaagaggaggctgggacgggaagggacaggaggggaagcagcacagggtatttcctcttctttgctcaactttatcaacagtacttcttgctttggtttcactgccacagcacccccgtgccgtctgtacagcctgccattcagctcccgttaggggtaccattcactgatacgatttatggcagttttgcagttgtccagactagaggatgggtgtgagggtaaaggagcctttcgcttctttgccagacactgagcacaaaactccacgctgggagcagcctggtcacatttcagggtcatctcaggaggctggggggcagctccagggctgtgggttttcaaagcctcagttatcctgtgagagcacagggaatagccatggaaatgtgcaagatttgtttttaatttttagactttatttttaatgcctaccttcacccagaccccctttttaataaaagtgctgtaagaacttatccacaataatgaagccccttttctcacctttctcactttttggacaatttgctccaattattatgctttctgaggaaagcccaaagctttgaaaaatagtctcattgctttctgcctccacctctccctcccctccagtgcgttcctggtactcggggagaggcccgctggctctgatgacgcggtgacctccatggggcttttttcttcactgccaggcagccttggtggaacactcctggcctataaattcagccacgttgagggtatttcctcctccctcgcgattctaaaagccctctggaattctggaatgtgtctgctcctagcagcagggaggaagtgtgtaactagagaggagcctattcagcaggtgtcatgactgtggcttggcgtgggtgacgcaccctcatccggggtgagttaaccatcttatgatggaccagcgattaaaggagactcaaacaccactacacccccctggttgaggacagagctcacttgtgttgctttgttttgctttctttgttttgctctgtcgtccaggtgtgagtgcaatggcaccatcacagcttactgcagcctcgacctcccgggccaaagcaatccttccacttcagcctcctgagtagctgggactacaggcatgcaccgccatgcctggctaatttttgtattttttgtagagacggggtctcacgatgttacctaggctagtcttgaactcctgggctcaagcgaccctcccacctcagcctcacaaaagtagtaggattacattcatgagccactgtgcctggccctcacctgtgttttaacaacacagagagatgattgtacttaataaaccatggacctgaaaaatcagagacgtaatgcaaatacttttccagctgtatttagaaacgaactccttccttcctgattgctgtgacccagtttacaatcttaggtgtggtccctgatgcagagaaagcagagttcaatctaggtggtctgactgcagccaatcagaattctccttctgaaacatgtttctgtagagtgaaatttttaaatccctttgacaagttggacaagctcatgcatagcacacaacttgaaaactcttctggcgtaaaaacattctcgagttaataatgttaccccttataacagaaaggaagtcctgtcctgtgagcatatacataaggaggttttaaagtgatttgaaaagtttggaatcacgggaaatatttagtggtaggatagaaatgttctgtctaatctagtaatgtagtaatgtcctgggtcgtgtgcttttttaggtgcctcgagtctttattggtaaagattgtataggcggatgcagtgatctagtctctttgcaacagagtggggaactgctgacgcggctaaagcagattggagctctgcagtaaccacagatctcataggaaatgttcaacaattctgtgaaaggtcacaggacccaattggagaaatcatatgaaaagcatagttggtcttggtgtcatatggatcagaggcacaagtgcagaggctgtggtcatgcggaacactctgttatttaagatggctatccagataatcctgaacactgtgtatttattttatttagactaccagcaaagattaaagcatgaaatgtaaaacatctgataaaacttacagccccctacaccaagagtgtatctgtgaaagagctcctacactttgaaaacttaagaatcccttatcatgaagtttgcctgttctagaattgtaagattgttaatttccttcaatctctagtgacaacacttaatttcttttctaataaaaaaaacctatagatgattcagtg

SEQ ID NO: 2713 - protein, 72 aa, Homosapiens; identical to SEQ ID NO: 2703

SEQ ID NO: 2714 - DNA, 1055 bp, Homosapiens
ctcaataccccaagcaatacctgcaactgaggattcttcccggggagaccgcagcccatcggcatggctcaagagtttgtgaactgcaaaatccagcctgggaaggtggttgtgttcatcaagcccacctgcccgtactgcaggagggcccaagagatcctcagtcaattgcccatcaaacaagggcttctggaatttgtcgatatcacagccaccaaccacactaacgagattcaagattatttgcaacagctcacgggagcaagaacggtgagtttcattttaaacggctagggaaaggctcccggattgccttttcttgtcagagctgtgcctttctttaggataaggctgcggctccgtacttcaaggcgtccagagggctgtgcggggcggggggtgtgggggagggcgccttagagaggatctcggtcacttgaatgagcggcggcactgcagccaaaggtcttcacggggcagaagagggagtacagctgatgtctgctgtgcggcagggtgcctcgagtctttattggtaaagattgtataggcggatgcagtgatctagtctctttgcaacagagtggggaactgctgacgcggctaaagcagattggagctctgcagtaaccacagatctcataggaaatgttcaacaattctgtgaaaggtcacaggacccaattggagaaatcatatgaaaagcatagttggtcttggtgtcatatggatcagaggcacaagtgcagaggctgtggtcatgcggaacactctgttatttaagatggctatccagataatcctgaacactgtgtatttattttatttagactaccagcaaagattaaagcatgaaatgtaaaacatctgataaaacttacagccccctacaccaagagtgtatctgtgaaagagctcctacactttgaaaacttaagaatcccttatcatgaagtttgcctgttctagaattgtaagattgttaatttccttcaatctctagtgacaacacttaatttcttttctaataaaaaaaacctatagatgattcagtg

SEQ ID NO: 2715 - protein, 32 aa, Homosapiens; identical to SEQ ID NO: 2693

SEQ ID NO: 2716 - DNA, 1623 bp, Homosapiens
ctcaataccccaagcaatacctgcaactgaggattcttcccggggagaccgcagcccatcggcatggctcaagagtttgtgaactgcaaaatccagcctgggaaggtggttgtgttcatcaagcccacctgcccgtactgcaggagggcccaagagatcctcagtcaattgcccatcaaacaagggcttctggaatttgtcgatatcacagccaccaaccacactaacgagattcaagattatttgcaacagctcacgggagcaagaacggtgagtttcattttaaacggctagggaaaggctcccggattgccttttcttgtcagagctgtgcctttctttaggataaggctgcggctccgtacttcaaggcgtccagagggctgtgcggggcggggggtgtgggggagggcgccttagagaggatctcggtcacttgaatgagcggcggcactgcagccaaaggtcttcacggggcagaagagggagtacagctgatgtctgctgtgcggcagggtgcctcgagtctttattggtaaagattgtataggcggatgcagtgatctagtctctttgcaacagagtggggaactgctgacgcggctaaagcagattggagctctgcagtaaccacagaacaggccccatgctgacgtccctcctcaagagctggatggcattgcaaatgatgacagcacttctggtggatgaatttgggggcacaaacagcttttttcctcttttggctcagtatttaaaagtggaccaacttgctcttaatcacagggccaagaaggttgacgggccatcttggttttcttctggatgtgctctttggttttcagaagactgtgacaagttctggcccaggattcgctcactgaccctcaattgtcctctttggcatgcgtttcttactgttctccatgtgtcggcatgtctctacctctaagccagtgtttttcaactatgtttatccagactccttctccacaatgatgaatccacagttggttatctgctactgcccattagctaaaatcattttgctgcttgactttatggagtttgtattatgaaatcagtgggtattttgaatgtgttctttctaactacatgcatctctccactcaactccaccccatcccatcccaccttgaaaatcactgctctgaaccagtgttctccaccttgtcctccacagatctcataggaaatgttcaacaattctgtgaaaggtcacaggacccaattggagaaatcatatgaaaagcatagttggtcttggtgtcatatggatcagaggcacaagtgcagaggctgtggtcatgcggaacactctgttatttaagatggctatccagataatcctgaacactgtgtatttattttatttagactaccagcaaagattaaagcatgaaatgtaaaacatctgataaaacttacagccccctacaccaagagtgtatctgtgaaagagctcctacactttgaaaacttaagaatcccttatcatgaagtttgcctgttctagaattgtaagattgttaatttccttcaatctctagtgacaacacttaatttcttttctaataaaaaaaacctatagatgattcagtg

SEQ ID NO: 2717 - protein, 32 aa, Homosapiens; identical to SEQ ID NO: 2693

SEQ ID NO: 2718 - DNA, 728 bp, Homosapiens
ggctcaataccccaagcaatacctgcaactgaggattcttcccggggagaccgcagcccatcggcatggctcaagagtttgtgaactgcaaaatccagcctgggaaggtggttgtgttcatcaagcccacctgcccgtactgcaggagggcccaagagatcctcagtcaattgcccatcaaacaagggcttctggaatttgtcgatatcacagccaccaaccacactaacgagattcaagatctctttgcaacagagtggggaactgctgacgcggctaaagcagattggagctctgcagtaaccacagatctcataggaaatgttcaacaattctgtgaaaggtcacaggacccaattggagaaatcatatgaaaagcatagttggtcttggtgtcatatggatcagaggcacaagtgcagaggctgtggtcatgcggaacactctgttatttaagatggctatccagataatcctgaacactgtgtatttattttatttagactaccagcaaagattaaagcatgaaatgtaaaacatctgataaaacttacagccccctacaccaagagtgtatctgtgaaagagctcctacactttgaaaacttaagaatcccttatcatgaagtttgcctgttctagaattgtaagattgttaatttccttcaatctctagtgacaacacttaatttcttttctaataaaaaaaacctatagatgattcagtg

SEQ ID NO: 2719 - protein, 102 aa, Homosapiens
MAQEFVNCKIQPGKVVVFIKPTCPYCRRAQEILSQLPIKQGLLEFVDITATNHTNEIQDLFATEWGTADAAKADWSSAVTTDLIGNVQQFCERSQDPIGEII

SEQ ID NO: 2720 - DNA, 1379 bp, Homosapiens
ggctcaataccccaagcaatacctgcaactgaggattcttcccggggagaccgcagcccatcggcatggctcaagagtttgtgaactgcaaaatccagcctgggaaggtggttgtgttcatcaagcccacctgcccgtactgcaggagggcccaagagatcctcagtcaattgcccatcaaacaagggcttctggaatttgtcgatatcacagccaccaaccacactaacgagattcaagattatttgcaacagctcacgggagcaagaacggtgcctcgagtctttattggtaaagattgtataggcggatgcagtgatctagtctctttgcaacagagtggggaactgctgacgcggctaaagcagattggagctctgcagtaaccacagaacaggccccatgctgacgtccctcctcaagagctggatggcattgcaaatgatgacagcacttctggtggatgaatttgggggcacaaacagcttttttcctcttttggctcagtatttaaaagtggaccaacttgctcttaatcacagggccaagaaggttgacgggccatcttggttttcttctggatgtgctctttggttttcagaagactgtgacaagttctggcccaggattcgctcactgaccctcaattgtcctctttggcatgcgtttcttactgttctccatgtgtcggcatgtctctacctctaagccagtgtttttcaactatgtttatccagactccttctccacaatgatgaatccacagttggttatctgctactgcccattagctaaaatcattttgctgcttgactttatggagtttgtattatgaaatcagtgggtattttgaatgtgttctttctaactacatgcatctctccactcaactccaccccatcccatcccaccttgaaaatcactgctctgaaccagtgttctccaccttgtcctccacagatctcataggaaatgttcaacaattctgtgaaaggtcacaggacccaattggagaaatcatatgaaaagcatagttggtcttggtgtcatatggatcagaggcacaagtgcagaggctgtggtcatgcggaacactctgttatttaagatggctatccagataatcctgaacactgtgtatttattttatttagactaccagcaaagattaaagcatgaaatgtaaaacatctgataaaacttacagccccctacaccaagagtgtatctgtgaaagagctcctacactttgaaaacttaagaatcccttatcatgaagtttgcctgttctagaattgtaagattgttaatttccttcaatctctagtgacaacacttaatttcttttctaataaaaaaaacctatagatgattcagtg

SEQ ID NO: 2721 - protein, 106 aa, Homosapiens; identical to SEQ ID NO: 347

SEQ ID NO: 2722 - DNA, 1089 bp, Homosapiens
gtaagcactttatgcttccccagaggtgactaaactctgatcattgccaatgggcaggcactccccaaatgtccaaggacaacaaagatacccagagtgtctttcatagctaccaatgattaaatagcaagtattgcattcctgggcattgctaactagtgaagtataccagatggaaatgtcttcgaagctgtccctttaaaactcgagcaagctaccaggcaaactccgcctccagggaggttccttattaaataggagccaactggctgggtcggggctcaataccccaagcaatacctgcaactgaggattcttcccggggagaccgcagcccatcggcatggctcaagagtttgtgaactgcaaaatccagcctgggaaggtggttgtgttcatcaagcccacctgcccgtactgcaggagggcccaagagatcctcagtcaattgcccatcaaacaagggcttctggaatttgtcgatatcacagccaccaaccacactaacgagattcaagattatttgcaacagctcacgggagcaagaacggtgcctcgagtctttattggtaaagattgtataggcggatgcagtgatctagtctctttgcaacagagtggggaactgctgacgcggctaaagcagattggagctctgcagtaaccacagatctcataggaaatgttcaacaattctgtgaaaggtcacaggacccaattggagaaatcatatgaaaagcatagttggtcttggtgtcatatggatcagaggcacaagtgcagaggctgtggtcatgcggaacactctgttatttaagatggctatccagataatcctgaacactgtgtatttattttatttagactaccagcaaagattaaagcatgaaatgtaaaacatctgataaaacttacagccccctacaccaagagtgtatctgtgaaagagctcctacactttgaaaacttaagaatcccttatcatgaagtttgcctgttctagaattgtaagattgttaatttccttcaatctctagtgacaacacttaatttcttttctaataaaaaaaacctatagatgattcagtg

SEQ ID NO: 2723 - protein, 106 aa, Homosapiens; identical to SEQ ID NO: 347

SEQ ID NO: 2724 - DNA, 724 bp, Homosapiens
ggctcaataccccaagcaatacctgcaactgaggattcttcccggggagaccgcagcccatcggcatggctcaagagtttgtgaactgcaaaatccagcctgggaaggtggttgtgttcatcaagcccacctgcccgtactgcaggagggcccaagagatcctcagtcaattgcccatcaaacaagggcttctggaatttgtcgatatcacagccaccaaccacactaacgagattcaagattatttgcaacagctcacgggagcaagaacggtgcctcgagtctttattggtaaagattgtataggcggatgcagtgatctagtctctttgcaacagagtggggaactgctgacgcggctaaagcagattggagctctgcagtaaccacagggccaagaaggttgacgggccatcttggttttcttctggatgtgctctttggttttcagaagactgtgacaagttctggcccaggattcgctcactgaccctcaattgtcctctttggcatgcgtttcttactgttctccatgtgtcggcatgtctctacctctaagccagtgtttttcaactatgtttatccagactccttctccacaatgatgaatccacagttggttatctgctactgcccattagctaaaatcattttgctgcttgactttatggagtttgtattatgaaatcagtgggtattttgaatgtgttctttctaactacat

SEQ ID NO: 2725 - protein, 106 aa, Homosapiens; identical to SEQ ID NO: 347

SEQ ID NO: 2726 - DNA, 1815 bp, Homosapiens
aacccactccagtccccttctgcactgtggaagctttgttcttttgctctttgcaataaatcttgctactgctcactctttgcgtccacactgcctttatgagctgtaacactcactgcgaaggtctgcagcttcactcctgaagccagccacaagaccacgaacccaccagaaggaagaaactccgaacacatctgaacatcagaaggaacaaactctggacacactgcctttaagaactgtaatactcaccgtgagggcccgcggcttcattcttgaagtcagtgagaccaagaacccaccaattccagacacagtgggatcacagagagagccaacagtccaggccatgacaagctggcacccagctctgcttcacatgatcaaactgcatcacggaagctgcacacgatgacaccctgtctggaaagtttttgccagagggcaaaagactgcaagcagaatatccctttgccatttctcattcaggactggccgttgtctgaaagcaaacctcaaggacaggacttctggactccgcagccacttcaggctgctgctccatcgcatgaattccagcaggtggcgctgcaccccgcgcggacccggcttgcctctcggccccagggaggtcggttgatgagcagtcgggaagtgggtctgcgcgcaccccgctgcagctgtggcaaacgcaaacgatgacacacaggcttgacgagggcctttgtcagaagcaatggggatctggcgtcaccgcacaatggaaaacaaagtgcttctgcctggctggccagaatgcacgtttgctcactattgatgctggggcatttacaggcagaatgagttcatgtgaaatttcaggatctgccatgactcagattcactttctgtaaaccagagtcaacattacatttccctttactctgggccattccttgaatttttaggtcaccagttgtttttgtactaactgaagggatttgagtatttcacaagcaccttatttttattagcatttttagggcattaccaatttgggacggatctgtagtgtgagagattgttgtcactcttagctccaaacataggttgactttatatattatttacatgttcagaattatactgtgtagaaattcaaatgaaacttgcaaaatacttttctggcaggaagccctggagaggatcgttcatggaaacaaggatgacgactggggtaagaaatgcaggtgactcgtgagtggtcagggagtggaagagaagacggctggaaggttttagcattcagaaaaaaaatggagacaactagagttgatctgaagattatggcagaattcaatattgggggaaagaaacaagatgggggttagaaattagaaacagcagagctccacaggttggaaaggttggaaaggatttgagcaagagaacaaggagcctgctaatagcaccctgggtttacatcaagagaagcacctggagagaattaactcgggaggaggtgggggcatgggaaaccttttcatctccaagagcgggcaggaacagcagctggcctgaacttgaaggtacaccaggtagcttgcgtgggccaggagaaggtgattctcttctatgcctctctccaacgccctgcttctgatgctgctcctctacctgtattgaggggaagatacatccctaagaagttccctgaaccccattctttgttgtggctaactggtccccttggaatttttctactaattttcaattccccctctcacctggtgaaatcttgaatcttactgttcaataaaagttcttctaccgaaa

SEQ ID NO: 2727 - protein, 96 aa, Homosapiens; identical to SEQ ID NO: 349

SEQ ID NO: 2728 - DNA, 1796 bp, Homosapiens
agaccacgaacccaccagaaggaagaaactccgaacacatctgaacatcagaaggaacaaactctggacacactgcctttaagaactgtaatactcaccgtgagggcccgcggcttcattcttgaagtcagtgagaccaagaacccaccaattccagacacagtgggatcacagagagagccaacagtccaggccatgacaagctggcacccagctctgcttcacatttgtccaactggcgtggctgtagctccttcctgcaaggcaatgctgaagaagctatggaagcaagaaggaagcatggattctaaaaactgacaacaaaccacttacccctattgctcttcttcctaaagctaaaggatcaaactgcatcacggaagctgcacacgatgacaccctgtctggaaagtttttgccagagggcaaaagactgcaagcagaatatccctttgccatttctcattcaggactggccgttgtctgaaagcaaacctcaaggacaggacttctggactccgcagccacttcaggctgctgctccatcgcatgaattccagcaggtggcgctgcaccccgcgcggacccggcttgcctctcggccccagggaggtcggttgatgagcagtcgggaagtgggtctgcgcgcaccccgctgcagctgtggcaaacgcaaacgatgacacacaggcttgacgagggcctttgtcagaagcaatggggatctggcgtcaccgcacaatggaaaacaaagtgcttctgcctggctggccagaatgcacgtttgctcactattgatgctggggcatttacaggcagaatgagttcatgtgaaatttcaggatctgccatgactcagattcactttctgtaaaccagagtcaacattacatttccctttactctgggccattccttgaatttttaggtcaccagttgtttttgtactaactgaagggatttgagtatttcacaagcaccttatttttattagcatttttagggcattaccaatttgggacggatctgtagtgtgagagattgttgtcactcttagctccaaacataggttgactttatatattatttacatgttcagaattatactgtgtagaaattcaaatgaaacttgcaaaatacttttctggcaggaagccctggagaggatcgttcatggaaacaaggatgacgactggggtaagaaatgcaggtgactcgtgagtggtcagggagtggaagagaagacggctggaaggttttagcattcagaaaaaaaatggagacaactagagttgatctgaagattatggcagaattcaatattgggggaaagaaacaagatgggggttagaaattagaaacagcagagctccacaggttggaaaggttggaaaggatttgagcaagagaacaaggagcctgctaatagcaccctgggtttacatcaagagaagcacctggagagaattaactcgggaggaggtgggggcatgggaaaccttttcatctccaagagcgggcaggaacagcagctggcctgaacttgaaggtacaccaggtagcttgcgtgggccaggagaaggtgattctcttctatgcctctctccaacgccctgcttctgatgctgctcctctacctgtattgaggggaagatacatccctaagaagttccctgaaccccattctttgttgtggctaactggtccccttggaatttttctactaattttcaattccccctctcacctggtgaaatcttgaatcttactgttcaataaaagttcttctaccgaaa

SEQ ID NO: 2729 - protein, 96 aa, Homosapiens; identical to SEQ ID NO: 349

SEQ ID NO: 2730 - DNA, 695 bp, Homosapiens
gtcagtgtagaaagcccaggcattgtcccatagctggccctgtgtgtttgcactgattcctcagaataagtttgcagatagcttaacttccagaattcctgagtttcactagtcccccttctttatgatgaattggaaaaagggtatattctgggataaagcaagaggaaactgggtgcagcaaagatccctagaccatttttcccagtggcccattgctcctgctgcttttttcataccagctgaatctccctaaaccccacgtctgcggcaaagtcttcgtggtgaaacaggcagtcttcagtacaagaagcgtcaatctcagatcttactcatttccaacctgtaccaatcaaaggccctcccagccaagataaaagcaaagtctccctcctccagagcacatgggaatggccccccagtagctggggcatgcaagctaatgaagtttcatcttccacctctatccaaatatgaccttgctgataccatctcctattagatgacaaatccggatgtttctattgcatggttgttatttgccacatgcttcctggacaagtttctagccagctgccatgtgtcaggacactcaggcagcctgtggaaagctgcacatggtgaggaacagagggctccagtcaaacgaccaatgccaacaaccatgtaagtgagcttggaagtggattccccag

SEQ ID NO: 2731 - protein, 55 aa, Homosapiens
MTNPDVSIAWLLFATCFLDKFLASCHVSGHSGSLWKAAHGEEQRAPVKRPMPTTM

SEQ ID NO: 2732 - DNA, 6272 bp, Homosapiens
cttacatagtggaggtggagatcctcctctccaaggaccacccgcgtagggcgagattccccaattctgacttttcactactatcccccacaggggcggggctccaactccaggtaaccagaccaggcaacctggacttccaattagcaggggagtccccaagccagcctggccaatctcggccggctagccaagacgaccagacgtgacgtcagacatgattaagttggcgcgtcacctagacgtcagcctcttacctctcggacgtcccgtcccaggagcaaaactctagtgactttgggcccgcccccgtgagagtggagggcggccgatgagggcggttctgaagggaacaagaccaatgagacgagcccggggcggggcgcggggccggagggtggggcgggtggcggcggtggcagtccgaggtctggctccgcgcagtatatgacagtacgtcagcagcgggatggccctagcagtggcggcggctgcagaagcccaagcagccgcggccgcagtggaggctagagccggagcggcggcggcggcggcaccccggggagtttaagatggcggcgggggggacagggggcctgcgggaggagcagcgctatgggctgtcgtgcggacggctggggcaggacaacatcaccgtactgcatgtgaagctcaccgagacggcgatccgggcgctcgagacttaccagagccacaagaatttaattccttttcgaccttcaatccagttccaaggactccacgggcttgtcaaaattcccaaaaatgatcccctcaatgaagttcataactttaacttttatttgtcaaatgtgggcaaagacaaccctcagggcagctttgactgcatccagcaaacattctccagctctggagcctcccagctcaattgcctgggatttatacaagataaaattacagtgtgtgcaacaaacgactcgtatcagatgacacgagaaagaatgacccaggcagaggaggaatcccgcaaccgaagcacaaaagttatcaaacccggtggaccatatgtagggaaaagagtgcaaattcggaaagcacctcaagctgtttcagatacagttcctgagaggaaaaggtcaacccccatgaaccctgcaaatacaattcgaaagacacatagcagcagcaccatctctcagaggccatacagggacagggtgattcacttactggccctgaaggcctacaagaaaccggagctacttgctagactccagaaagatggtgtcaatcaaaaagacaagaactccctgggagcaattctgcaacaggtagccaatctgaattctaaggacctctcatataccttaaaggattatgtttttaaagagcttcaaagagactggcctggatacagtgaaatagacagacggtcattggagtcagtgctctctagaaaactaaatccgtctcagaatgctgcaggcaccagccgttcagaatctcctgtatgttctagtagagacgctgtatcttctcctcagaaacggcttttggattcagagtttattgatcctttaatgaataaaaaagcccgaatatctcacctgacgaacagagtaccaccaacactaaatggtcatttgaatcccaccagtgaaaaatctgctgcaggcctcccgctgccccctgcggctgctgccatccctacccctccaccgctgccttcaacctatctgcccatctcacatcctcctcagattgtaaattctaactccaactcccctagcactccagaaggccgggggactcaagacctacctgttgacagttttagtcaaaacgatagtatctatgaggaccagcaagacaaatatacctctaggacttctctggaaaccttaccccctggttccgttctactaaagtgtccaaagcctatggaagaaaaccattcaatgtctcacaaaaagtccaaaaagaagtctaaaaaacataaggaaaaggaccaaataaaaaagcacgacattgagactattgaggaaaaggaggaagatcttaagagagaagaggaaattgccaagctaaataactccagtccaaattccagtggaggagttaaagaggattgcactgcctccatggaaccttcagcaattgaactcccagattatttgataaaatatatcgctatcgtctcctatgagcaacgccagaattataaggatgacttcaatgcagagtatgatgagtacagagctttgcatgccaggatggagactgtagctagaagatttatcaaactagatgcacaaagaaagcgcctttctccaggctcaaaagagtatcagaatgttcatgaagaagtcttacaagaatatcagaagataaagcagtctagtcccaattaccatgaagaaaaatacagatgtgaatatcttcataacaagctggctcacatcaaaaggctaataggtgaatttgaccaacagcaagcagagtcatggtcctagaactctgcttggaccagaagatgtgaataaacttaagcttatttatttaaaattccaaatgagttgctctagattctaaaaaggtgaaactttggctgttgaaagtttcagtattagtaaacttgagttactttttcttttccattttactttgcttccctgcatttcgaagctgctctttctggtcctccccaccaccccacccccaagacttgtgtttgttaatagaaataatttttttaggtattggggatccattgtctatatttcaaatcagttttttttcctcaaaaacttgtgtttgttattagaaatgattttttagatattggggatccagtgtccacacttaaaagttgtatgtgtttaaaaaacaacaacagtaatgtgcaaggtgaaatgcttttggataaacgtaagcctattttctgacgtttcttaatgcaaactctttgccttaaatggtagaatatttagaaatttgcacaaaattaaaaaaataaacattgtcttggagggttaaaaaatagaaaggtgtatgtgtatagattcacatacacatatgtatatacaggctgacttgatctagaacattaaatccgccctgcaagttaaccccccattgcaatggttgccttaaggtgtttgctagttgtgtacatagtgtggttaatcattagctacactgcttcccacttgattagagcaatgggaagcatactgtggcctaccagcatctggaagtgtgtgctcgatctgtatgtgtgcagaggtggtgtggatgtgagcgtgcatgaaggaaaaaaagctgctactcctagtaggccaaacgctcaggttaaacaactgacgagtgttactgtagggtgtttttttgtttttttgttttttttcttctatcaaattgctacttttgttgtggaagacaaaagcatttccatttcaacgagtttgtcagctttattaatgttgggcaaaaattgatatgtcatgaaaatgaaacagatctatagttttgggacaaaattataaaatgaaatgtgtaggtaacctatttatatactgctataaagtattttttgaagagagatatgcaaagaagctattacctacataagaggtatatttaaagattttttttttcatcctggtgccaggaatataaaaaagagtggatatatttaaccataacatactgtgattcatcaaacagcacaaactttcatttcatggagtttatctgttgacattgatttaaactgtcacttgttttatcatgtgggaacataagttatgtggtcaaaaatataaggattttgaattaatgttgattcaagttgtattgtcttattgtattgtcttttcaaagtgctgccagttgaaaagggaagcattatgtttacaaatctgttttgaaatgtttgccaaaattttggtagtgtctttaataaagatgtttgtctccagcatccagaaaaataaatgaataactttgttgtgtatcactgtaaaccagaaaaatgttggttatctagaaaacttgagagagcatgtagattaacttttctctttggagttctaaaacattaactggaaagattagataatatactaaatgtatacagaagtatacagactatacaaagactgaaacaagtcccttttgcactacaactctataacattaccgcagaaattttggttctatgtagcatggacctcctaaggaattctgtttcttttagcattgagatccctggtgctctttttttacctcagaattggtacaatcattattaaacgttaatttatttcaaactttttaattgaaaaaaggaaagggaaacttaattggggataaattcaggcatcatattattatgatagagtctcctgagtggttcgtctataggtaatgaactcattggtgttatttcttggacatcttggccttttaatcaaagactgtgtgctgctatttgctatgagcaaggtttctcaaaagcaaaaggtgcttggaccatttggatcacctgagttagaatctctaggtatagggcccaagtatctgcattttcacaggtttcttgtaggtgactttctgcaagctaaagtatgagaaccattggcttggatgtagttctaaacttttaggtctgtaaatcttgaaatcttgaactgaaggtcaactattggcttttttttttttttaatgtccatcatgtcagcaggtgcaaatcacttttcccctttgcatgatctgaggcacctcctcagttgtttcactgccaactcttgtttcagaacctgtttacaaacaagccttccagttggtgaatggttagccattggagctcctaccctgtacatcagcacatcttctggtttacaagttgggtaacaatgaaagctggagatgctaaatggaaatccagcattgcatacccttagacctgatcacataccagtaaaagccttaatttagatgttagttgtatgtgttggacagatccttgcaaaagtgtgtctgtctattagttgtaaatttgaaaattataaatctctgaatctgctactatccaagtttcatcccttttgaagatgaggcatgagcctattaaaatatttataatcatttttcgtcccctactgcaagacttttagattcttacaaatgattactacaggaatagtggccacttaatgtcagttactccggtggaagaatttatctagttttttttcttttcttttttggaaggatggtgtgaaaaatagcaagattagagaatgagttgtatagttttttctatcacatttcatctaaaatgatttgaaggacttttgaagatttttaccaacatccttaaatcaactccaggttggatgaacaactgatttaaaacaaactaagagaacattaactagatgtgggctttttaaaatatataggtattgcatttcctaccttgttatttattccactttgaatactttagagggcttaactttcaactctttaaggtagtaatggatagttttatacttgttctcacaaaattgttatggtcagtttatatcattgctccatgcattgattataaaaattcagtattaattttttctgatcttataagctttataggagttttcttttctcttataaagtgtttcaccttatgtaaaacaaatgcctgcttgcatattggaagatgttgaaattagttttagacaaaagtggtccatcaattcagacactctgcttggatgccttacccttttcattagtgcattctttgcttctgaaacttggcagaaactcgttagccagtccactgcctttctgacaatgtgtggagtcacgtatgcttggtatatgcctttactacttttaaagttctacagtttattacttgcccaagtgttactaaatccttttcttatgtgtactggatggagaaaaaattatagccagcactttgagaggaaagttttcagaaacaatattaactggcactactaactgaaggccacaggagatgctatcaatgttatttgtaatctgaagattgaacaaggctgtgaggctcatttcaaactattttgaggtgttaaaatatatatatgctgtttctcagctgttccactcaaaccgtgttaggactctcaaaggtaaaatgtcacaggggcttttcagttgttacagagctcagcagctgtggttgcccctgttctacaccaatttcagttcaataaaaatgttaactttgcaattct

SEQ ID NO: 2733 - protein, 640 aa, Homosapiens
MAAGGTGGLREEQRYGLSCGRLGQDNITVLHVKLTETAIRALETYQSHKNLIPFRPSIQFQGLHGLVKIPKNDPLNEVHNFNFYLSNVGKDNPQGSFDCIQQTFSSSGASQLNCLGFIQDKITVCATNDSYQMTRERMTQAEEESRNRSTKVIKPGGPYVGKRVQIRKAPQAVSDTVPERKRSTPMNPANTIRKTHSSSTISQRPYRDRVIHLLALKAYKKPELLARLQKDGVNQKDKNSLGAILQQVANLNSKDLSYTLKDYVFKELQRDWPGYSEIDRRSLESVLSRKLNPSQNAAGTSRSESPVCSSRDAVSSPQKRLLDSEFIDPLMNKKARISHLTNRVPPTLNGHLNPTSEKSAAGLPLPPAAAAIPTPPPLPSTYLPISHPPQIVNSNSNSPSTPEGRGTQDLPVDSFSQNDSIYEDQQDKYTSRTSLETLPPGSVLLKCPKPMEENHSMSHKKSKKKSKKHKEKDQIKKHDIETIEEKEEDLKREEEIAKLNNSSPNSSGGVKEDCTASMEPSAIELPDYLIKYIAIVSYEQRQNYKDDFNAEYDEYRALHARMETVARRFIKLDAQRKRLSPGSKEYQNVHEEVLQEYQKIKQSSPNYHEEKYRCEYLHNKLAHIKRLIGEFDQQQAESWS

SEQ ID NO: 2734 - DNA, 1978 bp, Homosapiens
cacataataatacaaagtgtaaagatagattgatttttatttaagttctgccctcaaattaatttttagaggagataagagtaaaatctgatcatttcaatttagtaatggttataatgttttcttgttgtgacaacaagttgctaaatgctgagctggggacatttttgtaactggttatcacagaaattataacttggacacataattctagcttttttgcagaataaaaggcctctgtaagaagaaaataattaagttgcaagagcctggaaaaatggagagggaaagagcaaacaaatctgactttggatagctttgaaaatgaacaaatgtgcaaaatagctagaatgtaaaagggaaaatggaatctgggctgtctgaacactttttttctattagtagcatctcatggtggacaatgttaaactatgctgtttagcccttttcatttccagagtaaagatcattttagatttaaaatgtgttacttctgcttaacagtagtgtgaaagctatacttattggggaatgatacagtatgaaaccataatgctggttatcatctcttaactaacaggaacttgagaaaccttgctgagtaccctctcatctgaggtagtgtatggttttagagttctctaggagggccttgaaaggcagctatcacctaccacttagttggcccaggaagggtcagttgtctgcagccacctgggcgacagagcaagacaccatctcaaaaaaataataaaaaacctaaattatcaacctttgaataattcatacttaacgaaaatatttctaatttttatgtaataagaatacttttacttgtagttaagctatcaaaactgtttaaaattttttccatcaccacataaacagccaactgtagaactacaacaatttttcgtaaaagtaggacaacttttttcttaaaaatgccagtgtaaccaaataatctcttctataatagcaacacagttgttgaccacacaactgtggtcattgaataatttccctaaggaaattattaaataaaatactgaaggtatgcttttgagaaagcacgataaatatataacaaattaagtctaagttttaagatcggtttagctgtgttgctaatatatgcttatccccaggaacctctttttaccccggggctccctctggtgtacagtcaatacagcccatgcctaggaaggactgcttcactgcttggctggcagtgtaccttttatagctaagacaccaggagggcagctttacatcagcagactatcactgtctcaattatacttagaaaattaaacctctacactgtctaattcagcatgaataaaaatattaatgaggacactaagtttgctcactgcatcacttttctcacattttctgctaggcgtctgtgatattagtaatttaaacaaactgatgggcttatataagaccatttggagaggactgaactccaagattttatggcagtgaagaatatatgtgtacccccaaggggcatcctgaatctcctgccacctgcctgaaattgctttgaaatctcaatttttatttcaaaaactcaagggaagtttgcattaatgataggaacacagagtgcaaagaaccaggccagttccttatgtgatcccagttcccagatctacaaataagtaatactgtaatatgtaataggccaggcgcagtggctcacgcctataatcctagcactttgggaggccaaggcgggtggatcacttggggccaggggttcgagaccagactgggcaacatgacgaaaccctgtctctactaaaaatacaaaaattagccgggcatggtggcatgtacctgtaatctcagctactcaggaggctgaggcacgagaatcggttgagcccaggaggtagaggttgcagtgagctgagatcgcgccactgccctctggcctgggcgacagagcaagactccgtct

SEQ ID NO: 2735 - protein, 41 aa, Homosapiens
MVLEFSRRALKGSYHLPLSWPRKGQLSAATWATEQDTISKK

SEQ ID NO: 2736 - DNA, 1562 bp, Homosapiens
aactagcagtccctttggggccaattgatgtaattattttcagtgtaaatcctaaaggttgcctgttttaggttaggagatgatagtaaaaatacctaatgctctgtttttatacctcatactaggtagccaatctgaattctaaggacctctcatataccttaaaggattatgtttttaaagagcttcaaagagactggcctggatacagtgaaatagacagacggtcattggagtcagtgctctctagaaaactaaatccgtctcagaatgctgcaggcaccagccgttcagaatctcctgtatgttctagtagagacgctgtatcttctcctcaggtatgtcataaacatagaattatagacctgacatagatattaggggcctctaatcaggtcctctgatgtataagtgaaggaaatgagacccggagaagctggacagcttgcctgcccaaagccatctggttatggctgagcttagcctagaatttaggtcttggcttccagcccagaactttctccactacacagcactgcttgtcagagtacttaatgtctaccttgctttccatttttaaagtttacattttgttgtaagattatctactttccaatttggtcactaactagaagacttacccagtcccaaacaattatcagattatatggaaaattgaagatacttaattttgtctgtcaacatgttccagaagaatattttttggggaaaatggatttacaatcaacaaataaacaaaaatgatggcatgtttccatgttttctttttaattggatccttatcagagtactcccaatcagattcttctccagtttagagttttcccccaagagattcagctcatccaagaaaaaggtgagaaggtcctaggcagtactagagtgaagcctgcctgattctcagctgattggccaaactcagaactctctcggtgttctgggtgcttttgacagacagtgggacgcacctccccaccccagtactgctgacacagtgtcttccctctctctctctggaccttactcccaagaattagtgagaagcccacagatgtgtggagaacactaagcataccctgggcaaacagccattcgcacatcagaaaatattagaaacttattgtgaggaacagagggggaacaaaaaagaaaaaggaaaaaaagcaggtctgtccttgcatatatacaatgtctgtggaagtctcacttttaatgccaactattatgaaactacttctactctgatcaaattatatactaggtgccaaataaatggtgttaaattgaaaacaaaataatgagttgattaaccattattttctttcaagccagaatacaagctacagcattacatttaagcataaatgtgaatttatattttatagttttcaactatctaaatttcctttttaacttaaatactattattgttgttgacagattaggctactattaccatgattttttttaaagtacttccacctaattttaatggaccaattattaagacttatcttccaatctggtaaagagatatgtaa

SEQ ID NO: 2737 - protein, 62 aa, Homosapiens
MFQKNIFWGKWIYNQQINKNDGMFPCFLFNWILIRVLPIRFFSSLEFSPKRFSSSKKKVRRS

SEQ ID NO: 2738 - DNA, 418 bp, Homosapiens
gggggttgaccttttcctctcaggaactgtatctgaaacagcttgaggtgctttccgaatttgcactcttttccctaaagtccagtggaaatgacattgttacacatttgtgggttacaatatgagcacctcagtttccacaattctgatttaggtacctcttcatttctagaggaaataataataaataatatgtataatgcatgtattttggtcattttgctacagaaagataataactagtaacacaaactgtaacaacagacttgataacttatatcttaaataaatatatgccatttctgaaaagcaaactataatacagtgaacatggtgaaatgtcagaaatacctgtcagacctctctaagaacacactcttggctgagcattacgttagtaatttcacacgttcagaag

SEQ ID NO: 2739 - protein, 50 aa, Homosapiens
MTLLHICGLQYEHLSFHNSDLGTSSFLEEIIINNMYNACILVILLQKDNN

SEQ ID NO: 2740 - DNA, 569 bp, Homosapiens
aatcatctctccattcaggaactcagcacagctgctaccatgaggagactgcgaggctccacattttcattttgcgctgggcctcacaagtgatgtagccagtgctacagaggccattgggaatcaaaagatgaactttcaggctgtatttggcagatgcatgggcccagtggtgaactctaatgggtaccaaaagcagcattcactagaagatggcctccaggaacccttcagcaacaaaagatcaaagtgccttcaggcttcccaataactgcctacaacagtgaatggccttttctgccattcccaatgagtaagctttaaaaaaaaacagaagatctggcaacattgggccaccttatgttcacctggcaacaatcagctgaaccaagaaatcactgagccctttaaacctcccagctcactaccgtccagcatcttcagtccctatgacattgtatctgccctctttcactcatttggatatccagtggtccctgaaggcatctgaattggtgacctctgtaccaaagatgtgagaaacagtcattaaatatgcagcaacctgg

SEQ ID NO: 2741 - protein, 46 aa, Homosapiens
MNFQAVFGRCMGPVVNSNGYQKQHSLEDGLQEPFSNKRSKCLQASQ

SEQ ID NO: 2742 - DNA, 704 bp, Homosapiens
agaatatcagagttttgccagaaacccttgagtctggagtggtacggctggagtccagattgcagtctgtggaggagtggacaggagaccaagaaattctcgagttctcttcagagaccaactggggatcaacaattcaatttaattctgacacccaaggaagaagagagtgcacctgatgtagtagccactgtaagaactgtgttggagaatgatccgattggccagtgcaagagggattgcagagaagaagaaaccacaagcagaaaaaccagatgaggaaattaagctaaatattaactatctcaagaatattcccagaagtgactgctaaatttaaatccctgctcacaatgaaatactgtacagcaggggttctcaaactttttggtcttaggacccttacagccttaaaaattattgagaactccaaagaactttcaattatgtgggtcataactactgatacttactgtattataacttgaaactgaaaaaatttttaaatatttataaacatttaaaaataataaacccattgtaagctaatgtaaatagcatgtttttattaaaaatcactttgttttccaaagcaaaaaatgtagtgagaagagaggccttcttttacattttaatatctggcttatgagaaaatagctgagtttctcatttctgcttctccatttaatctgttggtgtatatt

SEQ ID NO: 2743 - protein, 44 aa, Homosapiens
MKYCTAGVLKLFGLRTLTALKIIENSKELSIMWVITTDTYCIIT

SEQ ID NO: 2744 - DNA, 3850 bp, Homosapiens
gggtggcagcctaggagcggacgcgttgccgccgccgctgctcctcctcctcctcctgcagctcctccagctgccgctgctgccgccgctgccgccaccgccgccgccgggagaagtttcactcccgacccttgctcggagccccggcccagagctgagcgggagcccggcaggcagctgcagcccgcggcagtcgaggcgtccgcggcgcttcgacctccagccggtgtcggcgcctaggcggccggctgcggccgcggctgggggcgcaaaggcggaggaggggcgggtgtgagccggggaaaccgcgtgccgcgccgcgacagcccagcgagcgtccgcgcccgggacagccgcgatggctgtgcgctctcgccgcccgtggatgagcgtggcattagggctggtgctgggcttcaccgccgcgtcctggctcatcgcccccagggtggcggagctgagcgagaggaagagacgtggctccagcctctgctcctactacggtcgctctgctgctggcccccgcgccggcgctcagcagccgctcccccagccccagtcccgaccacggcaggagcagtcgccgccccccgcgcgccaggatctccaggggccaccgctgcccgaggcagcacccgggatcaccagttttcgaagcagcccctggcagcagccacctccgctgcagcagcggcggcgaggacgcgagcctgagggcgcgacggggcttcccggtgctccagcggccgagggggagcccgaggaggaggacgggggcgcggctgggcagcggagagacggccggccggggagtagccacaacggcagcggggacgggggcgctgccgccccgagcgcccgaccccgggacttcctgtacgtgggggtgatgaccgcgcagaagtacctgggcagccgcgcgctggccgcgcagcggacctgggcgcgtttcatcccgggccgcgtggagttcttttccagccagcagccccccaacgccggccagcccccgccacccctgcctgtcatcgcgctaccgggtgtggacgactcctatcctccccagaaaaagtccttcatgatgatcaagtacatgcacgaccactacctggacaagtatgagtggttcatgcgcgccgacgacgatgtctacatcaaaggtgataaattagaagagtttcttagatcgctaaacagcagtaagcctctctacctgggacagactggcctggggaatattgaagagcttggaaagctgggactggagcctggggaaaacttctgtatgggaggacctggcatgatctttagccgagaagttctcaggaggatggtgccacatattggtgaatgccttagagaaatgtacacgactcatgaggatgtggaagtaggaagatgcgttcgccgttttggtgggactcagtgtgtctggtcttacgagatgcaacaactgttccatgaaaattatgaacacaatcggaagggttacatccaagaccttcacaatagcaaaatccatgcagccataacacttcatcccaacaaaaggcctgcataccaatacaggctgcataattacatgctcagccgcaaaatttctgaacttcgctaccgcaccatccagctccacagggaaagtgccctgatgagcaagctcagtaacacagaagtgagcaaagaggaccagcagctgggagtgataccttctttcaaccacttccagcctcgggagagaaatgaagtgatagaatgggagttcctgacagggaagcttctatactcagcagctgagaaccagccccctcgacagagcctcagtagcattttaagaacagcactggatgataccgtcctacaggtgatggagatgatcaatgagaatgccaagagcagaggacggctcattgacttcaaggaaattcagtatggctaccgcagagttaaccccatgcacggggtggagtacattttggatttactccttttatacaaaagacacaagggaaggaaactgactgtgccagtgagacgtcatgcctatcttcagcagttgttcagcaagcctttcttcagagagaccgaagagctagatgtcaacagtcttgtggagagtattaacagtgaaactcagtcattctcctttatatctaattctttaaagatattatcttcttttcaaggtgccaaagaaatgggagggcacaatgaaaagaaagtacacattctcgttcctctcatcggaaggtatgacattttcttgagattcatggagaactttgaaaacatgtgtcttatcccaaagcagaatgtaaagttggtcattatccttttcagtagggattctggccaagactccagcaagcatattgagctgataaaagggtaccagaacaagtaccccaaagcagaaatgaccctgatcccaatgaagggagagttttccagaggtcttggtcttgaaatggcttctgcccagtttgacaatgacactttgctgctattttgtgatgttgacttgatcttcagagaagattttctccaacgatgtagagacaatacaattcagggacaacaggtgtactatcccatcatctttagccagtatgacccaaaggtaacaaacgggggaaatcctcccactgatgattacttcatattctcaaaaaagactggattttggagagactatggatatggcatcacctgtatttacaaaagtgatcttctaggtgcaggtggatttgatacctcaatacaaggctggggactagaagatgtagatctctacaataaagtcattctatctggcttaaggccattcagaagccaagaagtaggagtggtgcatattttccatccagttcattgtgatcctaacttggaccctaagcagtataagatgtgcttaggatccaaggcaagtactttcgcctcaaccatgcaactggctgaactctggcttgaaaaacatttaggtgtcaggtacaatcgaactctctcctgacagtccaggcaacacattttgccttttttaaggggagtttacctcattgttggttgttgttatttttattgtattattgttattttattattattattgttataattttattttgttgtcctggtcttaaactactcttggttgtcttcctaagggtgtttgttgacctcaagcaagaagagtctgcagttcactgatgtttcagatttctactgaagtcaatatgttattacttttatataactttatttgagattgagttaaatcatagcaatcaaatgacttttgaaacgcattcatcacaagagacagcttagaagaatgttctcttggggcttaaagatgcaatatcgacttttatttggtttctcaaattcaatgtgatacaaatatttactggtgaaaggtaccacaaaagtgctttatgcttcctatggggaagggactctgtaacataaacttgagttttgtaatttatacaaggacttaaatatataaacaataattttcttcatctttagaatttttaaagtaaatgaatacctatgattgtatgtttattttttaaaaaaagttttaaaaattgaggagttttgttccacaagcaaccggtactggctaccctggtcttatgacaattatgagctcctcacaactgtctgctataaatgcgaatgaactttattttctcaaggaaatatgatttaattaaatattcatgtacattttagaagctttatgaaacaatgtccttcatttgctggcaagaagataaaatatgacagaacctgtttatttaaaataaaacacaggtatagcagtattctttttcaaaaacactga

SEQ ID NO: 2745 - protein, 882 aa, Homosapiens; identical to SEQ ID NO: 355

SEQ ID NO: 2746 - DNA, 1148 bp, Homosapiens
actgcattccccaggagacaagaaaggaggatagaaaaacgacttaggaatctccttggagctcaagaccaggaacttccccaagccggaggtccctgaggcgctctagcgcgctggccgcactcgcagcccaggtcgccagtgcgcacgcgcaagattaggtggggcgccagagccggggcacctgcgcaggcttggctgcgccctctcgcgccgcacgctctgcgggttcctcccttcttccgagcctctcctctggccgccgcgcgggagagaggccgagatggcagatgagattgccaaggctcaggtcgctcggcctggtggcgacacgatctttgggaagatcatccgcaaggaaataccagccaaaatcatttttgaggatgaccggtgccttgctttccatgacatttcccctcaagcaccaacacattttctggtgatacccaagaaacatatatcccagatttctgtggcagaagatgatgatgaaagtcttcttggacacttaatgattgttggcaagaaatgtgctgctgatctgggcctgaataagggttatcgaatggtggtgaatgaaggttcagatggtggacagtctgtctatcacgttcatctccatgttcttggaggtcggcaaatgcattggcctcctggttaagcacgttttggggataattttctcttctttaggcaatgattaagttaggcaatttccagtatgttaagtaacacacttatttttgcctgtgtatggagagattcaagaaataattttaaaaccgcatacataataaaagacattgttgcatggcttatagtctctctgagtgttgcgtttgatttgttattttaaaaacatatttgttggaatatgtgaaggtgggtttataattttggatgtttcttgctttttcttcccaaggaggactcaacatatgaacatcgcattgttttaatggtgttactagtctttgaagacaaataatgagagtttataaatttagctttaacttcgaaatatctttccaggctaaaataggtccaacttagatttttaagctaattctcacattttctaagaacataggaaattgaccattttgggtttagaaacagtgctttatgttcagcccacattgccc

SEQ ID NO: 2747 - protein, 126 aa, Homosapiens; identical to SEQ ID NO: 357

SEQ ID NO: 2748 - DNA, 756 bp, Homosapiens
ttcaaagattagagcgagtacttaatggtaaaataccgtcttatatgcaataacattaaaccctcagaatacatttttttcttttttttttttttttgagacggagtttcgttcttgttgcccaggtgcactccagtctgagtgacagagcaagaccccatctcttaaaaaaaaaagtttaattgaacagcagattttatttctaatttgtttcttgaaattagtaatgataaatacctaatcttaatgagtctccagttgtagattatgctctgttgggattaagagtttccaaatatttgctcaaagggttgtgtttcaatgagagttttaagatttgatatttcagcttgacagtttgttatttaatggcaagaagtaataaattgcctgtgcctaagaaactttttttccttttccagcttcttggacacttaatgattgttggcaagaaatgtgctgctgatctgggcctgaataagggttatcgaatggtggtgaatgaaggttcagatggtggacagtctgtctatcacgttcatctccatgttcttggaggtcggcaaatgcattggcctcctggttaagcacgttttggggataattttctcttctttaggcaatgattaagttaggcaatttccagtatgttaagtaacacacttatttttgcctgtgtatggagagattcaagaaataattttaaaaccgcatacataataaaagacattgttgcatggcttatagtctctctga

SEQ ID NO: 2749 - protein, 72 aa, Homosapiens [sequence omitted]

SEQ ID NO: 2750 - DNA, 2048 bp, Homosapiens
cgcgccgcacgctctgcgggttcctcccttcttccgagcctctcctctggccgccgcgcgggagagaggccgagatggcagatgagattgccaaggctcaggtcgctcggcctggtggcgacacgatctttgggaagatcatccgcaaggaaataccagccaaaatcatttttgaggatgaccgggtaggtactgggcaccacctctctcgcctgctgagtgccttgctttccatgacatttcccctcaagcaccaacacattttctggtgatacccaagaaacatatatcccagatttctgtggcagaagatgatgatgaaagtgtcattactaaggaaaaaccagaaaaaccattaggacttcaactgcccagctgttttccaaagttactgcatcattttgtatcccaccagcaatgaatgagcgttccagcttctccttgggcaaaatcatctaatacagagcctattctgtaacagagtgttgaatatctcatgtaagagtattttactgcatatcaccagtctggaaaaggatcagaattcgaagtatggtttctcctgaatgcatatcgccacaccattgtaaagttgaaaaatcataatttccccaacttacaatttttgtccattgtccatctgtacaatggaccttactgcatgagtaaggtaagcagagtccactgtcctggggcttaataaggtaatgggaatagaaatgtaagactctctcccttccctcttttcttgccaaaggaattaaaggagttccctttcctgagagctttttagaatgttgaagttaaccctcccaacttttttctctcataatgggaaagcataagcagtgaaatgggagttaaagttcttttctcttggcaaccttctcccctttaacttttattagggaagaaagctggcaacatacaaatagactccatgtgtaaatagagacaaattgactgtagatagaaccaaaaaacaaacaggatgacacagagcgagactaggtatttgccacaggatcctgcaagtcccgacaatgcaatagatctggtagtgttcaaaggaaaatccataatggtcataaggaagtcataaagaaagcaagatgtcttgctttattaagaaaacttaaaacagcacttggaatataattaagttttttttttggttgggcatagtgccttgtgcctgtaatcccagcactttggaagttaaggtgggcagattgcccaagcgcaggagttcgagaccagcctggacaacattggagaagccccatctcaacaaaaaaatacaaaaattagccgggtgtggtggcatgtgcttgtagtcccagctccttgggtgggtgaggcaggaggatcacttcaacctgggaggtcgaggctgcagtgagctgagatcgtgccactgcactccagtctgagtgacagagcaagaccccatctcttaaaaaaaaaagtttaattgaacagcagattttatttctaatttgtttcttgaaattagtaatgataaatacctaatcttaatgagtctccagttgtagattatgctctgttgggattaagagtttccaaatatttgctcaaagggttgtgtttcaatgagagttttaagatttgatatttcagcttgacagtttgttatttaatggcaagaagtaataaattgcctgtgcctaagaaactttttttccttttccagcttcttggacacttaatgattgttggcaagaaatgtgctgctgatctgggcctgaataagggttatcgaatggtggtgaatgaaggttcagatggtggacagtctgtctatcacgttcatctccatgttcttggaggtcggcaaatgcattggcctcctggttaagcacgttttggggataattttctcttctttaggcaatgattaagttaggcaatttccagtatgttaagtaacacacttatttttgcctgtgtatggagagattcaagaaataattttaaaaccgcatacataataaaagacattgttgcatggcttatagtctctctga

SEQ ID NO: 2751 - protein, 65 aa, Homosapiens
MADEIAKAQVARPGGDTIFGKIIRKEIPAKIIFEDDRVGTGHHLSRLLSALLSMTFPLKHQHIFW

SEQ ID NO: 2752 - DNA, 713 bp, Homosapiens
gattaggtggggcgccagagccggggcacctgcgcaggcttggctgcgccctctcgcgccgcacgctctgcgggttcctcccttcttccgagcctctcctctggccgccgcgcgggagagaggccgagatggcagatgagattgccaaggctcaggtcgctcggcctggtggcgacacgatctttgggaagatcatccgcaaggaaataccagccaaaatcatttttgaggatgaccgggtaggtactgggcaccacctctctcgcctgctgagtgccttgctttccatgacatttcccctcaagcaccaacacattttctggtgatacccaagaaacatatatcccagatttctgtggcagaagatgatgatgaaagtcttcttggacacttaatgattgttggcaagaaatgtgctgctgatctgggcctgaataagggttatcgaatggtggtgaatgaaggttcagatggtggacagtctgtctatcacgttcatctccatgttcttggaggtcggcaaatgcattggcctcctggttaagcacgttttggggataattttctcttctttaggcaatgattaagttaggcaatttccagtatgttaagtaacacacttatttttgcctgtgtatggagagattcaagaaataattttaaaaccgcatacataataaaagacattgttgcatggcttatagtctctctga

SEQ ID NO: 2753 - protein, 65 aa, Homosapiens; identical to SEQ ID NO: 2751

SEQ ID NO: 2754 - DNA, 873 bp, Homosapiens
gcgcaagattaggtggggcgccagagccggggcacctgcgcaggcttggctgcgccctctcgcgccgcacgctctgcgggttcctcccttcttccgagcctctcctctggccgccgcgcgggagagaggccgagatggcagatgagattgccaaggctcaggtcgctcggcctggtggcgacacgatctttgggaagatcatccgcaaggaaataccagccaaaatcatttttgaggatgaccggtgccttgctttccatgacatttcccctcaagcaccaacacattttctggtgatacccaagaaacatatatcccagatttctgtggcagaagatgatgatgaaagtagtgttgaatatctcatgtaagagtattttactgcatatcaccagtctggaaaaggatcagaattcgaagtatggtttctcctgaatgcatatcgccacaccattgtaaagttgaaaaatcataatttccccaacttacaatttttgtccattgtccatctgtacaatggaccttactgcatgagtaagcttcttggacacttaatgattgttggcaagaaatgtgctgctgatctgggcctgaataagggttatcgaatggtggtgaatgaaggttcagatggtggacagtctgtctatcacgttcatctccatgttcttggaggtcggcaaatgcattggcctcctggttaagcacgttttggggataattttctcttctttaggcaatgattaagttaggcaatttccagtatgttaagtaacacacttatttttgcctgtgtatggagagattcaagaaataattttaaaaccgcatacataataaaagacattgttgcatggcttatagtctctctga

SEQ ID NO: 2755 - protein, 78 aa, Homosapiens
MADEIAKAQVARPGGDTIFGKIIRKEIPAKIIFEDDRCLAFHDISPQAPTHFLVIPKKHISQISVAEDDDESSVEYLM

SEQ ID NO: 2756 - DNA, 1029 bp, Homosapiens
gcgcaagattaggtggggcgccagagccggggcacctgcgcaggcttggctgcgccctctcgcgccgcacgctctgcgggttcctcccttcttccgagcctctcctctggccgccgcgcgggagagaggccgagatggcagatgagattgccaaggctcaggtcgctcggcctggtggcgacacgatctttgggaagatcatccgcaaggaaataccagccaaaatcatttttgaggatgaccggtgccttgctttccatgacatttcccctcaagcaccaacacattttctggtgatacccaagaaacatatatcccagatttctgtggcagaagatgatgatgaaagtgtcattactaaggaaaaaccagaaaaaccattaggacttcaactgcccagctgttttccaaagttactgcatcattttgtatcccaccagcaatgaatgagcgttccagcttctccttgggcaaaatcatctaatacagagcctattctgtaacagagtgttgaatatctcatgtaagagtattttactgcatatcaccagtctggaaaaggatcagaattcgaagtatggtttctcctgaatgcatatcgccacaccattgtaaagttgaaaaatcataatttccccaacttacaatttttgtccattgtccatctgtacaatggaccttactgcatgagtaagcttcttggacacttaatgattgttggcaagaaatgtgctgctgatctgggcctgaataagggttatcgaatggtggtgaatgaaggttcagatggtggacagtctgtctatcacgttcatctccatgttcttggaggtcggcaaatgcattggcctcctggttaagcacgttttggggataattttctcttctttaggcaatgattaagttaggcaatttccagtatgttaagtaacacacttatttttgcctgtgtatggagagattcaagaaataattttaaaaccgcatacataataaaagacattgttgcatggcttatagtctctctga

SEQ ID NO: 2757 - protein, 103 aa, Homosapiens
MADEIAKAQVARPGGDTIFGKIIRKEIPAKIIFEDDRCLAFHDISPQAPTHFLVIPKKHISQISVAEDDDESVITKEKPEKPLGLQLPSCFPKLLHHFVSHQQ

SEQ ID NO: 2758 - DNA, 991 bp, Homosapiens
gcgcaagattaggtggggcgccagagccggggcacctgcgcaggcttggctgcgccctctcgcgccgcacgctctgcgggttcctcccttcttccgagcctctcctctggccgccgcgcgggagagaggccgagatggcagatgagattgccaaggctcaggtcgctcggcctggtggcgacacgatctttgggaagatcatccgcaaggaaataccagccaaaatcatttttgaggatgaccggtgccttgctttccatgacatttcccctcaagcaccaacacattttctggtgatacccaagaaacatatatcccagatttctgtggcagaagatgatgatgaaagtgtcattactaaggaaaaaccagaaaaaccattaggacttcaactgcccagctgttttccaaagttactgcatcattttttgggcaaaatcatctaatacagagcctattctgtaacagagtgttgaatatctcatgtaagagtattttactgcatatcaccagtctggaaaaggatcagaattcgaagtatggtttctcctgaatgcatatcgccacaccattgtaaagttgaaaaatcataatttccccaacttacaatttttgtccattgtccatctgtacaatggaccttactgcatgagtaagcttcttggacacttaatgattgttggcaagaaatgtgctgctgatctgggcctgaataagggttatcgaatggtggtgaatgaaggttcagatggtggacagtctgtctatcacgttcatctccatgttcttggaggtcggcaaatgcattggcctcctggttaagcacgttttggggataattttctcttctttaggcaatgattaagttaggcaatttccagtatgttaagtaacacacttatttttgcctgtgtatggagagattcaagaaataattttaaaaccgcatacataataaaagacattgttgcatggcttatagtctctctga

SEQ ID NO: 2759 - protein, 103 aa, Homosapiens
MADEIAKAQVARPGGDTIFGKIIRKEIPAKIIFEDDRCLAFHDISPQAPTHFLVIPKKHISQISVAEDDDESVITKEKPEKPLGLQLPSCFPKLLHHFLGKII

SEQ ID NO: 2760 - DNA, 3550 bp, Homosapiens
gcgcaagattaggtggggcgccagagccggggcacctgcgcaggcttggctgcgccctctcgcgccgcacgctctgcgggttcctcccttcttccgagcctctcctctggccgccgcgcgggagagaggccgagatggcagatgagattgccaaggctcaggtcgctcggcctggtggcgacacgatctttgggaagatcatccgcaaggaaataccagccaaaatcatttttgaggatgaccggtgccttgctttccatgacatttcccctcaagcaccaacacattttctggtgatacccaagaaacatatatcccagatttctgtggcagaagatgatgatgaaagtgtcattactaaggaaaaaccagaaaaaccattaggacttcaactgcccagctgttttccaaagttactgcatcattttgtatcccaccagcaatgaatgagcgttccagcttctccgtatccttatcaacacttgctattaccttttttttttttttttgagacagagtcttgctctgtcgcccaggctgcagtgcagtggcactcggctcactgcaagctccacctccctggttcacaccattctcctgcctcagcctcccgagtagtgggacaacaggcgcccgccaccaaggctggctaattttttgtatttttagtagagacggctttcaccatgttagtcaggatagtttcgatttcctgacctcgtgatccgcccgcctcggcctcccaaagtgctgggattacacgcgtgagccaccgttcctggcctattatattcttaaagtaagctagagaaaaggttattaagaaaatcataaggaagagaaaatatatttactatttattaagtcgagtgaatcataaaggtcttcatccctgtcatcttcatgttgagtaggctgaggaagacgaggggttggtctagctgtagctgtctcaggggtggcagaggcagaagaaaatttgcatatgagtagacctgcacgggtcaaacccatgttgtgcaagggtcagttgtatttacttggggatacctttttaaagtgagacattatttctgaaacttagaaacttcaaggcattaatttttaattcaatatatttgtacaaatcacagagttcaaagattagagcgagtacttaatggtaaaataccgtcttatatgcaataacattaaaccctcagaatacatttttttcttttttttttttttttgagacggagtttcgttcttgttgcccaggctggagtgcaatggcacgatctcggctcaccgcaacctctgcctcctgggtacaagcgattcccctgccctcctgagtagctgggattacaggcatgccatcacgcctggcttatttgtatttttagtagagatggggtttctccatgttggtcaggttagtctcgaactcccaacctcacgtgatccacccgcctcagccttccaaagtgctgggattacaggtgtcagccaccacgcccagccccagaatacaaatttttaacatttagtataattagacagtcatggcattttaaggtcagagcttcttactcaaatgcagctcttttctgtaaggacaataaaatgttaatttttactcagttaacattctaaattagtgttttaaggtcatctcttttacttagaagacagttgttggccaggaaacgtttactgaaccagctttaaaaccgtgctaattcataattaaatgttgtgaccaatataggtatctgctgtacaaaattttatatagatgctcatcaacttaagatgggcttacatgctgataaacccatcataagttgaaaatattgtatgtctgttgaaaatgcgtgtaagacacctaacttactgaacattatagcctagcctagtctaacttaagcttgctcggaacacttaacgttaacctacagttgggcaaaatcatctaatacagagcctattctgtaacagagtgttgaatatctcatgtaagagtattttactgcatatcaccagtctggaaaaggatcagaattcgaagtatggtttctcctgaatgcatatcgccacaccattgtaaagttgaaaaatcataatttccccaacttacaatttttgtccattgtccatctgtacaatggaccttactgcatgagtaaggtaagcagagtccactgtcctggggcttaataaggtaatgggaatagaaatgtaagactctctcccttccctcttttcttgccaaaggaattaaaggagttccctttcctgagagctttttagaatgttgaagttaaccctcccaacttttttctctcataatgggaaagcataagcagtgaaatgggagttaaagttcttttctcttggcaaccttctcccctttaacttttattagggaagaaagctggcaacatacaaatagactccatgtgtaaatagagacaaattgactgtagatagaaccaaaaaacaaacaggatgacacagagcgagactaggtatttgccacaggatcctgcaagtcccgacaatgcaatagatctggtagtgttcaaaggaaaatccataatggtcataaggaagtcataaagaaagcaagatgtcttgctttattaagaaaacttaaaacagcacttggaatataattaagttttttttttggttgggcatagtgccttgtgcctgtaatcccagcactttggaagttaaggtgggcagattgcccaagcgcaggagttcgagaccagcctggacaacattggagaagccccatctcaacaaaaaaatacaaaaattagccgggtgtggtggcatgtgcttgtagtcccagctccttgggtgggtgaggcaggaggatcacttcaacctgggaggtcgaggctgcagtgagctgagatcgtgccactgcactccagtctgagtgacagagcaagaccccatctcttaaaaaaaaaagtttaattgaacagcagattttatttctaatttgtttcttgaaattagtaatgataaatacctaatcttaatgagtctccagttgtagattatgctctgttgggattaagagtttccaaatatttgctcaaagggttgtgtttcaatgagagttttaagatttgatatttcagcttgacagtttgttatttaatggcaagaagtaataaattgcctgtgcctaagaaactttttttccttttccagcttcttggacacttaatgattgttggcaagaaatgtgctgctgatctgggcctgaataagggttatcgaatggtggtgaatgaaggttcagatggtggacagtctgtctatcacgttcatctccatgttcttggaggtcggcaaatgcattggcctcctggttaagcacgttttggggataattttctcttctttaggcaatgattaagttaggcaatttccagtatgttaagtaacacacttatttttgcctgtgtatggagagattcaagaaataattttaaaaccgcatacataataaaagacattgttgcatggcttatagtctctctga

SEQ ID NO: 2761 - protein, 103 aa, Homosapiens; identical to SEQ ID NO: 2757

SEQ ID NO: 2762 - DNA, 675 bp, Homosapiens
gacagactggatgtgagatgtggcagagagagaagattcatagctaactctaagacttttgacctgagcagatgaaaggatgcagttaccatgaaggctgcagatgagccagtgacaactacagatcccaattggccatgctgatgttaaacgttaaaggatggctgccaatgagaattgtgcgccgggcaggaacgtgcatcatgcttgggcgtgagaaatgaatctgagaccagtgccttgctttccatgacatttcccctcaagcaccaacacattttctggtgatacccaagaaacatatatcccagatttctgtggcagaagatgatgatgaaagtcttcttggacacttaatgattgttggcaagaaatgtgctgctgatctgggcctgaataagggttatcgaatggtggtgaatgaaggttcagatggtggacagtctgtctatcacgttcatctccatgttcttggaggtcggcaaatgcattggcctcctggttaagcacgttttggggataattttctcttctttaggcaatgattaagttaggcaatttccagtatgttaagtaacacacttatttttgcctgtgtatggagagattcaagaaataattttaaaaccgcatacataataaaagacattgttgcatggcttatagtctctctga

SEQ ID NO: 2763 - protein, 49 aa, Homosapiens [sequence omitted]

SEQ ID NO: 2764 - DNA, 828 bp, Homosapiens
actgcattccccaggagacaagaaaggaggatagaaaaacgacttaggaatctccttggagctcaagaccaggaacttccccaagccggaggtccctgaggcgctctagcgcgctggccgcactcgcagcccaggtcgccagtgcgcacgcgcaagattaggtggggcgccagagccggggcacctgcgcaggcttggctgcgccctctcgcgccgcacgctctgcgggttcctcccttcttccgagcctctcctctggccgccgcgcgggagagaggccgagatggcagatgagattgccaaggctcaggtcgctcggcctggtggcgacacgatctttgggaagatcatccgcaaggaaataccagccaaaatcatttttgaggatgaccggtgccttgctttccatgacatttcccctcaagcaccaacacattttctggtgatacccaagaaacatatatcccagatttctgtggcagaagatgatgatgaaagtcttcttggacacttaatgattgttggcaagaaatgtgctgctgatctgggcctgaataagggttatcgaatggtggtgaatgaaggttcagatggtggacagtctgtctatcacgttcatctccatgttcttggaggtcggcaaatgcattggcctcctggttaagcacgttttggggataattttctcttctttaggcaatgattaagttaggcaatttccagtatgttaagtaacacacttatttttgcctgtgtatggagagattcaagaaataattttaaaaccgcatacataataaaagacattgttgcatggcttatagtctc

SEQ ID NO: 2765 - protein, 126 aa, Homosapiens; identical to SEQ ID NO: 357

SEQ ID NO: 2766 - DNA, 584 bp, Homosapiens
agattaggtggggcgccagagccggggcacctgcgcaggcttggctgcgccctctcgcgccgcacgctctgcgggttcctcccttcttccgagcctctcctctggccgccgcgcgggagagaggccgagatggcagatgagattgccaaggctcaggtcgctcggcctggtggcgacacgatctttgggaagatcatccgcaaggaaataccagccaaaatcatttttgaggatgaccggtgccttgctttccatgacatttcccctcaagcaccaacacattttctggtgatacccaagaaacatatatcccagatttctgtggcagaagatgatgatgaaagtgtaagtacatttctaacatgatttattttcttgctttttaaattgtgagattaattttgtccttaaagtgctgtcacattttcatcttcctaaggtcattactaaggaaaaaccagaaaaaccattaggacttcaactgcccagctgttttccaaagttactgcatcattttgtatcccaccagcaatgaatgagcgttccagcttctccgtatccttatcaacacttgctattacctt

SEQ ID NO: 2767 - protein, 78 aa, Homosapiens
MADEIAKAQVARPGGDTIFGKIIRKEIPAKIIFEDDRCLAFHDISPQAPTHFLVIPKKHISQISVAEDDDESVSTFLT

SEQ ID NO: 2768 - DNA, 2237 bp, Homosapiens
ctctgcggctcctcgcgattttaccagttcccatccgtttagcaaacgcctttagcaaacgcccgtttagcaaacgcctcctccgtcctttggaggagggcggggctaaaagggagatgctgcctagtgattcgttgtggcgcattagtaacgcgactacagggggctggaaacagttcagtctttgattggttgctgagaggcggggctactcgactgctctggaggtagcggccgcggtgaggagagccatgggacgggcagtcaaggttttacagctctttaaaacactgcacaggaccagacaacaagtttttaaaaatgatgccagagcattagaagcagccagaataaagataaatgaagaattcaaaaataataaaagtgaaacttcttctaagaaaatagaagagaactggtccctaggaaagaccttcttgtagaaaatgtgccatattgtgatgcaccaactcagaagcaatgagttttctagaatacaacaagtctttgtactttttaactttaaaatctacaactctggcaaaagtcctggaaatgcagacattttccctgaactggcatattgaaaatgaatgaattacagaatagcttcatatttaaatttcatgttaaaaggtcattactgagaactaaagaacataattaagtatttctaaaggaaattagataagaaaacatttcattttcattgaaaatcaaatttcataaagcaaagtaaatgcttagggagatatattcaatctttgaccttgatgagtatttgatcttaccatagctatttgagaatgtggtgcttttacaaattggtgagttttcctgccatgtgaaatgcaattattacatttaaattgttagattaaaatgatatttagtcctgaaaaatattaaattggtcaaaaaaatcacagtgtatgccagctctctacagaaagtggcctttgttttctaaagcactgggattatttctgtagctaatatataattgtacagtttctttttagagatagagagtatctctgtgttcttatgaagacattttttatcagttttctgaaaatagatgaataaaatattatagtcacctagggtcactatggaataaagaaatcctagtttaaagaggaaatagtggcccttgatcaaactatttaatatggccttagtagaattagctgtatttagacaaagttagactttagtgtgaaatgtaatcggtggctacattctcatcgttttaattaatgaaacttaaatggcttctcttcttccacatgtcctgtccttgacaagatgggcagtatcacaaaaggtcctggcattctaccatctaacactaggaactgtaaaatactgtttaatattcttcttgtttctcttttatctgtgtatctttgccattctattttctcagtgaatagtatgttttctcccattcactgataaattctctcatttgatgatgatacagggtttttaatttttgcaagattctcaatgcaagcattgttatgtatctagaaattatacctagagaaaaatgaaagtcgtttcaaatttgaaatttgcccttttaagagaatgctgaatgtcatcgcagtatataatcactatataaatgtgctgacttacagttattttagtgtctatatgacatattttgaggaaagttggctgacgttatttaaatttaatatatattctatattttagtgttattgaatattttatcactgagcttttttctttaacctgaattccctgttccatttttcattcatattaatttaaataactccagatttctttcttatagtcattattagtagcagatgagattaataattcacatgtttattaaagatagtggcttagaaattttaagatatattgatataggcccgggcgctgtggctcacacctgtaatcccgcactttgggaggctgaggcgggcagatcacaaggtcaggagttcgagaccagcctggccaatgtggtgaaaccccatctctactaaaaacacaaaaattagccaggtatggtggcgggcgcctgtagtcccagctactcgggaggctgaggcaggaaaatcacttgaacccgggaggtggaggttgcagtgaactgagattgtgccactgcactccagcctgggggacagagtgagactctgtctcaaaaaaaaaaaagaaaaaaaaaggaaaaaggaaaaaaaaaa

SEQ ID NO: 2769 - protein, 63 aa, Homosapiens
MGRAVKVLQLFKTLHRTRQQVFKNDARALEAARIKINEEFKNNKSETSSKKIEENWSLGKTFL

SEQ ID NO: 2770 - DNA, 2319 bp, Homosapiens
ctctgcggctcctcgcgattttaccagttcccatccgtttagcaaacgcctttagcaaacgcccgtttagcaaacgcctcctccgtcctttggaggagggcggggctaaaagggagatgctgcctagtgattcgttgtggcgcattagtaacgcgactacagggggctggaaacagttcagtctttgattggttgctgagaggcggggctactcgactgctctggaggtagcggccgcggtgaggagagccatgggacgggcagtcaaggttttacagctctttaaaacactgcacaggaccagacaacaagtttttaaaaatgatgccagagcattagaagcagccagaataaagataaatgaagaattcaaaaataataaaagtgaaacttcttctaagaaaatagaagagctaatgaaaataggttctgatgttgaattattactcagaacatctgttatacaaggtattcacacagaccacaatacactgaaactggtccctaggaaagaccttcttgtagaaaatgtgccatattgtgatgcaccaactcagaagcaatgagttttctagaatacaacaagtctttgtactttttaactttaaaatctacaactctggcaaaagtcctggaaatgcagacattttccctgaactggcatattgaaaatgaatgaattacagaatagcttcatatttaaatttcatgttaaaaggtcattactgagaactaaagaacataattaagtatttctaaaggaaattagataagaaaacatttcattttcattgaaaatcaaatttcataaagcaaagtaaatgcttagggagatatattcaatctttgaccttgatgagtatttgatcttaccatagctatttgagaatgtggtgcttttacaaattggtgagttttcctgccatgtgaaatgcaattattacatttaaattgttagattaaaatgatatttagtcctgaaaaatattaaattggtcaaaaaaatcacagtgtatgccagctctctacagaaagtggcctttgttttctaaagcactgggattatttctgtagctaatatataattgtacagtttctttttagagatagagagtatctctgtgttcttatgaagacattttttatcagttttctgaaaatagatgaataaaatattatagtcacctagggtcactatggaataaagaaatcctagtttaaagaggaaatagtggcccttgatcaaactatttaatatggccttagtagaattagctgtatttagacaaagttagactttagtgtgaaatgtaatcggtggctacattctcatcgttttaattaatgaaacttaaatggcttctcttcttccacatgtcctgtccttgacaagatgggcagtatcacaaaaggtcctggcattctaccatctaacactaggaactgtaaaatactgtttaatattcttcttgtttctcttttatctgtgtatctttgccattctattttctcagtgaatagtatgttttctcccattcactgataaattctctcatttgatgatgatacagggtttttaatttttgcaagattctcaatgcaagcattgttatgtatctagaaattatacctagagaaaaatgaaagtcgtttcaaatttgaaatttgcccttttaagagaatgctgaatgtcatcgcagtatataatcactatataaatgtgctgacttacagttattttagtgtctatatgacatattttgaggaaagttggctgacgttatttaaatttaatatatattctatattttagtgttattgaatattttatcactgagcttttttctttaacctgaattccctgttccatttttcattcatattaatttaaataactccagatttctttcttatagtcattattagtagcagatgagattaataattcacatgtttattaaagatagtggcttagaaattttaagatatattgatataggcccgggcgctgtggctcacacctgtaatcccgcactttgggaggctgaggcgggcagatcacaaggtcaggagttcgagaccagcctggccaatgtggtgaaaccccatctctactaaaaacacaaaaattagccaggtatggtggcgggcgcctgtagtcccagctactcgggaggctgaggcaggaaaatcacttgaacccgggaggtggaggttgcagtgaactgagattgtgccactgcactccagcctgggggacagagtgagactctgtctcaaaaaaaaaaaagaaaaaaaaaggaaaaaggaaaaaaaaaa

SEQ ID NO: 2771 - protein, 104 aa, Homosapiens
MGRAVKVLQLFKTLHRTRQQVFKNDARALEAARIKINEEFKNNKSETSSKKIEELMKIGSDVELLLRTSVIQGIHTDHNTLKLVPRKDLLVENVPYCDAPTQKQ

SEQ ID NO: 2772 - DNA, 2166 bp, Homosapiens
ctctgcggctcctcgcgattttaccagttcccatccgtttagcaaacgcctttagcaaacgcccgtttagcaaacgcctcctccgtcctttggaggagggcggggctaaaagggagatgctgcctagtgattcgttgtggcgcattagtaacgcgactacagggggctggaaacagttcagtctttgattggttgctgagaggcggggctactcgactgctctggaggtagcggccgcggtgaggagagccatgggacgggcagtcaaggttttacagctctttaaaacactgcacaggaccagacaacaagtttttaaaaatgatgccagagcattagaagaactggtccctaggaaagaccttcttgtagaaaatgtgccatattgtgatgcaccaactcagaagcaatgagttttctagaatacaacaagtctttgtactttttaactttaaaatctacaactctggcaaaagtcctggaaatgcagacattttccctgaactggcatattgaaaatgaatgaattacagaatagcttcatatttaaatttcatgttaaaaggtcattactgagaactaaagaacataattaagtatttctaaaggaaattagataagaaaacatttcattttcattgaaaatcaaatttcataaagcaaagtaaatgcttagggagatatattcaatctttgaccttgatgagtatttgatcttaccatagctatttgagaatgtggtgcttttacaaattggtgagttttcctgccatgtgaaatgcaattattacatttaaattgttagattaaaatgatatttagtcctgaaaaatattaaattggtcaaaaaaatcacagtgtatgccagctctctacagaaagtggcctttgttttctaaagcactgggattatttctgtagctaatatataattgtacagtttctttttagagatagagagtatctctgtgttcttatgaagacattttttatcagttttctgaaaatagatgaataaaatattatagtcacctagggtcactatggaataaagaaatcctagtttaaagaggaaatagtggcccttgatcaaactatttaatatggccttagtagaattagctgtatttagacaaagttagactttagtgtgaaatgtaatcggtggctacattctcatcgttttaattaatgaaacttaaatggcttctcttcttccacatgtcctgtccttgacaagatgggcagtatcacaaaaggtcctggcattctaccatctaacactaggaactgtaaaatactgtttaatattcttcttgtttctcttttatctgtgtatctttgccattctattttctcagtgaatagtatgttttctcccattcactgataaattctctcatttgatgatgatacagggtttttaatttttgcaagattctcaatgcaagcattgttatgtatctagaaattatacctagagaaaaatgaaagtcgtttcaaatttgaaatttgcccttttaagagaatgctgaatgtcatcgcagtatataatcactatataaatgtgctgacttacagttattttagtgtctatatgacatattttgaggaaagttggctgacgttatttaaatttaatatatattctatattttagtgttattgaatattttatcactgagcttttttctttaacctgaattccctgttccatttttcattcatattaatttaaataactccagatttctttcttatagtcattattagtagcagatgagattaataattcacatgtttattaaagatagtggcttagaaattttaagatatattgatataggcccgggcgctgtggctcacacctgtaatcccgcactttgggaggctgaggcgggcagatcacaaggtcaggagttcgagaccagcctggccaatgtggtgaaaccccatctctactaaaaacacaaaaattagccaggtatggtggcgggcgcctgtagtcccagctactcgggaggctgaggcaggaaaatcacttgaacccgggaggtggaggttgcagtgaactgagattgtgccactgcactccagcctgggggacagagtgagactctgtctcaaaaaaaaaaaagaaaaaaaaaggaaaaaggaaaaaaaaaa

SEQ ID NO: 2773 - protein, 53 aa, Homosapiens
MGRAVKVLQLFKTLHRTRQQVFKNDARALEELVPRKDLLVENVPYCDAPTQKQ

SEQ ID NO: 2774 - DNA, 3068 bp, Homosapiens
attctctcatttgatgatgatacagggtttttaatttttgcaagattctcaatgcaagcattgttatgtatctagaaattatacctagagaaaaatgaaagtcgtttcaaatttgaaatttgcccttttaagagaatgctgaatgtcatcgcagtatataatcactatataaatgtgctgacttacagttattttagtgtctatatgacatattttgaggaaagttggctgacgttatttaaatttaatatatattctatattttagtgttattgaatattttatcactgagcttttttctttaacctgaattccctgttccatttttcattcatattaatttaaataactccagatttctttcttatagtcattattagtagcagatgagattaataattcacatgtttattaaagatagtggcttagaaattttaagatatattgatataggcccgggcgctgtggctcacacctgtaatcccgcactttgggaggctgaggcgggcagatcacaaggtcaggagttcgagaccagcctggccaatgtggtgaaaccccatctctactaaaaacacaaaaattagccaggtatggtggcgggcgcctgtagtcccagctactcgggaggctgaggcaggaaaatcacttgaacccgggaggtggaggttgcagtgaactgagattgtgccactgcactccagcctgggggacagagtgagactctgtctcaaaaaaaaaaaagaaaaaaaaaggaaaaaggaaaaaaaaaagatatattgatacagataggtagatatgatattgtactttcatgccataagactacacaataaagttcctgaaagttcctgtgctgggattacaggtgtaagccactgcaccctgcctattcttataatcatatatttatatttcaaatggattttaactggttatttaatagtttaattagataaagtaattcatggctgggtgtggtggctcacgcctgtaatcccagcactttggcaggctgaggcaggtggattacctgaggtcggaagttcgagaccagcccaaccaacgtggagaaaccccatctctattaaaaatgcaaaattagcaggacatggtgatacacacctgtaatcccagctagtcaggaggctgaggcaggagaattacttgagccagggaagcagaggttgtggtgagctaagattgtgccactgcactccagcctgagagaacaagactccgtctcaaaaaaagaaaaaaagaaaacttttttacacatgggtatctcaccatgttgcccaggctggagtgcagtagctattcataggcacagtcatagcacactgcagcctagaatttctgacctcaagcaatcatcctgcctcagcctcctaagtagctaggactacaggtgcataccaccataaccagctttaattaaatgttttttatttggttattttttttaagttttctgtattcacacaaggggttgcccaaatataattttgctttgactattgagatctagtgaaagtggggtatatgaattctaattgcaaatatccaggctcagaggcccagcaggactttctaacacaatcttttagcggaagttagaaatggtatatagcaggagagtcagatttgagaagcatatgtagattcgaagctgggggaatatggcaggtagtttgtacaacatctaattcagaacattaaaattaagattttagtcaaactgtgtttaagttagttcttattttcctgtagatgcatctcacagcatcagtacaataccaaaaaagcacacaagaataagaatatgtggaatttctatacctattgacaaagcacataatttaaccataaacacaaagccataggtcaacaaagaaatgaagattccagttctgaaggtgagttttctgaagccaaagtggatacatgcaaaattaatatagttttactgtatatcagttgtcaccaatcagaaatggaaaacagatcctatttataattgcaaacaaaactgtaaaatagactttttaaagtctgggaatagacttctaaaataagctataacacttaaaaaggagagatatactatgttcctagataggacaattgaaaattctggagatgacagtttttcaaaaatctattgaggccaggtgcagtggcccatgcctgtagttccagtactttgggaggcctaggtgggtggatcacctgaggttgggagtttgagaccagcctgaccaacatggagaaaccccgtctctactaaaaatacaaaattagccaggcgtggtggtgcatgcctgtaatcccagctactcgggaggctgaggcgtgagaatcgcttgaacccggtaggcagatgttgcagtgagccgagatcgcaccattgcactccagcctaggcaacaagagcgaaactccatctcaaaaatagaaaaaacatttatcgaaatcccaacaagttgacaaatatatccacataaaaatataaaacttctgtattctgtgaaagctactataaataaagtttagagaaagttatttgccacctatgtcatgattgaaatagttaattgatcctgtgaatcagttagcaaaacataactcaatggaaagataggcaaatgatacaaataagaaattcacaaaagaagaaatactaagtctctagtgatgagagaaatgtaaattaaaatgaaacatgtttgttcatcaagttgtcacaagttagacaatcatatccaatatttttaaaggttgtaagactataaggaaatagccactgtcatatcatttttaaaggaatataaattatagggccttttgtttctttgggttttttttttttagagacaagatctctccgtgttgtctaggctggactcaaacttctggactcaagcaatcctcgcaacatcattaatagctgagagtagagacttgagccaccacacctgactatagggcctttttgaaaggaaaattgacatcatcaaaattttaaatatattcagtctatttctcaaaaactcaaagaatactaa

SEQ ID NO: 2775 - protein, 50 aa, Homosapiens
MILYFHAIRLHNKVPESSCAGITGVSHCTLPILIIIYLYFKWILTGYLIV

SEQ ID NO: 2776 - DNA, 881 bp, Homosapiens
ggtgcataccaccataaccagctttaattaaatgttttttatttggttattttttttaagttttctgtattcacacaaggggttgcccaaatataattttgctttgactattgagatctagtgaaagtggggtatatgaattctaattgcaaatatccaggctgaggcgtgagaatcgcttgaacccggtaggcagatgttgcagtgagccgagatcgcaccattgcactccagcctaggcaacaagagcgaaactccatctcaaaaatagaaaaaacatttatcgaaatcccaacaagttgacaaatatatccacataaaaatataaaacttctgtattctgtgaaagctactataaataaagtttagagaaagttatttgccacctatgtcatgattgaaatagttaattgatcctgtgaatcagttagcaaaacataactcaatggaaagataggcaaatgatacaaataagaaattcacaaaagaagaaatactaagtctctagtgatgagagaaatgtaaattaaaatgaaacatgtttgttcatcaagttgtcacaagttagacaatcatatccaatatttttaaaggttgtaagactataaggaaatagccactgtcatatcatttttaaaggaatataaattatagggccttttgtttctttgggttttttttttttagagacaagatctctccgtgttgtctaggctggactcaaacttctggactcaagcaatcctcgcaacatcattaatagctgagagtagagacttgagccaccacacctgactatagggcctttttgaaaggaaaattgacatcatcaaaattttaaatatattcagtctatttctcaaaaactcaaagaatactaa

SEQ ID NO: 2777 - protein, 30 aa, Homosapiens
LQISRLRRENRLNPVGRCCSEPRSHHCTPA

SEQ ID NO: 2778 - DNA, 887 bp, Homosapiens
gacagactggatgtgagatgtggcagagagagaagattcatagctaactctaagacttttgacctgagcagatgaaaggatgcagttaccatgaaggctgcagatgaggctgtgcaagcatgacaccagcatctgctccacttctgatgaggcctcatgaaagaagatgaagagggagccggcttatcacagggcaagagcaggagcaacagagatggggagacgtgccaagctgttttaaacaactaggtctctcatgaactaccagagcgagaacacactcatcaccaaggtgatggtgctaagccatgcatgagggatccatgcctgtgatccaaacacctcctaccagtccccacctccaacaatgggattacatttcaacatgagatttgagggtagcaaatatccaaactataacatcctctccaaatttcctcatgctcatttttaattcctctcacccacctgtccccctgccctcatctcttggaaaccactgttctgctttctgtcactgttgagacagataggcgggttggttccgttttaatgtggtctggaggaaaagaacaaaagccccttaagcttaagtgctagcttacctctcagccaattagtaacaaaacgcctaagaaactgttaaaaacaacttcctccctcagggagctagggacttccccagggctctgcatgtgcagttagacatcatctccaacctacagttaccccttcctcatttcagtgctaacaatcacacccagggcatgaagatttaaaatgctaatgctacataggatgtatgaagaagcatgtagagccactgtgcaagtgctagaaaaaaccctcccatacatgccctgacccaacccttccctagagagaga

SEQ ID NO: 2779 - protein, 30 aa, Homosapiens
MKEDEEGAGLSQGKSRSNRDGETCQAVLNN

SEQ ID NO: 2780 - DNA, 1648 bp, Homosapiens
ggggcgcgcgccgcctctcgctccgcccaacccgcgcgcgagcctgggcggggagggggagccaggaagctgcgagcgcgctggggagcgcagctgcaggcgttggggcggcaggagccgcggagccggcgctgagaggggctgcggccggagcgggcggctgagacaaaggcgacgatagggccagatttgagtgtgtgaatttttgagtgaaacctggaacccaaatgagaagaaatctgcaaggaataactactgacagtgaatctgcggtcatctgtatgcataatatggaatgttcttaacccagaagtagctgaatgtgttactccattgctgaggagtgactatctgttatagtccctgggtcaagacaacaatttttataccttcgtcgtggttcagaaaggagtctctgtagaaccagaagcaaagaaaggaaacaatccaaatttttctttattaaatcgactgtgtaagatacttgacttccaggaacaaaaacacggtgaaataataaaatttcatcttggcatcactggacatcatcgtattgaggagcgtatttttggaacttcccgagttgagatttggaaccttcattggtgctcatttactgtggactgtaagcatgagtgaattctggttgtgtttcaactgctgtattgcagaacagcctcagcctaaaaggcgacggcggattgacagaagtatgattggagagcccacaaactttgtgcatacagctcatgttggatcaggagacctgttcagtggaatgaattcagttagctccattcagaaccaaatgcagtccaagggaggttatggaggtggaatgcctgccaatgtccagatgcagctcgtggatacgaaggcgggatagccctggtcctttctccaggttattgtgaatttctatattttctctgtccactattctgtaatttttttttgtcctgtgattgcttttattttgaattacaaaaaagaagtgtgatggcaccttgtccaccctgtcgtgattattccagtgagatgttactgttctgctctgaagaagatactgtcagacgaatcctgcatttccttcagctggcatgcatgcctttggactcatggacagagttctttggattgtcactgaattttcaatgtttaatcagtatggatctgatcttcgcatgatcttttttgtgaatgctaacaccattttgcagttttttttttctattttaaacatttttcttttcactgccgaccccctgccttacgattttattggaaagcaaggacctgctattatttgttaatttgccatcatttatgtatattttggaaggtatgagacccacaagcacaatgatcatttttatttgtttgtttgtttgaaacttcagcagaatagatatctgcatgctttatgaagttgttgcttcggtaagagcccatgggatgccagaaattaacatttctttgctgccatgggctgatgatgctgctattagataaagtttagctgtggcaccaagtcacatcattttcatagaaaaagattacttgtagcttattttagaagtatgaccttttggtctgtttgattgattgattagaattgcaataaaagaaaagcttgcattcataaggc

SEQ ID NO: 2781 - protein, 84 aa, Homosapiens; identical to SEQ ID NO: 361

SEQ ID NO: 2782 - DNA, 2185 bp, Homosapiens
ggggcgcgcgccgcctctcgctccgcccaacccgcgcgcgagcctgggcggggagggggagccaggaagctgcgagcgcgctggggagcgcagctgcaggcgttggggcggcaggagccgcggagccggcgctgagaggggctgcggccggagcgggcggctgagacaaaggcgacgatagggccagatttgagtgtgtgaatttttgagtgaaacctggaacccaaatgagaagaaatctgcaaggaataactactgacagtgaatctgcggtcatctgtatgcataatatggaatgttcttaacccagaagtagctgaatgtgttactccattgctgaggagtgactatctgttatagtccctgggtcaagacaacaatttttataccttcgtcgtggttcagaaaggagtctctgtagaaccagaagcaaagaaaggaaacaatccaaatttttctttattaaatcgactgtgtaagatacttgacttccaggaacaaaaacacggtgaaataataaaatttcatcttggcatcactggacatcatcgtattgaggagcgtatttttggaacttcccgagttgagatttggaaccttcattggtgctcatttactgtggactgtaagcatgagtgaattctggttgtgtttcaactgctgtattgcagaacagcctcagcctaaaaggcgacggcggattgacagaagtatgattggagagcccacaaactttgtgcatacagctcatgttggatcaggagacctgttcagtggaatgaattcagttagctccattcagaaccaaatgcagtccaagggaggttatggaggtggaatgcctgccaatgtccagatgcagctcgtggatacgaaggcgggatagccctggtcctttctccaggttattgtgaatttctatattttctctgtccactattctgtaatttttttttgtcctgtgattgcttttattttgaattacaaaaaagaagtgtgatggcaccttgtccaccctgtcgtgattattccagtgagatgttactgttctgctctgaagaagatactgtcagacgaatcctgcatttccttcagctggcatgcatgcctttggactcatggacagagttctttggattgtcactgaattttcaatgtttaatcagtatggatctgatcttcgcatgatcttttttgtgaatgctaacaccattttgcagttttttttttctattttaaacatttttcttttcactgccgaccccctgccttacgattttattggaaagcaaggacctgctattatttgttaatttgccatcatttatgtatattttggaaggtatgagacccacaagcacaatgatcatttttatttgtttgtttgtttgaaacttcagcagaatagatatctgcatgctttatgaagttgttgcttcggtaagagcccatgggatgccagaaattaacatttctttgctgccatgggctgatgatgctgctattagataaagtttagctgtggcaccaagtcacatcattttcatagaaaaagattacttgtagcttattttagaagtatgaccttttggtctgtttgattgattgattagaattgcaataaaagaaaagcttgcattcataaggcattcattctgttgtaaatgttcaatatatttattttgagagcaaggacctgtggttgtaaacaggtgtggttacaggtgtggttatgtatctgagtgttgcggtcatactctcctccagtccaatcctgagcatcttcatcttattaattagctgttcgtttctttgtgcactcattcttttatttttacttctttttaatgttatggtatccagttgtttccagtagcagtttcttgaacttctggcctgtactactaactgcagacctccagagtcactggcctttctgtgctctacatattattttaggggccacatcagttgccaagagcaacatacataccgacctggctgaattattgccagtgaaaacaacctgtacgaagcctttgctcaggttctaaaatatgtttgtccttgcacgaattttgtatatttcaaatatttctgtaaaggtttcttcttttctgttagagtgtggtgttaagccagagtcagtggtttgtgttctcattaaaatgtttgtttaaatcct

SEQ ID NO: 2783 - protein, 84 aa, Homosapiens; identical to SEQ ID NO: 361

SEQ ID NO: 2784 - DNA, 2096 bp, Homosapiens
ggggcgcgcgccgcctctcgctccgcccaacccgcgcgcgagcctgggcggggagggggagccaggaagctgcgagcgcgctggggagcgcagctgcaggcgttggggcggcaggagccgcggagccggcgctgagaggggctgcggccggagcgggcggctgagacaaaggcgacgatagggccagatttgagtgtgtgaatttttgagtgaaacctggaacccaaatgagaagaaatctgcaaggaataactactgacagtgaatctgcggtcatctgtatgcataatatggaatgttcttaacccagaagtagctgaatgtgttactccattgctgaggagtgactatctgttatagtccctgggtcaagacaacaatttttataccttcgtcgtggttcagaaaggagtctctgtagaaccagaagcaaagaaaggaaacaatccaaatttttctttattaaatcgactgtgtaagatacttgacttccaggaacaaaaacacggtgaaataataaaatttcatcttggcatcactggacatcatcgtattgaggagcgtatttttggaacttcccgagttgagatttggaaccttcattggtgctcatttactgtggactgtaagcatgagtgaattctggttgtgtttcaactgctgtattgcagaacagcctcagcctaaaaggcgacggcggattgacagaagtatgattggagagcccacaaactttgtgcatacagctcatgttggatcaggagacctgttcagtggaatgaattcagttagctccattcagaaccaaatgcagtccaagggaggttatggaggtggaatgcctgccaatgtccagatgcagctcgtggatacgaaggcgggatagccctggtcctttctccaaagtgtgatggcaccttgtccaccctgtcgtgattattccagtgagatgttactgttctgctctgaagaagatactgtcagacgaatcctgcatttccttcagctggcatgcatgcctttggactcatggacagagttctttggattgtcactgaattttcaatgtttaatcagtatggatctgatcttcgcatgatcttttttgtgaatgctaacaccattttgcagttttttttttctattttaaacatttttcttttcactgccgaccccctgccttacgattttattggaaagcaaggacctgctattatttgttaatttgccatcatttatgtatattttggaaggtatgagacccacaagcacaatgatcatttttatttgtttgtttgtttgaaacttcagcagaatagatatctgcatgctttatgaagttgttgcttcggtaagagcccatgggatgccagaaattaacatttctttgctgccatgggctgatgatgctgctattagataaagtttagctgtggcaccaagtcacatcattttcatagaaaaagattacttgtagcttattttagaagtatgaccttttggtctgtttgattgattgattagaattgcaataaaagaaaagcttgcattcataaggcattcattctgttgtaaatgttcaatatatttattttgagagcaaggacctgtggttgtaaacaggtgtggttacaggtgtggttatgtatctgagtgttgcggtcatactctcctccagtccaatcctgagcatcttcatcttattaattagctgttcgtttctttgtgcactcattcttttatttttacttctttttaatgttatggtatccagttgtttccagtagcagtttcttgaacttctggcctgtactactaactgcagacctccagagtcactggcctttctgtgctctacatattattttaggggccacatcagttgccaagagcaacatacataccgacctggctgaattattgccagtgaaaacaacctgtacgaagcctttgctcaggttctaaaatatgtttgtccttgcacgaattttgtatatttcaaatatttctgtaaaggtttcttcttttctgttagagtgtggtgttaagccagagtcagtggtttgtgttctcattaaaatgtttgtttaaatcct

SEQ ID NO: 2785 - protein, 84 aa, Homosapiens; identical to SEQ ID NO: 361

SEQ ID NO: 2786 - DNA, 3698 bp, Homosapiens
ggggcgcgcgccgcctctcgctccgcccaacccgcgcgcgagcctgggcggggagggggagccaggaagctgcgagcgcgctggggagcgcagctgcaggcgttggggcggcaggagccgcggagccggcgctgagaggggctgcggccggagcgggcggctgagacaaaggcgacgatagggccagatttgagtgtgtgaatttttgagtgaaacctggaacccaaatgagaagaaatctgcaaggaataactactgacagtgaatctgcggtcatctgtatgcataatatggaatgttcttaacccagaagtagctgaatgtgttactccattgctgaggagtgactatctgttatagtccctgggtcaagacaacaatttttataccttcgtcgtggttcagaaaggagtctctgtagaaccagaagcaaagaaaggaaacaatccaaatttttctttattaaatcgactgtgtaagatacttgacttccaggaacaaaaacacggtgaaataataaaatttcatcttggcatcactggacatcatcgtattgaggagcgtatttttggaacttcccgagttgagatttggaaccttcattggtgctcatttactgtggactgtaagcatgagtgaattctggttgtgtttcaactgctgtattgcagaacagcctcagcctaaaaggcgacggcggattgacagaagtatgattggagagcccacaaactttgtgcatacagctcatgttggatcaggagacctgttcagtggaatgaattcagttagctccattcagaaccaaatgcagtccaagggaggttatggaggtggaatgcctgccaatgtccagatgcagctcgtggatacgaaggcgggatagccctggtcctttctccaggttattgtgaatttctatattttctctgtccactattctgtaatttttttttgtcctgtgattgcttttattttgaattacaaaaaagaagtgtgatggcaccttgtccaccctgtcgtgattattccagtgagatgttactgttctgctctgaagaagatactgtcagacgaatcctgcatttccttcagctggcatgcatgcctttggactcatggacagagttctttggattgtcactgaattttcaatgtttaatcagtatggatctgatcttcgcatgatcttttttgtgaatgctaacaccattttgcagttttttttttctattttaaacatttttcttttcactgccgaccccctgccttacgattttattggaaagcaaggacctgctattatttgttaatttgccatcatttatgtatattttggaaggtatgagacccacaagcacaatgatcatttttatttgtttgtttgtttgaaacttcagcagaatagatatctgcatgctttatgaagttgttgcttcggtaagagcccatgggatgccagaaattaacatttctttgctgccatgggctgatgatgctgctattagataaagtttagctgtggcaccaagtcacatcattttcatagaaaaagattacttgtagcttattttagaagtatgaccttttggtctgtttgattgattgattagaattgcaataaaagaaaagcttgcattcataaggcattcattctgttgtaaatgttcaatatatttattttgagagcaaggacctgtggttgtaaacaggtgtggttacaggtgtggttatgtatctgagtgttgcggtcatactctcctccagtccaatcctgagcatcttcatcttattaattagctgttcgtttctttgtgcactcattcttttatttttacttctttttaatgttatggtatccagttgtttccagtagcagtttcttgaacttctggcctgtactactaactgcagacctccagagtcactggcctttctgtgctctacatattattttaggggccacatcagttgccaagagcaacatacataccgacctggctgaattattgccagtgaaaacaacctgtacgaagcctttgctcaggttctaaaatatgtttgtccttgcacgaattttgtatatttcaaatatttctgtaaaggtttcttcttttctgttagagtgtggtgttaagccagagtcagtggtttgtgttctcattaaaatgtttgtttaaatcctatgtccaattcaagcctatctaactacatttggtaggattaacatttcatataacaaatggggcttaattaaaaactttaacttggaataaaggaacagggatcactttatcttctgccttcatttaccttagtccaagattcttgcaaaacaggcaactgaacaaacattaggtttatgtaggtaaaatgtgaaagcatttctcctccactttttaaaatttaatttacccagtacagcggggcaccagattacttgatctttgtattttgcagttttgagcctttgtgtcaatcccaagcacagagaggatctgccaaggaaaaacatttgcatcttcggagtagacattttgcagtttgtttaataacaacttctaaagtaagttgaattcatccattgtcactgattcaccaagtggatgttgcattgtggaatttgcctgagtactgttgtcattctgctcagccaggcacggtcagtttcttggccagggacattgctatgtgctgtgtgcaagctctttagaagagagattggattttcttggcattatcagcactcatgctatttagtctacttctattttgactgactctttaaattagtacaatttttctacttgtcatataactcctggaacaatagtacgggaagccgtgatccttttccctgactcatgattttagtctttttccaaatcgctgttttttttttttttttttttttttttgctgctccaacgaccagcatgtgttggagcagatctccatggtaagccaaaagtggacttgtcagcctataactactctgcagctgccactaactctacaggcacagtaactacactttatacaggagcacatgccaaagtgcctgggaggtgccaataaaatcaagaaataagaaaactacaaaaaaagatacggtattaaccttggacataattttttttagggaggcagctttcccacttttataaagggggttgtaaatctcaagaggtcatttgttccccatagcagcatatctcatttttaaattgaagcgaattaaataggattttactactcaacattcattatactgttaatctttgctgaaatatatgctaacaaatgttaagcaagggaaactgaagacttagtcatgtggattgttagcagtgatctgcattctgtaaaagaggtactttcccatgatgtaggcatgaagtggtgccagtaagcgtagagcggaaatgttgactttagttaacattgggtttagcatttccagtgcagcattatcagtgggcctttaaaaatacttcgtaagtacattagctttcactttgttgttaaattatagcagactcattatagagaacaagtttgccttgattttgtttaaaatgacttctgctaagcacccagaagataaaattgacatatttttataatataagcatactttttttgtacattgtgttcattcttgaataaaatgagttctgtgttggcttgtagatact

SEQ ID NO: 2787 - protein, 84 aa, Homosapiens; identical to SEQ ID NO: 361

SEQ ID NO: 2788 - DNA, 4485 bp, Homosapiens
ggggcgcgcgccgcctctcgctccgcccaacccgcgcgcgagcctgggcggggagggggagccaggaagctgcgagcgcgctggggagcgcagctgcaggcgttggggcggcaggagccgcggagccggcgctgagaggggctgcggccggagcgggcggctgagacaaaggcgacgatagggccagatttgagtgtgtgaatttttgagtgaaacctggaacccaaatgagaagaaatctgcaaggaataactactgacagtgaatctgcggtcatctgtatgcataatatggaatgttcttaacccagaagtagctgaatgtgttactccattgctgaggagtgactatctgttatagtccctgggtcaagacaacaatttttataccttcgtcgtggttcagaaaggagtctctgtagaaccagaagcaaagaaaggaaacaatccaaatttttctttattaaatcgactgtgtaagatacttgacttccaggaacaaaaacacggtgaaataataaaatttcatcttggcatcactggacatcatcgtattgaggagcgtatttttggaacttcccgagttgagatttggaaccttcattggtgctcatttactgtggactgtaagcatgagtgaattctggttgtgtttcaactgctgtattgcagaacagcctcagcctaaaaggcgacggcggattgacagaagtatgattggagagcccacaaactttgtgcatacagctcatgttggatcaggagacctgttcagtggaatgaattcagttagctccattcagaaccaaatgcagtccaagggaggttatggaggtggaatgcctgccaatgtccagatgcagctcgtggatacgaaggcgggatagccctggtcctttctccagtgagtactcagagctggggtctggacctgacggccagacatggccaggccaataatagtaaatatatgtatatatatataattttttaatggtgaacttattgggaaaggcaaaattactcagctaagtgtagtttctgcacttggaatgtaagttttaggttcttttccttattaagaactttaaatactttaaaacatctggttggggaggattctgatgacaagatgcttcttatgtgtcctttaaacaagagtgaaatcattattttgagtattgaggccgagcatggtggctcacacctgtaatcccagcactttgggaggcctaggtgggctgatcacctgaggccaggaattggagactagcctggccaacatggtgaaaccccatctctactaaaaatacaaaaattagctgggcatggtggcgcatgcctgtaatcgcagctactcaggaggctgaggcacgagaattgcttgaacctgggaggcaggggttgcagtcagctgagaatgcgccactgcgctccagcctgggtgacagagcaagaccctgtctcaaaaaagtactgatactaaagataatctcttgggtagtaattttacagttaagacttcattgtttataaacttttcaaattaattaaaaagactactttgaaaaaggataaaccctgaaaatgtagaaataatttcaagtttttttttgttttatagggttattgtgaatttctatattttctctgtccactattctgtaatttttttttgtcctgtgattgcttttattttgaattacaaaaaagaagtgtgatggcaccttgtccaccctgtcgtgattattccagtgagatgttactgttctgctctgaagaagatactgtcagacgaatcctgcatttccttcagctggcatgcatgcctttggactcatggacagagttctttggattgtcactgaattttcaatgtttaatcagtatggatctgatcttcgcatgatcttttttgtgaatgctaacaccattttgcagttttttttttctattttaaacatttttcttttcactgccgaccccctgccttacgattttattggaaagcaaggacctgctattatttgttaatttgccatcatttatgtatattttggaaggtatgagacccacaagcacaatgatcatttttatttgtttgtttgtttgaaacttcagcagaatagatatctgcatgctttatgaagttgttgcttcggtaagagcccatgggatgccagaaattaacatttctttgctgccatgggctgatgatgctgctattagataaagtttagctgtggcaccaagtcacatcattttcatagaaaaagattacttgtagcttattttagaagtatgaccttttggtctgtttgattgattgattagaattgcaataaaagaaaagcttgcattcataaggcattcattctgttgtaaatgttcaatatatttattttgagagcaaggacctgtggttgtaaacaggtgtggttacaggtgtggttatgtatctgagtgttgcggtcatactctcctccagtccaatcctgagcatcttcatcttattaattagctgttcgtttctttgtgcactcattcttttatttttacttctttttaatgttatggtatccagttgtttccagtagcagtttcttgaacttctggcctgtactactaactgcagacctccagagtcactggcctttctgtgctctacatattattttaggggccacatcagttgccaagagcaacatacataccgacctggctgaattattgccagtgaaaacaacctgtacgaagcctttgctcaggttctaaaatatgtttgtccttgcacgaattttgtatatttcaaatatttctgtaaaggtttcttcttttctgttagagtgtggtgttaagccagagtcagtggtttgtgttctcattaaaatgtttgtttaaatcctatgtccaattcaagcctatctaactacatttggtaggattaacatttcatataacaaatggggcttaattaaaaactttaacttggaataaaggaacagggatcactttatcttctgccttcatttaccttagtccaagattcttgcaaaacaggcaactgaacaaacattaggtttatgtaggtaaaatgtgaaagcatttctcctccactttttaaaatttaatttacccagtacagcggggcaccagattacttgatctttgtattttgcagttttgagcctttgtgtcaatcccaagcacagagaggatctgccaaggaaaaacatttgcatcttcggagtagacattttgcagtttgtttaataacaacttctaaagtaagttgaattcatccattgtcactgattcaccaagtggatgttgcattgtggaatttgcctgagtactgttgtcattctgctcagccaggcacggtcagtttcttggccagggacattgctatgtgctgtgtgcaagctctttagaagagagattggattttcttggcattatcagcactcatgctatttagtctacttctattttgactgactctttaaattagtacaatttttctacttgtcatataactcctggaacaatagtacgggaagccgtgatccttttccctgactcatgattttagtctttttccaaatcgctgttttttttttttttttttttttttttgctgctccaacgaccagcatgtgttggagcagatctccatggtaagccaaaagtggacttgtcagcctataactactctgcagctgccactaactctacaggcacagtaactacactttatacaggagcacatgccaaagtgcctgggaggtgccaataaaatcaagaaataagaaaactacaaaaaaagatacggtattaaccttggacataattttttttagggaggcagctttcccacttttataaagggggttgtaaatctcaagaggtcatttgttccccatagcagcatatctcatttttaaattgaagcgaattaaataggattttactactcaacattcattatactgttaatctttgctgaaatatatgctaacaaatgttaagcaagggaaactgaagacttagtcatgtggattgttagcagtgatctgcattctgtaaaagaggtactttcccatgatgtaggcatgaagtggtgccagtaagcgtagagcggaaatgttgactttagttaacattgggtttagcatttccagtgcagcattatcagtgggcctttaaaaatacttcgtaagtacattagctttcactttgttgttaaattatagcagactcattatagagaacaagtttgccttgattttgtttaaaatgacttctgctaagcacccagaagataaaattgacatatttttataatataagcatactttttttgtacattgtgttcattcttgaataaaatgagttctgtgttggcttgtagatactaaaaagaaagtattgattttgattcaataaatgttttctttcaatcctggttggcctttcctttaaa

SEQ ID NO: 2789 - protein, 84 aa, Homosapiens; identical to SEQ ID NO: 361

SEQ ID NO: 2790 - DNA, 3765 bp, Homosapiens
ggggcgcgcgccgcctctcgctccgcccaacccgcgcgcgagcctgggcggggagggggagccaggaagctgcgagcgcgctggggagcgcagctgcaggcgttggggcggcaggagccgcggagccggcgctgagaggggctgcggccggagcgggcggctgagacaaaggcgacgatagggccagatttgagtgtgtgaatttttgagtgaaacctggaacccaaatgagaagaaatctgcaaggaataactactgacagtgaatctgcggtcatctgtatgcataatatggaatgttcttaacccagaagtagctgaatgtgttactccattgctgaggagtgactatctgttatagtccctgggtcaagacaacaatttttataccttcgtcgtggttcagaaaggagtctctgtagaaccagaagcaaagaaaggaaacaatccaaatttttctttattaaatcgactgtgtaagatacttgacttccaggaacaaaaacacggtgaaataataaaatttcatcttggcatcactggacatcatcgtattgaggagcgtatttttggaacttcccgagttgagatttggaaccttcattggtgctcatttactgtggactgtaagcatgagtgaattctggttgtgtttcaactgctgtattgcagaacagcctcagcctaaaaggcgacggcggattgacagaagtatgattggagagcccacaaactttgtgcatacagctcatgttggatcaggagacctgttcagtggaatgaattcagttagctccattcagaaccaaatgcagtccaagggaggttatggaggtggaatgcctgccaatgtccagatgcagctcgtggatacgaaggcgggatagccctggtcctttctccaggttattgtgaatttctatattttctctgtccactattctgtaatttttttttgtcctgtgattgcttttattttgaattacaaaaaagaagtgtgatggcaccttgtccaccctgtcgtgattattccagtgagatgttactgttctgctctgaagaagatactgtcagacgaatcctgcatttccttcagctggcatgcatgcctttggactcatggacagagttctttggattgtcactgaattttcaatgtttaatcagtatggatctgatcttcgcatgatcttttttgtgaatgctaacaccattttgcagttttttttttctattttaaacatttttcttttcactgccgaccccctgccttacgattttattggaaagcaaggacctgctattatttgttaatttgccatcatttatgtatattttggaaggtatgagacccacaagcacaatgatcatttttatttgtttgtttgtttgaaacttcagcagaatagatatctgcatgctttatgaagttgttgcttcggtaagagcccatgggatgccagaaattaacatttctttgctgccatgggctgatgatgctgctattagataaagtttagctgtggcaccaagtcacatcattttcatagaaaaagattacttgtagcttattttagaagtatgaccttttggtctgtttgattgattgattagaattgcaataaaagaaaagcttgcattcataaggcattcattctgttgtaaatgttcaatatatttattttgagagcaaggacctgtggttgtaaacaggtgtggttacaggtgtggttatgtatctgagtgttgcggtcatactctcctccagtccaatcctgagcatcttcatcttattaattagctgttcgtttctttgtgcactcattcttttatttttacttctttttaatgttatggtatccagttgtttccagtagcagtttcttgaacttctggcctgtactactaactgcagacctccagagtcactggcctttctgtgctctacatattattttaggggccacatcagttgccaagagcaacatacataccgacctggctgaattattgccagtgaaaacaacctgtacgaagcctttgctcaggttctaaaatatgtttgtccttgcacgaattttgtatatttcaaatatttctgtaaaggtttcttcttttctgttagagtgtggtgttaagccagagtcagtggtttgtgttctcattaaaatgtttgtttaaatcctatgtccaattcaagcctatctaactacatttggtaggattaacatttcatataacaaatggggcttaattaaaaactttaacttggaataaaggaacagggatcactttatcttctgccttcatttaccttagtccaagattcttgcaaaacaggcaactgaacaaacattaggtttatgtaggtaaaatgtgaaagcatttctcctccactttttaaaatttaatttacccagtacagcggggcaccagattacttgatctttgtattttgcagttttgagcctttgtgtcaatcccaagcacagagaggatctgccaaggaaaaacatttgcatcttcggagtagacattttgcagtttgtttaataacaacttctaaagtaagttgaattcatccattgtcactgattcaccaagtggatgttgcattgtggaatttgcctgagtactgttgtcattctgctcagccaggcacggtcagtttcttggccagggacattgctatgtgctgtgtgcaagctctttagaagagagattggattttcttggcattatcagcactcatgctatttagtctacttctattttgactgactctttaaattagtacaatttttctacttgtcatataactcctggaacaatagtacgggaagccgtgatccttttccctgactcatgattttagtctttttccaaatcgctgttttttttttttttttttttttttttgctgctccaacgaccagcatgtgttggagcagatctccatggtaagccaaaagtggacttgtcagcctataactactctgcagctgccactaactctacaggcacagtaactacactttatacaggagcacatgccaaagtgcctgggaggtgccaataaaatcaagaaataagaaaactacaaaaaaagatacggtattaaccttggacataattttttttagggaggcagctttcccacttttataaagggggttgtaaatctcaagaggtcatttgttccccatagcagcatatctcatttttaaattgaagcgaattaaataggattttactactcaacattcattatactgttaatctttgctgaaatatatgctaacaaatgttaagcaagggaaactgaagacttagtcatgtggattgttagcagtgatctgcattctgtaaaagaggtactttcccatgatgtaggcatgaagtggtgccagtaagcgtagagcggaaatgttgactttagttaacattgggtttagcatttccagtgcagcattatcagtgggcctttaaaaatacttcgtaagtacattagctttcactttgttgttaaattatagcagactcattatagagaacaagtttgccttgattttgtttaaaatgacttctgctaagcacccagaagataaaattgacatatttttataatataagcatactttttttgtacattgtgttcattcttgaataaaatgagttctgtgttggcttgtagatactaaaaagaaagtattgattttgattcaataaatgttttctttcaatcctggttggcctttcctttaaa

SEQ ID NO: 2791 - protein, 84 aa, Homosapiens; identical to SEQ ID NO: 361

SEQ ID NO: 2792 - DNA, 409 bp, Homosapiens
ggggcggcaggagccgcggagccggcgctgagaggggctgcggccggagcgggcggctgagacaaaggcgacgatagggccagatttgagtgtgtgaatttttgagtgaaacctggaacccaaatgagaagaaatctgcaaggaataactactgacagtgaatctgcggtcatctgtatgcataatatggaatgttcttaacccagaagtagctgaatgtgttactccattgctgaggagtggtaagtctgataatctccactgataattaaataacctaaaccctttccataaaaagaggatgactacttctacattcttagcatttgctgacattaatttttatattacagaggaggacagcagtgcagtttaagggaattctttatccctaacatcatgtttaatg

SEQ ID NO: 2793 - protein, 38 aa, Homosapiens
LLTVNLRSSVCIIWNVLNPEVAECVTPLLRSGKSDNLH

SEQ ID NO: 2794 - DNA, 1007 bp, Homosapiens
gagaggggctgcggccggagcgggcggctgagacaaaggcgacgaaaaggcgacggcggattgacagaagtatgattggagagcccacaaactttgtgcatacagctcatgttggatcaggagacctgttcagtggaatgaattcagttagctccattcagaaccaaatgcagtccaagggaggttatggaggtggaatgcctgccaatgtccagatgcagctcgtggatacgaaggcgggatagccctggtcctttctccaggttattgtgaatttctatattttctctgtccactattctgtaatttttttttgtcctgtgattgcttttattttgaattacaaaaaagaagtgtgatggcaccttgtccaccctgtcgtgattattccagtgagatgttactgttctgctctgaagaagatactgtcagacgaatcctgcatttccttcagctggcatgcatgcctttggactcatggacagagttctttggattgtcactgaattttcaatgtttaatcagtatggatctgatcttcgcatgatcttttttgtgaatgctaacaccattttgcagttttttttttctattttaaacatttttcttttcactgccgaccccctgccttacgattttattggaaagcaaggacctgctattatttgttaatttgccatcatttatgtatattttggaaggtatgagacccacaagcacaatgatcatttttatttgtttgtttgtttgaaacttcagcagaatagatatctgcatgctttatgaagttgttgcttcggtaagagcccatgggatgccagaaattaacatttctttgctgccatgggctgatgatgctgctattagataaagtttagctgtggcaccaagtcacatcattttcatagaaaaagattacttgtagcttattttagaagtatgaccttttggtctgtttgattgattgattagaattgcaataaaagaaaagcttgcattcataaggc

SEQ ID NO: 2795 - protein, 57 aa, Homosapiens
MIGEPTNFVHTAHVGSGDLFSGMNSVSSIQNQMQSKGGYGGGMPANVQMQLVDTKAG

SEQ ID NO: 2796 - DNA, 1544 bp, Homosapiens
gagaggggctgcggccggagcgggcggctgagacaaaggcgacgaaaaggcgacggcggattgacagaagtatgattggagagcccacaaactttgtgcatacagctcatgttggatcaggagacctgttcagtggaatgaattcagttagctccattcagaaccaaatgcagtccaagggaggttatggaggtggaatgcctgccaatgtccagatgcagctcgtggatacgaaggcgggatagccctggtcctttctccaggttattgtgaatttctatattttctctgtccactattctgtaatttttttttgtcctgtgattgcttttattttgaattacaaaaaagaagtgtgatggcaccttgtccaccctgtcgtgattattccagtgagatgttactgttctgctctgaagaagatactgtcagacgaatcctgcatttccttcagctggcatgcatgcctttggactcatggacagagttctttggattgtcactgaattttcaatgtttaatcagtatggatctgatcttcgcatgatcttttttgtgaatgctaacaccattttgcagttttttttttctattttaaacatttttcttttcactgccgaccccctgccttacgattttattggaaagcaaggacctgctattatttgttaatttgccatcatttatgtatattttggaaggtatgagacccacaagcacaatgatcatttttatttgtttgtttgtttgaaacttcagcagaatagatatctgcatgctttatgaagttgttgcttcggtaagagcccatgggatgccagaaattaacatttctttgctgccatgggctgatgatgctgctattagataaagtttagctgtggcaccaagtcacatcattttcatagaaaaagattacttgtagcttattttagaagtatgaccttttggtctgtttgattgattgattagaattgcaataaaagaaaagcttgcattcataaggcattcattctgttgtaaatgttcaatatatttattttgagagcaaggacctgtggttgtaaacaggtgtggttacaggtgtggttatgtatctgagtgttgcggtcatactctcctccagtccaatcctgagcatcttcatcttattaattagctgttcgtttctttgtgcactcattcttttatttttacttctttttaatgttatggtatccagttgtttccagtagcagtttcttgaacttctggcctgtactactaactgcagacctccagagtcactggcctttctgtgctctacatattattttaggggccacatcagttgccaagagcaacatacataccgacctggctgaattattgccagtgaaaacaacctgtacgaagcctttgctcaggttctaaaatatgtttgtccttgcacgaattttgtatatttcaaatatttctgtaaaggtttcttcttttctgttagagtgtggtgttaagccagagtcagtggtttgtgttctcattaaaatgtttgtttaaatcct

SEQ ID NO: 2797 - protein, 57 aa, Homosapiens; identical to SEQ ID NO: 2795

SEQ ID NO: 2798 - DNA, 3057 bp, Homosapiens
gagaggggctgcggccggagcgggcggctgagacaaaggcgacgaaaaggcgacggcggattgacagaagtatgattggagagcccacaaactttgtgcatacagctcatgttggatcaggagacctgttcagtggaatgaattcagttagctccattcagaaccaaatgcagtccaagggaggttatggaggtggaatgcctgccaatgtccagatgcagctcgtggatacgaaggcgggatagccctggtcctttctccaggttattgtgaatttctatattttctctgtccactattctgtaatttttttttgtcctgtgattgcttttattttgaattacaaaaaagaagtgtgatggcaccttgtccaccctgtcgtgattattccagtgagatgttactgttctgctctgaagaagatactgtcagacgaatcctgcatttccttcagctggcatgcatgcctttggactcatggacagagttctttggattgtcactgaattttcaatgtttaatcagtatggatctgatcttcgcatgatcttttttgtgaatgctaacaccattttgcagttttttttttctattttaaacatttttcttttcactgccgaccccctgccttacgattttattggaaagcaaggacctgctattatttgttaatttgccatcatttatgtatattttggaaggtatgagacccacaagcacaatgatcatttttatttgtttgtttgtttgaaacttcagcagaatagatatctgcatgctttatgaagttgttgcttcggtaagagcccatgggatgccagaaattaacatttctttgctgccatgggctgatgatgctgctattagataaagtttagctgtggcaccaagtcacatcattttcatagaaaaagattacttgtagcttattttagaagtatgaccttttggtctgtttgattgattgattagaattgcaataaaagaaaagcttgcattcataaggcattcattctgttgtaaatgttcaatatatttattttgagagcaaggacctgtggttgtaaacaggtgtggttacaggtgtggttatgtatctgagtgttgcggtcatactctcctccagtccaatcctgagcatcttcatcttattaattagctgttcgtttctttgtgcactcattcttttatttttacttctttttaatgttatggtatccagttgtttccagtagcagtttcttgaacttctggcctgtactactaactgcagacctccagagtcactggcctttctgtgctctacatattattttaggggccacatcagttgccaagagcaacatacataccgacctggctgaattattgccagtgaaaacaacctgtacgaagcctttgctcaggttctaaaatatgtttgtccttgcacgaattttgtatatttcaaatatttctgtaaaggtttcttcttttctgttagagtgtggtgttaagccagagtcagtggtttgtgttctcattaaaatgtttgtttaaatcctatgtccaattcaagcctatctaactacatttggtaggattaacatttcatataacaaatggggcttaattaaaaactttaacttggaataaaggaacagggatcactttatcttctgccttcatttaccttagtccaagattcttgcaaaacaggcaactgaacaaacattaggtttatgtaggtaaaatgtgaaagcatttctcctccactttttaaaatttaatttacccagtacagcggggcaccagattacttgatctttgtattttgcagttttgagcctttgtgtcaatcccaagcacagagaggatctgccaaggaaaaacatttgcatcttcggagtagacattttgcagtttgtttaataacaacttctaaagtaagttgaattcatccattgtcactgattcaccaagtggatgttgcattgtggaatttgcctgagtactgttgtcattctgctcagccaggcacggtcagtttcttggccagggacattgctatgtgctgtgtgcaagctctttagaagagagattggattttcttggcattatcagcactcatgctatttagtctacttctattttgactgactctttaaattagtacaatttttctacttgtcatataactcctggaacaatagtacgggaagccgtgatccttttccctgactcatgattttagtctttttccaaatcgctgttttttttttttttttttttttttttgctgctccaacgaccagcatgtgttggagcagatctccatggtaagccaaaagtggacttgtcagcctataactactctgcagctgccactaactctacaggcacagtaactacactttatacaggagcacatgccaaagtgcctgggaggtgccaataaaatcaagaaataagaaaactacaaaaaaagatacggtattaaccttggacataattttttttagggaggcagctttcccacttttataaagggggttgtaaatctcaagaggtcatttgttccccatagcagcatatctcatttttaaattgaagcgaattaaataggattttactactcaacattcattatactgttaatctttgctgaaatatatgctaacaaatgttaagcaagggaaactgaagacttagtcatgtggattgttagcagtgatctgcattctgtaaaagaggtactttcccatgatgtaggcatgaagtggtgccagtaagcgtagagcggaaatgttgactttagttaacattgggtttagcatttccagtgcagcattatcagtgggcctttaaaaatacttcgtaagtacattagctttcactttgttgttaaattatagcagactcattatagagaacaagtttgccttgattttgtttaaaatgacttctgctaagcacccagaagataaaattgacatatttttataatataagcatactttttttgtacattgtgttcattcttgaataaaatgagttctgtgttggcttgtagatact

SEQ ID NO: 2799 - protein, 57 aa, Homosapiens; identical to SEQ ID NO: 2795

SEQ ID NO: 2800 - DNA, 3124 bp, Homosapiens
gagaggggctgcggccggagcgggcggctgagacaaaggcgacgaaaaggcgacggcggattgacagaagtatgattggagagcccacaaactttgtgcatacagctcatgttggatcaggagacctgttcagtggaatgaattcagttagctccattcagaaccaaatgcagtccaagggaggttatggaggtggaatgcctgccaatgtccagatgcagctcgtggatacgaaggcgggatagccctggtcctttctccaggttattgtgaatttctatattttctctgtccactattctgtaatttttttttgtcctgtgattgcttttattttgaattacaaaaaagaagtgtgatggcaccttgtccaccctgtcgtgattattccagtgagatgttactgttctgctctgaagaagatactgtcagacgaatcctgcatttccttcagctggcatgcatgcctttggactcatggacagagttctttggattgtcactgaattttcaatgtttaatcagtatggatctgatcttcgcatgatcttttttgtgaatgctaacaccattttgcagttttttttttctattttaaacatttttcttttcactgccgaccccctgccttacgattttattggaaagcaaggacctgctattatttgttaatttgccatcatttatgtatattttggaaggtatgagacccacaagcacaatgatcatttttatttgtttgtttgtttgaaacttcagcagaatagatatctgcatgctttatgaagttgttgcttcggtaagagcccatgggatgccagaaattaacatttctttgctgccatgggctgatgatgctgctattagataaagtttagctgtggcaccaagtcacatcattttcatagaaaaagattacttgtagcttattttagaagtatgaccttttggtctgtttgattgattgattagaattgcaataaaagaaaagcttgcattcataaggcattcattctgttgtaaatgttcaatatatttattttgagagcaaggacctgtggttgtaaacaggtgtggttacaggtgtggttatgtatctgagtgttgcggtcatactctcctccagtccaatcctgagcatcttcatcttattaattagctgttcgtttctttgtgcactcattcttttatttttacttctttttaatgttatggtatccagttgtttccagtagcagtttcttgaacttctggcctgtactactaactgcagacctccagagtcactggcctttctgtgctctacatattattttaggggccacatcagttgccaagagcaacatacataccgacctggctgaattattgccagtgaaaacaacctgtacgaagcctttgctcaggttctaaaatatgtttgtccttgcacgaattttgtatatttcaaatatttctgtaaaggtttcttcttttctgttagagtgtggtgttaagccagagtcagtggtttgtgttctcattaaaatgtttgtttaaatcctatgtccaattcaagcctatctaactacatttggtaggattaacatttcatataacaaatggggcttaattaaaaactttaacttggaataaaggaacagggatcactttatcttctgccttcatttaccttagtccaagattcttgcaaaacaggcaactgaacaaacattaggtttatgtaggtaaaatgtgaaagcatttctcctccactttttaaaatttaatttacccagtacagcggggcaccagattacttgatctttgtattttgcagttttgagcctttgtgtcaatcccaagcacagagaggatctgccaaggaaaaacatttgcatcttcggagtagacattttgcagtttgtttaataacaacttctaaagtaagttgaattcatccattgtcactgattcaccaagtggatgttgcattgtggaatttgcctgagtactgttgtcattctgctcagccaggcacggtcagtttcttggccagggacattgctatgtgctgtgtgcaagctctttagaagagagattggattttcttggcattatcagcactcatgctatttagtctacttctattttgactgactctttaaattagtacaatttttctacttgtcatataactcctggaacaatagtacgggaagccgtgatccttttccctgactcatgattttagtctttttccaaatcgctgttttttttttttttttttttttttttgctgctccaacgaccagcatgtgttggagcagatctccatggtaagccaaaagtggacttgtcagcctataactactctgcagctgccactaactctacaggcacagtaactacactttatacaggagcacatgccaaagtgcctgggaggtgccaataaaatcaagaaataagaaaactacaaaaaaagatacggtattaaccttggacataattttttttagggaggcagctttcccacttttataaagggggttgtaaatctcaagaggtcatttgttccccatagcagcatatctcatttttaaattgaagcgaattaaataggattttactactcaacattcattatactgttaatctttgctgaaatatatgctaacaaatgttaagcaagggaaactgaagacttagtcatgtggattgttagcagtgatctgcattctgtaaaagaggtactttcccatgatgtaggcatgaagtggtgccagtaagcgtagagcggaaatgttgactttagttaacattgggtttagcatttccagtgcagcattatcagtgggcctttaaaaatacttcgtaagtacattagctttcactttgttgttaaattatagcagactcattatagagaacaagtttgccttgattttgtttaaaatgacttctgctaagcacccagaagataaaattgacatatttttataatataagcatactttttttgtacattgtgttcattcttgaataaaatgagttctgtgttggcttgtagatactaaaaagaaagtattgattttgattcaataaatgttttctttcaatcctggttggcctttcctttaaa

SEQ ID NO: 2801 - protein, 57 aa, Homosapiens; identical to SEQ ID NO: 2795

SEQ ID NO: 2802 - DNA, 1124 bp, Homosapiens
atattttctctgtccactattctgtaatttttttttgtcctgtgattgcttttattttgaattacaaaaaagaagtgtgatggcaccttgtccaccctgtcgtgattattccagtgagatgttactgttctgctctgaagaagatactgtcagacgaatcctgcatttccttcagctggcatgcatgcctttggactcatggacagagttctttggattgtcactgaattttcaatgtttaatcagtatggatctgatcttcgcatgatcttttttgtgaatgctaacaccattttgcagttttttttttctattttaaacatttttcttttcactgccgaccccctgccttacgattttattggaaagcaaggacctgctattatttgttaatttgccatcatttatgtatattttggaagttttgagcctttgtgtcaatcccaagcacagagaggatctgccaaggaaaaacatttgcatcttcggagtagacattttgcagtttgtttaataacaacttctaaaccctcaaggacgttttgttctgaagactctcatattcagctctgggaaataattatttctctgattatcccttcaacttttgaagattaccagatttctcaacagcaatactgtggtctggaataaaagggggcacttccctcagactttggagaagacattattttgaactagaattctgtctacagccatactctcaatgaagtaagatggcagaataaagatgattacactagcaatgaatggctttactttccacacacccatcctgaaaacactctgcaagaatagagaacaaatccagtaataaaattaaatctcaggatttctaggtctgaagccaacctagaaggcattctatccaaattagaacaaacaatgagagatttttagaacaactgtttacaagaagcatgattaaatggataccattcaatagcaggaagataccatgcattcaaaacattttttatcgagcattatgtgcccaggtactgtttagacactgaggatacagcagtgaacaaatttcttaagcctccaagagtttttattctagtggggggatgcagaaagacattaagccaaataaagtg

SEQ ID NO: 2803 - protein, 35 aa, Homosapiens
MYILEVLSLCVNPKHREDLPRKNICIFGVDILQFV

SEQ ID NO: 2804 - DNA, 1574 bp, Homosapiens
ttattgccagtgaaaacaacctgtacgaagcctttgctcaggttctaaaatatgtttgtccttgcacgaattttgtatatttcaaatatttctgtaaaggtttcttcttttctgttagagtgtggtgttaagccagagtcagtggtttgtgttctcattaaaatgtttgtttaaatcctatgtccaattcaagcctatctaactacatttggtaggattaacatttcatataacaaatggggcttaattaaaaactttaacttggaataaaggaacagggatcactttatcttctgccttcatttaccttagtccaagattcttgcaaaacaggcaactgaacaaacattaggtttatgtaggtaaaatgtgaaagcatttctcctccactttttaaaatttaatttacccagtacagcggggcaccagattacttgatctttgtattttgcagttttgagcctttgtgtcaatcccaagcacagagaggatctgccaaggaaaaacatttgcatcttcggagtagacattttgcagtttgtttaataacaacttctaaagtaagttgaattcatccattgtcactgattcaccaagtggatgttgcattgtggaatttgcctgagtactgttgtcattctgctcagccaggcacggtcagtttcttggccagggacattgctatgtgctgtgtgcaagctctttagaagagagattggattttcttggcattatcagcactcatgctatttagtctacttctattttgactgactctttaaattagtacaatttttctacttgtcatataactcctggaacaatagtacgggaagccgtgatccttttccctgactcatgattttagtctttttccaaatcgctgttttttttttttttttttttttttttgctgctccaacgaccagcatgtgttggagcagatctccatggtaagccaaaagtggacttgtcagcctataactactctgcagctgccactaactctacaggcacagtaactacactttatacaggagcacatgccaaagtgcctgggaggtgccaataaaatcaagaatgttaatctttgctgaaatatatgctaacaaatgttaagcaagggaaactgaagacttagtcatgtggattgttagcagtgatctgcattctgtaaaagaggtactttcccatgatgtaggcatgaagtggtgccagtaagcgtagagcggaaatgttgactttagttaacattgggtttagcatttccagtgcagcattatcagtgggcctttaaaaatacttcgtaagtacattagctttcactttgttgttaaattatagcagactcattatagagaacaagtttgccttgattttgtttaaaatgacttctgctaagcacccagaagataaaattgacatatttttataatataagcatactttttttgtacattgtgttcattcttgaataaaatgagttctgtgttggcttgtagatactaaaaagaaagtattgattttgattcaataaatgttttctttcaatcctggttggcctttcctttaaa

SEQ ID NO: 2805 - protein, 57 aa, Homosapiens
MLHCGICLSTVVILLSQARSVSWPGTLLCAVCKLFRREIGFSWHYQHSCYLVYFYFD

SEQ ID NO: 2806 - DNA, 851 bp, Homosapiens
aaaaaaactttattgtagatatatgcaacctctaggctcattttgacccctacctcatctttttaatgcccatcatcttaatgttgtatctggtttgcctttgatgcctagaagaagaaaaaaatctttgcatttactaaagaaaacagttactccctgagtaagatcaagtgtttgatctgggaccttataaggaagttctcaaagaatggtgatcttggtattgaagaaagctgattttcatctcattagaagccctcaaggacgttttgttctgaagactctcatattcagctctgggaaataattatttctctgattatcccttcaacttttgaagattaccagatttctcaacagcaatactgtggtctggaataaaagggggcacttccctcagactttggagaagacattattttgaactagaattctgtctacagccatactctcaatgaagtaagatggcagaataaagatgattacactagcaatgaatggctttactttccacacacccatcctgaaaacactctgcaagaatagagaacaaatccagtaataaaattaaatctcaggatttctaggtctgaagccaacctagaaggcattctatccaaattagaacaaacaatgagagatttttagaacaactgtttacaagaagcatgattaaatggataccattcaatagcaggaagataccatgcattcaaaacattttttatcgagcattatgtgcccaggtactgtttagacactgaggatacagcagtgaacaaatttcttaagcctccaagagtttttattctagtggggggatgcagaaagacattaagccaaataaagtg

SEQ ID NO: 2807 - protein, 32 aa, Homosapiens
MVILVLKKADFHLIRSPQGRFVLKTLIFSSGK

SEQ ID NO: 2808 - DNA, 8192 bp, Homosapiens
cccgcgcagacttgtctccggccagtcgcgcgtgggtagaggccttaggcgggcgttgcgaagggttgtttgctagagttcggaccttgttacggcgcgaagttccctccttggggcgggggaaaggtaccgcacccgctacctagtgtgaatgaactgtggcgtgggctgctaagggcaggctgcggagtacccgggccgtggccatgaactcacccgtggaccctggcgctaggcaggcgttgaggaagaagccacccgagcggactcccgaggacttaaatactatttattcttatcttcatggaatggaaatattatcaaatctcagggaacatcagcttagattaatgtctgcaagagcacgctatgagagatacagtggcaatcaggttctcttttgttcagaaacgattgccagatgttggtatatcctactttctggatctgtgcttgtgaaaggctccatggtcttgcctccttgcagttttggtaagcagtttggaggaaaaagaggatgtgattgtcttgtattagagccttcagaaatgattgtggtagagaatgccaaagataatgaagatagtattctacaaagagaaattcctgccagacaatcccgaagaagatttcggaaaattaactataaaggagagcgccaaaccattactgatgatgtggaggttaacagctatctttctcttccagctgatcttaccaagatgcatctcacagaaaaccctcatccacaggtgactcatgtgtcttctagtcagtctggttgtagcattgccagtgactctggaagcagcagtttatctgatatctatcaggctacggagagtgaggtaggagatgtagatttgacacgtcttccagaaggacctgttgattctgaggatgacgaagaggaagatgaagagattgatcgaacagatccattgcaggggcgagatcttgttcgagaatgtcttgaaaaagaacctgcagacaaaactgatgatgacattgaacaattgctggagtttatgcaccagctccctgcatttgcaaacatgaccatgtctgtaaggagagaactctgctcagtgatgatttttgaagtggtagagcaggctggagctattattcttgaagatgggcaagagcttgactcatggtatgttattttaaacggcactgtggaaatcagtcatccagatggaaaagttgaaaatttgtttatgggaaatagttttggaattactcccactctggataagcagtacatgcatggaattgtcaggactaaagtagatgattgtcagtttgtctgcatagcccagcaagattattggagaattttaaaccatgtggaaaaaaatacccataaagttgaggaagagggagaaattgttatggtacatgagcatcgggaactagaccggagtggaaccaggaaaggacacattgtgatcaaggcaacacctgagcgtctcataatgcatttaatagaagaacattccatcgtggatccaacttatatagaagattttctattaacttacaggacatttcttgaaagtcctttggatgttgggatcaaactattggaatggtttaagatcgacagcttaagagataaggtgacacggattgtattattatgggtaaataatcattttaatgattttgaaggtgaccctgctatgactcgatttctagaggaatttgaaaaaaatctggaagatacaaagatgaatggtcatctccggttattgaatattgcctgtgctgcaaaggctaagtggagacaggttgtgctgcaaaaggcttcccgcgagtcccctctacaattcagccttaatggagggagtgagaagggatttggtatttttgttgaaggagtagaacctggtagcaaagctgctgattcaggactgaaacgtggtgatcagattatggaagtaaatggacaaaactttgagaatattacatttatgaaagccgttgaaattttgaggaataatactcatcttgcacttactgtgaagaccaacatttttgtgttcaaagagttactttttaggactgaacaagagaaatctggtgttcctcatattcccaaaattgctgaaaaaaaaagtaatcgccattctatccagcatgtgccaggagatattgaacagacatcacaggagaaaggaagtaagaaagttaaagcaaatactgtttcaggtggaagaaacaaaatcaggaagattttggataaaacacgatttagtatcttgcctccaaagctatttagtgatggaggcctaagccaatcacaagatgacagcattgtgggaacaaggcactgtaggcatagtctggctataatgcccatccctggaacactctcatccagcagccctgatctcctgcagcctaccaccagtatgttggatttttccaatccttcagatatccctgatcaagttataagagttttcaaagtggatcagcaaagttgctacattatcatcagtaaagacaccacagctaaagaagtagtttttcatgctgttcatgaatttggtttgaccggtgcatccgacacatattctctctgtgaagtttctgttactcctgagggtgtcataaaacagagaagacttccagatcagttctccaaattagctgatagaattcaactcaatggaaggtattacttaaaaaataacatggaaacagaaaccttatgttcagatgaagatgctcaagaactagttaaggaaagccagctatccatgctgcagctcagtaccattgaggtggccacccagctgtcaatgagggactttgatttgtttcgtaatattgaaccgactgagtacatcgatgacctttttaagttaaattccaaaacaggaaatactcatttgaagaggtttgaggacattgtaaaccaagagacattctgggttgcctcagaaattttaactgaagcaaatcagctcaaacgaatgaagattattaagcattttattaaaattgcacttcattgtcgagaatgtaagaacttcaattccatgtttgcaataataagtggcttgaacctggcatctgtagcaagactcagaggaacttgggaaaagttaccaagcaaatacgagaaacatcttcaagatctacaagacatttttgatccatctagaaacatggcaaagtatagaaatattcttagtagtcaaagtatgcagcctccaattattccactcttccctgttgtcaagaaagatatgacatttctacatgaaggaaatgactccaaagtagatggtttagtaaactttgagaagttaagaatgatttccaaggaaatccgccaagttgttcgaatgacttctgctaacatggacccagctatgatgtttcgacagaggtcactgagtcaaggaagcacaaattcaaacatgctggatgttcagggaggtgctcacaaaaaaagggcacgccgcagctctctgcttaatgccaagaagctatatgaggatgcccaaatggcaaggaaggtgaagcagtatctttccagtctcgatgtagagacagatgaggagaagttccagatgatgtcattacagtgggagcctgcatatggtaccttgaccaagaatttaagtgagaaaagatcagccaaatcatctgaaatgtctccagtgcctatgaggtcagctggccaaacaactaaagcccacttgcatcaaccccacagagtaagccaggtgcttcaggtgccagctgttaatttgcaccccatcaggaagaagggacaaacaaaagaccctgcactgaatacaagtttacctcagaaagttttaggaacaactgaagaaataagtggtaagaagcatacagaagacactatttctgtggcgtcatctttacattctagtcctcctgcatctcctcaaggctcccctcacaaaggttacacacttattccatcagctaaatctgacaacttgtctgactccagccatagtgagatttcttcacggtccagcatcgtgagcaattgttctgttgactccatgtctgcagctctacaggatgaacggtgttcctctcaggccctggcagtccctgaatccactggggcattggaaaagacagagcacgcttcagggataggagatcatagtcaacatggccctgggtggacactcttgaagccatctctaatcaagtgtttagctgtctcatcgtctgtgagcaatgaagagatttctcaagagcatatcattatagaagcagctgacagtggtcgtggaagttggacttcgtgttcaagcagctcccatgacaacttccaaagccttccaaacccaaaaagctgggattttttgaactcttacagacatacccatttggatgaccccattgctgaagttgaacccactgactctgagccctattcctgttctaaaagctgctctagaacttgtgggcagtgtaaaggaagcctagagagaaagagttggacctcctccagttctctgtctgacacgtatgaaccaaactatgggacagttaaacagagagtattggagagcaccccagctgagtcatctgaaggcttggaccccaaggatgccactgacccagtttataaaactgtcacttcaagtacagaaaagggcttgattgtgtactgtgtcacctcacccaagaaggacgataggtatagggagccacctcccactcctccaggatatttggggatttctttagcggacctaaaggaaggaccccacacacacctaaaacctccagattatagtgtggcagtgcagaggtcaaagatgatgcataacagcctctctagactgccaccagcttctctcagtagcaacctcgtggcctgtgttccatcgaagattgtaactcagcctcagaggcataatttgcagccattccatcctaaactaggagatgtgactgatgcagatagcgaagcagatgaaaatgaacaagtttcagcagtctagcctttggatgacctatttgaaaaccactgaaagtcgtggaggaatgggcaagaaccacctcatgattctgcaggccattgctaacgaacagctcattgctacaaccagtccagaggttttattccctctactccgagcaatgaaatagacctgagttatgcttcctttcatttaatttctgcagataaatagtttcctgagcaatggatgctatgcctggataccagtctccactttgcacgccggaactgccttgggaccacagttacagaaaaaatgtaaactcagagtgatccttgtgtatattgctatagatttttctttaacaagctattttaaagataatggcattattatttccaagccatagcttgggctgaaggacaaattgaaattgtctgccaataccaaggatattcttgtatatttgaaaaataacttattatttgaattgttgtggttttgtttgtatttgagagctcttgttagctgatattcatgtttgaggtcataaaattgtctctggtctgaccaaacagaagtcatctttacagaggtgatatgcttgatctacacagagatgtgacttgatctgtagcaccaatgcaatgtaggtctcagtttgagagaaataggaagccctttgcagttgaggtgttaggaacctgctggtcatggtgtggaaggccaaatgaagctgccacagggtttcttgtcagtcctttgggaaatgggagggagtagtttggggaggagggtgggaaccctaatttccacagaatgaaattttgatgttaaatgacatgtatacaaattcttccttaagtgaaagttatgctgcatcgaattgtaactgaaagtatagatccaacaaatagagactgggttctagagagttctggtctatagaaacccaaaactaaaatctctcataactcaagtatggaatactttttttaaagaaattcttatcatgggtgttgtaataatgaagacgaatttgactttatgcagtgttctgcagcatgcctcccccacatctcatagcaccaggttgtgtctgacctgacataccctgcagctctcagctggctgcagtaacattttgtgggagaaagaggagctggagttacagaaatgattgtctcttggttctcagtttttagcccttgagaggacatacttttccagcctcatgggtatggcactcttaattaaaatttcagtgactgtttactggatgaggcagatttttcacatttttgcaaattaaatatattttatatatattaagtttaattttttcagtttttttaatgtaaaagcaagtgaaattttaataaacttctgtaattaccaaaaaaaaaaaaaaaaaaaaagccaaagccattaacgtgcactacccagatcaacttggagccaaaaggggtttacttctgaatggctgtccgtatgtgtccacataggatttagttggtttgtggcctcctttatagaaatgtgttgtctttccctagctgtctctgctgtctgtcttcctgcatatcccccttcattttaaaatcatgaatcagttgtaagtggtaaatggtagtagttcatctttcccatcaacatgattgtctctttattttaggaataatagcatttcaaaaattcctgtggtaaagaaacattaatctgaaacttaagccttagaaattaatcgcaggtatgatagaatgaggcttggtggttccatagctttcttggtcctttgaaatgggaaataacctgaaccaaaaatcctagtttgaaagttacacttcagtgatttggcctataaacagtggtcctatgattatacattttttccttcactgatttgcataattttgttttcatggccacagcaaaacaatgtgaaatatatttttgctatacccactttttttatcaaattcagatgtctactctcaccattttatattcatttccccagaaaaatgtgctgttttcataatgtctttatttagcaggtctttcaaaccaaatggaagccttacctgtctttgtccttaatagtgtaaatatcttgcacagagtgttgaggcctatggttttggacttgcaccttacagctgcctttgttttatctatctagctttaactgtgagtgttcagatcagctgatcacattgatcaggagccaaagccaaatgctttgtagtttgttatgtatgtatcccttaaaaaatcatgaggttttgatttttatattttaactaagggtacattcctgccttctcttagtttgtcatatgactagaacaagagaagtcttaagctgcatttactccaattccagatctccatttgtttttgttttataaatttataatcttaatgaagagactagtgccctctcttcctgccacaactctcaatctgccaagactgttgaagcagttaacgctcagtgcaaacttttgccaaatagtaagtttcaacaaaatatctttatagtgaaagattttgagaattagtaaatccagtacatgattccataaaagcttattaaagttaataattctaatttactccaaatgattactttcaatatgatctttggggagaaaaagcctttagtgaattttcttgagggtgataaatcacatcattgcgatctatatcacctccttgagaatctctcccaggctgaaaatgtgatggtaatcatgggtgtttttaagaacaaatctaatttttatcaagtgttctttcctctacaaaaaaggaaggaggagaaaaagcttccttaaaactgattattttgattcaattttaagtttctaaaaaaggtgatattaaagtatatgtattccttcagcattaccttaaaggctagaaaaacgggataaatcttcagaaaagtgtcaaaagtgtcacagtacatgttcaaatttaaacttgaatcctggttcatctttgacttttgttgtgcatttttaatgcttctttatttttgatacacagaatgcagttgaacttgatcttttaaaattgagacatgtaagctaatcagcaaaagacagaaacaaaactgcacatctgtaataatcagatagcaattctactgcacaattcattgattgtaaggtatcctgtaacaagcaatgtttgtctcctattttttgatac

SEQ ID NO: 2809 - protein, 1601 aa, Homosapiens
MNSPVDPGARQALRKKPPERTPEDLNTIYSYLHGMEILSNLREHQLRLMSARARYERYSGNQVLFCSETIARCWYILLSGSVLVKGSMVLPPCSFGKQFGGKRGCDCLVLEPSEMIVVENAKDNEDSILQREIPARQSRRRFRKINYKGERQTITDDVEVNSYLSLPADLTKMHLTENPHPQVTHVSSSQSGCSIASDSGSSSLSDIYQATESEVGDVDLTRLPEGPVDSEDDEEEDEEIDRTDPLQGRDLVRECLEKEPADKTDDDIEQLLEFMHQLPAFANMTMSVRRELCSVMIFEVVEQAGAIILEDGQELDSWYVILNGTVEISHPDGKVENLFMGNSFGITPTLDKQYMHGIVRTKVDDCQFVCIAQQDYWRILNHVEKNTHKVEEEGEIVMVHEHRELDRSGTRKGHIVIKATPERLIMHLIEEHSIVDPTYIEDFLLTYRTFLESPLDVGIKLLEWFKIDSLRDKVTRIVLLWVNNHFNDFEGDPAMTRFLEEFEKNLEDTKMNGHLRLLNIACAAKAKWRQVVLQKASRESPLQFSLNGGSEKGFGIFVEGVEPGSKAADSGLKRGDQIMEVNGQNFENITFMKAVEILRNNTHLALTVKTNIFVFKELLFRTEQEKSGVPHIPKIAEKKSNRHSIQHVPGDIEQTSQEKGSKKVKANTVSGGRNKIRKILDKTRFSILPPKLFSDGGLSQSQDDSIVGTRHCRHSLAIMPIPGTLSSSSPDLLQPTTSMLDFSNPSDIPDQVIRVFKVDQQSCYIIISKDTTAKEVVFHAVHEFGLTGASDTYSLCEVSVTPEGVIKQRRLPDQFSKLADRIQLNGRYYLKNNMETETLCSDEDAQELVKESQLSMLQLSTIEVATQLSMRDFDLFRNIEPTEYIDDLFKLNSKTGNTHLKRFEDIVNQETFWVASEILTEANQLKRMKIIKHFIKIALHCRECKNFNSMFAIISGLNLASVARLRGTWEKLPSKYEKHLQDLQDIFDPSRNMAKYRNILSSQSMQPPIIPLFPVVKKDMTFLHEGNDSKVDGLVNFEKLRMISKEIRQVVRMTSANMDPAMMFRQRSLSQGSTNSNMLDVQGGAHKKRARRSSLLNAKKLYEDAQMARKVKQYLSSLDVETDEEKFQMMSLQWEPAYGTLTKNLSEKRSAKSSEMSPVPMRSAGQTTKAHLHQPHRVSQVLQVPAVNLHPIRKKGQTKDPALNTSLPQKVLGTTEEISGKKHTEDTISVASSLHSSPPASPQGSPHKGYTLIPSAKSDNLSDSSHSEISSRSSIVSNCSVDSMSAALQDERCSSQALAVPESTGALEKTEHASGIGDHSQHGPGWTLLKPSLIKCLAVSSSVSNEEISQEHIIIEAADSGRGSWTSCSSSSHDNFQSLPNPKSWDFLNSYRHTHLDDPIAEVEPTDSEPYSCSKSCSRTCGQCKGSLERKSWTSSSSLSDTYEPNYGTVKQRVLESTPAESSEGLDPKDATDPVYKTVTSSTEKGLIVYCVTSPKKDDRYREPPPTPPGYLGISLADLKEGPHTHLKPPDYSVAVQRSKMMHNSLSRLPPASLSSNLVACVPSKIVTQPQRHNLQPFHPKLGDVTDADSEADENEQVSAV

SEQ ID NO: 2810 - DNA, 8192 bp, Homosapiens
gctgtaggagcaggggcctagcaagcgcccagcggagcgacccctgcctggccgtggctagcatggcccctacgctgttccagaagctcttcagcaagaggaccgggctgggcgcgcccggccgcgacgcccgggacccagattgcgggttcagttggcctttaccagagtttgatccaagccagattcgactgattgtatatcaagactgtgaaagacgagggagaaatgttttgtttgactccagtgttaagagaagaaatgaggacatatcagtatcggacttaaatactatttattcttatcttcatggaatggaaatattatcaaatctcagggaacatcagcttagattaatgtctgcaagagcacgctatgagagatacagtggcaatcaggttctcttttgttcagaaacgattgccagatgttggtatatcctactttctggatctgtgcttgtgaaaggctccatggtcttgcctccttgcagttttggtaagcagtttggaggaaaaagaggatgtgattgtcttgtattagagccttcagaaatgattgtggtagagaatgccaaagataatgaagatagtattctacaaagagaaattcctgccagacaatcccgaagaagatttcggaaaattaactataaaggagagcgccaaaccattactgatgatgtggaggttaacagctatctttctcttccagctgatcttaccaagatgcatctcacagaaaaccctcatccacaggtgactcatgtgtcttctagtcagtctggttgtagcattgccagtgactctggaagcagcagtttatctgatatctatcaggctacggagagtgaggtaggagatgtagatttgacacgtcttccagaaggacctgttgattctgaggatgacgaagaggaagatgaagagattgatcgaacagatccattgcaggggcgagatcttgttcgagaatgtcttgaaaaagaacctgcagacaaaactgatgatgacattgaacaattgctggagtttatgcaccagctccctgcatttgcaaacatgaccatgtctgtaaggagagaactctgctcagtgatgatttttgaagtggtagagcaggctggagctattattcttgaagatgggcaagagcttgactcatggtatgttattttaaacggcactgtggaaatcagtcatccagatggaaaagttgaaaatttgtttatgggaaatagttttggaattactcccactctggataagcagtacatgcatggaattgtcaggactaaagtagatgattgtcagtttgtctgcatagcccagcaagattattggagaattttaaaccatgtggaaaaaaatacccataaagttgaggaagagggagaaattgttatggtacatgagcatcgggaactagaccggagtggaaccaggaaaggacacattgtgatcaaggcaacacctgagcgtctcataatgcatttaatagaagaacattccatcgtggatccaacttatatagaagattttctattaacttacaggacatttcttgaaagtcctttggatgttgggatcaaactattggaatggtttaagatcgacagcttaagagataaggtgacacggattgtattattatgggtaaataatcattttaatgattttgaaggtgaccctgctatgactcgatttctagaggaatttgaaaaaaatctggaagatacaaagatgaatggtcatctccggttattgaatattgcctgtgctgcaaaggctaagtggagacaggttgtgctgcaaaaggcttcccgcgagtcccctctacaattcagccttaatggagggagtgagaagggatttggtatttttgttgaaggagtagaacctggtagcaaagctgctgattcaggactgaaacgtggtgatcagattatggaagtaaatggacaaaactttgagaatattacatttatgaaagccgttgaaattttgaggaataatactcatcttgcacttactgtgaagaccaacatttttgtgttcaaagagttactttttaggactgaacaagagaaatctggtgttcctcatattcccaaaattgctgaaaaaaaaagtaatcgccattctatccagcatgtgccaggagatattgaacagacatcacaggagaaaggaagtaagaaagttaaagcaaatactgtttcaggtggaagaaacaaaatcaggaagattttggataaaacacgatttagtatcttgcctccaaagctatttagtgatggaggcctaagccaatcacaagatgacagcattgtgggaacaaggcactgtaggcatagtctggctataatgcccatccctggaacactctcatccagcagccctgatctcctgcagcctaccaccagtatgttggatttttccaatccttcagatatccctgatcaagttataagagttttcaaagtggatcagcaaagttgctacattatcatcagtaaagacaccacagctaaagaagtagtttttcatgctgttcatgaatttggtttgaccggtgcatccgacacatattctctctgtgaagtttctgttactcctgagggtgtcataaaacagagaagacttccagatcagttctccaaattagctgatagaattcaactcaatggaaggtattacttaaaaaataacatggaaacagaaaccttatgttcagatgaagatgctcaagaactagttaaggaaagccagctatccatgctgcagctcagtaccattgaggtggccacccagctgtcaatgagggactttgatttgtttcgtaatattgaaccgactgagtacatcgatgacctttttaagttaaattccaaaacaggaaatactcatttgaagaggtttgaggacattgtaaaccaagagacattctgggttgcctcagaaattttaactgaagcaaatcagctcaaacgaatgaagattattaagcattttattaaaattgcacttcattgtcgagaatgtaagaacttcaattccatgtttgcaataataagtggcttgaacctggcatctgtagcaagactcagaggaacttgggaaaagttaccaagcaaatacgagaaacatcttcaagatctacaagacatttttgatccatctagaaacatggcaaagtatagaaatattcttagtagtcaaagtatgcagcctccaattattccactcttccctgttgtcaagaaagatatgacatttctacatgaaggaaatgactccaaagtagatggtttagtaaactttgagaagttaagaatgatttccaaggaaatccgccaagttgttcgaatgacttctgctaacatggacccagctatgatgtttcgacagaggtcactgagtcaaggaagcacaaattcaaacatgctggatgttcagggaggtgctcacaaaaaaagggcacgccgcagctctctgcttaatgccaagaagctatatgaggatgcccaaatggcaaggaaggtgaagcagtatctttccagtctcgatgtagagacagatgaggagaagttccagatgatgtcattacagtgggagcctgcatatggtaccttgaccaagaatttaagtgagaaaagatcagccaaatcatctgaaatgtctccagtgcctatgaggtcagctggccaaacaactaaagcccacttgcatcaaccccacagagtaagccaggtgcttcaggtgccagctgttaatttgcaccccatcaggaagaagggacaaacaaaagaccctgcactgaatacaagtttacctcagaaagttttaggaacaactgaagaaataagtggtaagaagcatacagaagacactatttctgtggcgtcatctttacattctagtcctcctgcatctcctcaaggctcccctcacaaaggttacacacttattccatcagctaaatctgacaacttgtctgactccagccatagtgagatttcttcacggtccagcatcgtgagcaattgttctgttgactccatgtctgcagctctacaggatgaacggtgttcctctcaggccctggcagtccctgaatccactggggcattggaaaagacagagcacgcttcagggataggagatcatagtcaacatggccctgggtggacactcttgaagccatctctaatcaagtgtttagctgtctcatcgtctgtgagcaatgaagagatttctcaagagcatatcattatagaagcagctgacagtggtcgtggaagttggacttcgtgttcaagcagctcccatgacaacttccaaagccttccaaacccaaaaagctgggattttttgaactcttacagacatacccatttggatgaccccattgctgaagttgaacccactgactctgagccctattcctgttctaaaagctgctctagaacttgtgggcagtgtaaaggaagcctagagagaaagagttggacctcctccagttctctgtctgacacgtatgaaccaaactatgggacagttaaacagagagtattggagagcaccccagctgagtcatctgaaggcttggaccccaaggatgccactgacccagtttataaaactgtcacttcaagtacagaaaagggcttgattgtgtactgtgtcacctcacccaagaaggacgataggtatagggagccacctcccactcctccaggatatttggggatttctttagcggacctaaaggaaggaccccacacacacctaaaacctccagattatagtgtggcagtgcagaggtcaaagatgatgcataacagcctctctagactgccaccagcttctctcagtagcaacctcgtggcctgtgttccatcgaagattgtaactcagcctcagaggcataatttgcagccattccatcctaaactaggagatgtgactgatgcagatagcgaagcagatgaaaatgaacaagtttcagcagtctagcctttggatgacctatttgaaaaccactgaaagtcgtggaggaatgggcaagaaccacctcatgattctgcaggccattgctaacgaacagctcattgctacaaccagtccagaggttttattccctctactccgagcaatgaaatagacctgagttatgcttcctttcatttaatttctgcagataaatagtttcctgagcaatggatgctatgcctggataccagtctccactttgcacgccggaactgccttgggaccacagttacagaaaaaatgtaaactcagagtgatccttgtgtatattgctatagatttttctttaacaagctattttaaagataatggcattattatttccaagccatagcttgggctgaaggacaaattgaaattgtctgccaataccaaggatattcttgtatatttgaaaaataacttattatttgaattgttgtggttttgtttgtatttgagagctcttgttagctgatattcatgtttgaggtcataaaattgtctctggtctgaccaaacagaagtcatctttacagaggtgatatgcttgatctacacagagatgtgacttgatctgtagcaccaatgcaatgtaggtctcagtttgagagaaataggaagccctttgcagttgaggtgttaggaacctgctggtcatggtgtggaaggccaaatgaagctgccacagggtttcttgtcagtcctttgggaaatgggagggagtagtttggggaggagggtgggaaccctaatttccacagaatgaaattttgatgttaaatgacatgtatacaaattcttccttaagtgaaagttatgctgcatcgaattgtaactgaaagtatagatccaacaaatagagactgggttctagagagttctggtctatagaaacccaaaactaaaatctctcataactcaagtatggaatactttttttaaagaaattcttatcatgggtgttgtaataatgaagacgaatttgactttatgcagtgttctgcagcatgcctcccccacatctcatagcaccaggttgtgtctgacctgacataccctgcagctctcagctggctgcagtaacattttgtgggagaaagaggagctggagttacagaaatgattgtctcttggttctcagtttttagcccttgagaggacatacttttccagcctcatgggtatggcactcttaattaaaatttcagtgactgtttactggatgaggcagatttttcacatttttgcaaattaaatatattttatatatattaagtttaattttttcagtttttttaatgtaaaagcaagtgaaattttaataaacttctgtaattaccaaaaaaaaaaaaaaaaaaaaagccaaagccattaacgtgcactacccagatcaacttggagccaaaaggggtttacttctgaatggctgtccgtatgtgtccacataggatttagttggtttgtggcctcctttatagaaatgtgttgtctttccctagctgtctctgctgtctgtcttcctgcatatcccccttcattttaaaatcatgaatcagttgtaagtggtaaatggtagtagttcatctttcccatcaacatgattgtctctttattttaggaataatagcatttcaaaaattcctgtggtaaagaaacattaatctgaaacttaagccttagaaattaatcgcaggtatgatagaatgaggcttggtggttccatagctttcttggtcctttgaaatgggaaataacctgaaccaaaaatcctagtttgaaagttacacttcagtgatttggcctataaacagtggtcctatgattatacattttttccttcactgatttgcataattttgttttcatggccacagcaaaacaatgtgaaatatatttttgctatacccactttttttatcaaattcagatgtctactctcaccattttatattcatttccccagaaaaatgtgctgttttcataatgtctttatttagcaggtctttcaaaccaaatggaagccttacctgtctttgtccttaatagtgtaaatatcttgcacagagtgttgaggcctatggttttggacttgcaccttacagctgcctttgttttatctatctagctttaactgtgagtgttcagatcagctgatcacattgatcaggagccaaagccaaatgctttgtagtttgttatgtatgtatcccttaaaaaatcatgaggttttgatttttatattttaactaagggtacattcctgccttctcttagtttgtcatatgactagaacaagagaagtcttaagctgcatttactccaattccagatctccatttgtttttgttttataaatttataatcttaatgaagagactagtgccctctcttcctgccacaactctcaatctgccaagactgttgaagcagttaacgctcagtgcaaacttttgccaaatagtaagtttcaacaaaatatctttatagtgaaagattttgagaattagtaaatccagtacatgattccataaaagcttattaaagttaataattctaatttactccaaatgattactttcaatatgatctttggggagaaaaagcctttagtgaattttcttgagggtgataaatcacatcattgcgatctatatcacctccttgagaatctctcccaggctgaaaatgtgatggtaatcatgggtgtttttaagaacaaatctaatttttatcaagtgttctttcctctacaaaaaaggaaggaggagaaaaagcttccttaaaactgattattttgattcaattttaagtttctaaaaaaggtgatattaaagtatatgtattccttcagcattaccttaaaggctagaaaaacgggataaatcttcagaaaagtgtcaaaagtgtcacagtacatgttcaaatttaaacttgaatcctggttcatctttgacttttgttgtgcatttttaatgcttctttatttttgatacacagaatgcagttgaacttgatcttttaaaattgagacatgtaagctaatcagcaaaagacagaaacaaaactgcacatctgtaataatcagatagcaattctactgcacaattcattgattgtaaggtatcctgtaacaagcaatgtttgtctcctattttt

SEQ ID NO: 2811 - protein, 1651 aa, Homosapiens
MAPTLFQKLFSKRTGLGAPGRDARDPDCGFSWPLPEFDPSQIRLIVYQDCERRGRNVLFDSSVKRRNEDISVSDLNTIYSYLHGMEILSNLREHQLRLMSARARYERYSGNQVLFCSETIARCWYILLSGSVLVKGSMVLPPCSFGKQFGGKRGCDCLVLEPSEMIVVENAKDNEDSILQREIPARQSRRRFRKINYKGERQTITDDVEVNSYLSLPADLTKMHLTENPHPQVTHVSSSQSGCSIASDSGSSSLSDIYQATESEVGDVDLTRLPEGPVDSEDDEEEDEEIDRTDPLQGRDLVRECLEKEPADKTDDDIEQLLEFMHQLPAFANMTMSVRRELCSVMIFEVVEQAGAIILEDGQELDSWYVILNGTVEISHPDGKVENLFMGNSFGITPTLDKQYMHGIVRTKVDDCQFVCIAQQDYWRILNHVEKNTHKVEEEGEIVMVHEHRELDRSGTRKGHIVIKATPERLIMHLIEEHSIVDPTYIEDFLLTYRTFLESPLDVGIKLLEWFKIDSLRDKVTRIVLLWVNNHFNDFEGDPAMTRFLEEFEKNLEDTKMNGHLRLLNIACAAKAKWRQVVLQKASRESPLQFSLNGGSEKGFGIFVEGVEPGSKAADSGLKRGDQIMEVNGQNFENITFMKAVEILRNNTHLALTVKTNIFVFKELLFRTEQEKSGVPHIPKIAEKKSNRHSIQHVPGDIEQTSQEKGSKKVKANTVSGGRNKIRKILDKTRFSILPPKLFSDGGLSQSQDDSIVGTRHCRHSLAIMPIPGTLSSSSPDLLQPTTSMLDFSNPSDIPDQVIRVFKVDQQSCYIIISKDTTAKEVVFHAVHEFGLTGASDTYSLCEVSVTPEGVIKQRRLPDQFSKLADRIQLNGRYYLKNNMETETLCSDEDAQELVKESQLSMLQLSTIEVATQLSMRDFDLFRNIEPTEYIDDLFKLNSKTGNTHLKRFEDIVNQETFWVASEILTEANQLKRMKIIKHFIKIALHCRECKNFNSMFAIISGLNLASVARLRGTWEKLPSKYEKHLQDLQDIFDPSRNMAKYRNILSSQSMQPPIIPLFPVVKKDMTFLHEGNDSKVDGLVNFEKLRMISKEIRQVVRMTSANMDPAMMFRQRSLSQGSTNSNMLDVQGGAHKKRARRSSLLNAKKLYEDAQMARKVKQYLSSLDVETDEEKFQMMSLQWEPAYGTLTKNLSEKRSAKSSEMSPVPMRSAGQTTKAHLHQPHRVSQVLQVPAVNLHPIRKKGQTKDPALNTSLPQKVLGTTEEISGKKHTEDTISVASSLHSSPPASPQGSPHKGYTLIPSAKSDNLSDSSHSEISSRSSIVSNCSVDSMSAALQDERCSSQALAVPESTGALEKTEHASGIGDHSQHGPGWTLLKPSLIKCLAVSSSVSNEEISQEHIIIEAADSGRGSWTSCSSSSHDNFQSLPNPKSWDFLNSYRHTHLDDPIAEVEPTDSEPYSCSKSCSRTCGQCKGSLERKSWTSSSSLSDTYEPNYGTVKQRVLESTPAESSEGLDPKDATDPVYKTVTSSTEKGLIVYCVTSPKKDDRYREPPPTPPGYLGISLADLKEGPHTHLKPPDYSVAVQRSKMMHNSLSRLPPASLSSNLVACVPSKIVTQPQRHNLQPFHPKLGDVTDADSEADENEQVSAV

SEQ ID NO: 2812 - DNA, 6272 bp, Homosapiens
gcagacttgtctccggccagtcgcgcgtgggtagaggccttaggcgggcgttgcgaagggttgtttgctagagttcggaccttgttacggcgcgaagttccctccttggggcgggggaaaggtaccgcacccgctacctagtgtgaatgaactgtggcgtgggctgctaagggcaggctgcggagtacccgggccgtggccatgaactcacccgtggaccctggcgctaggcaggcgttgaggaagaagccacccgagcggactcccgaggacttaaatactatttattcttatcttcatggaatggaaatattatcaaatctcagggaacatcagcttagattaatgtctgcaagagcacgctatgagagatacagtggcaatcaggttctcttttgttcagaaacgattgccagatgttggtatatcctactttctggatctgtgcttgtgaaaggctccatggtcttgcctccttgcagttttggtaagcagtttggaggaaaaagaggatgtgattgtcttgtattagagccttcagaaatgattgtggtagagaatgccaaagataatgaagatagtattctacaaagagaaattcctgccagacaatcccgaagaagatttcggaaaattaactataaaggagagcgccaaaccattactgatgatgtggaggttaacagctatctttctcttccagctgatcttaccaagatgcatctcacagaaaaccctcatccacaggtgactcatgtgtcttctagtcagtctggttgtagcattgccagtgactctggaagcagcagtttatctgatatctatcaggctacggagagtgaggtaggagatgtagatttgacacgtcttccagaaggacctgttgattctgaggatgacgaagaggaagatgaagagattgatcgaacagatccattgcaggggcgagatcttgttcgagaatgtcttgaaaaagaacctgcagacaaaactgatgatgacattgaacaattgctggagtttatgcaccagctccctgcatttgcaaacatgaccatgtctgtaaggagagaactctgctcagtgatgatttttgaagtggtagagcaggctggagctattattcttgaagatgggcaagagcttgactcatggtatgttattttaaacggcactgtggaaatcagtcatccagatggaaaagttgaaaatttgtttatgggaaatagttttggaattactcccactctggataagcagtacatgcatggaattgtcaggactaaagtagatgattgtcagtttgtctgcatagcccagcaagattattggagaattttaaaccatgtggaaaaaaatacccataaagttgaggaagagggagaaattgttatggtacatgagcatcgggaactagaccggagtggaaccaggaaaggacacattgtgatcaaggcaacacctgagcgtctcataatgcatttaatagaagaacattccatcgtggatccaacttatatagaagattttctattaacttacaggacatttcttgaaagtcctttggatgttgggatcaaactattggaatggtttaagatcgacagcttaagagataaggtgacacggattgtattattatgggtaaataatcattttaatgattttgaaggtgaccctgctatgactcgatttctagaggaatttgaaaaaaatctggaagatacaaagatgaatggtcatctccggttattgaatattgcctgtgctgcaaaggctaagtggagacaggttgtgctgcaaaaggcttcccgcgagtcccctctacaattcagccttaatggagggagtgagaagggatttggtatttttgttgaaggagtagaacctggtagcaaagctgctgattcaggactgaaacgtggtgatcagattatggaagtaaatggacaaaactttgagaatattacatttatgaaagccgttgaaattttgaggaataatactcatcttgcacttactgtgaagaccaacatttttgtgttcaaagagttactttttaggactgaacaagagaaatctggtgttcctcatattcccaaaattgctgaaaaaaaaagtaatcgccattctatccagcatgtgccaggagatattgaacagacatcacaggagaaaggaagtaagaaagttaaagcaaatactgtttcaggtggaagaaacaaaatcaggaagattttggataaaacacgatttagtatcttgcctccaaagctatttagtgatggaggcctaagccaatcacaagatgacagcattgtgggaacaaggcactgtaggcatagtctggctataatgcccatccctggaacactctcatccagcagccctgatctcctgcagcctaccaccagtatgttggatttttccaatccttcagctgttggtttttattatatccctgatcaagttataagagttttcaaagtggatcagcaaagttgctacattatcatcagtaaagacaccacagctaaagaagtagtttttcatgctgttcatgaatttggtttgaccggtgcatccgacacatattctctctgtgaagtttctgttactcctgagggtgtcataaaacagagaagacttccagatcagttctccaaattagctgatagaattcaactcaatggaaggtattacttaaaaaataacatggaaacagaaaccttatgttcagatgaagatgctcaagaactagttaaggaaagccagctatccatgctgcagctcagtaccattgaggtggccacccagctgtcaatgagggactttgatttgtttcgtaatattgaaccgactgagtacatcgatgacctttttaagttaaattccaaaacaggaaatactcatttgaagaggtttgaggacattgtaaaccaagagacattctgggttgcctcagaaattttaactgaagcaaatcagctcaaacgaatgaagattattaagcattttattaaaattgcacttcattgtcgagaatgtaagaacttcaattccatgtttgcaataataagtggcttgaacctggcatctgtagcaagactcagaggaacttgggaaaagttaccaagcaaatacgagaaacatcttcaagatctacaagacatttttgatccatctagaaacatggcaaagtatagaaatattcttagtagtcaaagtatgcagcctccaattattccactcttccctgttgtcaagaaagatatgacatttctacatgaaggaaatgactccaaagtagatggtttagtaaactttgagaagttaagaatgatttccaaggaaatccgccaagttgttcgaatgacttctgctaacatggacccagctatgatgtttcgacagaggaagaagaggtggcggagtctggggtcactgagtcaaggaagcacaaattcaaacatgctggatgttcagggaggtgctcacaaaaaaagggcacgccgcagctctctgcttaatgccaagaagctatatgaggatgcccaaatggcaaggaaggtgaagcagtatctttccagtctcgatgtagagacagatgaggagaagttccagatgatgtcattacagtgggagcctgcatatggtaccttgaccaagaatttaagtgagaaaagatcagccaaatcatctgaaatgtctccagtgcctatgaggtcagctggccaaacaactaaagcccacttgcatcaaccccacagagtaagccaggtgcttcaggtgccagctgttaatttgcaccccatcaggaagaagggacaaacaaaagaccctgcactgaatacaagtttacctcagaaagttttaggaacaactgaagaaataagtggtaagaagcatacagaagacactatttctgtggcgtcatctttacattctagtcctcctgcatctcctcaaggctcccctcacaaaggttacacacttattccatcagctaaatctgacaacttgtctgactccagccatagtgagatttcttcacggtccagcatcgtgagcaattgttctgttgactccatgtctgcagctctacaggatgaacggtgttcctctcaggccctggcagtccctgaatccactggggcattggaaaagacagagcacgcttcagggataggagatcatagtcaacatggccctgggtggacactcttgaagccatctctaatcaagtgtttagctgtctcatcgtctgtgagcaatgaagagatttctcaagagcatatcattatagaagcagctgacagtggtcgtggaagttggacttcgtgttcaagcagctcccatgacaacttccaaagccttccaaacccaaaaagctgggattttttgaactcttacagacatacccatttggatgaccccattgctgaagttgaacccactgactctgagccctattcctgttctaaaagctgctctagaacttgtgggcagtgtaaaggaagcctagagagaaagagttggacctcctccagttctctgtctgacacgtatgaaccaaactatgggacagttaaacagagagtattggagagcaccccagctgagtcatctgaaggcttggaccccaaggatgccactgacccagtttataaaactgtcacttcaagtacagaaaagggcttgattgaaaatgaacaagtttcagcagtctagcctttggatgacctatttgaaaaccactgaaagtcgtggaggaatgggcaagaaccacctcatgattctgcaggccattgctaacgaacagctcattgctacaaccagtccagaggttttattccctctactccgagcaatgaaatagacctgagttatgcttcctttcatttaatttctgcagataaatagtttcctgagcaatggatgctatgcctggataccagtctccactttgcacgccggaactgccttgggaccacagttacagaaaaaatgtaaactcagagtgatccttgtgtatattgctatagatttttctttaacaagctattttaaagataatggcattattatttccaagccatagcttgggctgaaggacaaattgaaattgtctgccaataccaaggatattcttgtatatttgaaaaataacttattatttgaattgttgtggttttgtttgtatttgagagctcttgttagctgatattcatgtttgaggtcataaaattgtctctggtctgaccaaacagaagtcatctttacagaggtgatatgcttgatctacacagagatgtgacttgatctgtagcaccaatgcaatgtaggtctcagtttgagagaaataggaagccctttgcagttgaggtgttaggaacctgctggtcatggtgtggaaggccaaatgaagctgccacagggtttcttgtcagtcctttgggaaatgggagggagtagtttggggaggagggtgggaaccctaatttccacagaatgaaattttgatgttaaatgacatgtatacaaattcttccttaagtgaaagttatgctgcatcgaattgtaactgaaagtatagatccaacaaatagagactgggttctagagagttctggtctatagaaacccaaaactaaaatctctcataactcaagtatggaatactttttttaaagaaattcttatcatgggtgttgtaataatgaagacgaatttgactttatgcagtgttctgcagcatgcctcccccacatctcatagcaccaggttgtgtctgacctgacataccctgcagctctcagctggctgcagtaacattttgtgggagaaagaggagctggagttacagaaatgattgtctcttggttctcagtttttagcccttgagaggacatacttttccagcctcatgggtatggcactcttaattaaaatttcagtgactgtttactggatgaggcagatttttcacatttttgcaaattaaatatattttatatatattaagtttaattttttcagtttttttaatgtaaaagcaagtgaaattttaataaacttctgtaattaccaaaaaaaaaaaaaaaaaaaaagccaaagccattaacgtgcactacccagatcaacttggagccaaaaggggtttacttctgaatggctgtccgtatgtgtccacataggatttagttggtttgtggcctcctttatagaaatgtgttgtctttccctagctgtctctgctgtctgtcttcctg

SEQ ID NO: 2813 - protein, 1509 aa, Homosapiens
MNSPVDPGARQALRKKPPERTPEDLNTIYSYLHGMEILSNLREHQLRLMSARARYERYSGNQVLFCSETIARCWYILLSGSVLVKGSMVLPPCSFGKQFGGKRGCDCLVLEPSEMIVVENAKDNEDSILQREIPARQSRRRFRKINYKGERQTITDDVEVNSYLSLPADLTKMHLTENPHPQVTHVSSSQSGCSIASDSGSSSLSDIYQATESEVGDVDLTRLPEGPVDSEDDEEEDEEIDRTDPLQGRDLVRECLEKEPADKTDDDIEQLLEFMHQLPAFANMTMSVRRELCSVMIFEVVEQAGAIILEDGQELDSWYVILNGTVEISHPDGKVENLFMGNSFGITPTLDKQYMHGIVRTKVDDCQFVCIAQQDYWRILNHVEKNTHKVEEEGEIVMVHEHRELDRSGTRKGHIVIKATPERLIMHLIEEHSIVDPTYIEDFLLTYRTFLESPLDVGIKLLEWFKIDSLRDKVTRIVLLWVNNHFNDFEGDPAMTRFLEEFEKNLEDTKMNGHLRLLNIACAAKAKWRQVVLQKASRESPLQFSLNGGSEKGFGIFVEGVEPGSKAADSGLKRGDQIMEVNGQNFENITFMKAVEILRNNTHLALTVKTNIFVFKELLFRTEQEKSGVPHIPKIAEKKSNRHSIQHVPGDIEQTSQEKGSKKVKANTVSGGRNKIRKILDKTRFSILPPKLFSDGGLSQSQDDSIVGTRHCRHSLAIMPIPGTLSSSSPDLLQPTTSMLDFSNPSAVGFYYIPDQVIRVFKVDQQSCYIIISKDTTAKEVVFHAVHEFGLTGASDTYSLCEVSVTPEGVIKQRRLPDQFSKLADRIQLNGRYYLKNNMETETLCSDEDAQELVKESQLSMLQLSTIEVATQLSMRDFDLFRNIEPTEYIDDLFKLNSKTGNTHLKRFEDIVNQETFWVASEILTEANQLKRMKIIKHFIKIALHCRECKNFNSMFAIISGLNLASVARLRGTWEKLPSKYEKHLQDLQDIFDPSRNMAKYRNILSSQSMQPPIIPLFPVVKKDMTFLHEGNDSKVDGLVNFEKLRMISKEIRQVVRMTSANMDPAMMFRQRKKRWRSLGSLSQGSTNSNMLDVQGGAHKKRARRSSLLNAKKLYEDAQMARKVKQYLSSLDVETDEEKFQMMSLQWEPAYGTLTKNLSEKRSAKSSEMSPVPMRSAGQTTKAHLHQPHRVSQVLQVPAVNLHPIRKKGQTKDPALNTSLPQKVLGTTEEISGKKHTEDTISVASSLHSSPPASPQGSPHKGYTLIPSAKSDNLSDSSHSEISSRSSIVSNCSVDSMSAALQDERCSSQALAVPESTGALEKTEHASGIGDHSQHGPGWTLLKPSLIKCLAVSSSVSNEEISQEHIIIEAADSGRGSWTSCSSSSHDNFQSLPNPKSWDFLNSYRHTHLDDPIAEVEPTDSEPYSCSKSCSRTCGQCKGSLERKSWTSSSSLSDTYEPNYGTVKQRVLESTPAESSEGLDPKDATDPVYKTVTSSTEKGLIENEQVSAV

SEQ ID NO: 2814 - DNA, 3662 bp, Homosapiens
ttacaaaagtgatgtcccagatcctcagttctagaacccaaatattgcctaaccattccatatttgagggaagcattgagtttttactgcattctgatgtccgactgtattgaattgcatataaatgctgtaaattttcagctaacgtgttattggtagttctgtttgagttttggccaaaataatggttactagtaaaattggttaacatgctcacagtgggcctgctataatggtagtggcaatagcatgtccaaagcagaacaacaagcaaaactactttagaaccctcattgctaaagaaccctggttcagagattcggctgaggatggacttgtcgtggtccagactcttgccatatcttcaaagcgtgggtggcctccaggaccagaggaatgctttttcttgttactgttgtgccataggttgcataggcacaaacacaggcctgatggaatatgccactcagggggccattgttatcctattcttttgaattctgtactttgccaaatcctgttcttaattcagaacgtcaccatatgtgccaaattactttgcattaatgctcttcatcttttaactcatttacatcagcatgcaatagcattaacagaacaaaatcttttaatcttcaatctgctatgcttagttctcatctctatagccccttattgtgattttcatcttcttataggtcactgagtcaaggaagcacaaattcaaacatgctggatgttcagggaggtgctcacaaaaaaagggcacgccgcagctctctgcttaatgccaagaagctatatgaggatgcccaaatggcaaggaaggtgaagcagtatctttccagtctcgatgtagagacagatgaggagaagttccagatgatgtcattacagtgggagcctgcatatggtaccttgaccaagaatttaagtgagaaaagatcagccaaatcatctgaaatgtctccagtgcctatgaggtcagctggccaaacaactaaagcccacttgcatcaaccccacagagtaagccaggtgcttcaggtgccagctgttaatttgcaccccatcaggaagaagggacaaacaaaagaccctgcactgaatacaagtttacctcagaaagttttaggaacaactgaagaaataagtggtaagaagcatacagaagacactatttctgtggcgtcatctttacattctagtcctcctgcatctcctcaaggctcccctcacaaaggttacacacttattccatcagctaaatctgacaacttgtctgactccagccatagtgagatttcttcacggtccagcatcgtgagcaattgttctgttgactccatgtctgcagctctacaggatgaacggtgttcctctcaggccctggcagtccctgaatccactggggcattggaaaagacagagcacgcttcagggataggagatcatagtcaacatggccctgggtggacactcttgaagccatctctaatcaagtgtttagctgtctcatcgtctgtgagcaatgaagagatttctcaagagcatatcattatagaagcagctgacagtggtcgtggaagttggacttcgtgttcaagcagctcccatgacaacttccaaagccttccaaacccaaaaagctgggattttttgaactcttacagacatacccatttggatgaccccattgctgaagttgaacccactgactctgagccctattcctgttctaaaagctgctctagaacttgtgggcagtgtaaaggaagcctagagagaaagagttggacctcctccagttctctgtctgacacgtatgaaccaaactatgggacagttaaacagagagtattggagagcaccccagctgagtcatctgaaggcttggaccccaaggatgccactgacccagtttataaaactgtcacttcaagtacagaaaagggcttgattgtgtactgtgtcacctcacccaagaaggacgataggtatagggagccacctcccactcctccaggatatttggggatttctttagcggacctaaaggaaggaccccacacacacctaaaacctccagattatagtgtggcagtgcagaggtcaaagatgatgcataacagcctctctagactgccaccagcttctctcagtagcaacctcgtggcctgtgttccatcgaagattgtaactcagcctcagaggcataatttgcagccattccatcctaaactaggagatgtgactgatgcagatagcgaagcagatgaaaatgaacaagtttcagcagtctagcctttggatgacctatttgaaaaccactgaaagtcgtggaggaatgggcaagaaccacctcatgattctgcaggccattgctaacgaacagctcattgctacaaccagtccagaggttttattccctctactccgagcaatgaaatagacctgagttatgcttcctttcatttaatttctgcagataaatagtttcctgagcaatggatgctatgcctggataccagtctccactttgcacgccggaactgccttgggaccacagttacagaaaaaatgtaaactcagagtgatccttgtgtatattgctatagatttttctttaacaagctattttaaagataatggcattattatttccaagccatagcttgggctgaaggacaaattgaaattgtctgccaataccaaggatattcttgtatatttgaaaaataacttattatttgaattgttgtggttttgtttgtatttgagagctcttgttagctgatattcatgtttgaggtcataaaattgtctctggtctgaccaaacagaagtcatctttacagaggtgatatgcttgatctacacagagatgtgacttgatctgtagcaccaatgcaatgtaggtctcagtttgagagaaataggaagccctttgcagttgaggtgttaggaacctgctggtcatggtgtggaaggccaaatgaagctgccacagggtttcttgtcagtcctttgggaaatgggagggagtagtttggggaggagggtgggaaccctaatttccacagaatgaaattttgatgttaaatgacatgtatacaaattcttccttaagtgaaagttatgctgcatcgaattgtaactgaaagtatagatccaacaaatagagactgggttctagagagttctggtctatagaaacccaaaactaaaatctctcataactcaagtatggaatactttttttaaagaaattcttatcatgggtgttgtaataatgaagacgaatttgactttatgcagtgttctgcagcatgcctcccccacatctcatagcaccaggttgtgtctgacctgacataccctgcagctctcagctggctgcagtaacattttgtgggagaaagaggagctggagttacagaaatgattgtctcttggttctcagtttttagcccttgagaggacatacttttccagcctcatgggtatggcactcttaattaaaatttcagtgactgtttactggatgaggcagatttttcacatttttgcaaattaaatatattttatatatattaagtttaattttttcagtttttttaatgtaaaagcaagtgaaattttaataaacttctgtaattacc

SEQ ID NO: 2815 - protein, 524 aa, Homosapiens
MLDVQGGAHKKRARRSSLLNAKKLYEDAQMARKVKQYLSSLDVETDEEKFQMMSLQWEPAYGTLTKNLSEKRSAKSSEMSPVPMRSAGQTTKAHLHQPHRVSQVLQVPAVNLHPIRKKGQTKDPALNTSLPQKVLGTTEEISGKKHTEDTISVASSLHSSPPASPQGSPHKGYTLIPSAKSDNLSDSSHSEISSRSSIVSNCSVDSMSAALQDERCSSQALAVPESTGALEKTEHASGIGDHSQHGPGWTLLKPSLIKCLAVSSSVSNEEISQEHIIIEAADSGRGSWTSCSSSSHDNFQSLPNPKSWDFLNSYRHTHLDDPIAEVEPTDSEPYSCSKSCSRTCGQCKGSLERKSWTSSSSLSDTYEPNYGTVKQRVLESTPAESSEGLDPKDATDPVYKTVTSSTEKGLIVYCVTSPKKDDRYREPPPTPPGYLGISLADLKEGPHTHLKPPDYSVAVQRSKMMHNSLSRLPPASLSSNLVACVPSKIVTQPQRHNLQPFHPKLGDVTDADSEADENEQVSAV

SEQ ID NO: 2816 - DNA, 4567 bp, Homosapiens
gcagacttgtctccggccagtcgcgcgtgggtagaggccttaggcgggcgttgcgaagggttgtttgctagagttcggaccttgttacggcgcgaagttccctccttggggcgggggaaaggtaccgcacccgctacctagtgtgaatgaactgtggcgtgggctgctaagggcaggctgcggagtacccgggccgtggccatgaactcacccgtggaccctggcgctaggcaggcgttgaggaagaagccacccgagcggactcccgaggacttaaatactatttattcttatcttcatggaatggaaatattatcaaatctcagggaacatcagcttagattaatgtctgcaagagcacgctatgagagatacagtggcaatcaggttctcttttgttcagaaacgattgccagatgttggtatatcctactttctggatctgtgcttgtgaaaggctccatggtcttgcctccttgcagttttggtaagcagtttggaggaaaaagaggatgtgattgtcttgtattagagccttcagaaatgattgtggtagagaatgccaaagataatgaagatagtattctacaaagagaaattcctgccagacaatcccgaagaagatttcggaaaattaactataaaggagagcgccaaaccattactgatgatgtggaggttaacagctatctttctcttccagctgatcttaccaagatgcatctcacagaaaaccctcatccacaggtgactcatgtgtcttctagtcagtctggttgtagcattgccagtgactctggaagcagcagtttatctgatatctatcaggctacggagagtgaggtaggagatgtagatttgacacgtcttccagaaggacctgttgattctgaggatgacgaagaggaagatgaagagattgatcgaacagatccattgcaggggcgagatcttgttcgagaatgtcttgaaaaagaacctgcagacaaaactgatgatgacattgaacaattgctggagtttatgcaccagctccctgcatttgcaaacatgaccatgtctgtaaggagagaactctgctcagtgatgatttttgaagtggtagagcaggctggagctattattcttgaagatgggcaagagcttgactcatggtatgttattttaaacggcactgtggaaatcagtcatccagatggaaaagttgaaaatttgtttatgggaaatagttttggaattactcccactctggataagcagtacatgcatggaattgtcaggactaaagtagatgattgtcagtttgtctgcatagcccagcaagattattggagaattttaaaccatgtggaaaaaaatacccataaagttgaggaagagggagaaattgttatggtacatgagcatcgggaactagaccggagtggaaccaggaaaggacacattgtgatcaaggcaacacctgagcgtctcataatgcatttaatagaagaacattccatcgtggatccaacttatatagaagattttctattaacttacaggacatttcttgaaagtcctttggatgttgggatcaaactattggaatggtttaagatcgacagcttaagagataaggtgacacggattgtattattatgggtaaataatcattttaatgattttgaaggtgaccctgctatgactcgatttctagaggaatttgaaaaaaatctggaagatacaaagatgaatggtcatctccggttattgaatattgcctgtgctgcaaaggctaagtggagacaggttgtgctgcaaaaggcttcccgcgagtcccctctacaattcagccttaatggagggagtgagaagggatttggtatttttgttgaaggagtagaacctggtagcaaagctgctgattcaggactgaaacgtggtgatcagattatggaagtaaatggacaaaactttgagaatattacatttatgaaagccgttgaaattttgaggaataatactcatcttgcacttactgtgaagaccaacatttttgtgttcaaagagttactttttaggactgaacaagagaaatctggtgttcctcatattcccaaaattgctgaaaaaaaaagtaatcgccattctatccagcatgtgccaggagatattgaacagacatcacaggagaaaggaagtaagaaagttaaagcaaatactgtttcaggtggaagaaacaaaatcaggaagattttggataaaacacgatttagtatcttgcctccaaagctatttagtgatggaggcctaagccaatcacaagatgacagcattgtgggaacaaggcactgtaggcatagtctggctataatgcccatccctggaacactctcatccagcagccctgatctcctgcagcctaccaccagtatgttggatttttccaatccttcagatatccctgatcaagttataagagttttcaaagtggatcagcaaagttgctacattatcatcagtaaagacaccacagctaaagaagtagtttttcatgctgttcatgaatttggtttgaccggtgcatccgacacatattctctctgtgaagtttctgttactcctgagggtgtcataaaacagagaagacttccagatcagttctccaaattagctgatagaattcaactcaatggaaggtattacttaaaaaataacatggaaacagaaaccttatgttcagatgaagatgctcaagaactagttaaggaaagccagctatccatgctgcagctcagtaccattgaggtggccacccagctgtcaatgagggactttgatttgtttcgtaatattgaaccgactgagtacatcgatgacctttttaagttaaattccaaaacaggaaatactcatttgaagaggtttgaggacattgtaaaccaagagacattctgggttgcctcagaaattttaactgaagcaaatcagctcaaacgaatgaagattattaagcattttattaaaattgcacttcattgtcgagaatgtaagaacttcaattccatgtttgcaataataagtggcttgaacctggcatctgtagcaagactcagaggaacttgggaaaagttaccaagcaaatacgagaaacatcttcaagatctacaagacatttttgatccatctagaaacatggcaaagtatagaaatattcttagtagtcaaagtatgcagcctccaattattccactcttccctgttgtcaagaaagatatgacatttctacatgaaggaaatgactccaaagtagatggtttagtaaactttgagaagttaagaatgatttccaaggaaatccgccaagttgttcgaatgacttctgctaacatggacccagctatgatgtttcgacagaggtcactgagtcaaggaagcacaaattcaaacatgctggatgttcagggaggtgctcacaaaaaaagggcacgccgcagctctctgcttaatgccaagaagctatatgaggatgcccaaatggcaaggaaggtgaagcagtatctttccagtctcgatgtagagacagatgaggagaagttccagatgatgtcattacagtgggagcctgcatatggtaccttgaccaagaatttaagtgagaaaagatcagccaaatcatctgaaatgtctccagtgcctatgaggtcagctggccaaacaactaaagcccacttgcatcaaccccacagagtaagccaggtgcttcaggtgccagctgttaatttgcaccccatcaggaagaagggacaaacaaaagaccctgcactgaatacaagtttacctcagaaagttttaggaacaactgaagaaataagtggtaagaagcatacagaagacactatttctgtggcgtcatctttacattctagtcctcctgcatctcctcaaggctcccctcacaaagttggcagtatcatatctgatcacagcagcaagatcagtggccagagctgccccggaataggtggggcttacttgcaaaagaaaatccttcagattaccaggagcacagccaaaagaacagacagtactgagaaggccactgaggagaatagagacaggacaagttgtgagaacacaaccagaaaaagaatgacatccccgtttagaagacttagggaaagaatgctttcaagggagagactagtcaacagccaaaaagaggacacagatcacaatcaagctacagaaagctgtgagaaagtgaaggatgttggaagcaacatcaaagatgagaaagggagtgccatcttcaattcaaatagccaaggcaacagtaacactttaaactgcttctatacgcgattcaagtctaaaaggaggaagacactctgatgaagttccttatttaattttagtgttaagtttgttttcagttattaatgtatacatggcttaaattaaaccatttgtcaaagcttaggcagacaacttagtaaaatactatttataaacacttgaaaatgcctcatttgtacataagttattttactgatgtattgagttagtaaattttatactcttg

SEQ ID NO: 2817 - protein, 1391 aa, Homosapiens
MNSPVDPGARQALRKKPPERTPEDLNTIYSYLHGMEILSNLREHQLRLMSARARYERYSGNQVLFCSETIARCWYILLSGSVLVKGSMVLPPCSFGKQFGGKRGCDCLVLEPSEMIVVENAKDNEDSILQREIPARQSRRRFRKINYKGERQTITDDVEVNSYLSLPADLTKMHLTENPHPQVTHVSSSQSGCSIASDSGSSSLSDIYQATESEVGDVDLTRLPEGPVDSEDDEEEDEEIDRTDPLQGRDLVRECLEKEPADKTDDDIEQLLEFMHQLPAFANMTMSVRRELCSVMIFEVVEQAGAIILEDGQELDSWYVILNGTVEISHPDGKVENLFMGNSFGITPTLDKQYMHGIVRTKVDDCQFVCIAQQDYWRILNHVEKNTHKVEEEGEIVMVHEHRELDRSGTRKGHIVIKATPERLIMHLIEEHSIVDPTYIEDFLLTYRTFLESPLDVGIKLLEWFKIDSLRDKVTRIVLLWVNNHFNDFEGDPAMTRFLEEFEKNLEDTKMNGHLRLLNIACAAKAKWRQVVLQKASRESPLQFSLNGGSEKGFGIFVEGVEPGSKAADSGLKRGDQIMEVNGQNFENITFMKAVEILRNNTHLALTVKTNIFVFKELLFRTEQEKSGVPHIPKIAEKKSNRHSIQHVPGDIEQTSQEKGSKKVKANTVSGGRNKIRKILDKTRFSILPPKLFSDGGLSQSQDDSIVGTRHCRHSLAIMPIPGTLSSSSPDLLQPTTSMLDFSNPSDIPDQVIRVFKVDQQSCYIIISKDTTAKEVVFHAVHEFGLTGASDTYSLCEVSVTPEGVIKQRRLPDQFSKLADRIQLNGRYYLKNNMETETLCSDEDAQELVKESQLSMLQLSTIEVATQLSMRDFDLFRNIEPTEYIDDLFKLNSKTGNTHLKRFEDIVNQETFWVASEILTEANQLKRMKIIKHFIKIALHCRECKNFNSMFAIISGLNLASVARLRGTWEKLPSKYEKHLQDLQDIFDPSRNMAKYRNILSSQSMQPPIIPLFPVVKKDMTFLHEGNDSKVDGLVNFEKLRMISKEIRQVVRMTSANMDPAMMFRQRSLSQGSTNSNMLDVQGGAHKKRARRSSLLNAKKLYEDAQMARKVKQYLSSLDVETDEEKFQMMSLQWEPAYGTLTKNLSEKRSAKSSEMSPVPMRSAGQTTKAHLHQPHRVSQVLQVPAVNLHPIRKKGQTKDPALNTSLPQKVLGTTEEISGKKHTEDTISVASSLHSSPPASPQGSPHKVGSIISDHSSKISGQSCPGIGGAYLQKKILQITRSTAKRTDSTEKATEENRDRTSCENTTRKRMTSPFRRLRERMLSRERLVNSQKEDTDHNQATESCEKVKDVGSNIKDEKGSAIFNSNSQGNSNTLNCFYTRFKSKRRKTL

SEQ ID NO: 2818 - DNA, 3431 bp, Homosapiens
atgtctgtaaggagagaactctgctcagtgatgatttttgaagtggtagagcaggctggagctattattcttgaagatgggcaagagcttgactcatggtatgttattttaaacggcactgtggaaatcagtcatccagatggaaaagttgaaaatttgtttatgggaaatagttttggaattactcccactctggataagcagtacatgcatggaattgtcaggactaaagtagatgattgtcagtttgtctgcatagcccagcaagattattggagaattttaaaccatgtggaaaaaaatacccataaagttgaggaagagggagaaattgttatggtacatgagcatcgggaactagaccggagtggaaccaggaaaggacacattgtgatcaaggcaacacctgagcgtctcataatgcatttaatagaagaacattccatcgtggatccaacttatatagaagattttctattaacttacaggacatttcttgaaagtcctttggatgttgggatcaaactattggaatggtttaagatcgacagcttaagagataaggtgacacggattgtattattatgggtaaataatcattttaatgattttgaaggtgaccctgctatgactcgatttctagaggaatttgaaaaaaatctggaagatacaaagatgaatggtcatctccggttattgaatattgcctgtgctgcaaaggctaagtggagacaggttgtgctgcaaaaggcttcccgcgagtcccctctacaattcagccttaatggagggagtgagaagggatttggtatttttgttgaaggagtagaacctggtagcaaagctgctgattcaggactgaaacgtggtgatcagattatggaagtaaatggacaaaactttgagaatattacatttatgaaagccgttgaaattttgaggaataatactcatcttgcacttactgtgaagaccaacatttttgtgttcaaagagttactttttaggactgaacaagagaaatctggtgttcctcatattcccaaaattgctgaaaaaaaaagtaatcgccattctatccagcatgtgccaggagatattgaacagacatcacaggagaaaggaagtaagaaagttaaagcaaatactgtttcaggtggaagaaacaaaatcaggaagattttggataaaacacgatttagtatcttgcctccaaagctatttagtgatggaggcctaagccaatcacaagatgacagcattgtgggaacaaggcactgtaggcatagtctggctataatgcccatccctggaacactctcatccagcagccctgatctcctgcagcctaccaccagtatgttggatttttccaatccttcagatatccctgatcaagttataagagttttcaaagtggatcagcaaagttgctacattatcatcagtaaagacaccacagctaaagaagtagtttttcatgctgttcatgaatttggtttgaccggtgcatccgacacatattctctctgtgaagtttctgttactcctgagggtgtcataaaacagagaagacttccagatcagttctccaaattagctgatagaattcaactcaatggaaggtattacttaaaaaataacatggaaacagaaaccttatgttcagatgaagatgctcaagaactagttaaggaaagccagctatccatgctgcagctcagtaccattgaggtggccacccagctgtcaatgagggactttgatttgtttcgtaatattgaaccgactgagtacatcgatgacctttttaagttaaattccaaaacaggaaatactcatttgaagaggtttgaggacattgtaaaccaagagacattctgggttgcctcagaaattttaactgaagcaaatcagctcaaacgaatgaagattattaagcattttattaaaattgcacttcattgtcgagaatgtaagaacttcaattccatgtttgcaataataagtggcttgaacctggcatctgtagcaagactcagaggaacttgggaaaagttaccaagcaaatacgagaaacatcttcaagatctacaagacatttttgatccatctagaaacatggcaaagtatagaaatattcttagtagtcaaagtatgcagcctccaattattccactcttccctgttgtcaagaaagatatgacatttctacatgaaggaaatgactccaaagtagatggtttagtaaactttgagaagttaagaatgatttccaaggaaatccgccaagttgttcgaatgacttctgctaacatggacccagctatgatgtttcgacagaggaagaagaggtggcggagtctggggtcactgagtcaaggaagcacaaattcaaacatgctggatgttcagggaggtgctcacaaaaaaagggcacgccgcagctctctgcttaatgccaagaagctatatgaggatgcccaaatggcaaggaaggtgaagcagtatctttccagtctcgatgtagagacagatgaggagaagttccagatgatgtcattacagtgggagcctgcatatggtaccttgaccaagaatttaagtgagaaaagatcagccaaatcatctgaaatgtctccagtgcctatgaggtcagctggccaaacaactaaagcccacttgcatcaaccccacagagtaagccaggtgcttcaggtgccagctgttaatttgcaccccatcaggaagaagggacaaacaaaagaccctgcactgaatacaagtttacctcagaaagttttaggaacaactgaagaaataagtggtaagaagcatacagaagacactatttctgtggcgtcatctttacattctagtcctcctgcatctcctcaaggctcccctcacaaagttggcagtatcatatctgatcacagcagcaagatcagtggccagagctgccccggaataggtggggcttacttgcaaaagaaaatccttcagattaccaggagcacagccaaaagaacagacagtactgagaaggccactgaggagaatagagacaggacaagttgtgagaacacaaccagaaaaagaatgacatccccgtttagaagacttagggaaagaatgctttcaagggagagactagtcaacagccaaaaagaggacacagatcacaatcaagctacagaaagctgtgagaaagtgaaggatgttggaagcaacatcaaagatgagaaagggagtgccatcttcaattcaaatagccaaggcaacagtaacactttaaactgcttctatacgcgattcaagtctaaaaggaggaagacactctgatgaagttccttatttaattttagtgttaagtttgttttcagttattaatgtatacatggcttaaattaaaccatttgtcaaagctt

SEQ ID NO: 2819 - protein, 1114 aa, Homosapiens
MSVRRELCSVMIFEVVEQAGAIILEDGQELDSWYVILNGTVEISHPDGKVENLFMGNSFGITPTLDKQYMHGIVRTKVDDCQFVCIAQQDYWRILNHVEKNTHKVEEEGEIVMVHEHRELDRSGTRKGHIVIKATPERLIMHLIEEHSIVDPTYIEDFLLTYRTFLESPLDVGIKLLEWFKIDSLRDKVTRIVLLWVNNHFNDFEGDPAMTRFLEEFEKNLEDTKMNGHLRLLNIACAAKAKWRQVVLQKASRESPLQFSLNGGSEKGFGIFVEGVEPGSKAADSGLKRGDQIMEVNGQNFENITFMKAVEILRNNTHLALTVKTNIFVFKELLFRTEQEKSGVPHIPKIAEKKSNRHSIQHVPGDIEQTSQEKGSKKVKANTVSGGRNKIRKILDKTRFSILPPKLFSDGGLSQSQDDSIVGTRHCRHSLAIMPIPGTLSSSSPDLLQPTTSMLDFSNPSDIPDQVIRVFKVDQQSCYIIISKDTTAKEVVFHAVHEFGLTGASDTYSLCEVSVTPEGVIKQRRLPDQFSKLADRIQLNGRYYLKNNMETETLCSDEDAQELVKESQLSMLQLSTIEVATQLSMRDFDLFRNIEPTEYIDDLFKLNSKTGNTHLKRFEDIVNQETFWVASEILTEANQLKRMKIIKHFIKIALHCRECKNFNSMFAIISGLNLASVARLRGTWEKLPSKYEKHLQDLQDIFDPSRNMAKYRNILSSQSMQPPIIPLFPVVKKDMTFLHEGNDSKVDGLVNFEKLRMISKEIRQVVRMTSANMDPAMMFRQRKKRWRSLGSLSQGSTNSNMLDVQGGAHKKRARRSSLLNAKKLYEDAQMARKVKQYLSSLDVETDEEKFQMMSLQWEPAYGTLTKNLSEKRSAKSSEMSPVPMRSAGQTTKAHLHQPHRVSQVLQVPAVNLHPIRKKGQTKDPALNTSLPQKVLGTTEEISGKKHTEDTISVASSLHSSPPASPQGSPHKVGSIISDHSSKISGQSCPGIGGAYLQKKILQITRSTAKRTDSTEKATEENRDRTSCENTTRKRMTSPFRRLRERMLSRERLVNSQKEDTDHNQATESCEKVKDVGSNIKDEKGSAIFNSNSQGNSNTLNCFYTRFKSKRRKTL

SEQ ID NO: 2820 - DNA, 2191 bp, Homosapiens
atagaatcaataggagcttctccttagggagctgctttgaaacagctctggtttgaaaaggaaactaccctttccagcctaggaaatggcttttcttgttcgctgttatgccaattgtcttcagccatgggcctccaaacttccagctgatcttaccaagatgcatctcacagaaaaccctcatccacaggtgactcatgtgtcttctagtcagtctggttgtagcattgccagtgactctggaagcagcagtttatctgatatctatcaggctacggagagtgaggtaggagatgtagatttgacacgtcttccagaaggacctgttgattctgaggatgacgaagaggaagatgaagagattgatcgaacagatccattgcaggggcgagatcttgttcgagaatgtcttgaaaaagaacctgcagacaaaactgatgatgacattgaacaattgctggagtttatgcaccagctccctgcatttgcaaacatgaccatgtctgtaaggagagaactctgctcagtgatgatttttgaagtggtagagcaggctggagctattattcttgaagatgggcaagagcttgactcatggtatgttattttaaacggcactgtggaaatcagtcatccagatggaaaagttgaaaatttgtttatgggaaatagttttggaattactcccactctggataagcagtacatgcatggaattgtcaggactaaagtagatgattgtcagtttgtctgcatagcccagcaagattattggagaattttaaaccatgtggaaaaaaatacccataaagttgaggaagagggagaaattgttatggtacatgagcatcgggaactagaccggagtggaaccaggaaaggacacattgtgatcaaggacatttcttgaaagtcctttggatgttgggatcaaactattggaatggtttaagatcgacagcttaagagataaggtgacacggattgtattattatgggtaaataatcattttaatgattttgaaggtgaccctgctatgactcgatttctagaggaatttgaaaaaaatctggaagatacaaagatgaatggtcatctccggttattgaatattgcctgtgctgcaaaggctaagtggagacaggttgtgctgcaaaaggcttcccgcgagtcccctctacaattcagccttaatggagggagtgagaagggatttggtatttttgttgaaggagtagaacctggtagcaaagctgctgattcaggactgaaacgtggtgatcagattatggaagtaaatggacaaaactttgagaatattacatttatgaaagccgttgaaattttgaggaataatactcatcttgcacttactgtgaagaccaacatttttgtgttcaaagagttactttttaggactgaacaagagaaatctggtgttcctcatattcccaaaattgctgaaaaaaaaagtaatcgccattctatccagcatgtgccaggagatattgaacagacatcacaggagaaaggaatgatggaggcctaagccaatcacaagatgacagcattgtgggaacaaggcactgtaggcatagtctggctataatgcccatccctggaacactctcatccagcagccctgatctcctgcagcctaccaccagtatgttggatttttccaatccttcaggtaattttcatatgtgattttatattgccgtattggtaccaaatgaacaaatagatggttaagccttgtgcagcaagtgctagagttacttgcagccctcttaactctagattatgacttgatgcaaaaaactaaagggagattgacttgttctgttaatttgaatggtacttcctctaaagtgaaacagaagtacataaaaaagagactacctctggccaggcgcagtggctcacgcctgtaatcccagcactttgggaggccgaggcgggcggatcatgaggtcaggagattgagaccatcctggctaacatggtgaaacaccatctctactaaaaatacaaaaaattagccagacgtgatggtgggtgcctgtagtcccagctacttgggaggctgaggcaggagaatggcgtgaacccgggaggcagagcttgcagtgagccgagatcggaccactgcactccagcctgggcgacagagcaagactccgtctc

SEQ ID NO: 2821 - protein, 274 aa, Homosapiens
MAFLVRCYANCLQPWASKLPADLTKMHLTENPHPQVTHVSSSQSGCSIASDSGSSSLSDIYQATESEVGDVDLTRLPEGPVDSEDDEEEDEEIDRTDPLQGRDLVRECLEKEPADKTDDDIEQLLEFMHQLPAFANMTMSVRRELCSVMIFEVVEQAGAIILEDGQELDSWYVILNGTVEISHPDGKVENLFMGNSFGITPTLDKQYMHGIVRTKVDDCQFVCIAQQDYWRILNHVEKNTHKVEEEGEIVMVHEHRELDRSGTRKGHIVIKDIS

SEQ ID NO: 2822 - DNA, 1208 bp, Homosapiens
aagttaatgttaaactattttgtataggatgtatattttctttcagtaagtgatacatcttttaaatgtctttgcttgttggcaccattggaaatacttggcaggaatcagttaatcttttgttatttctgagggtataatctgtaagcttacaccacacccagctaatttttgtatttttagtaaagacagggtttcaccatgttggctagactggtctcaggctcctgacctcaagtgatctgcccgccttgggcattacagtgctgtgattacagacatgagccactgtacctggcctgagcaggtaaagtttaattttaaaattaaactagttcaagggattagctactaagaaggataaagcagaataccctacagctgagggcgagttcccaaagacaaaacaaacttgaaagggagacagaccccttcctcacgactagagttgagacttggttgaagaatgttagttgcagcccaataaatagcagagacattcactgggttgctctgggacagagctggtccacagttgtctggtcaaggctggcaggaaggggaagggaactgctgaccaggagtggcacttaggagaccccccttaccaggatgcagatggcccctgaagctggggacaggaaacagaagccctccaattgcagaggaaagactttcttactgcagtgttactctagcaccctctgctgacaaaactgtaacattttcagctagcaaaggagaacatttacacaattctcatccttatcacaaagtatggcaataaagggtagatttgaagctgagagccagtatgtttggagaggcagtaaataactgtcacagtccactcccctggctgctcagcttccttatgaatgcttctaaacacacttgaaattccattcaacaatctgtgtctacgtaacaagacaaaactatcctttatacaaatggagttcttaccctctcccccaaataaggagacacacaacaacaatcattgctagctatatttgtatgtaatctgtcatagtgcctctgaatattctgttaactaaagactaccttataaagtttaccttcaatatcttatactatatatatagtaagcaaagagaaaatgcaaaaagctacttactacagtctttgtttctataatgggacacaaggctatagttcatatctctgtctttcactacccattc

SEQ ID NO: 2823 - protein, 43 aa, Homosapiens
MLLNTLEIPFNNLCLRNKTKLSFIQMEFLPSPPNKETHNNNHC

SEQ ID NO: 2824 - DNA, 1764 bp, Homosapiens
cccgcgcgccgtggccgtttgaagtgactaatttctgtcatatgactgaggcgcccatgggggtggcggggcggctgtaggagcaggggcctagcaagcgcccagcggagcgacccctgcctggccgtggctagcatggcccctacgctgttccagaagctcttcagcaagaggaccgggctgggcgcgcccggccgcgacgcccgggacccagattgcgggttcagttggcctttaccagagtttgatccaagccagattcgactgattgtatatcaagactgtgaaagacgagggagaaatgttttgtttgactccagtgttaagagaagaaatgaggacatatcagtatcgaaactcggcagtgatgctcaagttaaagtctttgggaaatgctgccaactgaaacctggaggagacagttcttcctctttagatagttctgtgacttcatcttctgatataaaagaccagtgtcttaagtaccagggttctcggtgctcttctgatgccaatatgcttggagagatgatgtttggctcagtagcaatgagctacaaaggatccaccttaaaaattcatcagattcgttcccctccacagctcatgctcagcaaagtgtttactgctcggactggcagcagtatttgtgggagtctcaatacgctacaagatagtcttgaattcatcaatcaggacaacaatacattaaaggctgataataacacagttattaatggactgcttggaaatataggtctttcacagttctgcagccccaggcgggcattctctgagcagggtccgctccgcctgatcaggagcgcctctttctttgcagttcacagcaacccaatggacatgcctggaagagagctcaatgaggacagagacagtggcatagcacggtctgcatctctcagcagcttgctgatcactccatttccttccccaaactcctcacttacccgaagttgtgccagcagctaccagcgacgttggcgacgcagccaaacaacaagtttggaaaatggggtatttcctagatggtctatagaagaaagctttaatctctcagatgaaagctgtggccctaacccaggaattgtgcggaaaaagaagattgcaattggggtaatcttttcattgtccaaagatgaagatgaaaataacaaatttaatgaattctttttttcacattttcctctctttgaaagccacatgaacaaattaaagagtgcaatagaacaggctatgaaaatgagccggagatcagctgatgccagtcagagaagtttggcatataatcgaatagttgatgccctaaatgaattcagaacaacaatttgtaatctttacacgatgccacgaattggagaacctgtctggcttacaatgatgtcggggactccagaaaagaaccacctttgctatcgtttcatgaaggagttcacctttctaatggaaaatgcttccaaaaatcaattcttgccagctctcattactgcagttctgaccaatcatcttgcctgggttccaacagtcatgccaaatggacaaccacctataaaaatatttttagaaaagcattcctctcagagtgtggacatgttggcaaagactcatccatataacccactttgggcacaactgggtatgtaatctgacaactgttacactatgtattagacttttttgtagctatctgtaattattttatagcaaaaccaaaaataaataaaatgcttttacctcctgcattct

SEQ ID NO: 2825 - protein, 508 aa, Homosapiens
MAPTLFQKLFSKRTGLGAPGRDARDPDCGFSWPLPEFDPSQIRLIVYQDCERRGRNVLFDSSVKRRNEDISVSKLGSDAQVKVFGKCCQLKPGGDSSSSLDSSVTSSSDIKDQCLKYQGSRCSSDANMLGEMMFGSVAMSYKGSTLKIHQIRSPPQLMLSKVFTARTGSSICGSLNTLQDSLEFINQDNNTLKADNNTVINGLLGNIGLSQFCSPRRAFSEQGPLRLIRSASFFAVHSNPMDMPGRELNEDRDSGIARSASLSSLLITPFPSPNSSLTRSCASSYQRRWRRSQTTSLENGVFPRWSIEESFNLSDESCGPNPGIVRKKKIAIGVIFSLSKDEDENNKFNEFFFSHFPLFESHMNKLKSAIEQAMKMSRRSADASQRSLAYNRIVDALNEFRTTICNLYTMPRIGEPVWLTMMSGTPEKNHLCYRFMKEFTFLMENASKNQFLPALITAVLTNHLAWVPTVMPNGQPPIKIFLEKHSSQSVDMLAKTHPYNPLWAQLGM

SEQ ID NO: 2826 - DNA, 560 bp, Homosapiens
tgagaaaacttgcccttcaacccctgaaaaaacaaagaaaaaagcaaattgatttgtcctcagtgcaaaaagcatcttttgaagaactatttccaaatgtcagcaattatgttaattcaaatgaaattgttcctgtgtcaagtttgcaggaaaattcttcaaatgagtttcctgcaaatgcatcagaaatatgttgtattattagaacatcaccaggaactagacaagtgaaaaataaaggtgttattgtaaagaagaagaaatattctcttcctaaggatacccctcaagatatcataataaaaatggcatgaaaaaacagctgtggctgaattttcaccactttgaagacaggagtgtgaagtcaaagtctataaagcagaatgtctgcctgaaattatatgaaattaaaaattaaaaattctccagttatttgtgatatatctctatgttgaaattctactgaggttcttgtcatttacttttaatcagttaagaaaaaaaattattccatatgcttcttaaatatatgtatttatattaaaagataaagaaccaaa

SEQ ID NO: 2827 - protein, 44 aa, Homosapiens
MSAIMLIQMKLFLCQVCRKILQMSFLQMHQKYVVLLEHHQELDK

SEQ ID NO: 2828 - DNA, 882 bp, Homosapiens
atgtggccgctacgggtctatacccgcaaaaagcgggagggtcagaggctcaatctcaccccgacgccagacctaggctctccagcgaaggccgaggccccgccaggttcgaagagaaaaggcaaagtgcacggcttgtcgaagattgcagagaaagcagagcggagcaggcagggaggtagcggctctgggccgttcagccctcgcttaggagttacaggagagaaaagcctgcaagaaaataggtctagtgaagacacccaggatgagaagattgcatcgttgcgtaaaacaaattccagtactcctggtaagaaaaacagaggccttttaacaagtactccatcttcagagacagctggttttgtgattgatttgtcctcagtgcaaaaagcatcttttgaagaactatttccaaatgtcagcaattatgttaattcaaatgaaattgttcctgtgtcaagtttgcaggaaaattcttcaaatgagtttcctgcaaatgcatcagaaatatgttgtattattagaacatcaccaggaactagacaagtgaaaaataaaggtgttattgtaaagaagaagaaatattctcttcctaaggatacccctcaagatatcataataaaaatggcatgaaaaaacagctgtggctgaattttcaccactttgaagacaggagtgtgaagtcaaagtctataaagcagaatgtctgcctgaaattatatgaaattaaaaattaaaaattctccagttatttgtgatatatctctatgttgaaattctactgaggttcttgtcatttacttttaatcagttaagaaaaaaaattattccatatgcttcttaaatatatgtatttatattaaaagataaagaaccaaa

SEQ ID NO: 2829 - protein, 211 aa, Homosapiens
MWPLRVYTRKKREGQRLNLTPTPDLGSPAKAEAPPGSKRKGKVHGLSKIAEKAERSRQGGSGSGPFSPRLGVTGEKSLQENRSSEDTQDEKIASLRKTNSSTPGKKNRGLLTSTPSSETAGFVIDLSSVQKASFEELFPNVSNYVNSNEIVPVSSLQENSSNEFPANASEICCIIRTSPGTRQVKNKGVIVKKKKYSLPKDTPQDIIIKMA

SEQ ID NO: 2830 - DNA, 374 bp, Homosapiens
ggacaaccgtctcagatcatttttcttcattttgaaattcaccatttaggccaggcgcagtgactcatgcctataatgccagcactttgggaggccaagtttcctgcaaatgcatcagaaatatgttgtattattagaacatcaccaggaactagacaagtgaaaaataaaggtgttattgtaaagaagaagaaatattctcttcctaaggatacccctcaagatatcataataaaaatggcatgaaaaaacagctgtggctgaattttcaccactttgaagacaggagtgtgaagtcaaagtctataaagcagaatgtctgcctgaaattatatgaaattaaaaattaaaaattctccagttatttgtgatat

SEQ ID NO: 2831 - protein, 59 aa, Homosapiens
MPIMPALWEAKFPANASEICCIIRTSPGTRQVKNKGVIVKKKKYSLPKDTPQDIIIKMA

SEQ ID NO: 2832 - DNA, 438 bp, Homosapiens
tgagaaaacttgcccttcaacccctgaaaaaacaaagaaaaaagcaaattgatttgtcctcagtgcaaaaagcatcttttgaagaactatttccaaatgtcagcaattatgttaattcaaatgaaattgttcctgtgtcaagtttgcaggaaaattcttcaaatgagtttcctgcaaatgcatcagaaatatgttgtattattagaacatcaccaggaactagacaagtgaaaaataaaggtgttattgtaaagaagaagaaatattctcttcctaaggatacccctcaagatatcataataaaaatggcatgaaaaaacagctgtggctgaattttcaccactttgaagacaggagtgtgaagtcaaagtctataaagcagaatgtctgcctgaaattatatgaaattaaaaattaaaaattctccagttatttgtg

SEQ ID NO: 2833 - protein, 44 aa, Homosapiens; identical to SEQ ID NO: 2827

SEQ ID NO: 2834 - DNA, 536 bp, Homosapiens
agaaaattcaccaattatggacgtttctccaaaaacgtgtcaagagaaagagaaaaacaaaaatgcatgactatgaatctacccaagtcagaaattcaaggccctgtctaaagacacatcctgaatcaaaccatatgagaaaaattacaagacaagaacacatttcaaaatggaggtagaggaaacaacacttttgggtaaagtacaactgatgattgtgccaacatgtgctaacccacagcccgcaactgaggctgatactccctggcaacactccaattaccacctctcatctggcaagcccagtagttcagttcctcaacatcaacgagcttgatatgattgcagggaagtggcgcccctacgtgccctggaacaccggagcaagatggcatttgttagtgttcagatctgttttagcactgaagatgttccaagccccttaaaatctctgagtggccaaagtggggaattatggatggaaagtaacacatctttaaaggggcatttgttactgcaagtgttggtaataaaac

SEQ ID NO: 2835 - protein, 55 aa, Homosapiens
MEVEETTLLGKVQLMIVPTCANPQPATEADTPWQHSNYHLSSGKPSSSVPQHQRA

SEQ ID NO: 2836 - DNA, 2007 bp, Homosapiens
agagccagaaggatttcaaatcccaagaagtctcacctgaccctatttgccagctcttcccagagatacccttcctctccctgcacctaagccaggcatgtagtaggggcgtctgggggagttgggaatggcttctgatttgccatctgcccatttaagcttgtgttccgagatcactgtctcctgggaatttagagcaggaagccaggccagtgagggaacaatcagcatcttagtgctcagcccctggtataagcaaatgtgggctggcacctgttagggccaggaacagacttagtaattgatagctattggagaaatgagtgagtaggtaggcccaggttgactgggcaacagaacgagactccgtctcaaaaagaaagaaaaaaaaaaaacaaaaacaaggtttcttctttttgccacttaaaatatcttatatttctagatttccaggtctatgtggaaatcatcacacttgggccaataaatgggttagttcagatgtgctgagaaaagtaaatagtgtaccctaaatatcttgcatgtacatttatctatttctctgtttaatgccacttaattttgtaagaaatgagaaatgaaaccctatgtatcagtggaaaaatccttcttgcttcagatttcccaactttattctggaggagaaaaaaatctgtatttctcattaacagagatagaaaaaggtgatgtacttacgatggtcacattcatattgggcattggatctatttaagcctagaagtataacagataatcagttccttaagtgtaaatatgttcttaaatgtttggcctttttatctgttattcaaatgtattagtaattctcatattttgcaaacagatccttttgtgtatattataaaatatataccaaatctgtttttccttttgctgtggaagatgtctttatataatattgagacttcccttgcaaatgagagacgggactctggtcaggtatagtgtgtaggcctagccccatgtattaggaactcataaactcagaaatccaaggattaaacattttatgtctccttcatttatgcaagtcatgctttcattctacatgtagttaaaactacaagtatgagaaaaaatagaactttccattggaattttttccaatcaggtaatgttttagcaacttgaaatcagcacttaatttgattgtattacctatcaaagaaccaataacctttcctttttctgcagtaaagaaaatgaaatatcctttattttccaaatgtatgaagcacaaatgcaatatagttatttaaaatataaaatactttaaaatgaatgtgaagaatgggaaaatatatttttgcatgaaaacagactacttacaaatgtgcttaatatctcaggaaaaaaagaatgaataaccgtatataaaattggtaaactataaattggctgtatttccttgccggttttaattttaaggaagcatttacatgaaaagaaaaaaggatcctagtagtctgaatttcctctcaagtatgctagaaaatactttctatgaatttacaattaactgcaataagaagtgggttagcattcaagtaaggtcaataccccaaatgagaaactcttcagttagaacacattagtggttgtaacacagaggcagtagataaatatttgaaatgtgagcatttctaaacttggtaccaaatggaaagggtttcatgaggtgacagtggcttttaaacattcatttgaccgattattctaattttccttgttaaatcattgcaacagttgcatgggggagaatggatattttttgaagaattgcttattccactttcaatttttaaaaatcgaggggattaaaatattactttttaaatatgcataaaagtatcttaactgtaattacattttcagttgctttgttatagtagcatgcatattaaatataaaatgcatttatgaaaatttttgtaaaaaataaaagatttttcatttctcaaagtt

SEQ ID NO: 2837 - protein, 63 aa, Homosapiens [sequence omitted]

SEQ ID NO: 2838 - DNA, 6540 bp, Homosapiens
gcagcggcggcggcggcgcggctactgctggggctgctgggctgcggggctgcggggctgcgggtcggggaggccgggccgggccgggccgggccccgctgaccgccatgctgaccttcttcctcgtgtcggggggctccctctggctattcgtagagtttgtcctctcacttctggagaagatgcagacacaggagatcctgaggatactgcgactgcctgagctaggtgacttgggacagtttttccgcagcctctcggccaccaccctcgtgagtatgggtgccctggctgccatccttgcctactggttcactcaccggccaaaggccttgcagccgccatgcaacctcctgatgcagtcagaagaagtagaggacagtggcggggcacggcgatctgtgattgggtctggccctcagctacttacccactactatgatgatgcccggaccatgtaccaggtgttccgccgtgggcttagcatctcagggaatgggccctgtcttggtttcaggaagcctaagcagccttaccagtggctgtcctaccaggaggtggccgacagggctgaatttctggggtccggacttctccagcacaattgtaaagcatgcactgatcagtttattggtgtttttgcacaaaatcggccagagtggatcattgtggagctggcctgctacacatattccatggtggtggtcccgctctatgacaccctgggccctggggctatccgctacatcatcaatacagcggacatcagcaccgtgattgtggacaaacctcagaaggctgtgcttctgctagagcatgtggagaggaaggagactccaggcctcaagctgatcatcctcatggacccattcgaagaagccctgaaagagagagggcagaagtgcggggtggtcattaagtccatgcaggccgtggaggactgtggccaagagaatcaccaggctcctgtgcccccgcagcctgatgacctctccattgtgtgtttcacaagcggcacgacagggaacccaaaaggtgcgatgctcacccatgggaacgtggtggctgatttctcaggctttctgaaagtgacagagaaagtgatctttccgagacaggacgatgtgctcatctccttcctgcctctggctcacatgtttgagagagtaatccagtctgtcgtctattgccacggagggcgtgttggcttcttccagggagatatccgccttctctcagatgacatgaaggctctatgccccaccatcttccctgtggtcccacgactgctgaaccggatgtacgacaagatcttcagccaggcaaacacaccattaaagcgctggctcctggagtttgcagcaaagcgtaagcaagccgaggtccggagtggaatcatcaggaatgatagtatctgggatgaactcttctttaataagattcaggccagtcttggtgggtgtgtgcggatgattgttactggagcagccccagcatcaccaacagttctgggatttctccgggcagctctagggtgccaggtttatgaaggttatggccaaactgagtgcacagctggatgtaccttcaccactcctggcgactggacctcagggcacgtaggggcgccacttccctgcaatcatatcaagctcgttgatgttgaggaactgaactactgggcctgcaaaggagagggagagatatgtgtgagaggaccaaatgtgttcaaaggctacttgaaagatccagacaggacgaaggaggccctggacagcgatggctggcttcacactggagacatcggaaaatggctgccggcaggaactcttaaaattattgatcggaaaaagcatatatttaaacttgctcagggagaatatgttgcacccgagaagattgagaacatctacatccggagccaacctgtggcgcaaatctatgtccatggggacagcttaaaggcctttttggtaggcattgttgtgcctgaccctgaagttatgccctcctgggcccagaagagaggaattgaaggaacatatgcagatctctgcacaaataaggatctgaagaaagccattttggaagatatggtgaggttaggaaaagaaagtggactccattcttttgagcaggttaaagccattcacatccattctgacatgttctcagttcaaaatggcttgctgacaccaacactaaaagctaagagacctgagctgagagagtacttcaaaaaacaaatagaagagctttactcaatctccatgtgaagttcaaggaaagttcttctcagtgtaatgaactgtctagcaatattatagttattcttgaaagtaatgagtcaaaatgacacagctgaaaatgaataagcatctgattttatgactgagccttttcctgtcccaagaggtctttaacaatattttctctatcatcaatgagtatattttatttttattataaaaatgatattgtggtggactgctaaaaatatcacaaatggcaatgtaaaaatcaagacattttctcaagaactgtgtaccactaaaagtaatatattgtcaatgttcacagaactattaaacataaaggaaaaacataagtgatatattctacttaattatttgtgaatcagtaaccagatgcagcaaatatctaggcaatgtggactacctcattcagtaactgattgtcaaaatcacaattaaatcagacttcaaaaattaaagctaggtgtatagaatcatgctaaaagaaaacatgataactcatagtctacgtaacttcagagtctttaaacatgacaatccacattgtcatatgtgaaaattttctctctgatttttactttcattcatgaaaaatgaaaattcagaaattctttttttcctttttgttttgagacagggtctgctctgtcacctaggctggagtgcagtggcttaatcatggctcattgcagtctccatctcctgggctcgagtgatcctcctgtctcacctcccaagtagctgagactacagtacaggcacatgccaccacacctggctaatagaaattttttttttagagattttgctcaggctggtctcaaactcctgagctcaagggatcctcccgccttggcctccctaagtgctaggattacaggcatgagccattgttcccagccaaattcagatattattaaaacacatgtcatatttatatagtaacttacaaagacctttcaatacattttctcatttattaagctcattaaagtattcaggaactacctagaaaaaatataatgtaaaactattcaaggatagtgtgtgtatgttcatggacttcttattataatgaattctaaaagacatctgttgactctacaatgaatggatccttgaggaatacttgggagaagaaactcagagttatttctcagggtaggcagcaattaatgtacctacattccttgctggggtcttctagtcttccattcccaatgtgcccatgctatgcctggaaaccctatatggttgtaattctgaacaatttcactttttttccagtaagaatatcaaggcagaaggtgggaaggaggggacattatttccagggaaaatagtttttcaacaatataactttgataaacctctttaaaatgccccaagaaaactttttaagtccatagacaaagaaatactgcctaatggcataattacattcctaaaatctttaagcgtgccgaagtttaaccactaaaacctcctttcttgcattatgtatttagatgcaccctgtattggggtgtcaacaatttcttataattaaaggccagataccatggacagcaattaagttccaagctatagattgtgcctctgaaaaaggcatggaccccaggaacgtgtttttcttctgtagagacaagactctaaaagcatatcaacaatccatatgcaattcatgtgttaatttaaaatgtatgtgctcagtgtttgtagtctagaagctcctttcccttggaggaatgccaagcagtttgcaaaaataaatgctgttagttaaaaaccacataatcacatgggcctactgaataaatatgcatcagtgattatatacttatatttcagtcttgtcaaaagtgaatcactgtttcatttgatgtatttacccagtctttttatccagtttttcttgggcatattctctctgaagacccactgttgcacttctaaatttgacagttaagaaatgagctagttctatacacactgatttttaaaggcgtttctgaataaactaatacttaaaatgtccaaagtcacatctgtacagcattagatttttatatttaatatatatttgactaattaaaagtgaaagttgttacctgaactggatattcatactattttaagggcaagttgcttacatttcaataacaacaaaaaaagaatctgtttcccattgtcctcctactcaactaaaattcatagttggctttaagcccaaaagaattttgaacaatgtgacagaaacaagtaatgtaaaacttattttgttttatttatactttataatagttagatataacagattatggacaacttaatatttcttctttttggctgggcgcggtggctcatgcctgtaatcccagcactttgggaggccgaggcgggcagatcacgaagtcaggagatcgagaccatcctggctaacacagtgaaaccccgtctctactaaaaaaatacaaaaaattagccgggcgttgtggcgggcgcctgtagtcccagctactcgggaggctgaggcaggagaatggcatgaacctgggaggcggagcttgcagtgagccgagatcccgccactgtactccagcctgggcaacagaacgagactccgtctcaaaaagaaagaaaaaaaaaaaacaaaaacaaggtttcttctttttgccacttaaaatatcttatatttctagatttccaggtctatgtggaaatcatcacacttgggccaataaatgggttagttcagatgtgctgagaaaagtaaatagtgtaccctaaatatcttgcatgtacatttatctatttctctgtttaatgccacttaattttgtaagaaatgagaaatgaaaccctatgtatcagtggaaaaatccttcttgcttcagatttcccaactttattctggaggagaaaaaaatctgtatttctcattaacagagatagaaaaaggtgatgtacttacgatggtcacattcatattgggcattggatctatttaagcctagaagtataacagataatcagttccttaagtgtaaatatgttcttaaatgtttggcctttttatctgttattcaaatgtattagtaattctcatattttgcaaacagatccttttgtgtatattataaaatatataccaaatctgtttttccttttgctgtggaagatgtctttatataatattgagacttcccttgcaaatgagagacgggactctggtcaggtatagtgtgtaggcctagccccatgtattaggaactcataaactcagaaatccaaggattaaacattttatgtctccttcatttatgcaagtcatgctttcattctacatgtagttaaaactacaagtatgagaaaaaatagaactttccattggaattttttccaatcaggtaatgttttagcaacttgaaatcagcacttaatttgattgtattacctatcaaagaaccaataacctttcctttttctgcagtaaagaaaatgaaatatcctttattttccaaatgtatgaagcacaaatgcaatatagttatttaaaatataaaatactttaaaatgaatgtgaagaatgggaaaatatatttttgcatgaaaacagactacttacaaatgtgcttaatatctcaggaaaaaaagaatgaataaccgtatataaaattggtaaactataaattggctgtatttccttgccggttttaattttaaggaagcatttacatgaaaagaaaaaaggatcctagtagtctgaatttcctctcaagtatgctagaaaatactttctatgaatttacaattaactgcaataagaagtgggttagcattcaagtaaggtcaataccccaaatgagaaactcttcagttagaacacattagtggttgtaacacagaggcagtagataaatatttgaaatgtgagcatttctaaacttggtaccaaatggaaagggtttcatgaggtgacagtggcttttaaacattcatttgaccgattattctaattttccttgttaaatcattgcaacagttgcatgggggagaatggatattttttgaagaattgcttattccactttcaatttttaaaaatcgaggggattaaaatattactttttaaatatgcataaaagtatcttaactgtaattacattttcagttgctttgttatagtagcatgcatattaaatataaaatgcatttatgaaaatttttgtaaaaaataaaagatttttcatttctcaaagtt

SEQ ID NO: 2839 - protein, 722 aa, Homosapiens; identical to SEQ ID NO: 369

SEQ ID NO: 2840 - DNA, 2647 bp, Homosapiens
aagtcatgtaacctctctgagctttgtgttccttacctgtagaaatgccacttcccttatagggttgctatgagcattaaagaaaggagcatatataaggcccctggtgtactcctagtcccattaggaaccagccaggggctcccccttggcctcgcactaaacagcacccacagccaacttcagcagcatctccagtactcatggggcttacacaccttcaccttcccagaattccctggggaaatccaacaactctaagacctggagcagacccattagtaggctgtagtacatctcaaaggcctgagtccccagggaggcccatgtccagggtttgggagtaggtgaggggggcacacgccagtgagaatggctgctttggcatctcccagaggctcaggattccactccatcttctgcttcatctccctgtgcctgagtgggacttggttggaaggtgagggggtgggggtcacctcagatggcattcatcagtgtctcatggcagcagccagagctgggtcagggggtcatgggtgccctccatgtagggcagcactttggacagctttggactatcgccagtagtgaccaccctaagggactcctcccttcctgtcctgtctttctagtctgtcgtctattgccacggagggcgtgttggcttcttccagggagatatccgccttctctcagatgacatgaaggctctatgccccaccatcttccctgtggtcccacgactgctgaaccggatgtacgacaagatcttcagccaggcaaacacaccattaaagcgctggctcctggagtttgcagcaaagcgtaagcaagccgaggtccggagtggaatcatcaggaatgatagtatctgggatgaactcttctttaataagattcaggccagtcttggtgggtgtgtgcggatgattgttactggagcagccccagcatcaccaacagttctgggatttctccgggcagctctagggtgccaggtttatgaaggttatggccaaactgagtgcacagctggatgtaccttcaccactcctggcgactggacctcagggcacgtaggggcgccacttccctgcaatcatatcaagctcgttgatgttgaggaactgaactactgggcctgcaaaggagagggagagatatgtgtgagaggaccaaatgtgttcaaaggctacttgaaagatccagacaggacgaaggaggccctggacagcgatggctggcttcacactggagacatcggaaaatggctgccggcaggaactcttaaaattattgatcggaaaaagcatatatttaaacttgctcagggagaatatgttgcacccgagaagattgagaacatctacatccggagccaacctgtggcgcaaatctatgtccatggggacagcttaaaggcctttttggtaggcattgttgtgcctgaccctgaagttatgccctcctgggcccagaagagaggaattgaaggaacatatgcagatctctgcacaaataaggatctgaagaaagccattttggaagatatggtgaggttaggaaaagaaagtggactccattcttttgagcaggttaaagccattcacatccattctgacatgttctcagttcaaaatggcttgctgacaccaacactaaaagctaagagacctgagctgagagagtacttcaaaaaacaaatagaagagctttactcaatctccatgtgaagttcaaggaaagttcttctcagtgtaatgaactgtctagcaatattatagttattcttgaaagtaatgagtcaaaatgacacagctgaaaatgaataagcatctgattttatgactgagccttttcctgtcccaagaggtctttaacaatattttctctatcatcaatgagtatattttatttttattataaaaatgatattgtggtggactgctaaaaatatcacaaatggcaatgtaaaaatcaagacattttctcaagaactgtgtaccactaaaagtaatatattgtcaatgttcacagaactattaaacataaaggaaaaacataagtgatatattctacttaattatttgtgaatcagtaaccagatgcagcaaatatctaggcaatgtggactacctcattcagtaactgattgtcaaaatcacaattaaatcagacttcaaaaattaaagctaggtgtatagaatcatgctaaaagaaaacatgataactcatagtctacgtaacttcagagtctttaaacatgacaatccacattgtcatatgtgaaaattttctctctgatttttactttcattcatgaaaaatgaaaattcagaaattctttttttcctttttgttttgagacagggtctgctctgtcacctaggctggagtgcagtggcttaatcatggctcattgcagtctccatctcctgggctcgagtgatcctcctgtctcacctcccaagtagctgagactacagtacaggcacatgccaccacacctggctaatagaaattttttttttagagattttgctcaggctggtctcaaactcctgagctcaagggatcctcccgccttggcctccctaagtgctaggattacaggcatgagccattgttcccagccaaattcaga

SEQ ID NO: 2841 - protein, 343 aa, Homosapiens
MKALCPTIFPVVPRLLNRMYDKIFSQANTPLKRWLLEFAAKRKQAEVRSGIIRNDSIWDELFFNKIQASLGGCVRMIVTGAAPASPTVLGFLRAALGCQVYEGYGQTECTAGCTFTTPGDWTSGHVGAPLPCNHIKLVDVEELNYWACKGEGEICVRGPNVFKGYLKDPDRTKEALDSDGWLHTGDIGKWLPAGTLKIIDRKKHIFKLAQGEYVAPEKIENIYIRSQPVAQIYVHGDSLKAFLVGIVVPDPEVMPSWAQKRGIEGTYADLCTNKDLKKAILEDMVRLGKESGLHSFEQVKAIHIHSDMFSVQNGLLTPTLKAKRPELREYFKKQIEELYSISM

SEQ ID NO: 2842 - DNA, 3159 bp, Homosapiens
tccaggaagcatcattcccagagctgccagagcagtggccctggaaaatatggaagcagctgtcagccatggcccagggcctgagcgtatgattctcaggaaaagtgggcaggacatctgactgtcagagtttgtcctctcacttctggagaagatgcagacacaggagatcctgaggatactgcgactgcctgagctaggtgacttgggacagtttttccgcagcctctcggccaccaccctcgtgagtatgggtgccctggctgccatccttgcctactggttcactcaccggccaaaggccttgcagccgccatgcaacctcctgatgcagtcagaagaagtagaggacagtggcggggcacggcgatctgtgattgggtctggccctcagctacttacccactactatgatgatgcccggaccatgtaccaggtgttccgccgtgggcttagcatctcagggaatgggccctgtcttggtttcaggaagcctaagcagccttaccagtggctgtcctaccaggaggtggccgacagggctgaatttctggggtccggacttctccagcacaattgtaaagcatgcactgatcagtttattggtgtttttgcacaaaatcggccagagtggatcattgtggagctggcctgctacacatattccatggtggtggtcccgctctatgacaccctgggccctggggctatccgctacatcatcaatacagcggacatcagcaccgtgattgtggacaaacctcagaaggctgtgcttctgctagagcatgtggagaggaaggagactccaggcctcaagctgatcatcctcatggacccattcgaagaagccctgaaagagagagggcagaagtgcggggtggtcattaagtccatgcaggccgtggaggactgtggccaagagaatcaccaggctcctgtgcccccgcagcctgatgacctctccattgtgtgtttcacaagcggcacgacagggaacccaaaaggtgcgatgctcacccatgggaacgtggtggctgatttctcaggctttctgaaagtgacagagagtcagtgggctcccacttgtgcggatgtgcacatttcctatttgcctttagcacacatgtttgagcgaatggtgcagtctgtcgtctattgccacggagggcgtgttggcttcttccagggagatatccgccttctctcagatgacatgaaggctctatgccccaccatcttccctgtggtcccacgactgctgaaccggatgtacgacaagatcttcagccaggcaaacacaccattaaagcgctggctcctggagtttgcagcaaagcgtaagcaagccgaggtccggagtggaatcatcaggaatgatagtatctgggatgaactcttctttaataagattcaggccagtcttggtgggtgtgtgcggatgattgttactggagcagccccagcatcaccaacagttctgggatttctccgggcagctctagggtgccaggtttatgaaggttatggccaaactgagtgcacagctggatgtaccttcaccactcctggcgactggacctcagggcacgtaggggcgccacttccctgcaatcatatcaagctcgttgatgttgaggaactgaactactgggcctgcaaaggagagggagagatatgtgtgagaggaccaaatgtgttcaaaggctacttgaaagatccagacaggacgaaggaggccctggacagcgatggctggcttcacactggagacatcggaaaatggctgccggcaggaactcttaaaattattgatcggaaaaagcatatatttaaacttgctcagggagaatatgttgcacccgagaagattgagaacatctacatccggagccaacctgtggcgcaaatctatgtccatggggacagcttaaaggcctttttggtaggcattgttgtgcctgaccctgaagttatgccctcctgggcccagaagagaggaattgaaggaacatatgcagatctctgcacaaataaggatctgaagaaagccattttggaagatatggtgaggttaggaaaagaaagtggactccattcttttgagcaggttaaagccattcacatccattctgacatgttctcagttcaaaatggcttgctgacaccaacactaaaagctaagagacctgagctgagagagtacttcaaaaaacaaatagaagagctttactcaatctccatgtgaagttcaaggaaagttcttctcagtgtaatgaactgtctagcaatattatagttattcttgaaagtaatgagtcaaaatgacacagctgaaaatgaataagcatctgattttatgactgagccttttcctgtcccaagaggtctttaacaatattttctctatcatcaatgagtatattttatttttattataaaaatgatattgtggtggactgctaaaaatatcacaaatggcaatgtaaaaatcaagacattttctcaagaactgtgtaccactaaaagtaatatattgtcaatgttcacagaactattaaacataaaggaaaaacataagtgatatattctacttaattatttgtgaatcagtaaccagatgcagcaaatatctaggcaatgtggactacctcattcagtaactgattgtcaaaatcacaattaaatcagacttcaaaaattaaagctaggtgtatagaatcatgctaaaagaaaacatgataactcatagtctacgtaacttcagagtctttaaacatgacaatccacattgtcatatgtgaaaattttctctctgatttttactttcattcatgaaaaatgaaaattcagaaattctttttttcctttttgttttgagacagggtctgctctgtcacctaggctggagtgcagtggcttaatcatggctcattgcagtctccatctcctgggctcgagtgatcctcctgtctcacctcccaagtagctgagactacagtacaggcacatgccaccacacctggctaatagaaattttttttttagagattttgctcaggctggtctcaaactcctgagctcaagggatcctcccgccttggcctccctaagtgctaggattacaggcatgagccattgttcccagccaaattcaga

SEQ ID NO: 2843 - protein, 697 aa, Homosapiens
MQTQEILRILRLPELGDLGQFFRSLSATTLVSMGALAAILAYWFTHRPKALQPPCNLLMQSEEVEDSGGARRSVIGSGPQLLTHYYDDARTMYQVFRRGLSISGNGPCLGFRKPKQPYQWLSYQEVADRAEFLGSGLLQHNCKACTDQFIGVFAQNRPEWIIVELACYTYSMVVVPLYDTLGPGAIRYIINTADISTVIVDKPQKAVLLLEHVERKETPGLKLIILMDPFEEALKERGQKCGVVIKSMQAVEDCGQENHQAPVPPQPDDLSIVCFTSGTTGNPKGAMLTHGNVVADFSGFLKVTESQWAPTCADVHISYLPLAHMFERMVQSVVYCHGGRVGFFQGDIRLLSDDMKALCPTIFPVVPRLLNRMYDKIFSQANTPLKRWLLEFAAKRKQAEVRSGIIRNDSIWDELFFNKIQASLGGCVRMIVTGAAPASPTVLGFLRAALGCQVYEGYGQTECTAGCTFTTPGDWTSGHVGAPLPCNHIKLVDVEELNYWACKGEGEICVRGPNVFKGYLKDPDRTKEALDSDGWLHTGDIGKWLPAGTLKIIDRKKHIFKLAQGEYVAPEKIENIYIRSQPVAQIYVHGDSLKAFLVGIVVPDPEVMPSWAQKRGIEGTYADLCTNKDLKKAILEDMVRLGKESGLHSFEQVKAIHIHSDMFSVQNGLLTPTLKAKRPELREYFKKQIEELYSISM

SEQ ID NO: 2844 - DNA, 3242 bp, Homosapiens
ggctctaccaccacccggcttctcagagcaggcggctgttgccatcgactgtccccaggagggcagactcggggcagggccttcgccacttttgtgctttgatcaagatgtggtaacttctttccctgggccccacaggccctataaagggaggctggttctagtgggacgagctcagccgcctcctcagtgccaggagcctgctggaaagagtttgtcctctcacttctggagaagatgcagacacaggagatcctgaggatactgcgactgcctgagctaggtgacttgggacagtttttccgcagcctctcggccaccaccctcgtgagtatgggtgccctggctgccatccttgcctactggttcactcaccggccaaaggccttgcagccgccatgcaacctcctgatgcagtcagaagaagtagaggacagtggcggggcacggcgatctgtgattgggtctggccctcagctacttacccactactatgatgatgcccggaccatgtaccaggtgttccgccgtgggcttagcatctcagggaatgggccctgtcttggtttcaggaagcctaagcagccttaccagtggctgtcctaccaggaggtggccgacagggctgaatttctggggtccggacttctccagcacaattgtaaagcatgcactgatcagtttattggtgtttttgcacaaaatcggccagagtggatcattgtggagctggcctgctacacatattccatggtggtggtcccgctctatgacaccctgggccctggggctatccgctacatcatcaatacagcggacatcagcaccgtgattgtggacaaacctcagaaggctgtgcttctgctagagcatgtggagaggaaggagactccaggcctcaagctgatcatcctcatggacccattcgaagaagccctgaaagagagagggcagaagtgcggggtggtcattaagtccatgcaggccgtggaggactgtggccaagagaatcaccaggctcctgtgcccccgcagcctgatgacctctccattgtgtgtttcacaagcggcacgacagggaacccaaaaggtgcgatgctcacccatgggaacgtggtggctgatttctcaggctttctgaaagtgacagagagtcagtgggctcccacttgtgcggatgtgcacatttcctatttgcctttagcacacatgtttgagcgaatggtgcagtctgtcgtctattgccacggagggcgtgttggcttcttccagggagatatccgccttctctcagatgacatgaaggctctatgccccaccatcttccctgtggtcccacgactgctgaaccggatgtacgacaagatcttcagccaggcaaacacaccattaaagcgctggctcctggagtttgcagcaaagcgtaagcaagccgaggtccggagtggaatcatcaggaatgatagtatctgggatgaactcttctttaataagattcaggccagtcttggtgggtgtgtgcggatgattgttactggagcagccccagcatcaccaacagttctgggatttctccgggcagctctagggtgccaggtttatgaaggttatggccaaactgagtgcacagctggatgtaccttcaccactcctggcgactggacctcagggcacgtaggggcgccacttccctgcaatcatatcaagctcgttgatgttgaggaactgaactactgggcctgcaaaggagagggagagatatgtgtgagaggaccaaatgtgttcaaaggctacttgaaagatccagacaggacgaaggaggccctggacagcgatggctggcttcacactggagacatcggaaaatggctgccggcaggaactcttaaaattattgatcggaaaaagcatatatttaaacttgctcagggagaatatgttgcacccgagaagattgagaacatctacatccggagccaacctgtggcgcaaatctatgtccatggggacagcttaaaggcctttttggtaggcattgttgtgcctgaccctgaagttatgccctcctgggcccagaagagaggaattgaaggaacatatgcagatctctgcacaaataaggatctgaagaaagccattttggaagatatggtgaggttaggaaaagaaagtggactccattcttttgagcaggttaaagccattcacatccattctgacatgttctcagttcaaaatggcttgctgacaccaacactaaaagctaagagacctgagctgagagagtacttcaaaaaacaaatagaagagctttactcaatctccatgtgaagttcaaggaaagttcttctcagtgtaatgaactgtctagcaatattatagttattcttgaaagtaatgagtcaaaatgacacagctgaaaatgaataagcatctgattttatgactgagccttttcctgtcccaagaggtctttaacaatattttctctatcatcaatgagtatattttatttttattataaaaatgatattgtggtggactgctaaaaatatcacaaatggcaatgtaaaaatcaagacattttctcaagaactgtgtaccactaaaagtaatatattgtcaatgttcacagaactattaaacataaaggaaaaacataagtgatatattctacttaattatttgtgaatcagtaaccagatgcagcaaatatctaggcaatgtggactacctcattcagtaactgattgtcaaaatcacaattaaatcagacttcaaaaattaaagctaggtgtatagaatcatgctaaaagaaaacatgataactcatagtctacgtaacttcagagtctttaaacatgacaatccacattgtcatatgtgaaaattttctctctgatttttactttcattcatgaaaaatgaaaattcagaaattctttttttcctttttgttttgagacagggtctgctctgtcacctaggctggagtgcagtggcttaatcatggctcattgcagtctccatctcctgggctcgagtgatcctcctgtctcacctcccaagtagctgagactacagtacaggcacatgccaccacacctggctaatagaaattttttttttagagattttgctcaggctggtctcaaactcctgagctcaagggatcctcccgccttggcctccctaagtgctaggattacaggcatgagccattgttcccagccaaattcaga

SEQ ID NO: 2845 - protein, 697 aa, Homosapiens; identical to SEQ ID NO: 2843

SEQ ID NO: 2846 - DNA, 3187 bp, Homosapiens
gcagcggcggcggcggcgcggctactgctggggctgctgggctgcggggctgcggggctgcgggtcggggaggccgggccgggccgggccgggccccgctgaccgccatgctgaccttcttcctcgtgtcggggggctccctctggctattcgtagagtttgtcctctcacttctggagaagatgcagacacaggagatcctgaggatactgcgactgcctgagctaggtgacttgggacagtttttccgcagcctctcggccaccaccctcgtgagtatgggtgccctggctgccatccttgcctactggttcactcaccggccaaaggccttgcagccgccatgcaacctcctgatgcagtcagaagaagtagaggacagtggcggggcacggcgatctgtgattgggtctggccctcagctacttacccactactatgatgatgcccggaccatgtaccaggtgttccgccgtgggcttagcatctcagggaatgggccctgtcttggtttcaggaagcctaagcagccttaccagtggctgtcctaccaggaggtggccgacagggctgaatttctggggtccggacttctccagcacaattgtaaagcatgcactgatcagtttattggtgtttttgcacaaaatcggccagagtggatcattgtggagctggcctgctacacatattccatggtggtggtcccgctctatgacaccctgggccctggggctatccgctacatcatcaatacagcggacatcagcaccgtgattgtggacaaacctcagaaggctgtgcttctgctagagcatgtggagaggaaggagactccaggcctcaagctgatcatcctcatggacccattcgaagaagccctgaaagagagagggcagaagtgcggggtggtcattaagtccatgcaggccgtggaggactgtggccaagagaatcaccaggctcctgtgcccccgcagcctgatgacctctccattgtgtgtttcacaagcggcacgacagggaacccaaaaggtgcgatgctcacccatgggaacgtggtggctgatttctcaggctttctgaaagtgacagagagtcagtgggctcccacttgtgcggatgtgcacatttcctatttgcctttagcacacatgtttgagcgaatggtgcagtctgtcgtctattgccacggagggcgtgttggcttcttccagggagatatccgccttctctcagatgacatgaaggctctatgccccaccatcttccctgtggtcccacgactgctgaaccggatgtacgacaagatcttcagccaggcaaacacaccattaaagcgctggctcctggagtttgcagcaaagcgtaagcaagccgaggtccggagtggaatcatcaggaatgatagtatctgggatgaactcttctttaataagattcaggccagtcttggtgggtgtgtgcggatgattgttactggagcagccccagcatcaccaacagttctgggatttctccgggcagctctagggtgccaggtttatgaaggttatggccaaactgagtgcacagctggatgtaccttcaccactcctggcgactggacctcagggcacgtaggggcgccacttccctgcaatcatatcaagctcgttgatgttgaggaactgaactactgggcctgcaaaggagagggagagatatgtgtgagaggaccaaatgtgttcaaaggctacttgaaagatccagacaggacgaaggaggccctggacagcgatggctggcttcacactggagacatcggaaaatggctgccggcaggaactcttaaaattattgatcggaaaaagcatatatttaaacttgctcagggagaatatgttgcacccgagaagattgagaacatctacatccggagccaacctgtggcgcaaatctatgtccatggggacagcttaaaggcctttttggtaggcattgttgtgcctgaccctgaagttatgccctcctgggcccagaagagaggaattgaaggaacatatgcagatctctgcacaaataaggatctgaagaaagccattttggaagatatggtgaggttaggaaaagaaagtggactccattcttttgagcaggttaaagccattcacatccattctgacatgttctcagttcaaaatggcttgctgacaccaacactaaaagctaagagacctgagctgagagagtacttcaaaaaacaaatagaagagctttactcaatctccatgtgaagttcaaggaaagttcttctcagtgtaatgaactgtctagcaatattatagttattcttgaaagtaatgagtcaaaatgacacagctgaaaatgaataagcatctgattttatgactgagccttttcctgtcccaagaggtctttaacaatattttctctatcatcaatgagtatattttatttttattataaaaatgatattgtggtggactgctaaaaatatcacaaatggcaatgtaaaaatcaagacattttctcaagaactgtgtaccactaaaagtaatatattgtcaatgttcacagaactattaaacataaaggaaaaacataagtgatatattctacttaattatttgtgaatcagtaaccagatgcagcaaatatctaggcaatgtggactacctcattcagtaactgattgtcaaaatcacaattaaatcagacttcaaaaattaaagctaggtgtatagaatcatgctaaaagaaaacatgataactcatagtctacgtaacttcagagtctttaaacatgacaatccacattgtcatatgtgaaaattttctctctgatttttactttcattcatgaaaaatgaaaattcagaaattctttttttcctttttgttttgagacagggtctgctctgtcacctaggctggagtgcagtggcttaatcatggctcattgcagtctccatctcctgggctcgagtgatcctcctgtctcacctcccaagtagctgagactacagtacaggcacatgccaccacacctggctaatagaaattttttttttagagattttgctcaggctggtctcaaactcctgagctcaagggatcctcccgccttggcctccctaagtgctaggattacaggcatgagccattgttcccagccaaattcaga

SEQ ID NO: 2847 - protein, 722 aa, Homosapiens; identical to SEQ ID NO: 371

SEQ ID NO: 2848 - DNA, 3165 bp, Homosapiens
tggagagcggggccggagagggctggttcgctctgcggccgggcccctcccccgcccgggagcttggcggttccgacaccgcggtcagtgcggggcaagccccagacccggccggccaggctgcagggcagggaagtttgtcctctcacttctggagaagatgcagacacaggagatcctgaggatactgcgactgcctgagctaggtgacttgggacagtttttccgcagcctctcggccaccaccctcgtgagtatgggtgccctggctgccatccttgcctactggttcactcaccggccaaaggccttgcagccgccatgcaacctcctgatgcagtcagaagaagtagaggacagtggcggggcacggcgatctgtgattgggtctggccctcagctacttacccactactatgatgatgcccggaccatgtaccaggtgttccgccgtgggcttagcatctcagggaatgggccctgtcttggtttcaggaagcctaagcagccttaccagtggctgtcctaccaggaggtggccgacagggctgaatttctggggtccggacttctccagcacaattgtaaagcatgcactgatcagtttattggtgtttttgcacaaaatcggccagagtggatcattgtggagctggcctgctacacatattccatggtggtggtcccgctctatgacaccctgggccctggggctatccgctacatcatcaatacagcggacatcagcaccgtgattgtggacaaacctcagaaggctgtgcttctgctagagcatgtggagaggaaggagactccaggcctcaagctgatcatcctcatggacccattcgaagaagccctgaaagagagagggcagaagtgcggggtggtcattaagtccatgcaggccgtggaggactgtggccaagagaatcaccaggctcctgtgcccccgcagcctgatgacctctccattgtgtgtttcacaagcggcacgacagggaacccaaaaggtgcgatgctcacccatgggaacgtggtggctgatttctcaggctttctgaaagtgacagagagtcagtgggctcccacttgtgcggatgtgcacatttcctatttgcctttagcacacatgtttgagcgaatggtgcagtctgtcgtctattgccacggagggcgtgttggcttcttccagggagatatccgccttctctcagatgacatgaaggctctatgccccaccatcttccctgtggtcccacgactgctgaaccggatgtacgacaagatcttcagccaggcaaacacaccattaaagcgctggctcctggagtttgcagcaaagcgtaagcaagccgaggtccggagtggaatcatcaggaatgatagtatctgggatgaactcttctttaataagattcaggccagtcttggtgggtgtgtgcggatgattgttactggagcagccccagcatcaccaacagttctgggatttctccgggcagctctagggtgccaggtttatgaaggttatggccaaactgagtgcacagctggatgtaccttcaccactcctggcgactggacctcagggcacgtaggggcgccacttccctgcaatcatatcaagctcgttgatgttgaggaactgaactactgggcctgcaaaggagagggagagatatgtgtgagaggaccaaatgtgttcaaaggctacttgaaagatccagacaggacgaaggaggccctggacagcgatggctggcttcacactggagacatcggaaaatggctgccggcaggaactcttaaaattattgatcggaaaaagcatatatttaaacttgctcagggagaatatgttgcacccgagaagattgagaacatctacatccggagccaacctgtggcgcaaatctatgtccatggggacagcttaaaggcctttttggtaggcattgttgtgcctgaccctgaagttatgccctcctgggcccagaagagaggaattgaaggaacatatgcagatctctgcacaaataaggatctgaagaaagccattttggaagatatggtgaggttaggaaaagaaagtggactccattcttttgagcaggttaaagccattcacatccattctgacatgttctcagttcaaaatggcttgctgacaccaacactaaaagctaagagacctgagctgagagagtacttcaaaaaacaaatagaagagctttactcaatctccatgtgaagttcaaggaaagttcttctcagtgtaatgaactgtctagcaatattatagttattcttgaaagtaatgagtcaaaatgacacagctgaaaatgaataagcatctgattttatgactgagccttttcctgtcccaagaggtctttaacaatattttctctatcatcaatgagtatattttatttttattataaaaatgatattgtggtggactgctaaaaatatcacaaatggcaatgtaaaaatcaagacattttctcaagaactgtgtaccactaaaagtaatatattgtcaatgttcacagaactattaaacataaaggaaaaacataagtgatatattctacttaattatttgtgaatcagtaaccagatgcagcaaatatctaggcaatgtggactacctcattcagtaactgattgtcaaaatcacaattaaatcagacttcaaaaattaaagctaggtgtatagaatcatgctaaaagaaaacatgataactcatagtctacgtaacttcagagtctttaaacatgacaatccacattgtcatatgtgaaaattttctctctgatttttactttcattcatgaaaaatgaaaattcagaaattctttttttcctttttgttttgagacagggtctgctctgtcacctaggctggagtgcagtggcttaatcatggctcattgcagtctccatctcctgggctcgagtgatcctcctgtctcacctcccaagtagctgagactacagtacaggcacatgccaccacacctggctaatagaaattttttttttagagattttgctcaggctggtctcaaactcctgagctcaagggatcctcccgccttggcctccctaagtgctaggattacaggcatgagccattgttcccagccaaattcaga

SEQ ID NO: 2849 - protein, 697 aa, Homosapiens; identical to SEQ ID NO: 2843

SEQ ID NO: 2850 - DNA, 3204 bp, Homosapiens
aaccgcgacccggctgccattcgagcctgcccagccataaaacccaggctgcgagtcgcgcgggggcagggtcgcgtgttgatggggtgggtggcggcggggtgggctcaatgtcacgctctggcgctcgtcgcccgtgctcccccttccagccggtttccgcagaatgccagagtttgtcctctcacttctggagaagatgcagacacaggagatcctgaggatactgcgactgcctgagctaggtgacttgggacagtttttccgcagcctctcggccaccaccctcgtgagtatgggtgccctggctgccatccttgcctactggttcactcaccggccaaaggccttgcagccgccatgcaacctcctgatgcagtcagaagaagtagaggacagtggcggggcacggcgatctgtgattgggtctggccctcagctacttacccactactatgatgatgcccggaccatgtaccaggtgttccgccgtgggcttagcatctcagggaatgggccctgtcttggtttcaggaagcctaagcagccttaccagtggctgtcctaccaggaggtggccgacagggctgaatttctggggtccggacttctccagcacaattgtaaagcatgcactgatcagtttattggtgtttttgcacaaaatcggccagagtggatcattgtggagctggcctgctacacatattccatggtggtggtcccgctctatgacaccctgggccctggggctatccgctacatcatcaatacagcggacatcagcaccgtgattgtggacaaacctcagaaggctgtgcttctgctagagcatgtggagaggaaggagactccaggcctcaagctgatcatcctcatggacccattcgaagaagccctgaaagagagagggcagaagtgcggggtggtcattaagtccatgcaggccgtggaggactgtggccaagagaatcaccaggctcctgtgcccccgcagcctgatgacctctccattgtgtgtttcacaagcggcacgacagggaacccaaaaggtgcgatgctcacccatgggaacgtggtggctgatttctcaggctttctgaaagtgacagagagtcagtgggctcccacttgtgcggatgtgcacatttcctatttgcctttagcacacatgtttgagcgaatggtgcagtctgtcgtctattgccacggagggcgtgttggcttcttccagggagatatccgccttctctcagatgacatgaaggctctatgccccaccatcttccctgtggtcccacgactgctgaaccggatgtacgacaagatcttcagccaggcaaacacaccattaaagcgctggctcctggagtttgcagcaaagcgtaagcaagccgaggtccggagtggaatcatcaggaatgatagtatctgggatgaactcttctttaataagattcaggccagtcttggtgggtgtgtgcggatgattgttactggagcagccccagcatcaccaacagttctgggatttctccgggcagctctagggtgccaggtttatgaaggttatggccaaactgagtgcacagctggatgtaccttcaccactcctggcgactggacctcagggcacgtaggggcgccacttccctgcaatcatatcaagctcgttgatgttgaggaactgaactactgggcctgcaaaggagagggagagatatgtgtgagaggaccaaatgtgttcaaaggctacttgaaagatccagacaggacgaaggaggccctggacagcgatggctggcttcacactggagacatcggaaaatggctgccggcaggaactcttaaaattattgatcggaaaaagcatatatttaaacttgctcagggagaatatgttgcacccgagaagattgagaacatctacatccggagccaacctgtggcgcaaatctatgtccatggggacagcttaaaggcctttttggtaggcattgttgtgcctgaccctgaagttatgccctcctgggcccagaagagaggaattgaaggaacatatgcagatctctgcacaaataaggatctgaagaaagccattttggaagatatggtgaggttaggaaaagaaagtggactccattcttttgagcaggttaaagccattcacatccattctgacatgttctcagttcaaaatggcttgctgacaccaacactaaaagctaagagacctgagctgagagagtacttcaaaaaacaaatagaagagctttactcaatctccatgtgaagttcaaggaaagttcttctcagtgtaatgaactgtctagcaatattatagttattcttgaaagtaatgagtcaaaatgacacagctgaaaatgaataagcatctgattttatgactgagccttttcctgtcccaagaggtctttaacaatattttctctatcatcaatgagtatattttatttttattataaaaatgatattgtggtggactgctaaaaatatcacaaatggcaatgtaaaaatcaagacattttctcaagaactgtgtaccactaaaagtaatatattgtcaatgttcacagaactattaaacataaaggaaaaacataagtgatatattctacttaattatttgtgaatcagtaaccagatgcagcaaatatctaggcaatgtggactacctcattcagtaactgattgtcaaaatcacaattaaatcagacttcaaaaattaaagctaggtgtatagaatcatgctaaaagaaaacatgataactcatagtctacgtaacttcagagtctttaaacatgacaatccacattgtcatatgtgaaaattttctctctgatttttactttcattcatgaaaaatgaaaattcagaaattctttttttcctttttgttttgagacagggtctgctctgtcacctaggctggagtgcagtggcttaatcatggctcattgcagtctccatctcctgggctcgagtgatcctcctgtctcacctcccaagtagctgagactacagtacaggcacatgccaccacacctggctaatagaaattttttttttagagattttgctcaggctggtctcaaactcctgagctcaagggatcctcccgccttggcctccctaagtgctaggattacaggcatgagccattgttcccagccaaattcaga

SEQ ID NO: 2851 - protein, 708 aa, Homosapiens
MPEFVLSLLEKMQTQEILRILRLPELGDLGQFFRSLSATTLVSMGALAAILAYWFTHRPKALQPPCNLLMQSEEVEDSGGARRSVIGSGPQLLTHYYDDARTMYQVFRRGLSISGNGPCLGFRKPKQPYQWLSYQEVADRAEFLGSGLLQHNCKACTDQFIGVFAQNRPEWIIVELACYTYSMVVVPLYDTLGPGAIRYIINTADISTVIVDKPQKAVLLLEHVERKETPGLKLIILMDPFEEALKERGQKCGVVIKSMQAVEDCGQENHQAPVPPQPDDLSIVCFTSGTTGNPKGAMLTHGNVVADFSGFLKVTESQWAPTCADVHISYLPLAHMFERMVQSVVYCHGGRVGFFQGDIRLLSDDMKALCPTIFPVVPRLLNRMYDKIFSQANTPLKRWLLEFAAKRKQAEVRSGIIRNDSIWDELFFNKIQASLGGCVRMIVTGAAPASPTVLGFLRAALGCQVYEGYGQTECTAGCTFTTPGDWTSGHVGAPLPCNHIKLVDVEELNYWACKGEGEICVRGPNVFKGYLKDPDRTKEALDSDGWLHTGDIGKWLPAGTLKIIDRKKHIFKLAQGEYVAPEKIENIYIRSQPVAQIYVHGDSLKAFLVGIVVPDPEVMPSWAQKRGIEGTYADLCTNKDLKKAILEDMVRLGKESGLHSFEQVKAIHIHSDMFSVQNGLLTPTLKAKRPELREYFKKQIEELYSISM

SEQ ID NO: 2852 - DNA, 2058 bp, Homosapiens
aagtcatgtaacctctctgagctttgtgttccttacctgtagaaatgccacttcccttatagggttgctatgagcattaaagaaaggagcatatataaggcccctggtgtactcctagtcccattaggaaccagccaggggctcccccttggcctcgcactaaacagcacccacagccaacttcagcagcatctccagtactcatggggcttacacaccttcaccttcccagaattccctggggaaatccaacaactctaagacctggagcagacccattagtaggctgtagtacatctcaaaggcctgagtccccagggaggcccatgtccagggtttgggagtaggtgaggggggcacacgccagtgagaatggctgctttggcatctcccagaggctcaggattccactccatcttctgcttcatctccctgtgcctgagtgggacttggttggaaggtgagggggtgggggtcacctcagatggcattcatcagtgtctcatggcagcagccagagctgggtcagggggtcatgggtgccctccatgtagggcagcactttggacagctttggactatcgccagtagtgaccaccctaagggactcctcccttcctgtcctgtctttctagtctgtcgtctattgccacggagggcgtgttggcttcttccagggagatatccgccttctctcagatgacatgaaggctctatgccccaccatcttccctgtggtcccacgactgctgaaccggatgtacgacaagatcttcagccaggcaaacacaccattaaagcgctggctcctggagtttgcagcaaagcgtaagcaagccgaggtccggagtggaatcatcaggaatgatagtatctgggatgaactcttctttaataagattcaggccagtcttggtgggtgtgtgcggatgattgttactggagcagccccagcatcaccaacagttctgggatttctccgggcagctctagggtgccaggtttatgaaggttatggccaaactgagtgcacagctggatgtaccttcaccactcctggcgactggacctcagggcacgtaggggcgccacttccctgcaatcatatcaagctcgttgatgttgaggaactgaactactgggcctgcaaaggagagggagagatatgtgtgagaggaccaaatgtgttcaaaggctacttgaaagatccagacaggacgaaggaggccctggacagcgatggctggcttcacactggagacatcggaaaatggctgccggcaggaactcttaaaattattgatcggaaaaagcatatatttaaacttgctcagggagaatatgttgcacccgagaagattgagaacatctacatccggagccaacctgtggcgcaaatctatgtccatggggacagcttaaaggcctttttggtaggcattgttgtgcctgaccctgaagttatgccctcctgggcccagaagagaggaattgaaggaacatatgcagatctctgcacaaataaggatctgaagaaagccattttggaagatatggtgaggttaggaaaagaaagtggactccattcttttgagcaggttaaagccattcacatccattctgacatgttctcagttcaaaatggcttgctgacaccaacactaaaagctaagagacctgagctgagagagtacttcaaaaaacaaatagaagagctttactcaatctccatgtgaagttcaaggaaagttcttctcagtgtaatgaactgtctagcaatattatagttattcttgaaagtaatgagtcaaaatgacacagctgaaaatgaataagcatctgattttatgactgagccttttcctgtcccaagaggtctttaacaatattttctctatcatcaatgagtatattttatttttattataaaaatgatattgtggtggactgctaaaaatatcacaaatggcaatgtaaaaatcaagacattttctcaagaactgtgtaccactaaaagtaatatattgtcaatgttcacagaactattaaacataaagg

SEQ ID NO: 2853 - protein, 343 aa, Homosapiens; identical to SEQ ID NO: 2841

SEQ ID NO: 2854 - DNA, 2570 bp, Homosapiens
tccaggaagcatcattcccagagctgccagagcagtggccctggaaaatatggaagcagctgtcagccatggcccagggcctgagcgtatgattctcaggaaaagtgggcaggacatctgactgtcagagtttgtcctctcacttctggagaagatgcagacacaggagatcctgaggatactgcgactgcctgagctaggtgacttgggacagtttttccgcagcctctcggccaccaccctcgtgagtatgggtgccctggctgccatccttgcctactggttcactcaccggccaaaggccttgcagccgccatgcaacctcctgatgcagtcagaagaagtagaggacagtggcggggcacggcgatctgtgattgggtctggccctcagctacttacccactactatgatgatgcccggaccatgtaccaggtgttccgccgtgggcttagcatctcagggaatgggccctgtcttggtttcaggaagcctaagcagccttaccagtggctgtcctaccaggaggtggccgacagggctgaatttctggggtccggacttctccagcacaattgtaaagcatgcactgatcagtttattggtgtttttgcacaaaatcggccagagtggatcattgtggagctggcctgctacacatattccatggtggtggtcccgctctatgacaccctgggccctggggctatccgctacatcatcaatacagcggacatcagcaccgtgattgtggacaaacctcagaaggctgtgcttctgctagagcatgtggagaggaaggagactccaggcctcaagctgatcatcctcatggacccattcgaagaagccctgaaagagagagggcagaagtgcggggtggtcattaagtccatgcaggccgtggaggactgtggccaagagaatcaccaggctcctgtgcccccgcagcctgatgacctctccattgtgtgtttcacaagcggcacgacagggaacccaaaaggtgcgatgctcacccatgggaacgtggtggctgatttctcaggctttctgaaagtgacagagagtcagtgggctcccacttgtgcggatgtgcacatttcctatttgcctttagcacacatgtttgagcgaatggtgcagtctgtcgtctattgccacggagggcgtgttggcttcttccagggagatatccgccttctctcagatgacatgaaggctctatgccccaccatcttccctgtggtcccacgactgctgaaccggatgtacgacaagatcttcagccaggcaaacacaccattaaagcgctggctcctggagtttgcagcaaagcgtaagcaagccgaggtccggagtggaatcatcaggaatgatagtatctgggatgaactcttctttaataagattcaggccagtcttggtgggtgtgtgcggatgattgttactggagcagccccagcatcaccaacagttctgggatttctccgggcagctctagggtgccaggtttatgaaggttatggccaaactgagtgcacagctggatgtaccttcaccactcctggcgactggacctcagggcacgtaggggcgccacttccctgcaatcatatcaagctcgttgatgttgaggaactgaactactgggcctgcaaaggagagggagagatatgtgtgagaggaccaaatgtgttcaaaggctacttgaaagatccagacaggacgaaggaggccctggacagcgatggctggcttcacactggagacatcggaaaatggctgccggcaggaactcttaaaattattgatcggaaaaagcatatatttaaacttgctcagggagaatatgttgcacccgagaagattgagaacatctacatccggagccaacctgtggcgcaaatctatgtccatggggacagcttaaaggcctttttggtaggcattgttgtgcctgaccctgaagttatgccctcctgggcccagaagagaggaattgaaggaacatatgcagatctctgcacaaataaggatctgaagaaagccattttggaagatatggtgaggttaggaaaagaaagtggactccattcttttgagcaggttaaagccattcacatccattctgacatgttctcagttcaaaatggcttgctgacaccaacactaaaagctaagagacctgagctgagagagtacttcaaaaaacaaatagaagagctttactcaatctccatgtgaagttcaaggaaagttcttctcagtgtaatgaactgtctagcaatattatagttattcttgaaagtaatgagtcaaaatgacacagctgaaaatgaataagcatctgattttatgactgagccttttcctgtcccaagaggtctttaacaatattttctctatcatcaatgagtatattttatttttattataaaaatgatattgtggtggactgctaaaaatatcacaaatggcaatgtaaaaatcaagacattttctcaagaactgtgtaccactaaaagtaatatattgtcaatgttcacagaactattaaacataaagg

SEQ ID NO: 2855 - protein, 697 aa, Homosapiens; identical to SEQ ID NO: 2843

SEQ ID NO: 2856 - DNA, 2653 bp, Homosapiens
ggctctaccaccacccggcttctcagagcaggcggctgttgccatcgactgtccccaggagggcagactcggggcagggccttcgccacttttgtgctttgatcaagatgtggtaacttctttccctgggccccacaggccctataaagggaggctggttctagtgggacgagctcagccgcctcctcagtgccaggagcctgctggaaagagtttgtcctctcacttctggagaagatgcagacacaggagatcctgaggatactgcgactgcctgagctaggtgacttgggacagtttttccgcagcctctcggccaccaccctcgtgagtatgggtgccctggctgccatccttgcctactggttcactcaccggccaaaggccttgcagccgccatgcaacctcctgatgcagtcagaagaagtagaggacagtggcggggcacggcgatctgtgattgggtctggccctcagctacttacccactactatgatgatgcccggaccatgtaccaggtgttccgccgtgggcttagcatctcagggaatgggccctgtcttggtttcaggaagcctaagcagccttaccagtggctgtcctaccaggaggtggccgacagggctgaatttctggggtccggacttctccagcacaattgtaaagcatgcactgatcagtttattggtgtttttgcacaaaatcggccagagtggatcattgtggagctggcctgctacacatattccatggtggtggtcccgctctatgacaccctgggccctggggctatccgctacatcatcaatacagcggacatcagcaccgtgattgtggacaaacctcagaaggctgtgcttctgctagagcatgtggagaggaaggagactccaggcctcaagctgatcatcctcatggacccattcgaagaagccctgaaagagagagggcagaagtgcggggtggtcattaagtccatgcaggccgtggaggactgtggccaagagaatcaccaggctcctgtgcccccgcagcctgatgacctctccattgtgtgtttcacaagcggcacgacagggaacccaaaaggtgcgatgctcacccatgggaacgtggtggctgatttctcaggctttctgaaagtgacagagagtcagtgggctcccacttgtgcggatgtgcacatttcctatttgcctttagcacacatgtttgagcgaatggtgcagtctgtcgtctattgccacggagggcgtgttggcttcttccagggagatatccgccttctctcagatgacatgaaggctctatgccccaccatcttccctgtggtcccacgactgctgaaccggatgtacgacaagatcttcagccaggcaaacacaccattaaagcgctggctcctggagtttgcagcaaagcgtaagcaagccgaggtccggagtggaatcatcaggaatgatagtatctgggatgaactcttctttaataagattcaggccagtcttggtgggtgtgtgcggatgattgttactggagcagccccagcatcaccaacagttctgggatttctccgggcagctctagggtgccaggtttatgaaggttatggccaaactgagtgcacagctggatgtaccttcaccactcctggcgactggacctcagggcacgtaggggcgccacttccctgcaatcatatcaagctcgttgatgttgaggaactgaactactgggcctgcaaaggagagggagagatatgtgtgagaggaccaaatgtgttcaaaggctacttgaaagatccagacaggacgaaggaggccctggacagcgatggctggcttcacactggagacatcggaaaatggctgccggcaggaactcttaaaattattgatcggaaaaagcatatatttaaacttgctcagggagaatatgttgcacccgagaagattgagaacatctacatccggagccaacctgtggcgcaaatctatgtccatggggacagcttaaaggcctttttggtaggcattgttgtgcctgaccctgaagttatgccctcctgggcccagaagagaggaattgaaggaacatatgcagatctctgcacaaataaggatctgaagaaagccattttggaagatatggtgaggttaggaaaagaaagtggactccattcttttgagcaggttaaagccattcacatccattctgacatgttctcagttcaaaatggcttgctgacaccaacactaaaagctaagagacctgagctgagagagtacttcaaaaaacaaatagaagagctttactcaatctccatgtgaagttcaaggaaagttcttctcagtgtaatgaactgtctagcaatattatagttattcttgaaagtaatgagtcaaaatgacacagctgaaaatgaataagcatctgattttatgactgagccttttcctgtcccaagaggtctttaacaatattttctctatcatcaatgagtatattttatttttattataaaaatgatattgtggtggactgctaaaaatatcacaaatggcaatgtaaaaatcaagacattttctcaagaactgtgtaccactaaaagtaatatattgtcaatgttcacagaactattaaacataaagg

SEQ ID NO: 2857 - protein, 697 aa, Homosapiens; identical to SEQ ID NO: 2843

SEQ ID NO: 2858 - DNA, 2598 bp, Homosapiens
gcagcggcggcggcggcgcggctactgctggggctgctgggctgcggggctgcggggctgcgggtcggggaggccgggccgggccgggccgggccccgctgaccgccatgctgaccttcttcctcgtgtcggggggctccctctggctattcgtagagtttgtcctctcacttctggagaagatgcagacacaggagatcctgaggatactgcgactgcctgagctaggtgacttgggacagtttttccgcagcctctcggccaccaccctcgtgagtatgggtgccctggctgccatccttgcctactggttcactcaccggccaaaggccttgcagccgccatgcaacctcctgatgcagtcagaagaagtagaggacagtggcggggcacggcgatctgtgattgggtctggccctcagctacttacccactactatgatgatgcccggaccatgtaccaggtgttccgccgtgggcttagcatctcagggaatgggccctgtcttggtttcaggaagcctaagcagccttaccagtggctgtcctaccaggaggtggccgacagggctgaatttctggggtccggacttctccagcacaattgtaaagcatgcactgatcagtttattggtgtttttgcacaaaatcggccagagtggatcattgtggagctggcctgctacacatattccatggtggtggtcccgctctatgacaccctgggccctggggctatccgctacatcatcaatacagcggacatcagcaccgtgattgtggacaaacctcagaaggctgtgcttctgctagagcatgtggagaggaaggagactccaggcctcaagctgatcatcctcatggacccattcgaagaagccctgaaagagagagggcagaagtgcggggtggtcattaagtccatgcaggccgtggaggactgtggccaagagaatcaccaggctcctgtgcccccgcagcctgatgacctctccattgtgtgtttcacaagcggcacgacagggaacccaaaaggtgcgatgctcacccatgggaacgtggtggctgatttctcaggctttctgaaagtgacagagagtcagtgggctcccacttgtgcggatgtgcacatttcctatttgcctttagcacacatgtttgagcgaatggtgcagtctgtcgtctattgccacggagggcgtgttggcttcttccagggagatatccgccttctctcagatgacatgaaggctctatgccccaccatcttccctgtggtcccacgactgctgaaccggatgtacgacaagatcttcagccaggcaaacacaccattaaagcgctggctcctggagtttgcagcaaagcgtaagcaagccgaggtccggagtggaatcatcaggaatgatagtatctgggatgaactcttctttaataagattcaggccagtcttggtgggtgtgtgcggatgattgttactggagcagccccagcatcaccaacagttctgggatttctccgggcagctctagggtgccaggtttatgaaggttatggccaaactgagtgcacagctggatgtaccttcaccactcctggcgactggacctcagggcacgtaggggcgccacttccctgcaatcatatcaagctcgttgatgttgaggaactgaactactgggcctgcaaaggagagggagagatatgtgtgagaggaccaaatgtgttcaaaggctacttgaaagatccagacaggacgaaggaggccctggacagcgatggctggcttcacactggagacatcggaaaatggctgccggcaggaactcttaaaattattgatcggaaaaagcatatatttaaacttgctcagggagaatatgttgcacccgagaagattgagaacatctacatccggagccaacctgtggcgcaaatctatgtccatggggacagcttaaaggcctttttggtaggcattgttgtgcctgaccctgaagttatgccctcctgggcccagaagagaggaattgaaggaacatatgcagatctctgcacaaataaggatctgaagaaagccattttggaagatatggtgaggttaggaaaagaaagtggactccattcttttgagcaggttaaagccattcacatccattctgacatgttctcagttcaaaatggcttgctgacaccaacactaaaagctaagagacctgagctgagagagtacttcaaaaaacaaatagaagagctttactcaatctccatgtgaagttcaaggaaagttcttctcagtgtaatgaactgtctagcaatattatagttattcttgaaagtaatgagtcaaaatgacacagctgaaaatgaataagcatctgattttatgactgagccttttcctgtcccaagaggtctttaacaatattttctctatcatcaatgagtatattttatttttattataaaaatgatattgtggtggactgctaaaaatatcacaaatggcaatgtaaaaatcaagacattttctcaagaactgtgtaccactaaaagtaatatattgtcaatgttcacagaactattaaacataaagg

SEQ ID NO: 2859 - protein, 722 aa, Homosapiens; identical to SEQ ID NO: 371

SEQ ID NO: 2860 - DNA, 2287 bp, Homosapiens
cggagagggctggttcgctctgcggccgggcccctcccccgcccgggagcttggcggttccgacaccgcgagtttgtcctctcacttctggagaagatgcagacacaggagatcctgaggatactgcgactgcctgagctaggtgacttgggacagtttttccgcagcctctcggccaccaccctcgacagtggcggggcacggcgatctgtgattgggtctggccctcagctacttacccactactatgatgatgcccggaccatgtaccaggtgttccgccgtgggcttagcatctcagggaatgggccctgtcttggtttcaggaagcctaagcagccttaccagtggctgtcctaccaggaggtggccgacagggctgaatttctggggtccggacttctccagcacaattgtaaagcatgcactgatcagtttattggtgtttttgcacaaaatcggccagagtggatcattgtggagctggcctgctacacatattccatggtggtggtcccgctctatgacaccctgggccctggggctatccgctacatcatcaatacagcggacatcagcaccgtgattgtggacaaacctcagaaggctgtgcttctgctagagcatgtggagaggaaggagactccaggcctcaagctgatcatcctcatggacccattcgaagaagccctgaaagagagagggcagaagtgcggggtggtcattaagtccatgcaggccgtggaggactgtggccaagagaatcaccaggctcctgtgcccccgcagcctgatgacctctccattgtgtgtttcacaagcggcacgacagggaacccaaaaggtgcgatgctcacccatgggaacgtggtggctgatttctcaggctttctgaaagtgacagagggagatatccgccttctctcagatgacatgaaggctctatgccccaccatcttccctgtggtcccacgactgctgaaccggatgtacgacaagatcttcagccaggcaaacacaccattaaagcgctggctcctggagtttgcagcaaagcgtaagcaagccgaggtccggagtggaatcatcaggaatgatagtatctgggatgaactcttctttaataagattcaggccagtcttggtgggtgtgtgcggatgattgttactggagcagccccagcatcaccaacagttctgggatttctccgggcagctctagggtgccaggtttatgaaggttatggccaaactgagtgcacagctggatgtaccttcaccactcctggcgactggacctcagggcacgtaggggcgccacttccctgcaatcatatcaagctcgttgatgttgaggaactgaactactgggcctgcaaaggagagggagagatatgtgtgagaggaccaaatgtgttcaaaggctacttgaaagatccagacaggacgaaggaggccctggacagcgatggctggcttcacactggagacatcggaaaatggctgccggcaggaactcttaaaattattgatcggaaaaagcatatatttaaacttgctcagggagaatatgttgcacccgagaagattgagaacatctacatccggagccaacctgtggcgcaaatctatgtccatggggacagcttaaaggcctttttggtaggcattgttgtgcctgaccctgaagttatgccctcctgggcccagaagagaggaattgaaggaacatatgcagatctctgcacaaataaggatctgaagaaagccattttggaagatatggtgaggttaggaaaagaaagtggactccattcttttgagcaggttaaagccattcacatccattctgacatgttctcagttcaaaatggcttgctgacaccaacactaaaagctaagagacctgagctgagagagtacttcaaaaaacaaatagaagagctttactcaatctccatgtgaagttcaaggaaagttcttctcagtgtaatgaactgtctagcaatattatagttattcttgaaagtaatgagtcaaaatgacacagctgaaaatgaataagcatctgattttatgactgagccttttcctgtcccaagaggtctttaacaatattttctctatcatcaatgagtatattttatttttattataaaaatgatattgtggtggactgctaaaaatatcacaaatggcaatgtaaaaatcaagacattttctcaagaactgtgtaccactaaaagtaatatattgtcaatgttcacagaactattaaacataaagg

SEQ ID NO: 2861 - protein, 622 aa, Homosapiens
MQTQEILRILRLPELGDLGQFFRSLSATTLDSGGARRSVIGSGPQLLTHYYDDARTMYQVFRRGLSISGNGPCLGFRKPKQPYQWLSYQEVADRAEFLGSGLLQHNCKACTDQFIGVFAQNRPEWIIVELACYTYSMVVVPLYDTLGPGAIRYIINTADISTVIVDKPQKAVLLLEHVERKETPGLKLIILMDPFEEALKERGQKCGVVIKSMQAVEDCGQENHQAPVPPQPDDLSIVCFTSGTTGNPKGAMLTHGNVVADFSGFLKVTEGDIRLLSDDMKALCPTIFPVVPRLLNRMYDKIFSQANTPLKRWLLEFAAKRKQAEVRSGIIRNDSIWDELFFNKIQASLGGCVRMIVTGAAPASPTVLGFLRAALGCQVYEGYGQTECTAGCTFTTPGDWTSGHVGAPLPCNHIKLVDVEELNYWACKGEGEICVRGPNVFKGYLKDPDRTKEALDSDGWLHTGDIGKWLPAGTLKIIDRKKHIFKLAQGEYVAPEKIENIYIRSQPVAQIYVHGDSLKAFLVGIVVPDPEVMPSWAQKRGIEGTYADLCTNKDLKKAILEDMVRLGKESGLHSFEQVKAIHIHSDMFSVQNGLLTPTLKAKRPELREYFKKQIEELYSISM

SEQ ID NO: 2862 - DNA, 2576 bp, Homosapiens
tggagagcggggccggagagggctggttcgctctgcggccgggcccctcccccgcccgggagcttggcggttccgacaccgcggtcagtgcggggcaagccccagacccggccggccaggctgcagggcagggaagtttgtcctctcacttctggagaagatgcagacacaggagatcctgaggatactgcgactgcctgagctaggtgacttgggacagtttttccgcagcctctcggccaccaccctcgtgagtatgggtgccctggctgccatccttgcctactggttcactcaccggccaaaggccttgcagccgccatgcaacctcctgatgcagtcagaagaagtagaggacagtggcggggcacggcgatctgtgattgggtctggccctcagctacttacccactactatgatgatgcccggaccatgtaccaggtgttccgccgtgggcttagcatctcagggaatgggccctgtcttggtttcaggaagcctaagcagccttaccagtggctgtcctaccaggaggtggccgacagggctgaatttctggggtccggacttctccagcacaattgtaaagcatgcactgatcagtttattggtgtttttgcacaaaatcggccagagtggatcattgtggagctggcctgctacacatattccatggtggtggtcccgctctatgacaccctgggccctggggctatccgctacatcatcaatacagcggacatcagcaccgtgattgtggacaaacctcagaaggctgtgcttctgctagagcatgtggagaggaaggagactccaggcctcaagctgatcatcctcatggacccattcgaagaagccctgaaagagagagggcagaagtgcggggtggtcattaagtccatgcaggccgtggaggactgtggccaagagaatcaccaggctcctgtgcccccgcagcctgatgacctctccattgtgtgtttcacaagcggcacgacagggaacccaaaaggtgcgatgctcacccatgggaacgtggtggctgatttctcaggctttctgaaagtgacagagagtcagtgggctcccacttgtgcggatgtgcacatttcctatttgcctttagcacacatgtttgagcgaatggtgcagtctgtcgtctattgccacggagggcgtgttggcttcttccagggagatatccgccttctctcagatgacatgaaggctctatgccccaccatcttccctgtggtcccacgactgctgaaccggatgtacgacaagatcttcagccaggcaaacacaccattaaagcgctggctcctggagtttgcagcaaagcgtaagcaagccgaggtccggagtggaatcatcaggaatgatagtatctgggatgaactcttctttaataagattcaggccagtcttggtgggtgtgtgcggatgattgttactggagcagccccagcatcaccaacagttctgggatttctccgggcagctctagggtgccaggtttatgaaggttatggccaaactgagtgcacagctggatgtaccttcaccactcctggcgactggacctcagggcacgtaggggcgccacttccctgcaatcatatcaagctcgttgatgttgaggaactgaactactgggcctgcaaaggagagggagagatatgtgtgagaggaccaaatgtgttcaaaggctacttgaaagatccagacaggacgaaggaggccctggacagcgatggctggcttcacactggagacatcggaaaatggctgccggcaggaactcttaaaattattgatcggaaaaagcatatatttaaacttgctcagggagaatatgttgcacccgagaagattgagaacatctacatccggagccaacctgtggcgcaaatctatgtccatggggacagcttaaaggcctttttggtaggcattgttgtgcctgaccctgaagttatgccctcctgggcccagaagagaggaattgaaggaacatatgcagatctctgcacaaataaggatctgaagaaagccattttggaagatatggtgaggttaggaaaagaaagtggactccattcttttgagcaggttaaagccattcacatccattctgacatgttctcagttcaaaatggcttgctgacaccaacactaaaagctaagagacctgagctgagagagtacttcaaaaaacaaatagaagagctttactcaatctccatgtgaagttcaaggaaagttcttctcagtgtaatgaactgtctagcaatattatagttattcttgaaagtaatgagtcaaaatgacacagctgaaaatgaataagcatctgattttatgactgagccttttcctgtcccaagaggtctttaacaatattttctctatcatcaatgagtatattttatttttattataaaaatgatattgtggtggactgctaaaaatatcacaaatggcaatgtaaaaatcaagacattttctcaagaactgtgtaccactaaaagtaatatattgtcaatgttcacagaactattaaacataaagg

SEQ ID NO: 2863 - protein, 697 aa, Homosapiens; identical to SEQ ID NO: 2843

SEQ ID NO: 2864 - DNA, 2615 bp, Homosapiens
aaccgcgacccggctgccattcgagcctgcccagccataaaacccaggctgcgagtcgcgcgggggcagggtcgcgtgttgatggggtgggtggcggcggggtgggctcaatgtcacgctctggcgctcgtcgcccgtgctcccccttccagccggtttccgcagaatgccagagtttgtcctctcacttctggagaagatgcagacacaggagatcctgaggatactgcgactgcctgagctaggtgacttgggacagtttttccgcagcctctcggccaccaccctcgtgagtatgggtgccctggctgccatccttgcctactggttcactcaccggccaaaggccttgcagccgccatgcaacctcctgatgcagtcagaagaagtagaggacagtggcggggcacggcgatctgtgattgggtctggccctcagctacttacccactactatgatgatgcccggaccatgtaccaggtgttccgccgtgggcttagcatctcagggaatgggccctgtcttggtttcaggaagcctaagcagccttaccagtggctgtcctaccaggaggtggccgacagggctgaatttctggggtccggacttctccagcacaattgtaaagcatgcactgatcagtttattggtgtttttgcacaaaatcggccagagtggatcattgtggagctggcctgctacacatattccatggtggtggtcccgctctatgacaccctgggccctggggctatccgctacatcatcaatacagcggacatcagcaccgtgattgtggacaaacctcagaaggctgtgcttctgctagagcatgtggagaggaaggagactccaggcctcaagctgatcatcctcatggacccattcgaagaagccctgaaagagagagggcagaagtgcggggtggtcattaagtccatgcaggccgtggaggactgtggccaagagaatcaccaggctcctgtgcccccgcagcctgatgacctctccattgtgtgtttcacaagcggcacgacagggaacccaaaaggtgcgatgctcacccatgggaacgtggtggctgatttctcaggctttctgaaagtgacagagagtcagtgggctcccacttgtgcggatgtgcacatttcctatttgcctttagcacacatgtttgagcgaatggtgcagtctgtcgtctattgccacggagggcgtgttggcttcttccagggagatatccgccttctctcagatgacatgaaggctctatgccccaccatcttccctgtggtcccacgactgctgaaccggatgtacgacaagatcttcagccaggcaaacacaccattaaagcgctggctcctggagtttgcagcaaagcgtaagcaagccgaggtccggagtggaatcatcaggaatgatagtatctgggatgaactcttctttaataagattcaggccagtcttggtgggtgtgtgcggatgattgttactggagcagccccagcatcaccaacagttctgggatttctccgggcagctctagggtgccaggtttatgaaggttatggccaaactgagtgcacagctggatgtaccttcaccactcctggcgactggacctcagggcacgtaggggcgccacttccctgcaatcatatcaagctcgttgatgttgaggaactgaactactgggcctgcaaaggagagggagagatatgtgtgagaggaccaaatgtgttcaaaggctacttgaaagatccagacaggacgaaggaggccctggacagcgatggctggcttcacactggagacatcggaaaatggctgccggcaggaactcttaaaattattgatcggaaaaagcatatatttaaacttgctcagggagaatatgttgcacccgagaagattgagaacatctacatccggagccaacctgtggcgcaaatctatgtccatggggacagcttaaaggcctttttggtaggcattgttgtgcctgaccctgaagttatgccctcctgggcccagaagagaggaattgaaggaacatatgcagatctctgcacaaataaggatctgaagaaagccattttggaagatatggtgaggttaggaaaagaaagtggactccattcttttgagcaggttaaagccattcacatccattctgacatgttctcagttcaaaatggcttgctgacaccaacactaaaagctaagagacctgagctgagagagtacttcaaaaaacaaatagaagagctttactcaatctccatgtgaagttcaaggaaagttcttctcagtgtaatgaactgtctagcaatattatagttattcttgaaagtaatgagtcaaaatgacacagctgaaaatgaataagcatctgattttatgactgagccttttcctgtcccaagaggtctttaacaatattttctctatcatcaatgagtatattttatttttattataaaaatgatattgtggtggactgctaaaaatatcacaaatggcaatgtaaaaatcaagacattttctcaagaactgtgtaccactaaaagtaatatattgtcaatgttcacagaactattaaacataaagg

SEQ ID NO: 2865 - protein, 708 aa, Homosapiens; identical to SEQ ID NO: 2851

SEQ ID NO: 2866 - DNA, 2615 bp, Homosapiens
aaccgcgacccggctgccattcgagcctgcccagccataaaacccaggctgcgagtcgcgcgggggcagggtcgcgtgttgatggggtgggtggcggcggggtgggctcaatgtcacgctctggcgctcgtcgcccgtgctcccccttccagccggtttccgcagaatgccagagtttgtcctctcacttctggagaagatgcagacacaggagatcctgaggatactgcgactgcctgagctaggtgacttgggacagtttttccgcagcctctcggccaccaccctcgtgagtatgggtgccctggctgccatccttgcctactggttcactcaccggccaaaggccttgcagccgccatgcaacctcctgatgcagtcagaagaagtagaggacagtggcggggcacggcgatctgtgattgggtctggccctcagctacttacccactactatgatgatgcccggaccatgtaccaggtgttccgccgtgggcttagcatctcagggaatgggccctgtcttggtttcaggaagcctaagcagccttaccagtggctgtcctaccaggaggtggccgacagggctgaatttctggggtccggacttctccagcacaattgtaaagcatgcactgatcagtttattggtgtttttgcacaaaatcggccagagtggatcattgtggagctggcctgctacacatattccatggtggtggtcccgctctatgacaccctgggccctggggctatccgctacatcatcaatacagcggacatcagcaccgtgattgtggacaaacctcagaaggctgtgcttctgctagagcatgtggagaggaaggagactccaggcctcaagctgatcatcctcatggacccattcgaagaagccctgaaagagagagggcagaagtgcggggtggtcattaagtccatgcaggccgtggaggactgtggccaagagaatcaccaggctcctgtgcccccgcagcctgatgacctctccattgtgtgtttcacaagcggcacgacagggaacccaaaaggtgcgatgctcacccatgggaacgtggtggctgatttctcaggctttctgaaagtgacagagaaagtgatctttccgagacaggacgatgtgctcatctccttcctgcctctggctcacatgtttgagagagtaatccagtctgtcgtctattgccacggagggcgtgttggcttcttccagggagatatccgccttctctcagatgacatgaaggctctatgccccaccatcttccctgtggtcccacgactgctgaaccggatgtacgacaagatcttcagccaggcaaacacaccattaaagcgctggctcctggagtttgcagcaaagcgtaagcaagccgaggtccggagtggaatcatcaggaatgatagtatctgggatgaactcttctttaataagattcaggccagtcttggtgggtgtgtgcggatgattgttactggagcagccccagcatcaccaacagttctgggatttctccgggcagctctagggtgccaggtttatgaaggttatggccaaactgagtgcacagctggatgtaccttcaccactcctggcgactggacctcagggcacgtaggggcgccacttccctgcaatcatatcaagctcgttgatgttgaggaactgaactactgggcctgcaaaggagagggagagatatgtgtgagaggaccaaatgtgttcaaaggctacttgaaagatccagacaggacgaaggaggccctggacagcgatggctggcttcacactggagacatcggaaaatggctgccggcaggaactcttaaaattattgatcggaaaaagcatatatttaaacttgctcagggagaatatgttgcacccgagaagattgagaacatctacatccggagccaacctgtggcgcaaatctatgtccatggggacagcttaaaggcctttttggtaggcattgttgtgcctgaccctgaagttatgccctcctgggcccagaagagaggaattgaaggaacatatgcagatctctgcacaaataaggatctgaagaaagccattttggaagatatggtgaggttaggaaaagaaagtggactccattcttttgagcaggttaaagccattcacatccattctgacatgttctcagttcaaaatggcttgctgacaccaacactaaaagctaagagacctgagctgagagagtacttcaaaaaacaaatagaagagctttactcaatctccatgtgaagttcaaggaaagttcttctcagtgtaatgaactgtctagcaatattatagttattcttgaaagtaatgagtcaaaatgacacagctgaaaatgaataagcatctgattttatgactgagccttttcctgtcccaagaggtctttaacaatattttctctatcatcaatgagtatattttatttttattataaaaatgatattgtggtggactgctaaaaatatcacaaatggcaatgtaaaaatcaagacattttctcaagaactgtgtaccactaaaagtaatatattgtcaatgttcacagaactattaaacataaagg

SEQ ID NO: 2867 - protein, 708 aa, Homosapiens
MPEFVLSLLEKMQTQEILRILRLPELGDLGQFFRSLSATTLVSMGALAAILAYWFTHRPKALQPPCNLLMQSEEVEDSGGARRSVIGSGPQLLTHYYDDARTMYQVFRRGLSISGNGPCLGFRKPKQPYQWLSYQEVADRAEFLGSGLLQHNCKACTDQFIGVFAQNRPEWIIVELACYTYSMVVVPLYDTLGPGAIRYIINTADISTVIVDKPQKAVLLLEHVERKETPGLKLIILMDPFEEALKERGQKCGVVIKSMQAVEDCGQENHQAPVPPQPDDLSIVCFTSGTTGNPKGAMLTHGNVVADFSGFLKVTEKVIFPRQDDVLISFLPLAHMFERVIQSVVYCHGGRVGFFQGDIRLLSDDMKALCPTIFPVVPRLLNRMYDKIFSQANTPLKRWLLEFAAKRKQAEVRSGIIRNDSIWDELFFNKIQASLGGCVRMIVTGAAPASPTVLGFLRAALGCQVYEGYGQTECTAGCTFTTPGDWTSGHVGAPLPCNHIKLVDVEELNYWACKGEGEICVRGPNVFKGYLKDPDRTKEALDSDGWLHTGDIGKWLPAGTLKIIDRKKHIFKLAQGEYVAPEKIENIYIRSQPVAQIYVHGDSLKAFLVGIVVPDPEVMPSWAQKRGIEGTYADLCTNKDLKKAILEDMVRLGKESGLHSFEQVKAIHIHSDMFSVQNGLLTPTLKAKRPELREYFKKQIEELYSISM

SEQ ID NO: 2868 - DNA, 787 bp, Homosapiens
cccctgggcactgtgctgagcacttctgctgcccttccctcttctccacaccccaggagcaaagataagtaaaatgctatgacagctgtcacacaggagaacagagcacccaggccttgaggtccaggaagcatcattcccagagctgccagagcagtggccctggaaaatatggaagcagctgtcagccatggcccagggcctgagcgtatgattctcaggaaaagtgggcaggacatctgactgtcaggtgtgacggcagaaggttctggcctcttcctgggaaaagcccttctaggtagccagcttctggggtgcactctgtacatcccaactccccgagggcctgccctacagtgtttcagaccagatatcaggtcctgtgacccaggacccctccctaacctgcccgtcaggtctcttgccttatctgactcttgttttcaacagagtttgtcctctcacttctggagaagatgcagacacaggagatcctgaggatactgcgactgcctgagctaggtgacttgggacagtttttccgcagcctctcggccaccaccctcgtgagtatgggtgccctggctgccatccttgcctactggttcactcaccggccaaaggccttgcagccgccatgcaacctcctgatgcagtcagaagaagtagaggacagtggcggggcacggcgatctgtgattgggtctggccctcagctacttacccactactatgatgatgcccggaccatgtaccaggtgttccgccgtgggcttagcatctcagg

SEQ ID NO: 2869 - protein, 102 aa, Homosapiens
MQTQEILRILRLPELGDLGQFFRSLSATTLVSMGALAAILAYWFTHRPKALQPPCNLLMQSEEVEDSGGARRSVIGSGPQLLTHYYDDARTMYQVFRRGLSI

SEQ ID NO: 2870 - DNA, 929 bp, Homosapiens
tcctggccaggctggggctgttctcaccagaaaacaaaaatgtctttcagaccaaagcaaaacgaggccccagctggcccaggcaggccattgggcgttgttcacactgacccactatgaacaccaatcactggggctctcactttgcacccactggaaggaacccatcatctttggagacggaactggaggcctcggtggctgctgaggaaagcactacgccccaagattcacatgaattaggagctacacaaaggaagtaggcccaggaataaccacacctaccacggatctcccgaggcagccgagcaaatgatgaggaaccacccctgggcatcctgaaggacaaccccaagggctcaaagcagcatctcatccacagcactcccctaaccccaccaatctgtggacccagtggatggttagtgggaactctggcgaggccaacgcaaggaatgggagcatcacaccagaccatccagtgaggtgaggaccttgactgggaattcctctcatctatgcttggcagagtggcccaagctcccaatctgtcaggtgactggaaccttggagctctaaggaagcagcagccctcagagaagactctcttccacaaaactggtcacccagaagctgtgggttcactagttgattcattcattcattcaacaaacacttctggagcacctccttctattccaggctgcactggttctcagcacacagggttctccagtgaagggtaacctggccctgcctgcaaggagtttacacctgcttttccctactgcttctaacatattggcatcatcccccacctgggcacagagcctagcatcctagcaggagcacactcaaaatctgttgtttactgattgacttgtggtaaggaaacagcttataaaacacattattaaaataaattacgc

SEQ ID NO: 2871 - protein, 48 aa, Homosapiens
MNTNHWGSHFAPTGRNPSSLETELEASVAAEESTTPQDSHELGATQRK

SEQ ID NO: 2872 - DNA, 459 bp, Homosapiens
gaggagtcctgccatacagcctctgtcacaccctcttggaggagccctgccaagcttgagatcccagcaaagtccctgccaggctgtggctgagttcaagctggagcagctctcccaggagtccagatcccagctgctgagctgtgagcccacatgcactcatggctgatggtctctggtgggcctgaagagatctcatgctcttccactctctgcttcctgacttctgctctctggttttctatcctcttctttctgggctgtggctcagccagctcctggcctgggagggctgcgtatagagaaggcccggctgcctgagcgctgtcctcggtgctggagtcctggtgggctctgcatgcttcttcctcgtgtcggggggctccctctggctattcgtaggtaagtgcccgtcctgtccgcgtcccggactcccatctcccgcaggctatgaggtct

SEQ ID NO: 2873 - protein, 55 aa, Homosapiens
MHSWLMVSGGPEEISCSSTLCFLTSALWFSILFFLGCGSASSWPGRAAYREGPAA

SEQ ID NO: 2874 - DNA, 925 bp, Homosapiens
cagagccccacgaaggaccagaacaagacagagtgcctcctgccgatccaaacatgagccgcctgcccgtcctgctcctgctccaactcctggtccgccccggactccaagctcccatgacccagacaacgcccttgaagacaagctgggttaactgctctaacatgatcgatgaaattataacacacttaaagcagccacctttgcctttgctggacttcaacaacctcaatggggaagaccaagacattctgatggaaaataaccttcgaaggccaaacctggaggcattcaacagggctgtcaagagtttacagaacgcatcagcaattgagagcattcttaaaaatctcctgccatgtctgcccctggccacggccgcacccacgcgacatccaatccatatcaaggacggtgactggaatgaattccggaggaaactgacgttctatctgaaaacccttgagaatgcgcaggctcaacagacgactttgagcctcgcgatcttttgagtccaacgtccagctcgttctctgggccttctcaccacagagcctcgggacatcaaaaacagcagaacttctgaaacctctgggtcatctctcacacattccaggaccagaagcatttcaccttttcctgcggcatcagatgaattgttaattatctaatttctgaaatgtgcagctcccatttggccttgtgcggttgtgttctcatttttatcccattgagactatttatttatgtatgtatgtatttatttatttattgcctggagtgtgaactgtatttattttagcagaggagccatgtcctgctgcttctgcaaaaaactcagagtggggtggggagcatgttcatttgtacctcgagttttaaactggttcctagggatgtgtgagaataaactagactctgaaca

SEQ ID NO: 2875 - protein, 152 aa, Homosapiens; identical to SEQ ID NO: 373

SEQ ID NO: 2876 - DNA, 785 bp, Homosapiens
acacagagagaaaggctaaagttctctggaggatgtggctgcagagcctgctgctcttgggcactgtggcctgcagcatctctgcacccgcccgctcgcccagccccagcacgcagccctgggagcatgtgaatgccatccaggaggcccggcgtctcctgaacctgagtagagacactgctgctgagatgaatgaaacagtagaagtcatctcagaaatgtttgacctccaggagccgacctgcctacagacccgcctggagctgtacaagcagggcctgcggggcagcctcaccaagctcaagggccccttgaccatgatggccagccactacaagcagcactgccctccaaccccggaaacttcctgtgcaacccagattatcacctttgaaagtttcaaagagaacctgaaggactttctgcttgtcatcccctttgactgctgggagccagtccaggagtgagaccggccagatgaggctggccaagccggggagctgctctctcatgaaacaagagctagaaactcaggatggtcatcttggagggaccaaggggtgggccacagccatggtgggagtggcctggacctgccctgggccacactgaccctgatacaggcatggcagaagaatgggaatattttatactgacagaaatcagtaatatttatatatttatatttttaaaatatttatttatttatttatttaagttcatattccatatttattcaagatgttttaccgtaataattattattaaaaatatgcttctacttg

SEQ ID NO: 2877 - protein, 144 aa, Homosapiens; identical to SEQ ID NO: 375

SEQ ID NO: 2878 - DNA, 428 bp, Homosapiens
agaggtcaggtggtgagaatggcggggtcagcggacagcagtggggctacaggctgtgtctgtggctgccctggcttagggctctggctggcccctcctttccgacctggtctggcagagcagccccgcaggaccagctcgcaaggctcctggggccagtggggctctgtcctgtgaggcggtccctccgcaaggacagagtcagagagaggctgaaaccaggtcctgaaaaacatcacagaaactacagctggaaatttcctgttgaccctgatagactactacttgacaccagccgaccgatctgctggctgcccaccatggtcctgccacaattctgatgggacagagaattggccttactttctttcctgataaatagccatagacctcaagccagccagttttggccagcttatagagactgt

SEQ ID NO: 2879 - protein, 52 aa, Homosapiens
MAGSADSSGATGCVCGCPGLGLWLAPPFRPGLAEQPRRTSSQGSWGQWGSVL

SEQ ID NO: 2880 - DNA, 1103 bp, Homosapiens
agggaactcaaaataggtgtgtggcctctagtcaccaaatggcttcttggctctgctttaaatttaggcccactcagccacttaagatccatcttgaaggactggctctttcagggtcacatttgttcatgcaaactattgatattgcatgctatttaccactatttcagatgaaattgccacaggatataaatcattggactatttaagagagcaaaggcttttggaagctgccacagtttcattcccaggtcctccacttaccagcaatgagacttcatgtgacctcaggtgctcctgctcaccttcatatttttttaagtatacatctgtgtatcatgaacaattcttatctcaaaatttaaaaatgaagtacacattataacagcattacaatcatgaacacatgtgctatgttctctgggagacaaagagaaactatttaccctactttccagaaaaggacactgacacttagagggaacacaagtgttgaaaccaggtctgaaatccaagacccaagatgcttttttgctgctaaagcattcattatccagactctgcctgcatgaaggtgatgcataggaaatgatgaacctggtaaaagcttccagtcttaaaaatactccaagtaaggctctttaaggcttctggtagggacattttattttttggtaaagccacaatagatagaaatgccataaaaacaaacatgtaaacaaggtatcagaactttggttcactgaaacatctcacacctaaaacacctgaggtacaaaggcaccttgctaggcgctagacagctaactctgctgcagccactttgatcctagccttggggccagggatggcacaggctgaatggaagggctgggacttcagtcacacaggagtcgccctagtatggtctccctctgctccagacaaacattcatttctccaaaaatcagcctgataggaacatacaaaggaacatacaaaggtgtctgtcacgttgacatgggctgaaggaccaggaaggggaaggacagaaaaggatgtcagtcaacttctgttgatccacaaggtctcaagaactcctgtcctcgttcatggaaccactt

SEQ ID NO: 2881 - protein, 78 aa, Homosapiens
MLFTTISDEIATGYKSLDYLREQRLLEAATVSFPGPPLTSNETSCDLRCSCSPSYFFKYTSVYHEQFLSQNLKMKYTL

SEQ ID NO: 2882 - DNA, 1408 bp, Homosapiens
gtgaagaaaggacagggagggaagtcccttcaggggcgggtgagttcccagacttctacctcagaaaggtaggtgctttctgggaaatgtctctgttgctggagtcccagagccctatcccctgtccatgggaaaatgagggtgtttctgctcagggcagagcttctgtgatgcttgcagtcaggtccctgagcacagtctcttaagaatgtgttctgaaaggccatctctttcccagggtacagctgtgttctggtacaacctcttgcggagcggggaaggtgactaccgaacaagacatgctgcctgccctgtgcttgtgggctgcaagtgggtctccaataagtggttccatgaacgaggacaggagttcttgagaccttgtggatcaacagaagttgactgacatccttttctgtccttccccttcctggtccttcagcccatgtcaacgtgacagacacctttgtatgttcctttgtatgttcctatcaggctgatttttggagaaatgaatgtttgtctggagcagagggagaccatactagggcgactcctgtgtgactgaagtcccagcccttccattcagcctgtgccatccctggccccaaggctaggatcaaagtggctgcagcagagttagctgtctagcgcctagcaaggtgcctttgtacctcaggtgttttaggtgtgagatgtttcagtgaaccaaagttctgataccttgtttacatgtttgtttttatggcatttctatctattgtggctttaccaaaaaataaaatgtccctaccagaagccttaaagagccttacttggagtatttttaagactggaagcttttaccaggttcatcatttcctatgcatcaccttcatgcaggcagagtctggataatgaatgctttagcagcaaaaaagcatcttgggtcttggatttcagacctggtttcaacacttgtgttccctctaagtgtcagtgtccttttctggaaagtagggtaaatagtttctctttgtctcccagagaacatagcacatgtgttcatgattgtaatgctgttataatgtgtacttcatttttaaattttgagataagaattgttcatgatacacagatgtatacttaaaaaaatatgaaggtgagcaggagcacctgtgtcaacaccaagttagaaaagagaacgttttcaagtcagtacctcaggagccccttgggaacccctcctagatcacatctccttcactgcccccagcactttggagataaatcattgtctcatgatgtgtggtactcattcctttgcttgtctttatagttttaccatctatgattagatccctaaataagtagttattctgttttccctgattttgaacttttactaatagaatgagagtaaatattt

SEQ ID NO: 2883 - protein, 65 aa, Homosapiens
MCSERPSLSQGTAVFWYNLLRSGEGDYRTRHAACPVLVGCKWVSNKWFHERGQEFLRPCGSTEVD

SEQ ID NO: 2884 - DNA, 1653 bp, Homosapiens
ggggactgcacatggtgttggaaacagtacagagctcctggtcagggcactttgcagagtacagtggcttaggcaaggccaaggctagatggggattcaaagggtggggtcagaacaggcattttctgagtacagactcagattattttcatccagggacagcccggatgtgggtctcctgtgggcctcaactcttgaacactcatgacatggagactgttctaatgaatcacactggttaagtaggcatgggaagagcctttcttggctaaagggctggccatggagcagacaccaagtagtgtcactcatgctgagaggagggcaatctatataccttgtcatgtcctttgtggctcaattgctctgagagccttgggtaggagggtcaagctctatgtcttatatttccagatgagtgatgtagaagctggtggtgccaccgtcttccctgatctgggggctgcaatttggcctaagaagggtacagctgtgttctggtacaacctcttgcggagcggggaaggtgactaccgaacaagacatgctgcctgccctgtgcttgtgggctgcaagtgggtctccaataagtggttccatgaacgaggacaggagttcttgagaccttgtggatcaacagaagttgactgacatccttttctgtccttccccttcctggtccttcagcccatgtcaacgtgacagacacctttgtatgttcctttgtatgttcctatcaggctgatttttggagaaatgaatgtttgtctggagcagagggagaccatactagggcgactcctgtgtgactgaagtcccagcccttccattcagcctgtgccatccctggccccaaggctaggatcaaagtggctgcagcagagttagctgtctagcgcctagcaaggtgcctttgtacctcaggtgttttaggtgtgagatgtttcagtgaaccaaagttctgataccttgtttacatgtttgtttttatggcatttctatctattgtggctttaccaaaaaataaaatgtccctaccagaagccttaaagagccttacttggagtatttttaagactggaagcttttaccaggttcatcatttcctatgcatcaccttcatgcaggcagagtctggataatgaatgctttagcagcaaaaaagcatcttgggtcttggatttcagacctggtttcaacacttgtgttccctctaagtgtcagtgtccttttctggaaagtagggtaaatagtttctctttgtctcccagagaacatagcacatgtgttcatgattgtaatgctgttataatgtgtacttcatttttaaattttgagataagaattgttcatgatacacagatgtatacttaaaaaaatatgaaggtgagcaggagcacctgtgtcaacaccaagttagaaaagagaacgttttcaagtcagtacctcaggagccccttgggaacccctcctagatcacatctccttcactgcccccagcactttggagataaatcattgtctcatgatgtgtggtactcattcctttgcttgtctttatagttttaccatctatgattagatccctaaataagtagttattctgttttccctgattttgaacttttactaatagaatgagagtaaatattt

SEQ ID NO: 2885 - protein, 122 aa, Homosapiens
MEQTPSSVTHAERRAIYIPCHVLCGSIALRALGRRVKLYVLYFQMSDVEAGGATVFPDLGAAIWPKKGTAVFWYNLLRSGEGDYRTRHAACPVLVGCKWVSNKWFHERGQEFLRPCGSTEVD

SEQ ID NO: 2886 - DNA, 3190 bp, Homosapiens
acatccttgtggaaccagcgttgtttttccttggcagctgcggagacccgtgataattcgttaactaattcaacaaacgggacccttctgtgtgccagaaaccgcaagcagttgctaacccagtgggacaggcggattggaagagcgggaaggtcctggcccagagcagtgtggtgagcgctgtgctggaagggaatgcgggcagtgggtacttggtagagcactgactgcctccggccagaggacttcccggaggaggtgacccatgagctggagtggtcagaggaaggctggcaaaagggcatcgtggacagaggaacagcctatgtgagtgggagcagagaccttggccaatgccattccttatggccttgtagtggaagcaaggtgatggggaaggaacactgtaggggatagctgtccacggacgctgtctacaagaccctggagtgagataacgtgcctggtactgtgccctgcatgtgtaagatgcccagttgaccttcgcagcaggagcctggatcagggcacttcctgcctcaggtattgctggacagcccagacacttccctctgtgaccatgaaactctgggtgtctgcattgctgatggcctggtttggtgtcctgagctgtgtgcaggccgaattcttcacctctattgggcacatgactgacctgatttatgcagagaaagagctggtgcagtctctgaaagagtacatccttgtggaggaagccaagctttccaagattaagagctgggccaacaaaatggaagccttgactagcaagtcagctgctgatgctgagggctacctggctcaccctgtgaatgcctacaaactggtgaagcggctaaacacagactggcctgcgctggaggaccttgtcctgcaggactcagctgcaggttttatcgccaacctctctgtgcagcggcagttcttccccactgatgaggacgagataggagctgccaaagccctgatgagacttcaggacacatacaggctggacccaggcacaatttccagaggggaacttccaggaaccaagtaccaggcaatgctgagtgtggatgactgctttgggatgggccgctcggcctacaatgaaggggactattatcatacggtgttgtggatggagcaggtgctaaagcagcttgatgccggggaggaggccaccacaaccaagtcacaggtgctggactacctcagctatgctgtcttccagttgggtgatctgcaccgtgccctggagctcacccgccgcctgctctcccttgacccaagccacgaacgagctggagggaatctgcggtactttgagcagttattggaggaagagagagaaaaaacgttaacaaatcagacagaagctgagctagcaaccccagaaggcatctatgagaggcctgtggactacctgcctgagagggatgtttacgagagcctctgtcgtggggagggtgtcaaactgacaccccgtagacagaagaggcttttctgtaggtaccaccatggcaacagggccccacagctgctcattgcccccttcaaagaggaggacgagtgggacagcccgcacatcgtcaggtactacgatgtcatgtctgatgaggaaatcgagaggatcaaggagatcgcaaaacctaaacttgcacgagccaccgttcgtgatcccaagacaggagtcctcactgtcgccagctaccgggtttccaaaagctcctggctagaggaagatgatgaccctgttgtggcccgagtaaatcgtcggatgcagcatatcacagggttaacagtaaagactgcagaattgttacaggttgcaaattatggagtgggaggacagtatgaaccgcacttcgacttctctaggaatgatgagcgagatactttcaagcatttagggacggggaatcgtgtggctactttcttaaactacatgagtgatgtagaagctggtggtgccaccgtcttccctgatctgggggctgcaatttggcctaagaagggtacagctgtgttctggtacaacctcttgcggagcggggaaggtgactaccgaacaagacatgctgcctgccctgtgcttgtgggctgcaagtgggtctccaataagtggttccatgaacgaggacaggagttcttgagaccttgtggatcaacagaagttgactgacatccttttctgtccttccccttcctggtccttcagcccatgtcaacgtgacagacacctttgtatgttcctttgtatgttcctatcaggctgatttttggagaaatgaatgtttgtctggagcagagggagaccatactagggcgactcctgtgtgactgaagtcccagcccttccattcagcctgtgccatccctggccccaaggctaggatcaaagtggctgcagcagagttagctgtctagcgcctagcaaggtgcctttgtacctcaggtgttttaggtgtgagatgtttcagtgaaccaaagttctgataccttgtttacatgtttgtttttatggcatttctatctattgtggctttaccaaaaaataaaatgtccctaccagaagccttaaagagccttacttggagtatttttaagactggaagcttttaccaggttcatcatttcctatgcatcaccttcatgcaggcagagtctggataatgaatgctttagcagcaaaaaagcatcttgggtcttggatttcagacctggtttcaacacttgtgttccctctaagtgtcagtgtccttttctggaaagtagggtaaatagtttctctttgtctcccagagaacatagcacatgtgttcatgattgtaatgctgttataatgtgtacttcatttttaaattttgagataagaattgttcatgatacacagatgtatacttaaaaaaatatgaaggtgagcaggagcacctgtgtcaacaccaagttagaaaagagaacgttttcaagtcagtacctcaggagccccttgggaacccctcctagatcacatctccttcactgcccccagcactttggagataaatcattgtctcatgatgtgtggtactcattcctttgcttgtctttatagttttaccatctatgattagatccctaaataagtagttattctgttttccctgattttgaacttttactaatagaatgagagtaaatattt

SEQ ID NO: 2887 - protein, 535 aa, Homosapiens; identical to SEQ ID NO: 381

SEQ ID NO: 2888 - DNA, 803 bp, Homosapiens
gtgaagaaaggacagggagggaagtcccttcaggggcgggtgagttcccagacttctacctcagaaaggtaggtgctttctgggaaatgtctctgttgctggagtcccagagccctatcccctgtccatgggaaaatgagggtgtttctgctcagggcagagcttctgtgatgcttgcagtcaggtccctgagcacagtctcttaagaatgtgttctgaaaggccatctctttcccagggtacagctgtgttctggtacaacctcttgcggagcggggaaggtgactaccgaacaagacatgctgcctgccctgtgcttgtgggctgcaagtgggtctccaataagtggttccatgaacgaggacaggagttcttgagaccttgtggatcaacagaagttgactgacatccttttctgtccttccccttcctggtccttcagcccatgtcaacgtgacagacacctttgtatgttcctttgtatgttcctatcaggctgatttttggagaaatgaatgtttgtctggagcagagggagaccatactagggcgactcctgtgtgactgaagtcccagcccttccattcagcctgtgccatccctggccccaaggctaggatcaaagtggctgcagcagagttagctgtctagcgcctagcaaggtgcctttgtacctcaggtgttttaggtgtgagatgtttcagtgaaccaaagttctgataccttgtttacatgtttgtttttatggcatttctatctattgtggctttaccaaaaaataaaatgtccctaccagaagcctt

SEQ ID NO: 2889 - protein, 65 aa, Homosapiens; identical to SEQ ID NO: 2883

SEQ ID NO: 2890 - DNA, 1048 bp, Homosapiens
ggggactgcacatggtgttggaaacagtacagagctcctggtcagggcactttgcagagtacagtggcttaggcaaggccaaggctagatggggattcaaagggtggggtcagaacaggcattttctgagtacagactcagattattttcatccagggacagcccggatgtgggtctcctgtgggcctcaactcttgaacactcatgacatggagactgttctaatgaatcacactggttaagtaggcatgggaagagcctttcttggctaaagggctggccatggagcagacaccaagtagtgtcactcatgctgagaggagggcaatctatataccttgtcatgtcctttgtggctcaattgctctgagagccttgggtaggagggtcaagctctatgtcttatatttccagatgagtgatgtagaagctggtggtgccaccgtcttccctgatctgggggctgcaatttggcctaagaagggtacagctgtgttctggtacaacctcttgcggagcggggaaggtgactaccgaacaagacatgctgcctgccctgtgcttgtgggctgcaagtgggtctccaataagtggttccatgaacgaggacaggagttcttgagaccttgtggatcaacagaagttgactgacatccttttctgtccttccccttcctggtccttcagcccatgtcaacgtgacagacacctttgtatgttcctttgtatgttcctatcaggctgatttttggagaaatgaatgtttgtctggagcagagggagaccatactagggcgactcctgtgtgactgaagtcccagcccttccattcagcctgtgccatccctggccccaaggctaggatcaaagtggctgcagcagagttagctgtctagcgcctagcaaggtgcctttgtacctcaggtgttttaggtgtgagatgtttcagtgaaccaaagttctgataccttgtttacatgtttgtttttatggcatttctatctattgtggctttaccaaaaaataaaatgtccctaccagaagcctt

SEQ ID NO: 2891 - protein, 122 aa, Homosapiens; identical to SEQ ID NO: 2885

SEQ ID NO: 2892 - DNA, 2094 bp, Homosapiens
gccaagggaggaggcgccgagctgaccgggcgacgccgcgggaggttctggaaacgccgggagctgcgagtgtccagacacttccctctgtgaccatgaaactctgggtgtctgcattgctgatggcctggtttggtgtcctgagctgtgtgcaggccgaattcttcacctctattgggcacatgactgacctgatttatgcagagaaagagctggtgcagtctctgaaagagtacatccttgtggaggaagccaagctttccaagattaagagctgggccaacaaaatggaagccttgactagcaagtcagctgctgatgctgagggctacctggctcaccctgtgaatgcctacaaactggtgaagcggctaaacacagactggcctgcgctggaggaccttgtcctgcaggactcagctgcaggttttatcgccaacctctctgtgcagcggcagttcttccccactgatgaggacgagataggagctgccaaagccctgatgagacttcaggacacatacaggctggacccaggcacaatttccagaggggaacttccaggaaccaagtaccaggcaatgctgagtgtggatgactgctttgggatgggccgctcggcctacaatgaaggggactattatcatacggtgttgtggatggagcaggtgctaaagcagcttgatgccggggaggaggccaccacaaccaagtcacaggtgctggactacctcagctatgctgtcttccagttgggtgatctgcaccgtgccctggagctcacccgccgcctgctctcccttgacccaagccacgaacgagctggagggaatctgcggtactttgagcagttattggaggaagagagagaaaaaacgttaacaaatcagacagaagctgagctagcaaccccagaaggcatctatgagaggcctgtggactacctgcctgagagggatgtttacgagagcctctgtcgtggggagggtgtcaaactgacaccccgtagacagaagaggcttttctgtaggtaccaccatggcaacagggccccacagctgctcattgcccccttcaaagaggaggacgagtgggacagcccgcacatcgtcaggtactacgatgtcatgtctgatgaggaaatcgagaggatcaaggagatcgcaaaacctaaacttgcacgagccaccgttcgtgatcccaagacaggagtcctcactgtcgccagctaccgggtttccaaaagctcctggctagaggaagatgatgaccctgttgtggcccgagtaaatcgtcggatgcagcatatcacagggttaacagtaaagactgcagaattgttacaggttgcaaattatggagtgggaggacagtatgaaccgcacttcgacttctctaggcgaccttttgacagcggcctcaaaacagaggggaataggttagcgacgtttcttaactacatgagtgatgtagaagctggtggtgccaccgtcttccctgatctgggggctgcaatttggcctaagaagggtacagctgtgttctggtacaacctcttgcggagcggggaaggtgactaccgaacaagacatgctgcctgccctgtgcttgtgggctgcaagtgggtctccaataagtggttccatgaacgaggacaggagttcttgagaccttgtggatcaacagaagttgactgacatccttttctgtccttccccttcctggtccttcagcccatgtcaacgtgacagacacctttgtatgttcctttgtatgttcctatcaggctgatttttggagaaatgaatgtttgtctggagcagagggagaccatactagggcgactcctgtgtgactgaagtcccagcccttccattcagcctgtgccatccctggccccaaggctaggatcaaagtggctgcagcagagttagctgtctagcgcctagcaaggtgcctttgtacctcaggtgttttaggtgtgagatgtttcagtgaaccaaagttctgataccttgtttacatgtttgtttttatggcatttctatctattgtggctttaccaaaaaataaaatgtccctaccagaagcctt

SEQ ID NO: 2893 - protein, 533 aa, Homosapiens; identical to SEQ ID NO: 377

SEQ ID NO: 2894 - DNA, 1104 bp, Homosapiens
ctggtagggacattttattttttggtaaagccacaatagatagaaatgccataaaaacaaacatgtaaacaaggtatcagaactttggttcactgaaacatctcacacctaaaacacctgaggtacaaaggcaccttgctaggcgctagacagctaactctgctgcagccactttgatcctagccttggggccagggatggcacaggctgaatggaagggctgggacttcagtcacacaggagtcgccctagtatggtctccctctgctccagacaaacattcatttctccaaaaatcagcctgataggaacatacaaaggaacatacaaaggtgtctgtcacgttgacatgggctgaaggaccaggaaggggaaggacagaaaaggatgtcagtcaacttctgttgatccacaaggtctcaagaactcctgtcctcgttcatggaaccacttattggagactgtgaaaagaaagcaagcatgttacaatcctattggtcagtttagtagcctgaatgaatgactccttcatgatgaccccctgcactgtgccctggaatcagacacaaataagacaagacatgatctcaggcctcaatttgctgaagaattggtaaggaagacacatgtaaacagataattgtatgaaattctgcacacatgtttcttgctcttagagggaagaggaaatcctagggctagaatataaagctacatagaagttatcctgggaagaagatgggcatacccagatggttctctcaccaagagggtcccaggagtgacaacaggatgagaaagtaatcaaggcagaagccaccctgacgtgtgttggggactcaagaggcctaatattactgggaggtggcaggtagaaactgagaggtagggtgtgaggatgaggaagactgtcagcattgcagagggcttggacattaacctcaggagccgtggaccagcagatccagtctgtatgccatgggcacaagagcaacagagctgctgccagcactatcaccccacgccatatcttcaaacacacaggaaccatgattctgttcctcacagactctctcataatgaataaaaattttatttcaatgc

SEQ ID NO: 2895 - protein, 62 aa, Homosapiens
MRKTVSIAEGLDINLRSRGPADPVCMPWAQEQQSCCQHYHPTPYLQTHRNHDSVPHRLSHNE

SEQ ID NO: 2896 - DNA, 931 bp, Homosapiens
ccagacatccttgtggaaccagcgttgtttttccttggcagctgcggagacccgtgataattcgttaactaattcaacaaacgggacccttctgtgtgccagaaaccgcaagcagttgctaacccagtgggacaggcggattggaagagcgggaaggtcctggcccagagcagtgtgacacttccctctgtgaccatgaaactctgggtgtctgcattgctgatggcctggtttggtgtcctgagctgtgtgcaggccgaattcttcacctctattgggcacatgactgacctgatttatgcagagaaagagctggtgcagtctctgaaagagtacatccttgtggaggaagccaagctttccaagattaagaggtgtcctaagtccccaaccatccttagttggccttccttcccttctgcccctcaaggaacaaggaagccatccagggtgcctataagaggaaacctttgagagggtgatgtggggctggcctggttacttcatgccagtgcttgagaggagctaagtacatgggctaaggagtcactgtttattttctatttaagaccttttcccttacattgggggtcccagctgttatctagattaaggggctagaagtatctgtggggagttactgtattcatttttcattgcctcttgatgaaaagggccccagaacctggcaccagggaattctcactaggaaaattgtcacaggtcaagacctatgtgggtggacgcattagtcttccttttcctctggttccacagctgggccaacaaaatggaagccttgactagcaagtcagctgctgatgctgagggctacctggctcaccctgtgaatgcctacaaactggtgaagcggctaaacacagactggcctgcgctggaggaccttgtcctgcaggactcagctgcaggt

SEQ ID NO: 2897 - protein, 92 aa, Homosapiens
MKLWVSALLMAWFGVLSCVQAEFFTSIGHMTDLIYAEKELVQSLKEYILVEEAKLSKIKRCPKSPTILSWPSFPSAPQGTRKPSRVPIRGNL

SEQ ID NO: 2898 - DNA, 1189 bp, Homosapiens
gggcgcggcgtccaggcggcggcggcggctgcggcggcggcggctcctcctcagagtccggctcaggctccggctgcggctccagcccgcgatgccccattccgtgaccctgcgcgggccttcgccctggggcttccgcctggtgggcggccgggacttcagcgcgcccctcaccatctcacgggtccatgctggcagcaaggctgcattggctgccctgtgcccaggagacctgatccaggccatcaatggtgagagcacagagctcatgacacacctggaggcacagaaccgcatcaagggctgccacgatcacctcacactgtctgtgagcaggcctgagggtaggagctggcccagtgcccctgatgacagcaaggctcaggcacacaggatccacatcgatcctgagatccaggacggcagcccaacaaccagcaggcggccctcaggcaccgggactgggccagaagatggcagaccaagcctgggatctccatatggacaaccccctcgctttccagtccctcacaatggcagcagcgaggccaccctgccagcccagatgagcaccctgcatgtgtctccaccccccagcgctgacccagccagaggcctcccgcggagccgggactgcagagtcgacctgggctccgaggtgtacaggatgctgcgggagccagccgagcccgtggccgcggagcccaagcagtcaggctccttccgctacttgcagggcatgctagaggccggcgagggcggggattggcccgggcctggcggcccccggaacctcaagcccacggccagcaagctgggcgctccgctgagcggcctgcaggggctgcccgagtgcacgcgctgcggccacggcatcgtgggcaccatcgtcaaggcacgggacaagctctaccatcccgagtgcttcatgtgcagtgactgcggcctgaacctcaagcagcgtggttacttctttctggacgagcggctctactgtgagagccacgccaaggcgcgcgtgaagccgcccgagggctacgacgtggtggcggtgtaccccaatgccaaggtggaactcgtctgagctgggaccctgctcccacgcctgcttcttaaggtccctgctcggccggtgtaaatatgtttcaccctgtccctctaataaagctcctctgctccaccttgaacc

SEQ ID NO: 2899 - protein, 330 aa, Homosapiens; identical to SEQ ID NO: 383

SEQ ID NO: 2900 - DNA, 1059 bp, Homosapiens
caggcggcggcggcggctgcggcggcggcggctcctcctcagagtccggctcaggctccggctgcggctccagcccgcgatgccccattccgtgaccctgcgcgggccttcgccctggggcttccgcctggtgggcggccgggacttcagcgcgcccctcaccatctcacgggtccatgctggcagcaaggctgcattggctgccctgtgcccaggagacctgatccaggccatcaatggtgagagcacagagctcatgacacacctggaggcacagaaccgcatcaagggctgccacgatcacctcacactgtctgtgagcaggcctgagggtaggagctggcccagtgcccctgatgacagcaaggctcaggcacacaggatccacatcgatcctgagatccaggacggcagcccaacaaccagcaggcggccctcaggcaccgggactgggccagaagatggcagaccaagcctgggatctccatatggacaaccccctcgctttccagtccctcacaatggcagcagcgaggccaccctgccagcccagatgagcaccctgcatgtgtctccaccccccagcgctgacccagccagaggcctcccgcggagccgggactgcagagtcgacctgggctccgaggtgtacaggatgctgcgggagccagccgagcccgtggccgcggagcccaagcagtcaggctccttccgctacttgcagggcatgctagaggccggcgagggcggggcaccatcgtcaaggcacgggacaagctctaccatcccgagtgcttcatgtgcagtgactgcggcctgaacctcaagcagcgtggttacttctttctggacgagcggctctactgtgagagccacgccaaggcgcgcgtgaagccgcccgagggctacgacgtggtggcggtgtaccccaatgccaaggtggaactcgtctgagctgggaccctgctcccacgcctgcttcttaaggtccctgctcggccggtgtaaatatgtttcaccctgtccctctaataaagctcctctgctccaccttgaacc

SEQ ID NO: 2901 - protein, 246 aa, Homosapiens
MPHSVTLRGPSPWGFRLVGGRDFSAPLTISRVHAGSKAALAALCPGDLIQAINGESTELMTHLEAQNRIKGCHDHLTLSVSRPEGRSWPSAPDDSKAQAHRIHIDPEIQDGSPTTSRRPSGTGTGPEDGRPSLGSPYGQPPRFPVPHNGSSEATLPAQMSTLHVSPPPSADPARGLPRSRDCRVDLGSEVYRMLREPAEPVAAEPKQSGSFRYLQGMLEAGEGGAPSSRHGTSSTIPSASCAVTAA

SEQ ID NO: 2902 - DNA, 2302 bp, Homosapiens
caggcggcggcggcggctgcggcggcggcggctcctcctcagagtccggctcaggctccggctgcggctccagcccgcgatgccccattccgtgaccctgcgcgggccttcgccctggggcttccgcctggtgggcggccgggacttcagcgcgcccctcaccatctcacgggtccatgctggcagcaaggctgcattggctgccctgtgcccaggagacctgatccaggccatcaatggtgagagcacagagctcatgacacacctggaggcacagaaccgcatcaagggctgccacgatcacctcacactgtctgtgagcaggcctgagggtaggagctggcccagtgcccctgatgacagcaaggctcaggcacacaggatccacatcgatcctgagatccaggacggcagcccaacaaccagcaggcggccctcaggcaccgggactgggccagaagatggcagaccaagcctgggatctccatatggacaaccccctcgctttccagtccctcacaatggcagcagcgaggccaccctgccagcccagatgagcaccctgcatgtgtctccaccccccagcgctgacccagccagaggcctcccgcggagccgggactgcagagtcgacctgggctccgaggtgtacaggatgctgcgggagccagccgagcccgtggccgcggagcccaagcagtcaggctccttccgctacttgcagggcatgctagaggccggcgagggcggggattggcccgggcctggcggcccccggaacctcaagcccacggccagcaagctgggcgctccgctgagcggcctgcaggggctgcccgagtgcacgcgctgcggccacggcatcgtgggcaccatcgtcaaggcacgggacaagctctaccatcccgagtgcttcatgtgcagtgactgcggcctgaacctcaagcagcgtggttacttctttctggacgagcggctctactgtgagagccacgccaaggcgcgcgtgaagccgcccgagggctacgacgtggtggcggtgtaccccaatgccaaggtggaactcgtctgagctgggaccctgctcccacgcctgcttcttaaggtccctgctcggccggtgtaaatatgtttcaccctgtccctctaataaagctcctctgctccaccttgaacctgtcacctggcctgccaccctcctgcgcaggccatgcatggctcccgagtacagtagtatctgcttaggtgccaggcatgtcctaggctctgggtgcagtagtgagcaggacgggtaccatgctgccctgaagggggccacagcctgggtggaaggcagacctgaatcacaacgggccagctctagtaatacgaaggtgaggtctgggatgctgcgtgcggcgcgacgacaggaggtatgacctgggtggggtcagggaaagtcttagctgagaactaagagatgagggaggcacaaactctgcacgggggaactgtgtgtgcaaaggtgagctgggggcgagaaaggcctctgtggccgtcatcggcactagcgggttgggggtggtggtggggtgctggcagcctcaggagcgatcgctcccctggagagggtgattgagtgtggagatcaccggggccgccgcgggccgtctgcacttctgttccaggtttttctggcattttctgttccaggtttcttccacccacgagcactttattctcctccgagacccccttttcttccccttcctctctcccccaccagggggcgcgcttaaatttccagacagagaccagaaggaaggtttagaaagaaaagaacacttgcccagggcagctttgccctccaagaggctccctcctgtctctaagtcaattccacccctcctcgaagtcccggcttccacccctctcctcagagtcccggcgtttacctcgtggtgtgtttgccttgggcctttcatgccccggctgcacacatcgtctgtgaattgtggctgttcactcccgaggatgtgtcctagactccgggtcgcgtggatctaccctctagtttacttgctcgggagaagaaactgactcgttttatttagtgcctatttagcgagcccagagtaacgtacatttgtgctgttttcaattttgtgctatcgcaaatcacaaaaaaactgttatcaattcacattcatcatcagcacgagacccatttccttgtgctcctgccagctcaggatattatgtttcttttttcatttttgccagtctgttaagtaaaatgtcatatgcgtttgttttaatttgc

SEQ ID NO: 2903 - protein, 330 aa, Homosapiens; identical to SEQ ID NO: 383

SEQ ID NO: 2904 - DNA, 2184 bp, Homosapiens
caggcggcggcggcggctgcggcggcggcggctcctcctcagagtccggctcaggctccggctgcggctccagcccgcgatgccccattccgtgaccctgcgcgggccttcgccctggggcttccgcctggtgggcggccgggacttcagcgcgcccctcaccatctcacgggtccatgctggcagcaaggctgcattggctgccctgtgcccaggagacctgatccaggccatcaatggtgagagcacagagctcatgacacacctggaggcacagaaccgcatcaagggctgccacgatcacctcacactgtctgtgagcaggcctgagggtaggagctggcccagtgcccctgatgacagcaaggctcaggcacacaggatccacatcgatcctgagatccaggacggcagcccaacaaccagcaggcggccctcaggcaccgggactgggccagaagatggcagaccaagcctgggatctccatatggacaaccccctcgctttccagtccctcacaatggcagcagcgaggccaccctgccagcccagatgagcaccctgcatgtgtctccaccccccagcgctgacccagccagaggcctcccgcggagccgggactgcagagtcgacctgggctccgaggtgtacaggatgctgcgggagccagccgagcccgtggccgcggagcccaagcagtcaggctccttccgctacttgcagggcatgctagaggccggcgagggcggggcaccatcgtcaaggcacgggacaagctctaccatcccgagtgcttcatgtgcagtgactgcggcctgaacctcaagcagcgtggttacttctttctggacgagcggctctactgtgagagccacgccaaggcgcgcgtgaagccgcccgagggctacgacgtggtggcggtgtaccccaatgccaaggtggaactcgtctgagctgggaccctgctcccacgcctgcttcttaaggtccctgctcggccggtgtaaatatgtttcaccctgtccctctaataaagctcctctgctccaccttgaacctgtcacctggcctgccaccctcctgcgcaggccatgcatggctcccgagtacagtagtatctgcttaggtgccaggcatgtcctaggctctgggtgcagtagtgagcaggacgggtaccatgctgccctgaagggggccacagcctgggtggaaggcagacctgaatcacaacgggccagctctagtaatacgaaggtgaggtctgggatgctgcgtgcggcgcgacgacaggaggtatgacctgggtggggtcagggaaagtcttagctgagaactaagagatgagggaggcacaaactctgcacgggggaactgtgtgtgcaaaggtgagctgggggcgagaaaggcctctgtggccgtcatcggcactagcgggttgggggtggtggtggggtgctggcagcctcaggagcgatcgctcccctggagagggtgattgagtgtggagatcaccggggccgccgcgggccgtctgcacttctgttccaggtttttctggcattttctgttccaggtttcttccacccacgagcactttattctcctccgagacccccttttcttccccttcctctctcccccaccagggggcgcgcttaaatttccagacagagaccagaaggaaggtttagaaagaaaagaacacttgcccagggcagctttgccctccaagaggctccctcctgtctctaagtcaattccacccctcctcgaagtcccggcttccacccctctcctcagagtcccggcgtttacctcgtggtgtgtttgccttgggcctttcatgccccggctgcacacatcgtctgtgaattgtggctgttcactcccgaggatgtgtcctagactccgggtcgcgtggatctaccctctagtttacttgctcgggagaagaaactgactcgttttatttagtgcctatttagcgagcccagagtaacgtacatttgtgctgttttcaattttgtgctatcgcaaatcacaaaaaaactgttatcaattcacattcatcatcagcacgagacccatttccttgtgctcctgccagctcaggatattatgtttcttttttcatttttgccagtctgttaagtaaaatgtcatatgcgtttgttttaatttgc

SEQ ID NO: 2905 - protein, 246 aa, Homosapiens; identical to SEQ ID NO: 2901

SEQ ID NO: 2906 - DNA, 1016 bp, Homosapiens
ggcggctgcggcggcggcggctcctcctcagagtccggctcaggctccggctgcggctccagcccgcgatgccccattccgtgaccctgcgcgggccttcgccctggggcttccgcctggtgggcggccgggacttcagcgcgcccctcaccatctcacgggacggcagcccaacaaccagcaggcggccctcaggcaccgggactgggccagaagatggcagaccaagcctgggatctccatatggacaaccccctcgctttccagtccctcacaatggcagcagcgaggccaccctgccagcccagatgagcaccctgcatgtgtctccaccccccaggtagcacagagatgccttcggtgccatgcccagaacccatcttaacccttgatccctcaaatctcacccagtcccactctgacccctgacacttgatccttgggtcttagctggttgcattctgactcataagccttaccagaccccaagtccacagggtgaaggctggaactgcatcccttcctcctctatttctttctccctcccagcgctgacccagccagaggcctcccgcggagccgggactgcagagtcgacctgggctccgaggtgtacaggatgctgcgggagccagccgagcccgtggccgcggagcccaagcagtcaggctccttccgctacttgcagggcatgctagaggccggcgagggcggtaagacgcctgccacctgtccccatctgccttcccactccctgcagtgcccaggttgccccctagcgaccccacgtcccgcctcgcagtcacctgccctcttcggtctctgcggcccggtcccacgcccttgctacaaccttgctacgccctggcttcccgattccctctccaccccctgtcgctgcccctcaccccacgcccgccaaacccgttccccagtctcgggtgccgatggcccgtctggcgcccaaccaaacaccccgcagaaatggagttctgacctcctcaccccgttcatgc

SEQ ID NO: 2907 - protein, 91 aa, Homosapiens
MPHSVTLRGPSPWGFRLVGGRDFSAPLTISRDGSPTTSRRPSGTGTGPEDGRPSLGSPYGQPPRFPVPHNGSSEATLPAQMSTLHVSPPPR

SEQ ID NO: 2908 - DNA, 932 bp, Homosapiens
ggcggctgcggcggcggcggctcctcctcagagtccggctcaggctccggctgcggctccagcccgcgatgccccattccgtgaccctgcgcgggccttcgccctggggcttccgcctggtgggcggccgggacttcagcgcgcccctcaccatctcacgggacggcagcccaacaaccagcaggcggccctcaggcaccgggactgggccagaagatggcagaccaagcctgggatctccatatggacaaccccctcgctttccagtccctcacaatggcagcagcgaggccaccctgccagcccagatgagcaccctgcatgtgtctccaccccccagcgctgacccagccagaggcctcccgcggagccgggactgcagagtcgacctgggctccgaggtgtacaggatgctgcgggagccagccgagcccgtggccgcggagcccaagcagtcaggctccttccgctacttgcagggcatgctagaggccggcgagggcggggattggcccgggcctggcggcccccggaacctcaagcccacggccagcaagctgggcgctccgctgagcggcctgcaggggctgcccgagtgcacgcgctgcggccacggcatcgtgggcaccatcgtcaaggcacgggacaagctctaccatcccgagtgcttcatgtgcagtgactgcggcctgaacctcaagcagcgtggttacttctttctggacgagcggctctactgtgagagccacgccaaggcgcgcgtgaagccgcccgagggctacgacgtggtggcggtgtaccccaatgccaaggtggaactcgtctgagctgggaccctgctcccacgcctgcttcttaaggtccctgctcggccggtgtaaatatgtttcaccctgtccctctaataaagctcctctgctccaccttgaacc

SEQ ID NO: 2909 - protein, 252 aa, Homosapiens
MPHSVTLRGPSPWGFRLVGGRDFSAPLTISRDGSPTTSRRPSGTGTGPEDGRPSLGSPYGQPPRFPVPHNGSSEATLPAQMSTLHVSPPPSADPARGLPRSRDCRVDLGSEVYRMLREPAEPVAAEPKQSGSFRYLQGMLEAGEGGDWPGPGGPRNLKPTASKLGAPLSGLQGLPECTRCGHGIVGTIVKARDKLYHPECFMCSDCGLNLKQRGYFFLDERLYCESHAKARVKPPEGYDVVAVYPNAKVELV

SEQ ID NO: 2910 - DNA, 2057 bp, Homosapiens
ggcggctgcggcggcggcggctcctcctcagagtccggctcaggctccggctgcggctccagcccgcgatgccccattccgtgaccctgcgcgggccttcgccctggggcttccgcctggtgggcggccgggacttcagcgcgcccctcaccatctcacgggacggcagcccaacaaccagcaggcggccctcaggcaccgggactgggccagaagatggcagaccaagcctgggatctccatatggacaaccccctcgctttccagtccctcacaatggcagcagcgaggccaccctgccagcccagatgagcaccctgcatgtgtctccaccccccagcgctgacccagccagaggcctcccgcggagccgggactgcagagtcgacctgggctccgaggtgtacaggatgctgcgggagccagccgagcccgtggccgcggagcccaagcagtcaggctccttccgctacttgcagggcatgctagaggccggcgagggcggggattggcccgggcctggcggcccccggaacctcaagcccacggccagcaagctgggcgctccgctgagcggcctgcaggggctgcccgagtgcacgcgctgcggccacggcatcgtgggcaccatcgtcaaggcacgggacaagctctaccatcccgagtgcttcatgtgcagtgactgcggcctgaacctcaagcagcgtggttacttctttctggacgagcggctctactgtgagagccacgccaaggcgcgcgtgaagccgcccgagggctacgacgtggtggcggtgtaccccaatgccaaggtggaactcgtctgagctgggaccctgctcccacgcctgcttcttaaggtccctgctcggccggtgtaaatatgtttcaccctgtccctctaataaagctcctctgctccaccttgaacctgtcacctggcctgccaccctcctgcgcaggccatgcatggctcccgagtacagtagtatctgcttaggtgccaggcatgtcctaggctctgggtgcagtagtgagcaggacgggtaccatgctgccctgaagggggccacagcctgggtggaaggcagacctgaatcacaacgggccagctctagtaatacgaaggtgaggtctgggatgctgcgtgcggcgcgacgacaggaggtatgacctgggtggggtcagggaaagtcttagctgagaactaagagatgagggaggcacaaactctgcacgggggaactgtgtgtgcaaaggtgagctgggggcgagaaaggcctctgtggccgtcatcggcactagcgggttgggggtggtggtggggtgctggcagcctcaggagcgatcgctcccctggagagggtgattgagtgtggagatcaccggggccgccgcgggccgtctgcacttctgttccaggtttttctggcattttctgttccaggtttcttccacccacgagcactttattctcctccgagacccccttttcttccccttcctctctcccccaccagggggcgcgcttaaatttccagacagagaccagaaggaaggtttagaaagaaaagaacacttgcccagggcagctttgccctccaagaggctccctcctgtctctaagtcaattccacccctcctcgaagtcccggcttccacccctctcctcagagtcccggcgtttacctcgtggtgtgtttgccttgggcctttcatgccccggctgcacacatcgtctgtgaattgtggctgttcactcccgaggatgtgtcctagactccgggtcgcgtggatctaccctctagtttacttgctcgggagaagaaactgactcgttttatttagtgcctatttagcgagcccagagtaacgtacatttgtgctgttttcaattttgtgctatcgcaaatcacaaaaaaactgttatcaattcacattcatcatcagcacgagacccatttccttgtgctcctgccagctcaggatattatgtttcttttttcatttttgccagtctgttaagtaaaatgtcatatgcgtttgttttaatttgc

SEQ ID NO: 2911 - protein, 252 aa, Homosapiens; identical to SEQ ID NO: 2909

SEQ ID NO: 2912 - DNA, 496 bp, Homosapiens
gcttttttttttttttaacagggtctcactctgttgcctaggctcgagtgcagtggcaagatcatagctcactgcagcctcgaactcctgggctcaaggggtcctcccacctcagccttctgagtagtttggactataggtgcatgccgccacagctggctattttttttttcatttttattttttctagagagggggtctcgctatgttgcccagtggtcacgagtcttggcaagaaagtctgaagacgggaccagctgcacatgttttaccctaagagcttgctatataaaggatactttctggaaggctggttggtgtgaggattcagtcttgcagccactcgagacatcacttctgttcgtaagtccctcttatatatttctctctgagaaaatggatttgtcaacctctttctttggcttctcagctctctcggcctttgggtttgcatagtcctgctatccatggaacaatggctcacaagggccaacac

SEQ ID NO: 2913 - protein, 33 aa, Homosapiens
MPPQLAIFFFIFIFSREGVSLCCPVVTSLGKKV

SEQ ID NO: 2914 - DNA, 913 bp, Homosapiens
acttggatgatcaacttggttaatattcaggctatcttgacagtctccacacccgtgagcaatgtcccagggcagcctgcaggcctgatagaaactccacaaacctgcctatcacggaagaggccttatccttcgccacataacctggctcgcctctgggttatgggtggggaatcagtaagtcctactgctgttcaggccctgaccccagttcccaggaaagcacaaggctagtgccaccagaggtccaggccctttgctggaggctccatcaactccactaccagtgggctaccagcagctccactagggttcctagaggaggcagcccagctgcagaagaggacaggaggatctacggtgtggcagcagccctgtcttagatcactggtggcctgcaaagaaggctggtccttaacacacaaggttcccccagggcctctggagcacaagacctggcagaagtggtatccagcttagaggtgactgcctcagttttcccagcccatggactgatgggaaggtcaagaccctaatgatgctccatgggagaagaggacatgcttgaggcaaaggccagcccatgcttagcccctggccacgagccaggattgcctctgctgcttgccctgtggccctgcagatgaacttaggccctctccagagcagagcatttgttgcccttcctgctcctttagcctcagggcaggaggctgccgggtttcctcacacgcagggcctcttctctctgaggtcttggccctgagggctatatatgaagggccatgcccatggagactgagatctgacccctgcagtaggtctcagggatgaggaccccagcatcagacactctgggttgcttggggcacttccttccccaacagaagcttcagtcccaacccaggtccca

SEQ ID NO: 2915 - protein, 75 aa, Homosapiens
MINLVNIQAILTVSTPVSNVPGQPAGLIETPQTCLSRKRPYPSPHNLARLWVMGGESVSPTAVQALTPVPRKAQG

SEQ ID NO: 2916 - DNA, 1767 bp, Homosapiens
gcgcgtgcgcgcggggcacccgccgccgaccaggcaagccaggcagcaggcgacccaagaccgtccgcggaggagacaagcaagctgtcatgttataagcagccctttgaggggtccatgtgatgtcaaggaatgaagtctctagccaacatttaatgaggaactgaggcccaccaacaaccttgagtgagcttggaagtagctccttcagcatcagttgggtgtcgagatgactactgacagcttgactgcaacttcatgagagtcttctggaccagaaccactcaagtcagggtttccccatgttggtcagcctggtctcaaactcctgacttcaggtgatccacctgcctcagcctcccaaagcgctgggattacagtttcagtatctacggccaactgggtaaaccaaatagatgctctttacaaatattttttaacttcttaaaatatctcattgaggattccgttccaagatggccaaataggaacagctctggtctgcagctcccagtgtgatcgacgcagaagacggatgatttctgcatttccaactgaggtaccagttgaatgaagagaagcacacctcctccccagaacagtactgcagctatgatataacgcctgggcagggttcgcaatagcagccaggctgtaatgtaagctggaatttcaatcaaggcagagaggaaacagttcagatggagtcttgctctgctgcccaggctggagtacagtagtgcgatcaaggctcactggaacctccacctcctgggttcaagtgattctcctgcctcagcctcccaagtagctgggattacagctgcccggacacgaaggagccgaggagcacgcctacgaagaacagggaggtggtgaggggcaccttccagttgtcctcacacaccagattccactgccaaggaagacagcatgaagcgtgagcccaaccctgaggcagacctcaaccccagcccagctctgagggaatattagcacggctggcgggcagactctcctcccctgggccaggatattgcctttgtacaaagggcataggccttgcagccctgggtttgactggcctgtgccgggactggggagagtaacctggggcaggtcactgccctccctgaaactcaggatcctctttggaaagggagggtgatgctcctactccgctcgcattacatagcaagaagccagccaaggccatggctgtgactggtgacccctcagctgtgaggcagtccaaagtaaaggtggcactgcatcttcagaagccagcctagtgcggaggggaggtgtttgaaaagcccaaagggcagggcagagggcatggccacttggtccaggcgtaaaatttcttttcccttgttgaaaagtgcaagtggttccaggagctctgtgactttattttctgagcaggcccctctgagaaatcatgtggtccctggtccactcacgcctaggccaagcttgtggcctgattcggggccccatcgttctggggcctacttactcctctccagggctccctagctcccctcctacatccctacaccctccttcccatccagtctttccagaagtgtggtccctcccattccctagggtctgtgggatgctgctgccctaacaagtccctgccagtgcatctacaaaatgagtttcagccagagtttcagtttgacttaagtcaattaagcaacatctcaagggaggtgacaaaaatttcaaagtgtgtttagtgacctttcatttatt

SEQ ID NO: 2917 - protein, 67 aa, Homosapiens
MATWSRRKISFPLLKSASGSRSSVTLFSEQAPLRNHVVPGPLTPRPSLWPDSGPHRSGAYLLLSRAP

SEQ ID NO: 2918 - DNA, 463 bp, Homosapiens
gaacagaaattcttggcaagtcagttcgtattatattctctacattaggagtgtgcacattttttgcagttggctatatgctgctgccactgtttgcttacttcatcagagactggcggatgctgctgctggcgctgacggtgccgggagtgctgtgtgtcccgctgtggtggagctggtccatgaatgctcctggctgtgggcatactgtaccagggacaggacttgccccagacagaggccagcctgggaccagcactgacaagctgagtgctccccctgaacatttaccagtggtcttaccattttcctataaaagaaaatagctttcttctgaacatcccatccttgcaggttcattcctgaatctccccgatggctgatatcccagagaagatttagagaggctgaagatatcatccaaaaagctgcaaaaatgaacaacatagctgtaccagcagtg

SEQ ID NO: 2919 - protein, 82 aa, Homosapiens
MLLPLFAYFIRDWRMLLLALTVPGVLCVPLWWSWSMNAPGCGHTVPGTGLAPDRGQPGTSTDKLSAPPEHLPVVLPFSYKRK

SEQ ID NO: 2920 - DNA, 322 bp, Homosapiens
gagacaagcaagctgtcatgttataagcagccctttgaggggtccatgtgatgtcaaggaatgaagtctctagccaacatttaatgaggaactgaggcccaccaacaaccttgagtgagcttggaagtagctccttcagcatcagttgggtgtcgagatgactactgacagcttgactgcaacttcatgagagtcttctggaccagaaccactcagttaagtggcagttgaatgaagagaagcacacctcctccccagaacagtactgcagctatgatataacgcctgggcagggttcgcaatagcagccaggctgtaatgt

SEQ ID NO: 2921 - protein, 42 aa, Homosapiens
LQLHESLLDQNHSVKWQLNEEKHTSSPEQYCSYDITPGQGSQ

SEQ ID NO: 2922 - DNA, 3757 bp, Homosapiens
ttcagaaggtcagtaataataaacttctcccagctaaaggaggatgttctaacccatcgcaaggaagctaaaaaccttgaaaatagattagacgaatggctaactagaataaacagtgtagagaagaccttaaatgacctgatggagctgaaaaccatggcacgagaactttgtgacacatgcacaagcttcaatagccgattcgatcaagaaaggatatcagtgattgaagatcaaattaatgaaataactcaagaagattagagaaaaaagagtaaaagggaacgaacaaagcctccaagaaatatgggactatgtgaaagaccaaatctacgtttgattggtgtacctgaaaatgacagggagaatggaaccaagttggaaaacactcctcaggatattatcaaggagaacttccccaacttagcaaagcaggccaacattcaaattcaggatatacagagaatgccacaaagatactcctcaagaagagcaaacccaagacacataattggcagattcaccaaggttgaaatgaaggaaaaaatgttaagcgcagccagagagaaaggtcgggttacgcacaaagggaagcccatcagactaacagcggatctctcggcagaaaccctacaagcccgaagagagtgggggccaatattcaacattcttaaagaaaagaattttcaacccagaatttcatatccagccaaactaagcttcataagtgaagaataaaatcctttccagacaagcaaatgctgagagattttgtcaccaccaggcctgccctaaaagagctcctgaaggaagcactaaacatggaaaggaaaaaccggtaccagccactgcaaaaatatgccaaattgtaaagaccatcgatgctatgaagaaactgcatgaactaacaagcaaaataaccagctaacatcataatgacaggatcaaattcacacataacaatattaaccttaaatgtaaatgggctaaatgccccaattaaaagacacagactggcaaattggataaagagtcaagacccatccgtgtcctgtattcaggagacccatctcacgtgcagagacacacataggctcaaaataaagggatggaggaagatctaccaagcaaatggaaagcagaaaaaagcaggggttgcaatcctagtctctgattaaacagactttaaaccaacaaagatcaaacgggacaaagaaggccattacataatggtaaagggatcaattcaacaagaagagctaactatcctaaatatatatgcacccaatacaggaacacccagattcataaaacaagtccttagagacctacaaagaaacttagactcccacacaataataatgggagactttaacaccccactgtcaatattagacagatcaatgagacagaaggttaacaaggatatccaggacttgaactcagatctgcaccaagcagacttaatagacatctacagacctctccaccccaaatgaagagagtatacattcttctcagcaccacatcacacttattccaaaattgaccacatagttggaagtaaagcactccttagcacatgtaaaggaacagaaatcacaacaaactgtgtctcagaccacagtgcaatcaaattagaactcaggattaagaaactcactcaaaactgcacaactgcatggaaactgaacaatctgctcctgaatgactactgggtaaataacgaaatgaaggcagaaataaagacgttctttgaaaacaatgagagcaaagacacaacgtgccagaatctctggaacacacttaaagcacggtatatagggaaatttatagcactaaatacccacaagagaaagcaggaaagatcaaaatcaacaccctaacatcataattaaaagaactagagaagcaagagcaaacaaattcaaaagctagcagaaggcaagaaataactaagatcagagcagaactgaaagagatagagacacaaaaacttcaaaaaaatcaacgaatccaggagctcgttttttgaaaagatcaacaaaattgatagactgttagcaagactaataaagaagaaaagagagaagaatcaaatcgatggtataaaaagtgataaaggggatgtcaccaccaatcccacagaaatacaaactaccatcagagaatactataaacacctctacacaaataaactagaaaatctagaagaaatggataaattcctggacacatacagcctcccaagactaaaccaggaagaagttgaatctctgattagaccaataacaggctctgaaattgaggcagtagttaatagcccaccaaccaaaaacagtccaggaccagacagattcacagccaaattctaccagaggtacagaggagctggtaccattctttctgaaactattcctagcaatagaaaagagggaatcctccctaattcattttatgaggccagcatcatcctgataccaaagcctggcagagacacaacaaaaaaaagaaaaagagaattttataccaatatccctgatgaacatcgatgcaaaaatcctcaataaaatactggcaaaccgaatccagtagcacatcaaaaagcttctccaccacgatcaagtgggcttcatccctgggatgcaaggctgtttcaacatatgcaaatcaataaacataatccatcacagaaacagaaccaatgacaaaaaccgcttgattatctcaatagatgcagaaaaggccgtcgacaaaattcaaaagcccttcatgctaaaaactctcaataaactaggtattgatagaacgtttctcaaaataataagagctatatatgacaaacccacagccaatatcatgtggaatgggctaaagctgttgacctgatagatatgggttcaagaggacacagctgaatactgtgcttaggaaaagaacagtttcaaaggctttccagattgtcagatttgatgatatcctccttggtgcacacctctcttggctatggggcacataaaccacctctaccaatctaactggtttgtgcagtttttctgattttgtatctaccggcaaaatatatcttaagccatttttaggaaacaggaggtttagtcacgtgctcaacaaaagcacaacaaatggggagcatttaatggtgtaagggctgtgaggtgtagctgctgaaactgtagctaggagctgccttgctgccttcttgcaggcagattggccagatgagccaggctaaaatacaattaatatctaccattgtggtttaatatgaaatatggatacctggtctttgtctcagttcttgtcatagagttccccaaacctttagaacttcctgagtggtaggaatatctcattagtgataatgagcccctttgattcgataactcctgagtttatgctaatgaggttacttaatgtggggccctagatattcttaggatggggctagttcccggaaagaccaggtcatttgaggattagagggttggaacttttagctctacccactgatctctgggtggggaaggtgctggagatcaagctgcctaaaaactcttgaacaacaagatttgaggagcttccagtaaatgcgtccacaagctgggagggcactgcaccccagtttcactgggacagaagctcttgcacttggaatctttccagacctagcccttcatgctgcttcatctggctgttcatctgtatcctttataataaattggcaaatgtaaaggtt

SEQ ID NO: 2923 - protein, 117 aa, Homosapiens
MDKFLDTYSLPRLNQEEVESLIRPITGSEIEAVVNSPPTKNSPGPDRFTAKFYQRYRGAGTILSETIPSNRKEGILPNSFYEASIILIPKPGRDTTKKRKREFYTNIPDEHRCKNPQ

SEQ ID NO: 2924 - DNA, 1776 bp, Homosapiens
ggcctgtcctggggacctggcgaggcccggcctctgccagccaagcctgctggggacgaccgaggtagcccgggctcggcttaggaaggcagcgggactcgaggccttggggtccgagtccgaactcgctcctctagcgccgggcggggagcgagtgggagagcggccgcgaagctccagtgttgaaaacgcacccctcccagctttttgcaaggcctacttgggggcggagagacaagcaagctgtcatgttataagcagccctttgaggggtccatgtgatgtcaaggaatgaagtctctagccaacatttaatgaggaactgaggcccaccaacaaccttgagtgagcttggaagtagctccttcagcatcagttgggtgtcgagatgactactgacagcttgactgcaacttcatgagagtcttctggaccagaaccactcagttaagtggctcccagattcctgatcctcagaaactctgagaaataatgaatgttggttgttttaaaatggtaaattttgaggtattatgttatgtggcaatagatagctaatatataaattatttgaatcaaacaatacgttaaattaaagctcagaagaataaacatctgtaattccttaatttgttttcccttctattctacagaatagaattttacagatgaaccttgtagttacttgtgcaataagagacagtatgttgtattgattaagtgcagagcctctggatgtatgatagaagaaagaccaatattcaattgctttcttcttcaattccaagcttgtgagcttgagcaaattttaaaagtgttttaagcctcagtttcctgggatggtagtgcttagctcgagctcctagcatatattaactacaaactaaatattagctataattattagttttactttgattattgactctaaataaataccttaagaactttgtgttctccacagatttggatatgtctggacgttatgtaggctggagtagtcagcaattacttgcctgaggaagggaaggcctcctcctttaagaaaagaatagggctgggattacaggtatgagccaccacgcctggccaattgcatgctttttacaaggagttttggttctcctgcccagcccactgccactggactgccctgtattgtaagtcccctcaataaaccttatgtctcagtttctggttctaggtctcttcttcagcctcttgaacatggtgccatccctactgaagtcaatggggtctgacatgactaggggaacttgaacaaaatctgaaatagctgtttttttcttgccaaaatcactgtaagacattatttgcctcagccccagaacattgaattatatgacccaagagtggagaaacagagaagtctgtctgtgtcatcagacaatatcccaagtgggatgtcatcaccccaatgcatattggcatttgggcagagtagagcagcgtcagcctagcaagacttggcacaattctgttggattgcacaatagaatgagaaatcacatttctgctgttatgtgattctgcattttaactccagtttgtttggcctggacagacaggtaactagccatgaagacaatggaccttgaaacattctgaagactagaaaaagtatgtaataaaatactttgaacaactgtttaaggacttaaatgtccagactgtttctttagatgagtgtaatttccaatgtgaaaccccacaattcggcttcaagaggtacaggacagtttttgaattccacag

SEQ ID NO: 2925 - protein, 61 aa, Homosapiens
MTQEWRNREVCLCHQTISQVGCHHPNAYWHLGRVEQRQPSKTWHNSVGLHNRMRNHISAVM

SEQ ID NO: 2926 - DNA, 919 bp, Homosapiens
tccagtggcagtgggctgggcaggagaaccaaaactccttgtaaaaagcatgcaattggccaggcgtggtggctcatacctgtaatcccagcgctttgggaggctgaggcaggtggatcacctgaagtcaggagcaagtaattgctgactactccagcctacataacgtccagacatatccaaatctgtggagaacacaaagttcttaaggtatttatttagagtcaataatcaaagtaaaactaataattatagctaatatttagtttgtagttaatatatgctaggagctcgagctaagcactaccatcccaggaaactgaggcttaaaacacttttaaaatttgctcaagctcacaagcttggaattgaagaagaaagcaattgaatattggtctttcttctatcatacatccagaggctctgcacttaatcaatacaacatactgtctcttattgcacaagtaactacaaggttcatctgtaaaattctattctgtagaatagaagggaaaacaaattaaggaattacagatgtttattcttctgagctttaatttaacgtattgtttgattcaaataatttatatattagctatctattgccacataacataatacctcaaaatttaccattttaaaacaaccaacattcattatttctcagagtttctgaggatcaggaatctgggagccacttaactgagtggttctggtccagaagactctcatgaagttgcagtcaagctgtcagtagtcatctcgacacccaactgatgctgaaggagctacttccaagctcactcaaggttgttggtgggcctcagttcctcattaaatgttggctagagacttcattccttgacatcacatggacccctcaaagggctgcttataacatgacagcttgcttgtctct

SEQ ID NO: 2927 - protein, 46 aa, Homosapiens
MLKELLPSSLKVVGGPQFLIKCWLETSFLDITWTPQRAAYNMTACL

SEQ ID NO: 2928 - DNA, 1079 bp, Homosapiens
gccggcgccgctctgcctgccagcggggcgcgccttgcggcccaggcccgcaaccttccctggtcgtgcgccctatgtaaggccagccgcggcaggaccaaggcggcggtgtcagctcgcgagcctaccctccgcggacggtcttgggtcgcctgctgcctggcttgcctggtcggcggcgggtgccccgcgcgcacgcgcaaagcccgccgcgttccccgaccccaggccgcgctctgtgggcctctgagggcggcatgcgggactacgacgaggtgaccgccttcctgggcgagtgggggcccttccagcgcctcatcttcttcctgctcagcgccagcatcatccccaatggcttcaccggcctgtcctccgtgttcctgatagcgaccccggagcaccgctgccgggtgccggacgccgcgaacctgagcagcgcctggcgcaaccacactgtcccactgcggctgcgggacggccgcgaggtgccccacagctgccgccgctaccggctcgccaccatcgccaacttctcggcgcttgggctggagccggggcgcgacgtggacctggggcagctggagcaggagagctgtctggatggctgggagttcagtcaggacgtctacctgtccaccattgtgaccgagatgcgcactggacgctgtcactccccctcccccaacggtcaacaccctagcgatggagaccctccagccaggtggcttgggaacgcttcacgaggtgacctccagccacagtgtgctcctccctgcacaggtggtcagtctggcctcccgtcctgatggccactttgaagagggtaccaggaaggtcctggcggtccctgggcgatgctctatggccctgtgtgtccaggacttactctagttggggttgggggtggtaagtagcagagccaggacttgggccaggggctatcccgtttttcctctagtctcttgatttctttttagaagagaagaaatacttctctttcctgaacttttaaaagttaaataaagcatgtgtatacaactgcctcttccctttttcctctagttactccttcccctacc

SEQ ID NO: 2929 - protein, 182 aa, Homosapiens
MRDYDEVTAFLGEWGPFQRLIFFLLSASIIPNGFTGLSSVFLIATPEHRCRVPDAANLSSAWRNHTVPLRLRDGREVPHSCRRYRLATIANFSALGLEPGRDVDLGQLEQESCLDGWEFSQDVYLSTIVTEMRTGRCHSPSPNGQHPSDGDPPARWLGNASRGDLQPQCAPPCTGGQSGLPS

SEQ ID NO: 2930 - DNA, 2852 bp, Homosapiens
gccggcgccgctctgcctgccagcggggcgcgccttgcggcccaggcccgcaaccttccctggtcgtgcgccctatgtaaggccagccgcggcaggaccaaggcggcggtgtcagctcgcgagcctaccctccgcggacggtcttgggtcgcctgctgcctggcttgcctggtcggcggcgggtgccccgcgcgcacgcgcaaagcccgccgcgttccccgaccccaggccgcgctctgtgggcctctgagggcggcatgcgggactacgacgaggtgaccgccttcctgggcgagtgggggcccttccagcgcctcatcttcttcctgctcagcgccagcatcatccccaatggcttcaccggcctgtcctccgtgttcctgatagcgaccccggagcaccgctgccgggtgccggacgccgcgaacctgagcagcgcctggcgcaaccacactgtcccactgcggctgcgggacggccgcgaggtgccccacagctgccgccgctaccggctcgccaccatcgccaacttctcggcgcttgggctggagccggggcgcgacgtggacctggggcagctggagcaggagagctgtctggatggctgggagttcagtcaggacgtctacctgtccaccattgtgaccgagtggaacctggtgtgtgaggacgactggaaggccccactcacaatctccttgttcttcgtgggtgtgctgttgggctccttcatttcagggcagctgtcagacaggtttggccggaagaatgtgctgttcgtgaccatgggcatgcagacaggcttcagcttcctgcagatcttctcgaagaattttgagatgtttgtcgtgctgtttgtccttgtaggcatgggccagatctccaactatgtggcagcatttgtcctggggacagaaattcttggcaagtcagttcgtataatattctctacgttaggagtgtgcatattttatgcatttggctacatggtgctgccactgtttgcttacttcatccgagactggcggatgctgctggtggcgctgacgatgccgggggtgctatgcgtggcactctggtggttcatccctgagtccccccgatggctcatctctcagggacgatttgaagaggcagaggtgatcatccgcaaggctgccaaagccaatgggattgttgtgccttccactatctttgacccgagtgagttacaagacctaagttccaagaagcagcagtcccacaacattctggatctgcttcgaacctggaatatccggatggtcaccatcatgtccataatgctgtggatgaccatatcagtgggctattttgggctttcgcttgatactcctaacttgcatggggacatctttgtgaactgcttcctttcagcgatggttgaagtcccagcatatgtgttggcctggctgctgctgcaatatttgccccggcgctattccatggccactgccctcttcctgggtggcagtgtccttctcttcatgcagctggtacccccagacttgtattatttggctacagtcctggtgatggtgggcaagtttggagtcacggctgccttttccatggtctacgtgtacacagccgagctgtatcccacagtggtgagaaacatgggtgtgggagtcagctccacagcatcccgcctgggcagcatcctgtctccctacttcgtttaccttggtgcctacgaccgcttcctgccctacattctcatgggaagtctgaccatcctgacagccatcctcaccttgtttctcccagagagcttcggtaccccactcccagacaccattgaccagatgctaagagtcaaaggaatgaaacacagaaaaactccaagtcacacaaggatgttaaaagatggtcaagaaaggcccacaatccttaaaagcacagccttctaacatcgcttccagtaagggagaaactgaagaggaaagactgtcttgccagaaatggccagcttgtgcagactccgagtccttcagtgacaaaaggcctttgctgtttgtcctcttgacctgtgtctgacttgctcctggatgggcacccacactcagaggctacatatggccctagagcaccaccttcctctagggacactggggctacctacagacaacttcatctaagtcctaactattacaatgatggactcagcacctccaaagcagttaatttttcactagaaccagtgagatctggaggaatgtgagaagcatatgctaaatgtacattttaattttagactacttgaaaaggcccctaataaggctagaggtctaagtcccccacccctttccccactcccctctagtggtgaactttagaggaaaaggaagtaattgcacaaggagtttgattcttaccttttctcagttacagaggacattaactggatcattgcttccccagggcaggagagcgcagagctagggaaagtgaaaggtaatgaagatggagcagaatgagcagatgcagatcaccagcaaagtgcactgatgtgtgagctcttaagaccactcagcatgacgactgagtagacttgtttacatctgatcaaagcactgggcttgtccaggctcataataaatgctccattgaatctactattcttgttttccactgctgtggaaacctccttgctactatagcgtcttatgtatggtttaaaggaaatttatcaggtgagagagatgagcaacgttgtcttttctctcaaagctgtaatgtgggttttgttttattgtttatttgtttgttgttgtatccttttctccttgttatttgcccttcagaatgcacttgggaaaggctggttcctt

SEQ ID NO: 2931 - protein, 557 aa, Homosapiens; identical to SEQ ID NO: 387

SEQ ID NO: 2932 - DNA, 3275 bp, Homosapiens
gccggcgccgctctgcctgccagcggggcgcgccttgcggcccaggcccgcaaccttccctggtcgtgcgccctatgtaaggccagccgcggcaggaccaaggcggcggtgtcagctcgcgagcctaccctccgcggacggtcttgggtcgcctgctgcctggcttgcctggtcggcggcgggtgccccgcgcgcacgcgcaaagcccgccgcgttccccgaccccaggccgcgctctgtgggcctctgagggcggcatgcgggactacgacgaggtgaccgccttcctgggcgagtgggggcccttccagcgcctcatcttcttcctgctcagcgccagcatcatccccaatggcttcaccggcctgtcctccgtgttcctgatagcgaccccggagcaccgctgccgggtgccggacgccgcgaacctgagcagcgcctggcgcaaccacactgtcccactgcggctgcgggacggccgcgaggtgccccacagctgccgccgctaccggctcgccaccatcgccaacttctcggcgcttgggctggagccggggcgcgacgtggacctggggcagctggagcaggagagctgtctggatggctgggagttcagtcaggacgtctacctgtccaccattgtgaccgagtggaacctggtgtgtgaggacgactggaaggccccactcacaatctccttgttcttcgtgggtgtgctgttgggctccttcatttcagggcagctgtcagacaggtttggccggaagaatgtgctgttcgtgaccatgggcatgcagacaggcttcagcttcctgcagatcttctcgaagaattttgagatgtttgtcgtgctgtttgtccttgtaggcatgggccagatctccaactatgtggcagcatttgtcctggggacagaaattcttggcaagtcagttcgtataatattctctacgttaggagtgtgcatattttatgcatttggctacatggtgctgccactgtttgcttacttcatccgagactggcggatgctgctggtggcgctgacgatgccgggggtgctatgcgtggcactctggtggttcatccctgagtccccccgatggctcatctctcagggacgatttgaagaggcagaggtgatcatccgcaaggctgccaaagccaatgggattgttgtgccttccactatctttgacccgagtgagttacaagacctaagttccaagaagcagcagtcccacaacattctggatctgcttcgaacctggaatatccggatggtcaccatcatgtccataatgctgtggatgaccatatcagtgggctattttgggctttcgcttgatactcctaacttgcatggggacatctttgtgaactgcttcctttcagcgatggttgaagtcccagcatatgtgttggcctggctgctgctgcaatatttgccccggcgctattccatggccactgccctcttcctgggtggcagtgtccttctcttcatgcagctggtacccccagacttgtattatttggctacagtcctggtgatggtgggcaagtttggagtcacggctgccttttccatggtctacgtgtacacagccgagctgtatcccacagtggtgagaaacatgggtgtgggagtcagctccacagcatcccgcctgggcagcatcctgtctccctacttcgtttaccttggtgcctacgaccgcttcctgccctacattctcatgggaagtctgaccatcctgacagccatcctcaccttgtttctcccagagagcttcggtaccccactcccagacaccattgaccagatgctaagagtcaaaggaatgaaacacagaaaaactccaagtcacacaaggatgttaaaagatggtcaagaaaggcccacaatccttaaaagcacagccttctaacatcgcttccagtaagggagaaactgaagaggaaagactgtcttgccagaaatggccagcttgtgcagactccgagtccttcagtgacaaaaggcctttgctgtttgtcctcttgacctgtgtctgacttgctcctggatgggcacccacactcagaggctacatatggccctagagcaccaccttcctctagggacactggggctacctacagacaacttcatctaagtcctaactattacaatgatggactcagcacctccaaagcagttaatttttcactagaaccagtgagatctggaggaatgtgagaagcatatgctaaatgtacattttaattttagactacttgaaaaggcccctaataaggctagaggtctaagtcccccacccctttccccactcccctctagtggtgaactttagaggaaaaggaagtaattgcacaaggagtttgattcttaccttttctcagttacagaggacattaactggatcattgcttccccagggcaggagagcgcagagctagggaaagtgaaaggtaatgaagatggagcagaatgagcagatgcagatcaccagcaaagtgcactgatgtgtgagctcttaagaccactcagcatgacgactgagtagacttgtttacatctgatcaaagcactgggcttgtccaggctcataataaatgctccattgaatctactattcttgttttccactgctgtggaaacctccttgctactatagcgtcttatgtatggtttaaaggaaatttatcaggtgagagagatgagcaacgttgtcttttctctcaaagctgtaatgtgggttttgttttattgtttatttgtttgttgttgtatccttttctccttgttatttgcccttcagaatgcacttgggaaaggctggttccttagcctcctggtttgtgtctttttttttttttttttaaaacagaatcactctggcaattgtctgcagctgccactggtgcaaggccttaccagccctagcctctagcacttctctaagtgccaaaaacagtgtcattgtgtgtgttcctttcttgatacttagtcatgggaggatattacaaaaaagaaatttaaattgtgttcatagtctttcagagtagctcactttagtcctgtaactttattgggtgatattttgtgttcagtgtaattgtcttctctttgctgattatgttaccatggtactcctaaagcatatgcctcacctggttaaaaaagaacaaacatgtttttgtgaaagctactgaagtgccttgggaaatgagaaagttttaataagtaaaatgattttttaaataacagc

SEQ ID NO: 2933 - protein, 557 aa, Homosapiens; identical to SEQ ID NO: 387

SEQ ID NO: 2934 - DNA, 4193 bp, Homosapiens
gcacaccagtaactacatagtataaggactcaaaacattaacttttaaaaaatatcagaccaataaaccacacagccaggtactctctctgacccagagggcagggagccaggcttcgggaggaatacttagaggcctccttggaatgtggccaccgacaggaatatgtgggggtgcagtgaggaagctgtcagcctgggcctctgtcttcctgtacccttgagggactggtcacttacttttcctcattttcattcactctgatttgttactgacaaggcctagggaagttttcacagcctaaaacacagtcagtatacttactgttcttagaaacgtaacactccccgacgctgagatgcagacagctaagatgccagggattcaagtatgttattgtgtgctctgagtctctgaccacctcttcttcccatacacttatgatgttgttcctgcagttacaagacctaagttccaagaagcagcagtcccacaacattctggatctgcttcgaacctggaatatccggatggtcaccatcatgtccataatgctgtggtatgtaaaagagacctgcctgaggcttccagacaaagcttcttgaagtggccattgggcctcttgtttacagacatgcctcagacaaaattcaaagcctatgtcatcagagagtgaaaaggatatgtcttgtgttagatggaaaaaatgggcatgtcacaattcttaatgggatggaacctcagaaaaggagaatgaaaacaattgtggaggctgttgtgggaaatatggactcttgtggggaatctctccagatcttaagatgaatccttgcccaatttgggtcatttagttcccgtctcctacccagttaccgacagtggctgaggaggccaggtagggcttttaagaaggatctgagtgaagacaccatgtcctgtaggctgcagaggctgccagttactttctggaaatgtggaagtgggatgtgctcctcctgggatgtccataaacggtcctggagtcagggctatagcctagatgtccttaccaggttcccactaatgaggcaaagtatgtcagaaagggatttgtgaattaccagggagaggaaacatgtccaagtgcacatcgctagcttttgctcagcggccgaaccctgggattctaggcgacttctggagcctggtgggttagcggtgagaagatgggcgaggagggcggacttcatctcagagtccttattactagtctcatccagctttgaggcagtcagccactgtgcctactgagggagtgctatgagtcacccgcttccaaggaatggcccaggatccctccaggcagttcaccattccctgagttggcctcaagacaggagcagcatgtagcctgcaccacagacatgcaagcctgtgatgagtcacccacttttgtgttcacccaggctctcctccctgctctggatttcctggggactcatgcacatactctttttattgtaccagctgtgtgttccacctgcagatgagtcaaaacagtctaatccataaaggtctggtttgtcaaagagtgtgggtcatcaacagagagaatgcctactggggatgcccaggtcaggggtactgcagggcatcctgatgagaggcagtgtggcccctccattgggagccacctctgtgctccacaagtaccgcggggctggtgtcagctgtctctgaccagcctcttcctgactggtcaccacaggtagtgtgtgagggtctctctccaagtgtttgacctaatgttgttccttttgttatcttatcccccaaatcctatcacacctcacttgatgtctgcctcctgactcattctctagctccttctgcagttgctggatttgaggaggttcagcttaggatttttaaagctgaaaggcaggttggaatttttcttttcaatgaagtaaatctatctgaattatacaagcttttttgctgggacactgtctatatggaaggctctgagagcgcactggcgcagggtttacactgtaccacttgggctggggaaaattatcttttgatctatgaagtaagacgcagggttacagttactgctgccttactagtctctgcttaaagatggtttggaatttactgaaataattgcattgtaaaagttgtacaggttgggaaagatgtggatactgcttttccagctttcttctgcactctgtttcaggatgaccatatcagtgggctattttgggctttcgcttgatactcctaacttgcatggggacatctttgtgaactgcttcctttcagcgatggttgaagtcccagcatatgtgttggcctggctgctgctgcaatatttgccccggcgctattccatggccactgccctcttcctgggtggcagtgtccttctcttcatgcagctggtacccccagacttgtattatttggctacagtcctggtgatggtgggcaagtttggagtcacggctgccttttccatggtctacgtgtacacagccgagctgtatcccacagtggtgagaaacatgggtgtgggagtcagctccacagcatcccgcctgggcagcatcctgtctccctacttcgtttaccttggtgcctacgaccgcttcctgccctacattctcatgggaagtctgaccatcctgacagccatcctcaccttgtttctcccagagagcttcggtaccccactcccagacaccattgaccagatgctaagagtcaaaggaatgaaacacagaaaaactccaagtcacacaaggatgttaaaagatggtcaagaaaggcccacaatccttaaaagcacagccttctaacatcgcttccagtaagggagaaactgaagaggaaagactgtcttgccagaaatggccagcttgtgcagactccgagtccttcagtgacaaaaggcctttgctgtttgtcctcttgacctgtgtctgacttgctcctggatgggcacccacactcagaggctacatatggccctagagcaccaccttcctctagggacactggggctacctacagacaacttcatctaagtcctaactattacaatgatggactcagcacctccaaagcagttaatttttcactagaaccagtgagatctggaggaatgtgagaagcatatgctaaatgtacattttaattttagactacttgaaaaggcccctaataaggctagaggtctaagtcccccacccctttccccactcccctctagtggtgaactttagaggaaaaggaagtaattgcacaaggagtttgattcttaccttttctcagttacagaggacattaactggatcattgcttccccagggcaggagagcgcagagctagggaaagtgaaaggtaatgaagatggagcagaatgagcagatgcagatcaccagcaaagtgcactgatgtgtgagctcttaagaccactcagcatgacgactgagtagacttgtttacatctgatcaaagcactgggcttgtccaggctcataataaatgctccattgaatctactattcttgttttccactgctgtggaaacctccttgctactatagcgtcttatgtatggtttaaaggaaatttatcaggtgagagagatgagcaacgttgtcttttctctcaaagctgtaatgtgggttttgttttattgtttatttgtttgttgttgtatccttttctccttgttatttgcccttcagaatgcacttgggaaaggctggttccttagcctcctggtttgtgtctttttttttttttttttaaaacagaatcactctggcaattgtctgcagctgccactggtgcaaggccttaccagccctagcctctagcacttctctaagtgccaaaaacagtgtcattgtgtgtgttcctttcttgatacttagtcatgggaggatattacaaaaaagaaatttaaattgtgttcatagtctttcagagtagctcactttagtcctgtaactttattgggtgatattttgtgttcagtgtaattgtcttctctttgctgattatgttaccatggtactcctaaagcatatgcctcacctggttaaaaaagaacaaacatgtttttgtgaaagctactgaagtgccttgggaaatgagaaagttttaataagtaaaatgattttttaaataacagc

SEQ ID NO: 2935 - protein, 221 aa, Homosapiens
MWILLFQLSSALCFRMTISVGYFGLSLDTPNLHGDIFVNCFLSAMVEVPAYVLAWLLLQYLPRRYSMATALFLGGSVLLFMQLVPPDLYYLATVLVMVGKFGVTAAFSMVYVYTAELYPTVVRNMGVGVSSTASRLGSILSPYFVYLGAYDRFLPYILMGSLTILTAILTLFLPESFGTPLPDTIDQMLRVKGMKHRKTPSHTRMLKDGQERPTILKSTAF

SEQ ID NO: 2936 - DNA, 999 bp, Homosapiens
ggactcagcacctccaaagcagttaatttttcactagaaccagtgagatctggaggaatgtgagaagcatatgctaaatgtacattttaattttagactacttgaaaaggcccctaataaggctagaggtctaagtcccccacccctttccccactcccctctagtggtgaactttagaggaaaaggaagtaattgcacaaggagtttgattcttaccttttctcaatgcagatcaccagcaaagtgcactgatgtgtgagctcttaagaccactcagcatgacgactgagtagacttgtttacatctgatcaaagcactgggcttgtccaggctcataataaatgctccattgaatctactattcttgttttccactgctgtggaaacctccttgctactatagcgtcttatgtatggtttaaaggaaatttatcaggtgagagagatgagcaacgttgtcttttctctcaaagctgtaatgtgggttttgttttattgtttatttgtttgttgttgtatccttttctccttgttatttgcccttcagaatgcacttgggaaaggctggttccttagcctcctggtttgtgtctttttttttttttttttaaaacagaatcactctggcaattgtctgcagctgccactggtgcaaggccttaccagccctagcctctagcacttctctaagtgccaaaaacagtgtcattgtgtgtgttcctttcttgatacttagtcatgggaggatattacaaaaaagaaatttaaattgtgttcatagtctttcagagtagctcactttagtcctgtaactttattgggtgatattttgtgttcagtgtaattgtcttctctttgctgattatgttaccatggtactcctaaagcatatgcctcacctggttaaaaaagaacaaacatgtttttgtgaaagctactgaagtgccttgggaaatgagaaagttttaataagtaaaatgattttttaaataacagc

SEQ ID NO: 2937 - protein, 89 aa, Homosapiens [sequence omitted]

SEQ ID NO: 2938 - DNA, 795 bp, Homosapiens
atggaggaacctgtcccggtcggccgaagcgccgcgggcgcctttccacttacggcgggcctgcccagcctcccgcccagcccgggcccgggtcccgccgaggcagggtttcgctttcgctttcctgccgatgtcgttgaggaaaatgaaagcggtcgtggccaggactggcgcagctgccgtttcaggcgaggggcgcagaatgcagcggccgccagcctggagcgcgggccctggggccgcaacccgcgccgggcgaggtggcagcacaccctgggccccccactccccgccgcaagtcctgaggatggccagcagagaaacaagaaaatggactccctggctgctggagagttgaatgccagccaccagccatgggtgccagagtttgtagcctattggaggaaaacacaccaagatcacctctgcagcctgcacagccgggcctttggactcctggatgctagagtgacctgggcgctgaggagggcccccgagccagtaccaggaaaggatagactcctgcttgcagcattcccagcagaggcatcgcctgtggacaccgcgtctgtgtctgtatatggcagagctcccagatatatgcacaagggagtgaaaaaatgtgtttgcaccccagtctctaaaaattcaacagcctggttacttctgggtggtatatcgtaggtggctttaatacgtgttatttgctcatctgtatttcttactctttgcacaattaaaccatgttccttttacttatgtacatttttaataaaagaaagttgttaatgactc

SEQ ID NO: 2939 - protein, 227 aa, Homosapiens
MEEPVPVGRSAAGAFPLTAGLPSLPPSPGPGPAEAGFRFRFPADVVEENESGRGQDWRSCRFRRGAQNAAAASLERGPWGRNPRRARWQHTLGPPLPAASPEDGQQRNKKMDSLAAGELNASHQPWVPEFVAYWRKTHQDHLCSLHSRAFGLLDARVTWALRRAPEPVPGKDRLLLAAFPAEASPVDTASVSVYGRAPRYMHKGVKKCVCTPVSKNSTAWLLLGGIS

SEQ ID NO: 2940 - DNA, 524 bp, Homosapiens
agaatgcagcggccgccagcctggagcgcgggccctggggccgcaacccgcgccgggcgaggtggcagcacaccctgggccccccactccccgccgcaagtcctgaggatggccagcagagaaacaagaaaatggactccctggctgctggagagttgaatgccagccaccagccatgggtgccagagtttgtagcctattggaggaaaacacaccaaggtaagacaacaataagaccacatcttgtttgggactgcccaacgtagccttggaaactgtccaaggaagaccagggtgctaagtgttggcagctggataaagggaaggcccaagagactttgcgttgacttcctggatagagtgagagtcctggggacagtgaggcagctcagtatagtcagtgatggctgtgaggtctttagactcaggaagacagtgttgcacttgggaaaatgtagcagcctcccccaagccagttggttgtgggcccacagcatggccctcttgccctcacttccctacct

SEQ ID NO: 2941 - protein, 51 aa, Homosapiens
MQRPPAWSAGPGAATRAGRGGSTPWAPHSPPQVLRMASRETRKWTPWLLES

SEQ ID NO: 2942 - DNA, 2025 bp, Homosapiens
agaatgcagcggccgccagcctggagcgcgggccctggggccgcaacccgcgccgggcgaggtggcagcacaccctgggccccccactccccgccgcaagtcctgaggatggccagcagagaaacaagaaaatggactccctggctgctggagagttgaatgccagccaccagccatgggtgccagagtttgtagcctattggaggaaaacacaccaagggaatcttcaaactcttcttctccactggctcctgctgtgctcctgtctccatcacctgtataatgcttcctgccatcctgccttccccgtggagtacagccatgctgtctgctgcttacagccaagattctggaaagaaatgtctcctttttcctcgtcatcaaccactcatttattcagcaagtgtttcttttacacttgcctgtgctgggcatggcagcaatgcagcagtgaacaaaaccatcagccctgctctcatgcagcttataatcaagtagagagacagacataaatgattaatagatgctcctgtaatggtggttgtgaggtgtgctgccacagcccagccacacacgccagttcccttctctgcacatgtacatgtctgctcatccttcccacctgaactcatgtgccacctcacttatgccccttcccaatgccgcacccacacaacagggtgtccctctgtgcccacagcagcccttgggtataactgttccccacagaggctgaaccccaagggcagagtccaggccacactcaccacggagacccctgcctggcacagagcccagcccagcagagatgctcagaagatgaatgaaagtccctgctgagattgatccaatctgtttgtgaacatctctggggtccaagaattcacggctttctttttctttagagagccttttgtttctttttgccattatatactatatttgggttagggcacaacaatgtgaatatacttaatactgaactctacacttgaaaatggttaagatggtaaagttttaagttatatgtattttgccacaattttttaaaatgcagagcataggtacaaagaaggaaaaaaagggggcaaggtccattttattgagaaataaagaacaaagggttcaattcagagaggattggattttaaaacgtaatttagattagggaaatgcaaatgaaaaccataataagtaagataccacttcacatctgttaggatggctattttaaaacaacaaaaacaacctgaaaataagtgttggcaaggatgtgaagaaatagatacccttgtgcattgctattgggaacgtaaaatcatgcagcctttgttgaaaacaatgtggtggttcctcaaaaacttagttatcatatgatcccgcagttccacttctaggaatatacccaaaagaattgaaagcagggactcaaagtgatatttgtacaccagtgtttgtagcagtattattcacaatagccaaaaggtggaaacaacccagatgtccatgacaagaggagtggataaacaaaatatggtgaatatgtacaatggaacataattcagctttaaaaaggaatgaaattctggtacatgttataacatagatgaaccttaaaaacattatgctaagtgaaataagccagacacagaaggaaaaataccagatgatcccacttatatgaggtacctagaatagtgaaattcatagagacagaaagtagaaggatggttgccaggggctggaaggaggaagaacagggagatactgcttagtggatgcagagtttatgttgagggtgatgaaaaagttctggagatggatggtggtgatggctgcacaacagtgagaatgtacttcatactatggaactctgcacttaaaaatggttaaaatggatgtagacattttatgtctattttgccataacaagaaagtaatttgggtgtattttagagattttagaaaatactgtaagcacaagaggaaaaaaattaaaatcattcgcaatcaccaggtagagac

SEQ ID NO: 2943 - protein, 126 aa, Homosapiens
MDSLAAGELNASHQPWVPEFVAYWRKTHQGNLQTLLLHWLLLCSCLHHLYNASCHPAFPVEYSHAVCCLQPRFWKEMSPFSSSSTTHLFSKCFFYTCLCWAWQQCSSEQNHQPCSHAAYNQVERQT

SEQ ID NO: 2944 - DNA, 1536 bp, Homosapiens
gcggccgccagcctggagcgcgggccctggggccgcaacccgcgccgggcgaggtggcagcacaccctgggccccccactccccgccgcaagtcctgaggatggccagcagagaaacaagaaaatggactccctggctgctggagagttgaatgccagccaccagccatgggtgccagagtttgtagcctattggaggaaaacacaccaagcctacgccactctgtgccctttagccaaggaagcccagctgaggccccgcagcgtccctgcccagcagagctacaggaggcccgaggccccttcctgttcactcttgctctatagacgccacgctgcaaagcagatgtgcagggacaccacctgaagacccagcctgcagctcagccctacacactgtggatggtggagatcccagagggccaagagaagcttattgagacttctctgcactgcccctcccacagcaggaggttcatggcccatgcatttctgggagggttgacagggcccaggttgtggaatacctgtctgtgagccccatgtcctgtcttgtcccagctgcctgtagtttgacagagtatgctagaggtcagccattgctagggaggctgccactaaccacacagagaggaaggaaaattctcagccacagcacttagagctgagcctgacatggtcctcagcaagatgttgcaagttcctaatctgaacacagaggccagggagtaagcatcatctggagcccagagctgactgtcattacccacaaacataaacaccctgagtctggccttctccccaccctgccgaggttgtcagagcctcagcactggctctgccctgggtggcagcccctgggaagcccagctgccacctctctacaaatggccctgtagaagctgtgctcagtgatccacttcctggggggggctgggcccaccttgttgccattacaccccattacaaactgatgcaaccagctttcaacagacactgccaaggaagatacacattacaacagcatgctgcaatacctctgcctgtgcaagagactgacccacatccaaaaaatggacatcttcccaccccagtgtctcactccactgagctggaagtggcctttgtcaggaccctgtgaggtcttgagtggatctgcttttcccaagatattaaaccagtgactttaaatcctggctgcatattaccatcatctgggatattaaaaaatactgatgcctggatcttgctcccacccaaagagtctgactgaattgatggggttttcaaacattttttaagtgtttgttgaaggatgacatacatgcaaaaaaaaaaaaaaaagcacaaaccataagtgtaaagctcagtgaattttcacaaaatgaatttaccccgagtaaccagcatccaaatcatgaaacagaacatcaccagcaacccctggtaccccttccacttactacctggctccaaaggctaatgtccattctggcttctaatggtgtacagtcatttctcctgttttcaaacttta

SEQ ID NO: 2945 - protein, 80 aa, Homosapiens
MDSLAAGELNASHQPWVPEFVAYWRKTHQAYATLCPLAKEAQLRPRSVPAQQSYRRPEAPSCSLLLYRRHAAKQMCRDTT

SEQ ID NO: 2946 - DNA, 1862 bp, Homosapiens
gcggccgccagcctggagcgcgggccctggggccgcaacccgcgccgggcgaggtggcagcacaccctgggccccccactccccgccgcaagtcctgaggatggccagcagagaaacaagaaaatggactccctggctgctggagagttgaatgccagccaccagccatgggtgccagagtttgtagcctattggaggaaaacacaccaagccccgaacagcacagtgaatggatagggcagcagatgagctctgccccacgccggccctgtttcagaacagcactccagagtgccgcactgcttgctgaaccacagctgttactgcagattgaggagcctcagagggaacagaagataaagatcattatggaatttaggattgcaggacattctttgacatttcataacagccaggggagatcaactgtggtcaggggacaggggcaggaagaaaccatggccaaggcctgtctggcaggacttgaaggggcagagggacccttgcaaatgaccctgcctggaacccacccccagttggcccctgtatagcactgatccagctggggcttttatcccaggataccctcttcagggatgcctgtatttgttgattatctgccatatgcctggtcactgcagaatacaaggaagaaaatagccttcagcagaagctgagacaggagcctagaggatggacagtaaggagtcgaaggctcaggatgaggctttcctgactttctcccctagaggactgatgttctctactggtacagaccttgttttattcatccttatgtccctaacctggaatgggcccagggtgacagttataataagtgtttgtcaagtgagcaagtgtgtggagtgtgcattgtagagagtaaggtctctacaggatcctgctggagaggcagcccactgggctcaccacttctccagaggagggactggtcccttgccagacagccctgccagctggagcaggcttcctcaggggtgcctggagctgttgaccatggctgttgccctctggcccctcttgggaagagcaacctgtcaggtgttaaagacggtcttcatttctcttctccaagtaaacatgactagtttccatctcaccatcttctggccctcagcagactggttatccagtctggagaggcaacagtagtatccagatgtgatccgaacagacagaacgatggatgcagacggaaaattcaggtttgtgtgcttcggcagtcagtatatgcaagtcgtaatggggacagtggctggcatggcctttagcactgtgggaaggatcagggtgtctgcccatcatttttctctctttgatagacactgtttacgtagacactgttttggtgtaaaaccctacgttgtagctcttgtcaacagtgttatgtttctcctcaactgtcctggaaactccctgaggtggctggcttgtaggcactccatacctgttagctagtattatttatttattgttttattatttgaatggacaatcaattcatgtcatttaatgaacatgggctatgtgccagaaaccaccaggtgccagaatacaacactgaactacagtaggcctgtccctgggccccagagctcccagacacactaggaagacttgttgatttaatgataaaccttgattgagctcatgattaacatcttcaccaccagacatcattgagtgctctctgtgtgttcaactcagaacatacccttcctgccctcagaggctggaatgtgagagtcattaagggagacaccattgtgggagtgagaaaatcctggacttggagggaactgactagggatcacctcccagctctgccatggacccactgt

SEQ ID NO: 2947 - protein, 127 aa, Homosapiens
MGARVCSLLEENTPSPEQHSEWIGQQMSSAPRRPCFRTALQSAALLAEPQLLLQIEEPQREQKIKIIMEFRIAGHSLTFHNSQGRSTVVRGQGQEETMAKACLAGLEGAEGPLQMTLPGTHPQLAPV

SEQ ID NO: 2948 - DNA, 761 bp, Homosapiens
agaccacttcctctgctccccagcgccggatggatgcagatctgtgagtaaggagccagctgcaggcaagcagctcgagggcaggtgggcatgatgtctggctaccactcgcactggacgccacacacacagccagggtggcagaaggccccacctgccatgtgccagtgggacaccaccctcatggtctgcgtttccaggtttccaactaaggactgagcacactctcaacatggacctcctaactgctctcgaggatggacagctggcctcaagggaacactgcaaagtggctctaggaagaagccactgtccctccagaccataaaaatggctaccaagggcagagccagcagctttcgctgtaaagtttctcaagaaaatcacagatattcccctctgtgatgttcagctcagcctggaaaggaggccgctggaagacctggatgcccgtcgtgggacaagagccagaagcactcacccagtgccaacacctgctgggccacaaacagtttctgcttgggatcccaacacaggcagcagagtcagcaaaaactctaagatatcaagaagtcaagcatttcttaacaacagcagcaaactcttacacagggctgtggttaccagacactgctctaaataacttacacttgtttacttatttcatcctcacaacaacgggtaaatattttaggtctctgccaatttgcctgattactgaattaggttgaatcattaaaatgaataacttgataataccc

SEQ ID NO: 2949 - protein, 108 aa, Homosapiens
MFSSAWKGGRWKTWMPVVGQEPEALTQCQHLLGHKQFLLGIPTQAAESAKTLRYQEVKHFLTTAANSYTGLWLPDTALNNLHLFTYFILTTTGKYFRSLPICLITELG

SEQ ID NO: 2950 - DNA, 405 bp, Homosapiens
gatggacagctggcctcaagggaacactgcaaagtggctctaggaagaagccactgtccctccagaccataaaaatggctaccaagggcagagccagcagctttcgctgtaaagtttctcaagaaaatcacagatattcccctctgtgatgttcagctcagcctggaaaggagaggtagaaactgagagttgaagaggctgaataatttctcaagcacactcccaactcgaccacccacaagcaaaaaggcagagctgggattcaaacacaggtatgactgtgtgtggacatctcccctgtgctatgctccctgaaggaaaattctaagtggtgttgtttctgggagaaatctacctgtgtggtctttaaacctactctgacaggagcaagggccaccactctgt

SEQ ID NO: 2951 - protein, 37 aa, Homosapiens
KWLPRAEPAAFAVKFLKKITDIPLCDVQLSLERRGRN

SEQ ID NO: 2952 - DNA, 369 bp, Homosapiens
cctcctcccaccccccacccaactgcaaggtagggaggctactgaggggccagcctgtggattccagagggcacagggctatctgggatggaggggacagggttctgaagacagaaggtgggaaggtcacactgtaagggcagacataccccatttcttctacctaaacaactgggtgtaataccactgtttccctgagaaacactttcaggattaaaaagtatataagtaaagaaaataaagcatataagtgatctggtggctttaatacgtgttatttgctcatctgtatttcttactctttgcacaattaaaccatgttccttttacttatgtacatttttaataaaagaaagttgttaatgactc

SEQ ID NO: 2953 - protein, 44 aa, Homosapiens
VKKIKHISDLVALIRVICSSVFLTLCTIKPCSFYLCTFLIKESC

SEQ ID NO: 2954 - DNA, 3730 bp, Homosapiens
cttttagcaaaaatttaacagctggcaaaactgtattgttaaggatacatgcagaggaggtcaaactacaaaaagcacagaattattacaaatgtctacttatgcagaagggagggttggggttgtgattagtaggggaacacgtaggtgctttgggggtgctagtattgttttctctctttaagtttgggagattaccctggattattgggtagaaactggggtgggtgagcccaatgtaatcacaagcattcttaaatggagaagagagaggcagaagggtcagaagcagaagcagaagcagagagattgcaatatatgaaagacctggccagccagtgctggctttgaaggtggaggaaggggccgcaggccaaggaatgcaggcagcctctaaaagctggaaaggggaagaaaggaaagagattctctactagagcccccaggaaggaatgcagccctgctgacaccttcagtttagcccagtgagacctgttttggacttctgacctacggaactataagaaaagaaatttgtgttgttttaagcccctaagtttatgttagtttattagagcagcaacaggaagctgatccactgggaaaccatctgggatatgcagctgcccaaaatccctgctcgtggttagattcagccttacgaggctccacagcccctctgcgaaagactccattccctcttggagaagctcagactctagagccctgggcaaggaatgggccttcatggcatgggggcgatcaagaaggatgccccccaggacagtgactctgctggacttctctacagaaaacagtatatccctcagtggcatgagaagatccaatagggtcaccacactccacaactgcaggggacactgttcacattttagtctatgcagcctctggtggccaaagattaaatgagaacacctttgctgtgtgacctgaagttcatggtcagtaaattgtagctattgttatgcacgacttagggggaagcaggggtcactgcagagcagcagtggttttatagagatttgctttatgattatttgttaaactgaacatatattctatgtatttttctgcataattattgtttcacaatttttaaaaagcatatacacacatgaatcttctctagccccgaacagcacagtgaatggatagggcagcagatgagctctgccccacgccggccctgtttcagaacagcactccagagtgccgcactgcttgctgaaccacagctgttactgcagattgaggagcctcagagggaacagaagataaagatcattatggaatttaggattgcaggacattctttgacatttcataacagccaggggagatcaactgtggtcaggggacaggggcaggaagaaaccatggccaaggcctgtctggcaggacttgaaggggcagagggacccttgcaaatgaccctgcctggaacccacccccagttggcccctgtatagcactgatccagctggggcttttatcccaggataccctcttcagggatgcctgtatttgttgattatctgccatatgcctggtcactgcagaatacaaggaagaaaatagccttcagcagaagctgagacaggagcctagaggatggacagtaaggagtcgaaggctcaggatgaggctttcctgactttctcccctagaggactgatgttctctactggtacagaccttgttttattcatccttatgtccctaacctggaatgggcccagggtgacagttataataagtgtttgtcaagtgagcaagtgtgtggagtgtgcattgtagagagtaaggtctctacaggatcctgctggagaggcagcccactgggctcaccacttctccagaggagggactggtcccttgccagacagccctgccagctggagcaggcttcctcaggggtgcctggagctgttgaccatggctgttgccctctggcccctcttgggaagagcaacctgtcaggtgttaaagacggtcttcatttctcttctccaagtaaacatgactagtttccatctcaccatcttctggccctcagcagactggttatccagtctggagaggcaacagtagtatccagatgtgatccgaacagacagaacgatggatgcagacggaaaattcaggtttgtgtgcttcggcagtcagtatatgcaagtcgtaatggggacagtggctggcatggcctttagcactgtgggaaggatcagggtgtctgcccatcatttttctctctttgatagacactgtttacgtagacactgttttggtgtaaaaccctacgttgtagctcttgtcaacagtgttatgtttctcctcaactgtcctggaaactccctgaggtggctggcttgtaggcactccatacctgttagctagtattatttatttattgttttattatttgaatggacaatcaattcatgtcatttaatgaacatgggctatgtgccagaaaccaccaggtgccagaatacaacactgaactacagtaggcctgtccctgggccccagagctcccagacacactaggaagacttgttgatttaatgataaaccttgattgagctcatgattaacatcttcaccaccagacatcattgagtgctctctgtgtgttcaactcagaacatacccttcctgccctcagaggctggaatgtgagagtcattaagggagacaccattgtgggagtgagaaaatcctggacttggagggaactgactagggatcacctcccagctctgccatggacccactgtgtgaccatgggcaagttacttgacctctctgagcctcagttatcttatcagtgaaactgggttaataatatatctctcagtggcacaggaggatcacatagggtcaccacactccacaactccaggagatgctgttaacattttagtctatggatcctctggtggcctaagatttaaatgagagcacttttgctatgtgacctgaagttaatgtcaataagttatagctattgttatgtacgatgtaagcaggggtcactgcaggccagaaggctgacacaatttggccaggctttgttcttcaaggaagggcagggctctgagaagtgcagaccgtgatgcaggtgaaggccaggaggcagggactcccagggcaggtctggaaggagcgaggctggtgacggaagtggtcagcaacctcaaggcatgagtaaggcgcttgcccttctctccaggcacagaggagtcactggaagctgggcaaagagctgtagtcccagcttctccggaggctgaggtgggaggatcacttgagcctgtgaggtcgagactacaccgagattgcactaagccgagattgcaccactgcgctccagccttggtcaacagggtgagattttgtctcaaaaaataagtaaaagtaattataggtcatcatggaatatttttaaactatagaaatataaaaaatatataatcacctgtaatcccaccatccaaagataatcacctttagtattgtgatgtattccctccatctgtattccacaaaaaaattatatattaattagatttgaattgtgtatagtttcacatctcccttttcctctgtaaaattgtgctttatgagaaggagggattatttttaatgtagaagaaactagaaaacctttttcttaaaaaaaaaaaaaaaaaaaaaaaagcaaagc

SEQ ID NO: 2955 - protein, 101 aa, Homosapiens [sequence omitted]

SEQ ID NO: 2956 - DNA, 1254 bp, Homosapiens
aacagaagataaagatcattatggaatttaggattgcaggacattctttgacatttcataacagccaggggagatcaactgtggtcaggggacaggggcaggaagaaaccatggccaaggcctgtctggcaggacttgaaggggcagagggacccttgcaaatgaccctgcctggaacccacccccagttggcccctgtatagcactgatccagctggggcttttatcccaggataccctcttcagggatgcctgtatttgttgattatctgccatatgcctggtcactgcagaatacaaggaagaaaatagccttcagcagaagctgagacaggagcctagaggatggacagtaaggagtcgaaggctcaggatgaggctttcctgactttctcccctagaggactgatgttctctactggtacagaccttgttttattcatccttatgtccctaacctggaatgggcccagggtgacagttataataagtgtttgtcaagtgagcaagtgtgtggagtgtgcattgtagagagtaaggtctctacaggatcctgctggagaggcagcccactgggctcaccacttctccagaggagggactggtcccttgccagacagccctgccagctggagcaggcttcctcaggggtgcctggagctgttgaccatggctgttgccctctggcccctcttgggaagagcaacctgtcaggtgttaaagacggtcttcatttctcttctccaagtaaacatgactagtttccatctcaccatcttctggccctcagcagactggttatccagtctggagaggcaacagtagtatccagatgtgatccgaacagacagaacgatggatgcagacggaaaattcagatcacctctgcagcctgcacagccgggcctttggactcctggatgctagagtgacctgggcgctgaggagggcccccgagccagtaccaggaaaggatagactcctgcttgcagcattcccagcagaggcatcgcctgtggacaccgcgtctgtgtctgtatatggcagagctcccagatatatgcacaagggagtgaaaaaatgtgtttgcaccccagtctctaaaaattcaacagcctggttacttctgggtggtatatcgtaggtggctttaatacgtgttatttgctcatctgtatttcttactctttgcacaattaaaccatgttccttttacttatgtacatttttaataaaagaaagttgttaatgact

SEQ ID NO: 2957 - protein, 94 aa, Homosapiens
MQTENSDHLCSLHSRAFGLLDARVTWALRRAPEPVPGKDRLLLAAFPAEASPVDTASVSVYGRAPRYMHKGVKKCVCTPVSKNSTAWLLLGGIS

SEQ ID NO: 2958 - DNA, 2503 bp, Homosapiens
tgctcggtggcgccgctgccctggcagagctcgccactccttagtcgaggcaagacgtgcgcccgagccccgccgaaccgaggccacccggagccgtgcccagtccacgccggccgtgcccggcggccttaagaacccggcaacctctgccttcttccctcttccactcggagtcgcgctccgcgcgccctcactgcagcccctgcgtcgccgggaccctcgcgcgcgaccgccgaatcgctcctgcagcagagccaacatgcccatcactcggatgcgcatgagaccctggctagagatgcagattaattccaaccaaatcccggggctcatctggattaataaagaggagatgatcttccagatcccatggaagcatgctgccaagcatggctgggacatcaacaaggatgcctgtttgttccggagctgggccattcacacaggccgatacaaagcaggggaaaaggagccagatcccaagacgtggaaggccaactttcgctgtgccatgaactccctgccagatatcgaggaggtgaaagaccagagcaggaacaagggcagctcagctgtgcgagtgtaccggatgcttccacctctcaccaagaaccagagaaaagaaagaaagtcgaagtccagccgagatgctaagagcaaggccaagaggaagtcatgtggggattccagccctgataccttctctgatggactcagcagctccactctgcctgatgaccacagcagctacacagttccaggctacatgcaggacttggaggtggagcaggccctgactccagcactgtcgccatgtgctgtcagcagcactctccccgactggcacatcccagtggaagttgtgccggacagcaccagtgatctgtacaacttccaggtgtcacccatgccctccacctctgaagctacaacagatgaggatgaggaagggaaattacctgaggacatcatgaagctcttggagcagtcggagtggcagccaacaaacgtggatgggaaggggtacctactcaatgaacctggagtccagcccacctctgtctatggagactttagctgtaaggaggagccagaaattgacagcccagggggggatattgggctgagtctacagcgtgtcttcacagatctgaagaacatggatgccacctggctggacagcctgctgaccccagtccggttgccctccatccaggccattccctgtgcaccgtagcagggcccctgggcccctcttattcctctaggcaagcaggacctggcatcatggtggatatggtgcagagaagctggacttctgtgggcccctcaacagccaagtgtgaccccactgccaagtggggatggggcctccctccttgggtcattgacctctcagggcctggcaggccagtgtctgggtttttcttgtggtgtaaagctggccctgcctcctgggaagatgaggttctgagaccagtgtatcaggtcagggacttggacaggagtcagtgtctggctttttcctctgagcccagctgcctggagagggtctcgctgtcactggctggctcctaggggaacagaccagtgaccccagaaaagcataacaccaatcccagggctggctctgcactaagagaaaattgcactaaatgaatctcgttcccaaagaactacccccttttcagctgagccctggggactgttccaaagccagtgaaatgtgaaggaaagtggggtccttcggggcgatgctccctcagcctcagaggagctctaccctgctccctgctttggctgaggggcttgggaaaaaaacttggcactttttcgtgtggatcttgccacatttctgatcagaggtgtacactaacatttcccccgagctcttggcctttgcatttatttatacagtgccttgctcggcgcccaccaccccctcaagccccagcagccctcaacaggcccagggagggaagtgtgagcgccttggtatgacttaaaattggaaatgtcatctaaccattaagtcatgtgtgaacacataaggacgtgtgtaaatatgtacatttgtctttttataaaaagtaaattgtttataaggggtgtggcctttttagagagaaatttaacttgtagatgattttactttttatggaaacactgatggacttattattggcatcccgcctgaacttgactttggggtgaacagggacatgcatctattataaaatcctttcggccaggcgcggtggctcacacctgtaatcccagcactttgggaggccgagatgggtggatcacctgaggtcaggagttcgagaccagcctggtgaaactccatttctactaaaaatgcaaaaattagctgggcgtggttgcgggtgcttgtaatcccagctactcaggaggctgaggcaagagaatcgcttgaacctgggaggtggaggttgcagtgagccgagaacatgccattgcactccagcccgggcaccaa

SEQ ID NO: 2959 - protein, 325 aa, Homosapiens; identical to SEQ ID NO: 391

SEQ ID NO: 2960 - DNA, 2161 bp, Homosapiens
tgctcggtggcgccgctgccctggcagagctcgccactccttagtcgaggcaagacgtgcgcccgagccccgccgaaccgaggccacccggagccgtgcccagtccacgccggccgtgcccggcggccttaagaacccggcaacctctgccttcttccctcttccactcggagtcgcgctccgcgcgccctcactgcagcccctgcgtcgccgggaccctcgcgcgcgaccgccgaatcgctcctgcagcagagccaacatgcccatcactcggatgcgcatgagaccctggctagagatgcagattaattccaaccaaatcccggggctcatctggattaataaagaggagatgatcttccagatcccatggaagcatgctgccaagcatggctgggacatcaacaaggatgcctgtttgttccggagctgggccattcacacaggccgatacaaagcaggggaaaaggagccagatcccaagacgtggaaggccaactttcgctgtgccatgaactccctgccagatatcgaggaggtgaaagaccagagcaggaacaagggcagctcagctgtgcgagtgtaccggatgcttccacctctcaccaagaaccagagaaaagaaagaaagtcgaagtccagccgagatgctaagagcaaggccaagaggaagtcatgtggggattccagccctgataccttctctgatggactcagcagctccactctgcctgatgaccacagcagctacacagttccaggctacatgcaggacttggaggtggagcaggccctgactccagcactgtcgccatgtgctgtcagcagcactctccccgactggcacatcccagtggaagttgtgccggacagcaccagtgatctgtacaacttccaggtgtcacccatgccctccacctctgaagctacaacagatgaggatgaggaagggaaattacctgaggacatcatgaagctcttggagcagtcggagtggcagccaacaaacgtggatgggaaggggtacctactcaatgaacctggagtccagcccacctctgtctatggagactttagctgtaaggaggagccagaaattgacagcccagggggggatattgggctgagtctacagcgtgtcttcacagatctgaagaacatggatgccacctggctggacagcctgctgaccccagtccggttgccctccatccaggccattccctgtgcaccgtagcagggcccctgggcccctcttattcctctaggcaagcaggacctggcatcatggtggatatggtgcagagaagctggacttctgtgggcccctcaacagccaagtgtgaccccactgccaagtggggatggggcctccctccttgggtcattgacctctcagggcctggcaggccagtgtctgggtttttcttgtggtgtaaagctggccctgcctcctgggaagatgaggttctgagaccagtgtatcaggtcagggacttggacaggagtcagtgtctggctttttcctctgagcccagctgcctggagagggtctcgctgtcactggctggctcctaggggaacagaccagtgaccccagaaaagcataacaccaatcccagggctggctctgcactaagagaaaattgcactaaatgaatctcgttcccaaagaactacccccttttcagctgagccctggggactgttccaaagccagtgaaatgtgaaggaaagtggggtccttcggggcgatgctccctcagcctcagaggagctctaccctgctccctgctttggctgaggggcttgggaaaaaaacttggcactttttcgtgtggatcttgccacatttctgatcagaggtgtacactaacatttcccccgagctcttggcctttgcatttatttatacagtgccttgctcggcgcccaccaccccctcaagccccagcagccctcaacaggcccagggagggaagtgtgagcgccttggtatgacttaaaattggaaatgtcatctaaccattaagtcatgtgtgaacacataaggacgtgtgtaaatatgtacatttgtctttttataaaaagtaaattgtttataaggggtgtggcctttttagagagaaatttaacttgtagatgattttactttttatgg

SEQ ID NO: 2961 - protein, 325 aa, Homosapiens; identical to SEQ ID NO: 391

SEQ ID NO: 2962 - DNA, 349 bp, Homosapiens
gcgtgtcttcacagatctgaagaacatggatgccacctggctggacagcctgctgaccccagtccggttgccctccatccaggccattccctgtgcaccgtagcagggcccctgggcccctcttattccttcttggcctttgcatttatttatacagtgccttgctcggcgcccaccaccccctcaagccccagcagccctcaacaggcccagggagggaagtgtgagcgccttggtatgacttaaaattggaaatgtcatctaaccattaagtcatgtgtgaacacataaggacgtgtgtaaatatgtacatttgtctttttataaaaagtaaattgtttataagggg

SEQ ID NO: 2963 - protein, 56 aa, Homosapiens
PQSGCPPSRPFPVHRSRAPGPLLFLLGLCIYLYSALLGAHHPLKPQQPSTGPGREV

SEQ ID NO: 2964 - DNA, 1232 bp, Homosapiens
ggtggcgccgctgccctggcagagctcgccactccttagtcgaggcaagacgtgcgcccgagccccgccgaaccgaggccacccggagccgtgcccagtccacgccggccgtgcccggcggccttaagaacccggcaacctctgccttcttccctcttccactcggagtcgcgctccgcgcgccctcactgcagcccctgcgtcgccgggaccctcgcgcgcgaccgccgaatcgctcctgcagcagagccaacatgcccatcactcggatgcgcatgagaccctggctagagatgcagattaattccaaccaaatcccggggctcatctggattaataaagaggagatgatcttccagatcccatggaagcatgctgccaagcatggctgggacatcaacaaggatgcctgtttgttccggagctgggccattcacacaggccgatacaaagcaggggaaaaggagccagatcccaagacgtggaaggccaactttcgctgtgccatgaactccctgccagatatcgaggaggtgaaagaccagagcaggaacaagggcagctcagctgtgcgagtgtaccggatgcttccacctctcaccaagaaccagagaaaagaaagaaagtcgaagtccagccgagatgctaagagcaaggccaagaggaagtcatgtggggattccagccctgataccttctctgatggactcagcagctccactctgcctgatgaccacagcagctacacagttccaggctacatgcaggacttggaggtggagcaggccctgactccaggtgagctggtccaggtctggcaggagaccccacaggtcagtgggatgactctttctcttggaggcatggtgctggcacatggtggcccattagtgcaggctgcagggttggtcggagggcgctcgatgtcttgcaaactaagaaagcacacaaccttgacctgtggcttctgctgttccccagcactgtcgccatgtgctgtcagcagcactctccccgactggcacatcccagtggaagttgtgccggacagcaccagtgatctgtacaacttccaggtgtcacccatgccctccacctctgaaggttggtgctcctggggcctggcctgcctgcttgactgtctgggtcctgtgaagggcttcctgagagagaaaagatgatcagaactccacctggcactgaattgattgagttgggcattgcccagtctt

SEQ ID NO: 2965 - protein, 308 aa, Homosapiens
MPITRMRMRPWLEMQINSNQIPGLIWINKEEMIFQIPWKHAAKHGWDINKDACLFRSWAIHTGRYKAGEKEPDPKTWKANFRCAMNSLPDIEEVKDQSRNKGSSAVRVYRMLPPLTKNQRKERKSKSSRDAKSKAKRKSCGDSSPDTFSDGLSSSTLPDDHSSYTVPGYMQDLEVEQALTPGELVQVWQETPQVSGMTLSLGGMVLAHGGPLVQAAGLVGGRSMSCKLRKHTTLTCGFCCSPALSPCAVSSTLPDWHIPVEVVPDSTSDLYNFQVSPMPSTSEGWCSWGLACLLDCLGPVKGFLREKR

SEQ ID NO: 2966 - DNA, 1035 bp, Homosapiens
ggtggcgccgctgccctggcagagctcgccactccttagtcgaggcaagacgtgcgcccgagccccgccgaaccgaggccacccggagccgtgcccagtccacgccggccgtgcccggcggccttaagaacccggcaacctctgccttcttccctcttccactcggagtcgcgctccgcgcgccctcactgcagcccctgcgtcgccgggaccctcgcgcgcgaccgccgaatcgctcctgcagcagagccaacatgcccatcactcggatgcgcatgagaccctggctagagatgcagattaattccaaccaaatcccggggctcatctggattaataaagtgagtgtaactctttgggttttcctgccactgttttaacccatgtacttctggagggaccaaagcttcagatgcagctcaaaaagggaagtgataacgggacaagcaggtgtttctcccagtgggtcctgcatgcagggagtgtgcacggcccagcctgggcctcacttgcatgactcctgccttcttcccttcttgaggtagggcacccacctgaaggcacttccagtttccagcagcaagactttccagcatctgcagagctggagttctgctctcctctaagcgagacccttacaaacatacacagcactctgcagggctccaatcgaacaaatagaagactgagaagtggatgctgctgggcagaaacgtgcctggcttagcagaggacaaacgagttaatcttgcaccagtcactctggcccaagaagcctatagctggtgcacttggggcaacatagaccctatagacttagtagcaatgatagtattcataataatagctaatgcttactgaacactccctgtgtgcctggcacctgctaagtatgttatttacattgtgtcatttaatcctcgcagtagtcctgtgggttagatcttactaatgtcatcattttcagataagtaaacagaggcactgagaggtagatcataagatcacacaaaaagtgatgaagccaagatttga

SEQ ID NO: 2967 - protein, 54 aa, Homosapiens [sequence omitted]

SEQ ID NO: 2968 - DNA, 816 bp, Homosapiens; identical to SEQ ID NO: 392

SEQ ID NO: 2969 - protein, 134 aa, Homosapiens; identical to SEQ ID NO: 393

SEQ ID NO: 2970 - DNA, 5798 bp, Homosapiens
ccaggagagcggcgtggacgcgtgcgggcctagaggcccacgtgatccgcagggcggccgaggcaggaagctgtgagtgcgcggttgcggggtcgcattgtggctacggctttgcgtccccggcgggcagccccaggctggtccccgcctccgctctccccaccggcggggaaagcagctggtgtgggaggaaaggctccatcccccgccccctctctcccgctgttggctggcaggatcttttggcagtcctgtggcctcgctccccgcccggatcctcctgaccctgagattcgcgggtctcacgtcccgtgcacgccttgcttcggcctcagttaagcctttgtgggctccaggtccctggtgagattagaaacgtttgcaaacatgtcccggatcgaaaagatgagcattctgggcgtgcggagttttggaatagaggacaaagataagcaaattatcactttcttcagcccccttacaattttggttggacccaatggggcgggaaagacgaccatcattgaatgtctaaaatatatttgtactggagatttccctcctggaaccaaaggaaatacatttgtacacgatcccaaggttgctcaagaaacagatgtgagagcccagattcgtctgcaatttcgtgatgtcaatggagaacttatagctgtgcaaagatctatggcatggtgaaaaggtcagtctgagctctaagtgtgcagaaattgaccgagaaatgatcagttctcttggggtttccaaggctgtgctaaataatgtcattttctgtcatcaagaagattctaattggcctttaagtgaaggaaaggctttgaagcaaaagtttgatgagattttttcagcaacaagatacattaaagccttagaaacacttcggcaggtacgtcagacacaaggtcagaaagtaaaagaatatcaaatggaactaaaatatctgaagcaatataaggaaaaagcttgtgagattcgtgatcagattacaagtaaggaagcccagttaacatcttcaaaggaaattgtcaaatcctatgagaatgaacttgatccattgaagaatcgtctaaaagaaattgaacataatctctctaaaataatgaaacttgacaatgaaattaaagccttggatagccgaaagaagcaaatggagaaagataatagtgaactggaagagaaaatggaaaaggtttttcaagggactgatgagcaactaaatgacttatatcacaatcaccagagaacagtaagggagaaagaaaggaaattggtagactgtcatcgtgaactggaaaaactaaataaagaatctaggcttctcaatcaggaaaaatcagaactgcttgttgaacagggtcgtctacagctgcaagcagatcgccatcaagaacatatccgagctagagattcattaattcagtctttggcaacacagctagaattggatggctttgagcgtggaccattcagtgaaagacagattaaaaattttcacaaacttgtgagagagagacaagaaggggaagcaaaaactgccaaccaactgatgaatgactttgcagaaaaagagactctgaaacaaaaacagatagatgagataagagataagaaaactggactgggaagaataattgagttaaaatcagaaatcctaagtaagaagcagaatgagctgaaaaatgtgaagtatgaattacagcagttggaaggatcttcagacaggattcttgaactggaccaggagctcataaaagctgaacgtgagttaagcaaggctgagaaaaacagcaatgtagaaaccttaaaaatggaagtaataagtctccaaaatgaaaaagcagacttagacaggaccctgcgtaaacttgaccaggagatggagcagttaaaccatcatacaacaacacgtacccaaatggagatgctgaccaaagacaaagctgacaaagatgaacaaatcagaaaaataaaatctaggcacagtgatgaattaacctcactgttgggatattttcccaacaaaaaacagcttgaagactggctacatagtaaatcaaaagaaattaatcagaccagggacagacttgccaaattgaacaaggaactagcttcatctgagcagaataaaaatcatataaataatgaactaaaaagaaaggaagagcagttgtccagttacgaagacaagctgtttgatgtttgtggtagccaggattttgaaagtgatttagacaggcttaaagaggaaattgaaaaatcatcaaaacagcgagccatgctggctggagccacagcagtttactcccagttcattactcagctaacagacgaaaaccagtcatgttgccccgtttgtcagagagtttttcagacagaggctgagttacaagaagtcatcagtgatttgcagtctaaactgcgacttgctccagataaactcaagtcaacagaatcagagctaaaaaaaaaggaaaagcggcgtgatgaaatgctgggacttgtgcccatgaggcaaagcataattgatttgaaggagaaggaaataccagaattaagaaacaaactgcagaatgtcaatagagacatacagcgcctaaagaacgacatagaagaacaagaaacactcttgggtacaataatgcctgaagaagaaagtgccaaagtatgcctgacagatgttacaattatggagaggttccagatggaacttaaagatgttgaaagaaaaattgcacaacaagcagctaagctacaaggaatagacttagatcgaactgtccaacaagtcaaccaggagaaacaagagaaacagcacaagttagacacagtttctagtaagattgaattgaatcgtaagcttatacaggaccagcaggaacagattcaacatctaaaaagtacaacaaatgagctaaaatctgagaaacttcagatatccactaatttgcaacgtcgtcagcaactggaggagcagactgtggaattatccactgaagttcagtctttgtacagagagataaaggatgctaaagagcaggtaagccctttggaaacaacattggaaaagttccagcaagaaaaagaagaattaatcaacaaaaaaaatacaagcaacaaaatagcacaggataaactgaatgatattaaagagaaggttaaaaatattcatggctatatgaaagacattgagaattatattcaagatgggaaagacgactataagaagcaaaaagaaactgaacttaataaagtaatagctcaactaagtgaatgcgagaaacacaaagaaaagataaatgaagatatgagactcatgagacaagatattgatacacagaagatacaagaaaggtggctacaagataaccttactttaagaaaaagaaatgaggaactaaaagaagttgaagaagaaagaaaacaacatttgaaggaaatgggtcaaatgcaggttttgcaaatgaaaagtgaacatcagaagttggaagagaacatagacaatataaaaagaaatcataatttggcattagggcgacagaaaggttatgaagaagaaattattcattttaagaaagaacttcgagaaccacaatttcgggatgctgaggaaaagtatagagaaatgatgattgttatgaggacaacagaacttgtgaacaaggatctggatatttattataagactcttgaccaagcaataatgaaatttcacagtatgaaaatggaagaaatcaataaaattatacgtgacctgtggcgaagtacctatcgtggacaagatattgaatacatagaaatacggtctgatgccgatgaaaatgtatcagcttctgataaaaggcggaattataactaccgagtggtgatgctgaagggagacacagccttggatatgcgaggacgatgcagtgctggacaaaaggtattagcctcactcatcattcgcctggccctggctgaaacgttctgcctcaactgtggcatcattgccttggatgagccaacaacaaatcttgaccgagaaaacattgaatctcttgcacatgctctggttgagataataaaaagtcgctcacagcagcgtaacttccagcttctggtaatcactcatgatgaagattttgtggagcttttaggacgttctgaatatgtggagaaattctacaggattaaaaagaacatcgatcagtgctcagagattgtgaaatgcagtgttagctccctgggattcaatgttcattaaaaatatccaagatttaaatgccatagaaatgtaggtcctcagaaagtgtataataagaaacttatttctcatatcaacttagtcaataagaaaatatattctttcaaaggaacattgtgtctaggattttggatgttgagaggttctaaaatcatgaaacttgtttcactgaaaattggacagattgcctgtttctgatttgctgctcttcatcccattccaggcagcctctgtcaggccttcagggttcagcagtacagccgagactcgactctgtgcctccctccccagtgcaaatgcatgcttcttctcaaagcactgttgagaaggagataattactgccttgaaaatttatggttttggtatttttttaaatcatagttaaatgttacctctgaatttacttccttgcatgtggtttgaaaaactgagtattaatatctgaggatgaccagaaatggtgagatgtatgtttggctctgcttttaactttataaatccagtgacctctctctctgggacttggtttccccaactaaaatttgaagtagttgaatggggtctcaaagtttgacaggaaccttaagtaatcatctaagtcagtacccaccaccttcttctcctacatatcccttccagatggtcatccagactcagagctctctctacagagaggaaattctccactgtgcacacccacctttggaaagctctgaccacttgaggcctgatctgcccatcgtgaagaagcctgtaacactcctctgcgtctatcctgtgtagcatactggcttcaccatcaatcctgattcctctctaagtgggcattgccatgtggaaggcaagccaggctcactcacagagtcaaggcctgctccctgtagggtccaaccagacctggaagaacaggcctctccatttgctcttcagatgccacttctaagaaaagcctaatcacagtttttcctggaattgccagctgacatcttgaatccttccattccacacagaatgcaaccaagtcacacgcttttgaattatgctttgtagagttttgtcattcagagtcagccaggaccataccgggtcttgattcagtcacatggcatggttttgtgccatctgtagctataatgagcatgtttgcctagacagcttttctcaactgggtccagaagagaattaagccctaaggtcctaaggcatctatctgtgctaggttaaatggttggcccccaaagatagacaggtcctgatttctagaacccgtgactgttactttatacagcaaaggaaactttgcagatgtgattaaagctaaggaccttaagacagagtatcctgggggtggtggtggggtgggggggggtcctaaatgtaatcacgagtaagattaagagcaaatcaattctagtcatatattaaacatccacaataaccaagatatttttatcccaagaatgcaagatttcagaaaatgaaaaatctgttgataaatccatcactataataaaaccgaaggtgaaaaaaattctg

SEQ ID NO: 2971 - protein, 1173 aa, Homosapiens; identical to SEQ ID NO: 397

SEQ ID NO: 2972 - DNA, 5863 bp, Homosapiens
ccaggagagcggcgtggacgcgtgcgggcctagaggcccacgtgatccgcagggcggccgaggcaggaagctgtgagtgcgcggttgcggggtcgcattgtggctacggctttgcgtccccggcgggcagccccaggctggtccccgcctccgctctccccaccggcggggaaagcagctggtgtgggaggaaaggctccatcccccgccccctctctcccgctgttggctggcaggatcttttggcagtcctgtggcctcgctccccgcccggatcctcctgaccctgagattcgcgggtctcacgtcccgtgcacgccttgcttcggcctcagttaagcctttgtgggctccaggtccctggtgagattagaaacgtttgcaaacatgtcccggatcgaaaagatgagcattctgggcgtgcggagttttggaatagaggacaaagataagcaaattatcactttcttcagcccccttacaattttggttggacccaatggggcgggaaagacgaccatcattgaatgtctaaaatatatttgtactggagatttccctcctggaaccaaaggaaatacatttgtacacgatcccaaggttgctcaagaaacagatgtgagagcccagattcgtctgcaatttcgtgatgtcaatggagaacttatagctgtgcaaagatctatggtgtgtactcagaaaagcaaaaagacagaatttaaaactctggaaggagtcattactagaacaaagcatggtgaaaaggtcagtctgagctctaagtgtgcagaaattgaccgagaaatgatcagttctcttggggtttccaaggctgtgctaaataatgtcattttctgtcatcaagaagattctaattggcctttaagtgaaggaaaggctttgaagcaaaagtttgatgagattttttcagcaacaagatacattaaagccttagaaacacttcggcaggtacgtcagacacaaggtcagaaagtaaaagaatatcaaatggaactaaaatatctgaagcaatataaggaaaaagcttgtgagattcgtgatcagattacaagtaaggaagcccagttaacatcttcaaaggaaattgtcaaatcctatgagaatgaacttgatccattgaagaatcgtctaaaagaaattgaacataatctctctaaaataatgaaacttgacaatgaaattaaagccttggatagccgaaagaagcaaatggagaaagataatagtgaactggaagagaaaatggaaaaggtttttcaagggactgatgagcaactaaatgacttatatcacaatcaccagagaacagtaagggagaaagaaaggaaattggtagactgtcatcgtgaactggaaaaactaaataaagaatctaggcttctcaatcaggaaaaatcagaactgcttgttgaacagggtcgtctacagctgcaagcagatcgccatcaagaacatatccgagctagagattcattaattcagtctttggcaacacagctagaattggatggctttgagcgtggaccattcagtgaaagacagattaaaaattttcacaaacttgtgagagagagacaagaaggggaagcaaaaactgccaaccaactgatgaatgactttgcagaaaaagagactctgaaacaaaaacagatagatgagataagagataagaaaactggactgggaagaataattgagttaaaatcagaaatcctaagtaagaagcagaatgagctgaaaaatgtgaagtatgaattacagcagttggaaggatcttcagacaggattcttgaactggaccaggagctcataaaagctgaacgtgagttaagcaaggctgagaaaaacagcaatgtagaaaccttaaaaatggaagtaataagtctccaaaatgaaaaagcagacttagacaggaccctgcgtaaacttgaccaggagatggagcagttaaaccatcatacaacaacacgtacccaaatggagatgctgaccaaagacaaagctgacaaagatgaacaaatcagaaaaataaaatctaggcacagtgatgaattaacctcactgttgggatattttcccaacaaaaaacagcttgaagactggctacatagtaaatcaaaagaaattaatcagaccagggacagacttgccaaattgaacaaggaactagcttcatctgagcagaataaaaatcatataaataatgaactaaaaagaaaggaagagcagttgtccagttacgaagacaagctgtttgatgtttgtggtagccaggattttgaaagtgatttagacaggcttaaagaggaaattgaaaaatcatcaaaacagcgagccatgctggctggagccacagcagtttactcccagttcattactcagctaacagacgaaaaccagtcatgttgccccgtttgtcagagagtttttcagacagaggctgagttacaagaagtcatcagtgatttgcagtctaaactgcgacttgctccagataaactcaagtcaacagaatcagagctaaaaaaaaaggaaaagcggcgtgatgaaatgctgggacttgtgcccatgaggcaaagcataattgatttgaaggagaaggaaataccagaattaagaaacaaactgcagaatgtcaatagagacatacagcgcctaaagaacgacatagaagaacaagaaacactcttgggtacaataatgcctgaagaagaaagtgccaaagtatgcctgacagatgttacaattatggagaggttccagatggaacttaaagatgttgaaagaaaaattgcacaacaagcagctaagctacaaggaatagacttagatcgaactgtccaacaagtcaaccaggagaaacaagagaaacagcacaagttagacacagtttctagtaagattgaattgaatcgtaagcttatacaggaccagcaggaacagattcaacatctaaaaagtacaacaaatgagctaaaatctgagaaacttcagatatccactaatttgcaacgtcgtcagcaactggaggagcagactgtggaattatccactgaagttcagtctttgtacagagagataaaggatgctaaagagcaggtaagccctttggaaacaacattggaaaagttccagcaagaaaaagaagaattaatcaacaaaaaaaatacaagcaacaaaatagcacaggataaactgaatgatattaaagagaaggttaaaaatattcatggctatatgaaagacattgagaattatattcaagatgggaaagacgactataagaagcaaaaagaaactgaacttaataaagtaatagctcaactaagtgaatgcgagaaacacaaagaaaagataaatgaagatatgagactcatgagacaagatattgatacacagaagatacaagaaaggtggctacaagataaccttactttaagaaaaagaaatgaggaactaaaagaagttgaagaagaaagaaaacaacatttgaaggaaatgggtcaaatgcaggttttgcaaatgaaaagtgaacatcagaagttggaagagaacatagacaatataaaaagaaatcataatttggcattagggcgacagaaaggttatgaagaagaaattattcattttaagaaagaacttcgagaaccacaatttcgggatgctgaggaaaagtatagagaaatgatgattgttatgaggacaacagaacttgtgaacaaggatctggatatttattataagactcttgaccaagcaataatgaaatttcacagtatgaaaatggaagaaatcaataaaattatacgtgacctgtggcgaagtacctatcgtggacaagatattgaatacatagaaatacggtctgatgccgatgaaaatgtatcagcttctgataaaaggcggaattataactaccgagtggtgatgctgaagggagacacagccttggatatgcgaggacgatgcagtgctggacaaaaggtattagcctcactcatcattcgcctggccctggctgaaacgttctgcctcaactgtggcatcattgccttggatgagccaacaacaaatcttgaccgagaaaacattgaatctcttgcacatgctctggttgagataataaaaagtcgctcacagcagcgtaacttccagcttctggtaatcactcatgatgaagattttgtggagcttttaggacgttctgaatatgtggagaaattctacaggattaaaaagaacatcgatcagtgctcagagattgtgaaatgcagtgttagctccctgggattcaatgttcattaaaaatatccaagatttaaatgccatagaaatgtaggtcctcagaaagtgtataataagaaacttatttctcatatcaacttagtcaataagaaaatatattctttcaaaggaacattgtgtctaggattttggatgttgagaggttctaaaatcatgaaacttgtttcactgaaaattggacagattgcctgtttctgatttgctgctcttcatcccattccaggcagcctctgtcaggccttcagggttcagcagtacagccgagactcgactctgtgcctccctccccagtgcaaatgcatgcttcttctcaaagcactgttgagaaggagataattactgccttgaaaatttatggttttggtatttttttaaatcatagttaaatgttacctctgaatttacttccttgcatgtggtttgaaaaactgagtattaatatctgaggatgaccagaaatggtgagatgtatgtttggctctgcttttaactttataaatccagtgacctctctctctgggacttggtttccccaactaaaatttgaagtagttgaatggggtctcaaagtttgacaggaaccttaagtaatcatctaagtcagtacccaccaccttcttctcctacatatcccttccagatggtcatccagactcagagctctctctacagagaggaaattctccactgtgcacacccacctttggaaagctctgaccacttgaggcctgatctgcccatcgtgaagaagcctgtaacactcctctgcgtctatcctgtgtagcatactggcttcaccatcaatcctgattcctctctaagtgggcattgccatgtggaaggcaagccaggctcactcacagagtcaaggcctgctccctgtagggtccaaccagacctggaagaacaggcctctccatttgctcttcagatgccacttctaagaaaagcctaatcacagtttttcctggaattgccagctgacatcttgaatccttccattccacacagaatgcaaccaagtcacacgcttttgaattatgctttgtagagttttgtcattcagagtcagccaggaccataccgggtcttgattcagtcacatggcatggttttgtgccatctgtagctataatgagcatgtttgcctagacagcttttctcaactgggtccagaagagaattaagccctaaggtcctaaggcatctatctgtgctaggttaaatggttggcccccaaagatagacaggtcctgatttctagaacccgtgactgttactttatacagcaaaggaaactttgcagatgtgattaaagctaaggaccttaagacagagtatcctgggggtggtggtggggtgggggggggtcctaaatgtaatcacgagtaagattaagagcaaatcaattctagtcatatattaaacatccacaataaccaagatatttttatcccaagaatgcaagatttcagaaaatgaaaaatctgttgataaatccatcactataataaaaccgaaggtgaaaaaaattctg

SEQ ID NO: 2973 - protein, 1312 aa, Homosapiens; identical to SEQ ID NO: 395

SEQ ID NO: 2974 - DNA, 4395 bp, Homosapiens
gtgatccgcagggcggccgaggcaggaagctgtgagtgcgcggttgcggggtcgcattgtggctacggctttgcgtccccggcgggcagccccaggctggtccccgcctccgctctccccaccggcggggaaagcagctggtgtgggaggaaaggctccatcccccgccccctctctcccgctgttggctggcaggatcttttggcagtcctgtggcctcgctccccgcccggatcctcctgaccctgagattcgcgggtctcacgtcccgtgcacgccttgcttcggcctcagttaagcctttgtgggctccaggtccctggtgagattagaaacgtttgcaaacatgtcccggatcgaaaagatgagcattctgggcgtgcggagttttggaatagaggacaaagataagcaaattatcactttcttcagcccccttacaattttggttggacccaatggggcgggaaagacgaccatcattgaatgtctaaaatatatttgtactggagatttccctcctggaaccaaaggaaatacatttgtacacgatcccaaggttgctcaagaaacagatgtgagagcccagattcgtctgcaatttcgtgatgtcaatggagaacttatagctgtgcaaagatctatggtgtgtactcagaaaagcaaaaagacagaatttaaaactctggaaggagtcattactagaacaaagcatggtgaaaaggtcagtctgagctctaagtgtgcagaaattgaccgagaaatgatcagttctcttggggtttccaaggctgtgctaaataatgtcattttctgtcatcaagaagattctaattggcctttaagtgaaggaaaggctttgaagcaaaagtttgatgagattttttcagcaacaagatacattaaagccttagaaacacttcggcaggtacgtcagacacaaggtcagaaagtaaaagaatatcaaatggaactaaaatatctgaagcaatataaggaaaaagcttgtgagattcgtgatcagattacaagtaaggaagcccagttaacatcttcaaaggaaattgtcaaatcctatgagaatgaacttgatccattgaagaatcgtctaaaagaaattgaacataatctctctaaaataatgaaacttgacaatgaaattaaagccttggatagccgaaagaagcaaatggagaaagataatagtgaactggaagagaaaatggaaaaggtttttcaagggactgatgagcaactaaatgacttatatcacaatcaccagagaacagtaagggagaaagaaaggaaattggtagactgtcatcgtgaactggaaaaactaaataaagaatctaggcttctcaatcaggaaaaatcagaactgcttgttgaacagggtcgtctacagctgcaagcagatcgccatcaagaacatatccgagctagagattcattaattcagtctttggcaacacagctagaattggatggctttgagcgtggaccattcagtgaaagacagattaaaaattttcacaaacttgtgagagagagacaagaaggggaagcaaaaactgccaaccaactgatgaatgactttgcagaaaaagagactctgaaacaaaaacagatagatgagataagagataagaaaactggactgggaagaataattgagttaaaatcagaaatcctaagtaagaagcagaatgagctgaaaaatgtgaagtatgaattacagcagttggaaggatcttcagacaggattcttgaactggaccaggagctcataaaagctgaacgtgagttaagcaaggctgagaaaaacagcaatgtagaaaccttaaaaatggaagtaataagtctccaaaatgaaaaagcagacttagacaggaccctgcgtaaacttgaccaggagatggagcagttaaaccatcatacaacaacacgtacccaaatggagatgctgaccaaagacaaagctgacaaagatgaacaaatcagaaaaataaaatctaggcacagtgatgaattaacctcactgttgggatattttcccaacaaaaaacagcttgaagactggctacatagtaaatcaaaagaaattaatcagaccagggacagacttgccaaattgaacaaggaactagcttcatctgagcagaataaaaatcatataaataatgaactaaaaagaaaggaagagcagttgtccagttacgaagacaagctgtttgatgtttgtggtagccaggattttgaaagtgatttagacaggcttaaagaggaaattgaaaaatcatcaaaacagcgagccatgctggctggagccacagcagtttactcccagttcattactcagctaacagacgaaaaccagtcatgttgccccgtttgtcagagagtttttcagacagaggctgagttacaagaagtcatcagtgatttgcagtctaaactgcgacttgctccagataaactcaagtcaacagaatcagagctaaaaaaaaaggaaaagcggcgtgatgaaatgctgggacttgtgcccatgaggcaaagcataattgatttgaaggagaaggaaataccagaattaagaaacaaactgcagaatgtcaatagagacatacagcgcctaaagaacgacatagaagaacaagaaacactcttgggtacaataatgcctgaagaagaaagtgccaaagtatgcctgacagatgttacaattatggagaggttccagatggaacttaaagatgttgaaagaaaaattgcacaacaagcagctaagctacaaggaatagacttagatcgaactgtccaacaagtcaaccaggagaaacaagagaaacagcacaagttagacacagtttctagtaagattgaattgaatcgtaagcttatacaggaccagcaggaacagattcaacatctaaaaagtacaacaaatgagctaaaatctgagaaacttcagatatccactaatttgcaacgtcgtcagcaactggaggagcagactgtggaattatccactgaagttcagtctttgtacagagagataaaggatgctaaagagcaggtaagccctttggaaacaacattggaaaagttccagcaagaaaaagaagaattaatcaacaaaaaaaatacaagcaacaaaatagcacaggataaactgaatgatattaaagagaaggttaaaaatattcatggctatatgaaagacattgagaattatattcaagatgggaaagacgactataagaagcaaaaagaaactgaacttaataaagtaatagctcaactaagtgaatgcgagaaacacaaagaaaagataaatgaagatatgagactcatgagacaagatattgatacacagaagatacaagaaaggtggctacaagataaccttactttaagaaaaagaaatgaggaactaaaagaagttgaagaagaaagaaaacaacatttgaaggaaatgggtcaaatgcaggttttgcaaatgaaaagtgaacatcagaagttggaagagaacatagacaatataaaaagaaatcataatttggcattagggcgacagaaaggttatgaagaagaaattattcattttaagaaagaacttcgagaaccacaatttcgggatgctgaggaaaagtatagagaaatgatgattgttatgaggacaacagaacttgtgaacaaggatctggatatttattataagactcttgaccaagcaataatgaaatttcacagtatgaaaatggaagaaatcaataaaattatacgtgacctgtggcgaagtacctatcgtggacaagatattgaatacatagaaatacggtctgatgccgatgaaaatgtatcagcttctgataaaaggcggaattataactaccgagtggtgatgctgaagggagacacagccttggatatgcgaggacgatgcagtgctggacaaaaggtattagcctcactcatcattcgcctggccctggctgaaacgttctgcctcaactgtggcatcattgccttggatgagccaacaacaaatcttgaccgagaaaacattgaatctcttgcacatgctctggttgagataataaaaagtcgctcacagcagcgtaacttccagcttctggtaatcactcatgatgaagattttgtggagcttttaggacgttctgaatatgtggagaaattctacaggattaaaaagaacatcgatcagtgctcagagattgtgaaatgcagtgttagctccctgggattcaatgttcattaaaaatatccaagatttaaatgccatagaaatgtaggtcctcagaaagtgtataataagaaacttatttctcatatcaacttagtcaataagaaaatatattctttcaaagg

SEQ ID NO: 2975 - protein, 1312 aa, Homosapiens; identical to SEQ ID NO: 395

SEQ ID NO: 2976 - DNA, 4330 bp, Homosapiens
gtgatccgcagggcggccgaggcaggaagctgtgagtgcgcggttgcggggtcgcattgtggctacggctttgcgtccccggcgggcagccccaggctggtccccgcctccgctctccccaccggcggggaaagcagctggtgtgggaggaaaggctccatcccccgccccctctctcccgctgttggctggcaggatcttttggcagtcctgtggcctcgctccccgcccggatcctcctgaccctgagattcgcgggtctcacgtcccgtgcacgccttgcttcggcctcagttaagcctttgtgggctccaggtccctggtgagattagaaacgtttgcaaacatgtcccggatcgaaaagatgagcattctgggcgtgcggagttttggaatagaggacaaagataagcaaattatcactttcttcagcccccttacaattttggttggacccaatggggcgggaaagacgaccatcattgaatgtctaaaatatatttgtactggagatttccctcctggaaccaaaggaaatacatttgtacacgatcccaaggttgctcaagaaacagatgtgagagcccagattcgtctgcaatttcgtgatgtcaatggagaacttatagctgtgcaaagatctatggcatggtgaaaaggtcagtctgagctctaagtgtgcagaaattgaccgagaaatgatcagttctcttggggtttccaaggctgtgctaaataatgtcattttctgtcatcaagaagattctaattggcctttaagtgaaggaaaggctttgaagcaaaagtttgatgagattttttcagcaacaagatacattaaagccttagaaacacttcggcaggtacgtcagacacaaggtcagaaagtaaaagaatatcaaatggaactaaaatatctgaagcaatataaggaaaaagcttgtgagattcgtgatcagattacaagtaaggaagcccagttaacatcttcaaaggaaattgtcaaatcctatgagaatgaacttgatccattgaagaatcgtctaaaagaaattgaacataatctctctaaaataatgaaacttgacaatgaaattaaagccttggatagccgaaagaagcaaatggagaaagataatagtgaactggaagagaaaatggaaaaggtttttcaagggactgatgagcaactaaatgacttatatcacaatcaccagagaacagtaagggagaaagaaaggaaattggtagactgtcatcgtgaactggaaaaactaaataaagaatctaggcttctcaatcaggaaaaatcagaactgcttgttgaacagggtcgtctacagctgcaagcagatcgccatcaagaacatatccgagctagagattcattaattcagtctttggcaacacagctagaattggatggctttgagcgtggaccattcagtgaaagacagattaaaaattttcacaaacttgtgagagagagacaagaaggggaagcaaaaactgccaaccaactgatgaatgactttgcagaaaaagagactctgaaacaaaaacagatagatgagataagagataagaaaactggactgggaagaataattgagttaaaatcagaaatcctaagtaagaagcagaatgagctgaaaaatgtgaagtatgaattacagcagttggaaggatcttcagacaggattcttgaactggaccaggagctcataaaagctgaacgtgagttaagcaaggctgagaaaaacagcaatgtagaaaccttaaaaatggaagtaataagtctccaaaatgaaaaagcagacttagacaggaccctgcgtaaacttgaccaggagatggagcagttaaaccatcatacaacaacacgtacccaaatggagatgctgaccaaagacaaagctgacaaagatgaacaaatcagaaaaataaaatctaggcacagtgatgaattaacctcactgttgggatattttcccaacaaaaaacagcttgaagactggctacatagtaaatcaaaagaaattaatcagaccagggacagacttgccaaattgaacaaggaactagcttcatctgagcagaataaaaatcatataaataatgaactaaaaagaaaggaagagcagttgtccagttacgaagacaagctgtttgatgtttgtggtagccaggattttgaaagtgatttagacaggcttaaagaggaaattgaaaaatcatcaaaacagcgagccatgctggctggagccacagcagtttactcccagttcattactcagctaacagacgaaaaccagtcatgttgccccgtttgtcagagagtttttcagacagaggctgagttacaagaagtcatcagtgatttgcagtctaaactgcgacttgctccagataaactcaagtcaacagaatcagagctaaaaaaaaaggaaaagcggcgtgatgaaatgctgggacttgtgcccatgaggcaaagcataattgatttgaaggagaaggaaataccagaattaagaaacaaactgcagaatgtcaatagagacatacagcgcctaaagaacgacatagaagaacaagaaacactcttgggtacaataatgcctgaagaagaaagtgccaaagtatgcctgacagatgttacaattatggagaggttccagatggaacttaaagatgttgaaagaaaaattgcacaacaagcagctaagctacaaggaatagacttagatcgaactgtccaacaagtcaaccaggagaaacaagagaaacagcacaagttagacacagtttctagtaagattgaattgaatcgtaagcttatacaggaccagcaggaacagattcaacatctaaaaagtacaacaaatgagctaaaatctgagaaacttcagatatccactaatttgcaacgtcgtcagcaactggaggagcagactgtggaattatccactgaagttcagtctttgtacagagagataaaggatgctaaagagcaggtaagccctttggaaacaacattggaaaagttccagcaagaaaaagaagaattaatcaacaaaaaaaatacaagcaacaaaatagcacaggataaactgaatgatattaaagagaaggttaaaaatattcatggctatatgaaagacattgagaattatattcaagatgggaaagacgactataagaagcaaaaagaaactgaacttaataaagtaatagctcaactaagtgaatgcgagaaacacaaagaaaagataaatgaagatatgagactcatgagacaagatattgatacacagaagatacaagaaaggtggctacaagataaccttactttaagaaaaagaaatgaggaactaaaagaagttgaagaagaaagaaaacaacatttgaaggaaatgggtcaaatgcaggttttgcaaatgaaaagtgaacatcagaagttggaagagaacatagacaatataaaaagaaatcataatttggcattagggcgacagaaaggttatgaagaagaaattattcattttaagaaagaacttcgagaaccacaatttcgggatgctgaggaaaagtatagagaaatgatgattgttatgaggacaacagaacttgtgaacaaggatctggatatttattataagactcttgaccaagcaataatgaaatttcacagtatgaaaatggaagaaatcaataaaattatacgtgacctgtggcgaagtacctatcgtggacaagatattgaatacatagaaatacggtctgatgccgatgaaaatgtatcagcttctgataaaaggcggaattataactaccgagtggtgatgctgaagggagacacagccttggatatgcgaggacgatgcagtgctggacaaaaggtattagcctcactcatcattcgcctggccctggctgaaacgttctgcctcaactgtggcatcattgccttggatgagccaacaacaaatcttgaccgagaaaacattgaatctcttgcacatgctctggttgagataataaaaagtcgctcacagcagcgtaacttccagcttctggtaatcactcatgatgaagattttgtggagcttttaggacgttctgaatatgtggagaaattctacaggattaaaaagaacatcgatcagtgctcagagattgtgaaatgcagtgttagctccctgggattcaatgttcattaaaaatatccaagatttaaatgccatagaaatgtaggtcctcagaaagtgtataataagaaacttatttctcatatcaacttagtcaataagaaaatatattctttcaaagg

SEQ ID NO: 2977 - protein, 1173 aa, Homosapiens; identical to SEQ ID NO: 397

SEQ ID NO: 2978 - DNA, 1695 bp, Homosapiens
cttaatgagactccttactatactggaatattcattctagcttaagctagaatctggtttgcaatactattatgtcattgattctgaaacatcttatggttataattgcattttttcattcctgctggcacataaaatagtggtatgtcttataactgatgagacagtgaccttattctgataaggagtgccatgaaaactctaacgggtcttcagcttcttgttctacatttagcctatcctgtgagaatgcttcaggcccttcttttaaaagtctacataatgttgcaggaaatgttggttagcttcaggagagtgtaataatagtagctgagcctgattcattttatatagcagcaaagagcttcccaccattcaggtgtagccttgggtgcttccactgcactgatgtttgtttctctctttcagttacttgggtgagttggctccccaggcttttgagatacctgccttttgtccagcactgcatcgtcctcgcatatccaaggctgtgtctcccttcagcatcaccactcggcttttagcagactgaagccatggtttttagttttgtctctagtgatgagcagaaaagagggatgaggaagaggctttactggtccaaccagaaagagaagctaagaacccatgactggattctctcccttggacaccccacagaccaatatctcaccttccaggagaagacccttccagctcttgcttctttaaacctattaacttagttttctttagctagactcccaaacatcagcttttacaattcagcctatggttcaatcactatggcaagataaacatttgtttaggtgtgaaacaccactggctatctttgggttttgtaatctaccctcttgaggttgcaggagctactgtgaaaccttactgcatccatggtcatgatagagatggtgactctaaggtgagccctgaataaagccctcatctgaagctcccctcgaatgcagggacccaggctctgaagagcctcacagaaagctggctaccttggatgcaaaactgtaaaggttacgtgtttacaatgagtcttaaaagaagcatgacctggccaggtgcgtggctcatgcttgtaatcccagcactttgggaggccaaggcaggtggatcacaaggtcaagagatcaagaccatcctggccaacatggtgaaaccccgtctctactaaaaatacaaaaaattagccgggtgtggtggcaggcgcctgtaatcccagctacttgggaggccgaggcagaagaattgcttgaacccgggaggtggagatggcagtgagctgagatcgcaccattggagtccagcctgggcaaaaagagcgaaactctgtctcaaaaaaaaaaaaaaaagtattacctaatatgcaaccttccacatctggggaaaaatgagagtagaacattttgggcatggggtagaacaccatatcttgagtgatatattctaacatcatttaaattggtatattgtattagtatggggtaatacattccaaatgatggataatttcccccttttcatctatgtgtctctgaccactgccaatgcttatacttagtgatgtttttagatgattactaataacagatggtaatcagcttttcttgaaaatgcactgctgacttcctgtgttaccttaaatagacagctgaacgcaac

SEQ ID NO: 2979 - protein, 62 aa, Homosapiens [sequence omitted]

SEQ ID NO: 2980 - DNA, 839 bp, Homosapiens
cttaatgagactccttactatactggaatattcattctagcttaagctagaatctggtttgcaatactattatgtcattgattctgaaacatcttatggttataattgcattttttcattcctgctggcacataaaatagtggtatgtcttataactgatgagacagtgaccttattctgataaggagtgccatgaaaactctaacgggtcttcagcttcttgttctacatttagcctatcctgtgagaatgcttcaggcccttcttttaaaagtctacataatgttgcaggaaatgttggttagcttcaggagagtgtaataatagtagctgagcctgattcattttatatagcagcaaagagcttcccaccattcaggtgtagccttgggtgcttccactgcactgatgtttgtttctctctttcagttacttgggtgagttggctccccaggcttttgagatacctgccttttgtccagcactgcatcgtcctcgcatatccaaggctgtgtctcccttcagcatcaccactcggcttttagcagactgaagccatggtttttagttttgtctctagtgatgagcagaaaagagggatgaggaagaggctttactggtccaaccagaaagagaagctaagaacccatgactggattctctcccttggacaccccacagaccaatatctcaccttccaggagaagacccttccagctcttgcttctttaaacctattaacttagttttctttagctagactcccaaacatcagcttttacaattcagcctatggttcaatcactatggcaagataaacatttgtttaggtgtgaaac

SEQ ID NO: 2981 - protein, 62 aa, Homosapiens [sequence omitted]

SEQ ID NO: 2982 - DNA, 412 bp, Homosapiens
accccgcgggcccggccgagcggcagcccctgccctggagggtggtctccagggaccaaggcgtggcgggcggtgcggagaggcgcggcacagatggctacatcagaggaatttctccacatattcagaacgtcctaaaagctccacaaaatcttcatcatgagtgattaccagaagctggaagttacgctgctttacttgggtgagttggctccccaggcttttgagatacctgccttttgtccagcactgcatcgtcctcgcatatccaaggctgtgtctcccttcagcatcaccactcggtagttataattccgccttttatcagaagctgatacattttcatcggcatcagaccgtatttctatgtattcaatatctgacacaggaagaagaatattttagaggaacc

SEQ ID NO: 2983 - protein, 48 aa, Homosapiens
MSDYQKLEVTLLYLGELAPQAFEIPAFCPALHRPRISKAVSPFSITTR

SEQ ID NO: 2984 - DNA, 388 bp, Homosapiens
gcctcttcgctttgctctggccccgaagcgctgggattgggacctcccttcctcccgaccagctcatcctgggaaagctggggttgctttttcgggtttctctggactctgggtctccgttggcaaagacatgatgcccagtcaggaggagtaaggcctgagagagttgtttttttacttgggtgagttggctccccaggcttttgagatacctgccttttgtccagcactgcatcgtcctcgcatatccaaggctgtgtctcccttcagcatcaccactcggtagttataattccgccttttatcagaagctgatacattttcatcggcatcagaccgtatttctatgtattcaatatctgacacaggaagaagaatattttagagg

SEQ ID NO: 2985 - protein, 74 aa, Homosapiens
ESCFFTWVSWLPRLLRYLPFVQHCIVLAYPRLCLPSASPLGSYNSAFYQKLIHFHRHQTVFLCIQYLTQEEEYF

SEQ ID NO: 2986 - DNA, 1073 bp, Homosapiens
gaagagaattaagccctaaggtcctaaggcatctatctgtgctaggttaaatggttggcccccaaagatagacaggtcctgatttctagaacccgtgactgttactttatacagcaaaggaaactttgcagatgtgattaaagctaaggaccttaagacagagtatcctgggggtggtggtggggtgggggggggtcctaaatgtaatcacgagtaagattaagagcaaatcaattctagtcatatattaaacatccacaataaccaagatatttttatcccaagaatgcaagatttcagaaaatgaaaaatctgttgataaatccatcactataataaaaccgaaggtgaaaaaaattctgaaaaaattctagcagctatatttgataaaattcaacatctcctagctttagcaaactcacagttttgcaaataatattttcttaatgttatctgttgctaaatcaaaattaaacagtcatcttaactgcaaaataaaacatttctcagtaaatattaaagccagttaccttctatcaacatgttaatgaaagtgctagttgttgcagcaaagaataacaaaggcaatacacgatcaatataggcagtgaaacaaaagtatcatttgcaagttaaaacagacttcccaattttaaatctggtttccccctgaatatgtggcatccttggcagcacttctgagagtggctgctttcattccaagaagcccatgggtttggaggtgggataggtgcctttctggcttctcattgctgcttctagatcaagtactggtaaaggtaaatatataggtaatataaaagtataaatgtattttgggggctgggagcagtggctcatgcctgtaatcccaacactttgagaggccgaggtgggcggatcacctgaggtcaggagtttgagaccagcctgcccaacatggtgaaaccctgtctctactaaaaatacaaaaaatcagccaggcgttgtggtgggcgcctgtaatcccagctactcaggaggctgaggcaggagaatctcttgaacccaggaggcggaggttgcggtgagct

SEQ ID NO: 2987 - protein, 33 aa, Homosapiens
MLSVAKSKLNSHLNCKIKHFSVNIKASYLLSTC

SEQ ID NO: 2988 - DNA, 1638 bp, Homosapiens
cgggtgtccagccggcccttgccctgcctggcgctcggaccgccacctttgccgccccctcgccagcctccgcagcttccagactggccggtctgcgcgcccacccctgcctcccggaccggccaccgccggaggccgcggaggagggcccggccgcgcagatcccgcttatcgggcccatctcccgttacataaggccacccccctatctccgcgggccatcgccgccgcaaccgccgcgccagcgccttctcccacgcgcgggggcgcccctgcccaccgctcccggcagggcttttggtggccatgggggataaggggcgttgactcacccgggcggggctccgggagttgcacagaccaaggcaaatgccgtggcctctgctgtgggggtttctggaggacttctaggaaaacgagggaagagcaggaaaaggcgacatggctgcaggggccaagcccaggagccgccctccacagcactcattctgcagaagggaaatttgaggcccccagacggcaggggttgatcctgcagagactggctccgctctgcaatggcagcatggtatggagcatcaacctgacagctggcatgtactgtgcagccctggaatccctgatcaacgtgtcaggctgcagtgccatcgagaagacccagaggatgctgagcggattctgcccgcacaaggtctcagctgggcagttttccagcttgcatgtccgagacaccaaaatcgaggtggcccagtttgtaaaggacctgctcttacatttaaagaaactttttcgcgagggacagttcaactgaaacttcgaaagcatcattatttgcagagacaggacctgactattgaagttgcagattcatttttctttctgatgtcaaaaatgtcttgggtaggcgggaaggagggttagggaggggtaaaattccttagcttagacctcagcctgtgctgcccgtcttcagcctagccgacctcagccttccccttgcccagggctcagcctggtgggcctcctctgtccagggccctgagctcggtggacccagggatgacatgtccctacacccctcccctgccctagagcacactgtagcattacagtgggtgccccccttgccagacatgtggtgggacagggacccacttcacacacaggcaactgaggcagacagcagctcaggcacacttcttcttggtcttatttattattgtgtgttatttaaatgagtgtgtttgtcaccgttggggattggggaagactgtggctgctagcacttggagccaagggttcagagactcagggccccagcactaaagcagtggacaccaggagtccctggtaataagtactgtgtacagaattctgctacctcactggggtcctggggcctcggagcctcatccgaggcagggtcaggagaggggcagaacagccgctcctgtctgccagccagcagccagctctcagccaacgagtaatttattgtttttccttgtatttaaatattaaatatgttagcaaagagttaatatatagaagggtaccttgaacactgggggaggggacattgaacaagttgtttcattgactatcaaactgaagccagaaataaagttggtgacagat

SEQ ID NO: 2989 - protein, 116 aa, Homosapiens
MEHQPDSWHVLCSPGIPDQRVRLQCHREDPEDAERILPAQGLSWAVFQLACPRHQNRGGPVCKGPALTFKETFSRGTVQLKLRKHHYLQRQDLTIEVADSFFFLMSKMSWVGGKEG

SEQ ID NO: 2990 - DNA, 1272 bp, Homosapiens
gcgcgggggcgcccctgcccaccgctcccggcagggcttttggtggccatgggggataaggggcgttgactcacccgggcggggctccgggagttgcacagaccaaggccctgtgcctccctctacagccctcagggagctcattgaggagctggtcaacatcacccagaaccagaaggctccgctctgcaatggcagcatggtatggagcatcaacctgacagctggcatgtactgtgcagccctggaatccctgatcaacgtgtcaggctgcagtgccatcgagaagacccagaggatgctgagcggattctgcccgcacaaggtctcagctgggcagttttccagcttgcatgtccgagacaccaaaatcgaggtggcccagtttgtaaaggacctgctcttacatttaaagaaactttttcgcgagggacagttcaactgaaacttcgaaagcatcattatttgcagagacaggacctgactattgaagttgcagattcatttttctttctgatgtcaaaaatgtcttgggtaggcgggaaggagggttagggaggggtaaaattccttagcttagacctcagcctgtgctgcccgtcttcagcctagccgacctcagccttccccttgcccagggctcagcctggtgggcctcctctgtccagggccctgagctcggtggacccagggatgacatgtccctacacccctcccctgccctagagcacactgtagcattacagtgggtgccccccttgccagacatgtggtgggacagggacccacttcacacacaggcaactgaggcagacagcagctcaggcacacttcttcttggtcttatttattattgtgtgttatttaaatgagtgtgtttgtcaccgttggggattggggaagactgtggctgctagcacttggagccaagggttcagagactcagggccccagcactaaagcagtggacaccaggagtccctggtaataagtactgtgtacagaattctgctacctcactggggtcctggggcctcggagcctcatccgaggcagggtcaggagaggggcagaacagccgctcctgtctgccagccagcagccagctctcagccaacgagtaatttattgtttttccttgtatttaaatattaaatatgttagcaaagagttaatatatagaagggtaccttgaacactgggggaggggacattgaacaagttgtttcattgactatcaaactgaagccagaaataaagttggtgacagat

SEQ ID NO: 2991 - protein, 116 aa, Homosapiens; identical to SEQ ID NO: 2989

SEQ ID NO: 2992 - DNA, 1439 bp, Homosapiens
ccctgcccaccgctcccggcagggcttttggtggccatgggggataaggggcgttgactcacccgggcggggctccgggagttgcacagaccaaggcaaatgccgtggcctctgctgtgggggtttctggaggacttctaggaaaacgagggaagagcaggaaaaggcgacatggctgcaggggccaagcccaggagccgccctccacagcactcattctgcagaagggaaatttgaggcccccagacggcaggggttgatcctgcagagactggccctgtgcctccctctacagccctcagggagctcattgaggagctggtcaacatcacccagaaccagaaggctccgctctgcaatggcagcatggtatggagcatcaacctgacagctggcatgtactgtgcagccctggaatccctgatcaacgtgtcaggctgcagtgccatcgagaagacccagaggatgctgagcggattctgcccgcacaaggtctcagctgggcagttttccagcttgcatgtccgagacaccaaaatcgaggtggcccagtttgtaaaggacctgctcttacatttaaagaaactttttcgcgagggacagttcaactgaaacttcgaaagcatcattatttgcagagacaggacctgactattgaagttgcagattcatttttctttctgatgtcaaaaatgtcttgggtaggcgggaaggagggttagggaggggtaaaattccttagcttagacctcagcctgtgctgcccgtcttcagcctagccgacctcagccttccccttgcccagggctcagcctggtgggcctcctctgtccagggccctgagctcggtggacccagggatgacatgtccctacacccctcccctgccctagagcacactgtagcattacagtgggtgccccccttgccagacatgtggtgggacagggacccacttcacacacaggcaactgaggcagacagcagctcaggcacacttcttcttggtcttatttattattgtgtgttatttaaatgagtgtgtttgtcaccgttggggattggggaagactgtggctgctagcacttggagccaagggttcagagactcagggccccagcactaaagcagtggacaccaggagtccctggtaataagtactgtgtacagaattctgctacctcactggggtcctggggcctcggagcctcatccgaggcagggtcaggagaggggcagaacagccgctcctgtctgccagccagcagccagctctcagccaacgagtaatttattgtttttccttgtatttaaatattaaatatgttagcaaagagttaatatatagaagggtaccttgaacactgggggaggggacattgaacaagttgtttcattgactatcaaactgaagccagaaataaagttggtgacagat

SEQ ID NO: 2993 - protein, 116 aa, Homosapiens; identical to SEQ ID NO: 2989

SEQ ID NO: 2994 - DNA, 1282 bp, Homosapiens; identical to SEQ ID NO: 398

SEQ ID NO: 2995 - protein, 146 aa, Homosapiens; identical to SEQ ID NO: 399

SEQ ID NO: 2996 - DNA, 873 bp, Homosapiens; identical to SEQ ID NO: 402

SEQ ID NO: 2997 - protein, 137 aa, Homosapiens; identical to SEQ ID NO: 403

SEQ ID NO: 2998 - DNA, 928 bp, Homosapiens
ttctatgcaaagcaaaaagccagcagcagccccaagctgataagattaatctaaagagcaaattatggtgtaatttcctatgctgaaactttgtagttaattttttaaaaaggtttcattttcctattggtctgatttcacaggaacattttacctgtttgtgaggcattttttctcctggaagagaggtgctgattggccccaagtgactgacaatctggtgtaacgaaaatttccaatgtaaactcattttccctcggtttcagcaattttaaatctatatatagagatatctttgtcagcattgcatcgttagcttctcctgataaactaattgcctcacattgtcactgcaaatcgacacctattaatgggtctcacctcccaactgcttccccctctgttcttcctgctagcatgtgccggcaactttgtccacggacacaagtgcgatatcaccttacaggagatcatcaaaactttgaacagcctcacagagcagaagactctgtgcaccgagttgaccgtaacagacatctttgctgcctccaagaacacaactgagaaggaaaccttctgcagggctgcgactgtgctccggcagttctacagccaccatgagaaggacactcgctgcctgggtgcgactgcacagcagttccacaggcacaagcagctgatccgattcctgaaacggctcgacaggaacctctggggcctggcgggcttgaattcctgtcctgtgaaggaagccaaccagagtacgttggaaaacttcttggaaaggctaaagacgatcatgagagagaaatattcaaagtgttcgagctgaatattttaatttatgagtttttgatagctttattttttaagtatttatatatttataactcatcataaaataaagtatatatagaatctaacagca

SEQ ID NO: 2999 - protein, 153 aa, Homosapiens [sequence omitted]

SEQ ID NO: 3000 - DNA, 483 bp, Homosapiens
gctttaaaagaaatttctcgagaatcttcacaagatgataggatggacaatgtcttcagcagcatcccgacaacacaggcagtaacagacgcgtttgtaagggagtggctcagtggtatcgcttgatgaaactggacaccatagctccagaactcaattgcagaagaggggcaaagggggaaaaggcagcacgatttattatcttgtacatgccagggcaggcctttaattttgtcttcatgttctacacacaggatggatttacctaaaatacaagtggcactgtataaacaaaattcactttggaaggctcagagtcatctctacaaaccaaaagaataaaaagtgaaactgaggcagaggcctgtggttgccagtgggaaaagccattccacgggtaggaagacctcatagacatcgaagacaaatgaaaatctgataaacaattccaggggaaaacgttataaaggtagacactcaaca

SEQ ID NO: 3001 - protein, 47 aa, Homosapiens
MKLDTIAPELNCRRGAKGEKAARFIILYMPGQAFNFVFMFYTQDGFT

SEQ ID NO: 3002 - DNA, 4366 bp, Homosapiens
tactcaccaacctttattaagtacattttagatactgggattagaagatgatgtcattagacatttctttggttttagcttctgtgggtttgatcaaggagtttattcagtattttaaatcttcccccaaatctggctttaactctttgccttaagagtgctttgtgtttgtttcttttacttagccctttgaggtggacctttctcacgtgtatcttgcctatactgaggagagtctgcgtcagtctttgatgaaactagaaagaccacgaacttcaaaggggaaagcaaggccaaagacagggagaagaaagcgttctgcaaagcctgaaactgtaattgactctttactgcagtaaatgttacagacttaaagtcacaataaaaattagtgatattctcatgcctggacaaaatctttaattaaaacagtgaagacttctctataatttcaattaatggaagttgtagatcaatgaataagactggaaataataatttgcttaagaacttttagtctacatatattaatataacattaaaattgtacaactggtgattgttcaaattgttgtactactactcttcaattgtactgtgcagggaagttgggggaacagttcatactatagagagttacagtttagatgtatgtgtaaatcgattagctatttatccaactactgtatatttaggtaactagaatttcaaaatagaaaaaaaaaaactgtgtcctgttttgcacatagaaagaagcagatcagattgtcctatgttgcgctgttatatatgaatgtttggactgtacatctaaagaatgattccgtcctaacacccacccagcctgtttgaacacattctaattgtctaacatttgttgcattttaagtatgagatgactgatcttatgaatgttttgtagaaaatgttataatttaacagtctttgcgagtatacatgttttttaacaagttgaaaatgtttcatctgaacctttcctaacttttttttgccagtttgagttcaaatcaaatacaccttaagttctggtttcatgttctcttgaaacattgaattgtacgtaaatataaaggatctactgttgcggaaaattaagaagctaaatactgctcagttatctttgcctgcgtgtatatttttaaaaattcactctgaagtgttatggatgcttttctttgagttctaaattttggtgggaattactttatgtctcccagttaagaagagtctccattttccagaaaatacagctaagcaagaaaaatatcttttaaatactttgcctttaaaacacttttttattttgtttttctattttaaaaataaaatattattttctgaatttcttctattgggtaatccagttagaccatattcctctacaaataaaaactatgttgatttcatagtaaagtaagttgtaatagagataattatttttttctgttgttagctgcttatgaaacttttattgtatttttttaaagttatgctactcctggccgggcatggtggctcacgcctgtaatcccagcactttgggaggccgaggcacgtggatcacttgatgtcaggagttcgagaccagcctggctaacatggtgaaaccctgtctccagtacaaatacaataattagctgggtgtggtggcgcacacctgtaatcccagctacttgggaggctgaggcaggagaatcacttgaacctgggaggcggaggttgcagtgagctgagatggcatcactgcactccagcctgggtgacagggtgacactccacctcaaaaaataaaaataaaataaaaataaagttatgctactcctaaaccacttaatatatgttttgtggttttcaaaattatgtaatcagccctgaaacacattggttgaaaatattttgagactttataagttagtatttattaaattaatattattttaataagttttgttaaatcctagtttaaatgacaaagctgtgtatagagtaggggtgagtgaaggtggagtactcttgaggtggcgataaaaatgtacccataaatttaaagtccattctgtaattggaatactgaatgtcctgtgtgtggtgaacattttctaggtgattagaattgcatttcactggctgcatttgtttgtggtatgtaagatagctagaaatttattacttaactctgtggggcattgtttagatactgtgaagagttgaggtaaatatgtgtcttgtaaaagctttgtgtgatcagaatattttggtaattataaaatgtttttgatgatacacatttaactctgttagtaattactctaaagaaatcttaattttaccagtttaaaaaaaacgcttctttttaaaagttcatgtttctaacctttaacaattcagttaataggaaaggagtaacttttaaatcaagctttaaaacatggaaatttaagccagtatgttagatattttttctatcccaccctaccatgataataaaaataaatctataaaaagtcaaaataaaaagccgatctataaaaagtcaattgagaagttctaaaagcaggctactatagcaggggtgtttgttttttgtttggagacggagtctggctctattacctaggctggagtgcagtgggacaatctcggctcactgtaacctctgtctcttcagcctcctgagttgctggaactacagctgtatgccatcatgctcggctaatttttgtatttttttgtagagatggggttttgccatgttgcccgggcctgtcttgaactcctagagcttaagtgatccacccgcctcaggctcccgaagtgctgggattacaggcatgattataggcctgagccaccacaccccgcctactatagcagttttttaaaaaaagcattatgttaaaactgattataccagatggacattaaatatccatctcagaaataccaaaatttgatacataagcctggcctgaatatcttttttttttttttgagacggagtcttactctgtcgcccaggctggagtgcagtggcgcgatctcggctcactgcaacctctgcctcctgggttcaagggattctcctgcctcagcctcttgagtagctgggattacaggtttgcgccaccacacccagctaatttttgtattttttttttagtagagaccgggtttcaccatgttggccaggctggtctcacctgactttgtgatccgcccgcctcagcctcccaaagtgctgggattacaggtgtgagccaccacgcctggcctcaagcctggtctgaatatctatatgcaaatatgggacactgacttcagagctattcatttagctccagtcatagcaattctgtagtttcctcacatttactgtgtctttgtccacaaatgaaatatgttgtaaggtcagtgttaatttcgtgagacgatatagatgaacacacttgctcattttttgaaataaatatgcagatttaaaatgagtggcacatatatataaataggttattgaatgggtattctcttttccctttaatttaaaaagtgatatttatttattaaaaggagcattggtagaattattggtttatagtatcttctttaataatccttacaattacatatactaataggatgttaaaattatcatcgtgtttcctatttgtgtttagattcttataaagcatgagatgagtaatcaagggaagggtcgcatctccatgtttgccccatgaatagaatccatttgacaagccatttcatttcctttctggagaaagggagttgttttttttttctttttacagcaaaaatttaaggttttattgggggagggggtggtgctacttcctctgtaacatgtttttaaaactatgattatggtttttggttgttttttgttttgtttgtttccttttagtctgtttttaatatccttccccttaactcttaaggaaagtcttctttcctacagggctgtgaattaaggaatgggtagcgtttacatttaagtacaccaatgtctgcccaatttcctaatgtatacatttgttttattttaaattattttttgttcttaaaaatactagaagaaaacatagatgtttctagtgcctttgaacttatactgtagtctgactaatttaatgaataacttcagtagcattactataatactgtatgctggccaaaattacaaattacagtttgttgcatcagtttcaaaagccatgctttcattgtattttatgtataaattgtatttgttcaagttgtatatattggtattgtatgtatacatgcagcatggttaaataagaataaaaatcttttacctaatgcc

SEQ ID NO: 3003 - protein, 35 aa, Homosapiens
MKLERPRTSKGKARPKTGRRKRSAKPETVIDSLLQ

SEQ ID NO: 3004 - DNA, 3321 bp, Homosapiens
gcgcaggcgtaattcaagggccgagagagcctgagactgggcttggggcggggcgagctcggaatgcggctgcgcactgggcgctctcgcccgagaagccgcagtctcgagagcgtcaacgaggtgtttcggtagtctctggccatcctttctgcgcacccggtgtcgctgggctgcaccccgggcggggacgtccgccgggcacgggagggggccaagatgccgatcaataaatcagagaagccagaaagctgcgataatgtgaaggttgttgttaggtgccggcccctcaatgagagagagaaatcaatgtgctacaaacaggctgtcagtgtggatgagatgaggggaactatcactgtacataagactgattcttccaatgaacctccaaagacatttacttttgatactgtttttggaccagagagtaaacaacttgatgtttataacttaactgcaagacctattattgattctgtacttgaaggctacaatgggactatttttgcatatggacaaaccggaacaggcaaaacttttaccatggaaggtgttcgagctattcctgaacttagaggaataattcccaattcatttgctcacatatttggtcatattgcaaaagcggagggtgatacaagatttttggttcgagtgtcttatttggaaatatataatgaagaagttcgtgaccttttgggcaaggatcagacacaaaggttagaggttaaagaaagacctgatgtgggagtttatatcaaagatttatcagcttatgtggtaaataatgctgatgatatggatagaattatgacgctaggccacaaaaatcgttctgttggtgcaactaatatgaacgaacatagttcccgttcccatgccatctttacaattactatagaatgcagtgaaaaaggcattgatggtaacatgcatgtcaggatggggaagctccatcttgtagatcttgctggttcagaaagacaggcaaaaactggagctactggacagcgcctaaaggaagctacaaaaatcaatctttcactttccacccttggtaatgtaatttctgccttggttgatggaaaaagcactcatgtgccttatcgtaactctaaactgactcgtcttcttcaggattccttaggaggaaattcaaaaaccatgatgtgtgcaaatattgggccagcagattacaattatgatgaaactatcagtacattacggtatgccaatcgtgctaagaatattaaaaataaagctagaattaatgaagatccaaaggatgctttgctgcgtcagttccagaaagaaatagaagaactgaaaaagaagcttgaagaaggagaagaaatatcaggctctgatatcagtgggtcagaggaagatgatgatgaagagggtgaggttggagaagatggagagaaaaggaaaaaaagaaggggaaaaaagaaagtctccccagacaagatgattgaaatgcaagcaaaaattgatgaggagagaaaagcacttgaaacaaagctcgacatggaagaagaagaaagaaacaaggctagagctgaattagagaaacgggaaaaagatcttcttaaagcccaacaagagcatcagtctttgctggaaaaattatctgccctggaaaagaaggtaattgttggtggggttgacttgttggccaaagctgaggaacaagagaaacttcttgaagaatctaacatggaactggaagaaaggaggaaaagagcagagcaacttcgcagagaacttgaggaaaaagagcaagaacgcttggatattgaagaaaaatataccagtttgcaagaggaagcacagggaaagaccaagaagttaaagaaagtttggactatgctgatggctgcaaagtcagagatggctgatctccaacaagaacatcagagggaaattgaaggcctactggagaacattcggcaacttagccgggagcttcgacttcagatgcttattattgataactttatacctcgggattatcaggaaatgattgaaaactatgtccattggaatgaagacataggagaatggcagctaaaatgtgttgcttatacaggaaataacatgaggaagcaaaccccagtacctgataaaaaggagaaagatccctttgaggtggacctttctcacgtgtatcttgcctatactgaggagagtctgcgtcagtctttgatgaaactagaaagaccacgaacttcaaaggggaaagcaaggccaaagacagggagaagaaagcgttctgcaaagcctgaaactgtaattgactctttactgcagtaaatgttacagacttaaagtcacaataaaaattagtgatattctcatgcctggacaaaatctttaattaaaacagtgaagacttctctataatttcaattaatggaagttgtagatcaatgaataagactggaaataataatttgcttaagaacttttagtctacatatattaatataacattaaaattgtacaactggtgattgttcaaattgttgtactactactcttcaattgtactgtgcagggaagttgggggaacagttcatactatagagagttacagtttagatgtatgtgtaaatcgattagctatttatccaactactgtatatttaggtaactagaatttcaaaatagaaaaaaaaaaactgtgtcctgttttgcacatagaaagaagcagatcagattgtcctatgttgcgctgttatatatgaatgtttggactgtacatctaaagaatgattccgtcctaacacccacccagcctgtttgaacacattctaattgtctaacatttgttgcattttaagtatgagatgactgatcttatgaatgttttgtagaaaatgttataatttaacagtctttgcgagtatacatgttttttaacaagttgaaaatgtttcatctgaacctttcctaacttttttttgccagtttgagttcaaatcaaatacaccttaagttctggtttcatgttctcttgaaacattgaattgtacgtaaatataaaggatctactgttgcggaaaattaagaagctaaatactgctcagttatctttgcctgcgtgtatatttttaaaaattcactctgaagtgttatggatgcttttctttgagttctaaattttggtgggaattactttatgtctcccagttaagaagagtctccattttccagaaaatacagctaagcaagaaaaatatcttttaaatactttgcctttaaaacacttttttattttgtttttctattttaaaaataaaatattattttctg

SEQ ID NO: 3005 - protein, 699 aa, Homosapiens; identical to SEQ ID NO: 405

SEQ ID NO: 3006 - DNA, 1508 bp, Homosapiens
gcgcaggcgtaattcaagggccgagagagcctgagactgggcttggggcggggcgagctcggaatgcggctgcgcactgggcgctctcgcccgagaagccgcagtctcgagagcgtcaacgaggtgtttcggtagtctctggccatcctttctgcgcacccggtgtcgctgggctgcaccccgggcggggacgtccgccgggcacgggagggggccaagatgccgatcaataaatcagagaagccagaaagctgcgataatgtgaaggttgttgttaggtgccggcccctcaatgagagagagaaatcaatgtgctacaaacaggctgtcagtgtggatgagatgaggggaactatcactgtacataagactgattcttccaatgaacctccaaagacatttacttttgatactgtttttggaccagagagtaaacaacttgatgtttataacttaactgcaagacctattattgattctgtacttgaaggctacaatgggactatttttgcatatggacaaaccggaacaggcaaaacttttaccatggaaggtgttcgagctattcctgaacttagaggaataattcccaattcatttgctcacatatttggtcatattgcaaaagcggagggtgatacaagatttttggttcgagtgtcttatttggaaatatataatgaagaagttcgtgaccttttgggcaaggatcagacacaaaggttagaggttaaagaaagacctgatgtgggagtttatatcaaagatttatcagcttatgtggtaaataatgctgatgatatggatagaattatgacgctaggccacaaaaatcgttctgttggtgcaactaatatgaacgaacatagttcccgttcccatgccatctttacaattactatagaatgcagtgaaaaaggcattgatggtaacatgcatgtcaggatggggaagctccatcttgtagatcttgctggttcagaaagacaggcaaaaactggagctactggacagcgcctaaaggaagctacaaaaatcaatctttcactttccacccttggtaatgtaatttctgccttggttgatggaaaaagcactcatgtgccttatcgtaactctaaactgactcgtcttcttcaggattccttaggaggaaattcaaaaaccatgatgtgtgcaaatattgggccagcagattacaattatgatgaaactatcagtacattacggtatgccaatcgtgctaagaatattaaaaataaagctagaattaatgaagatccaaaggatgctttgctgcgtcagttccagaaagaaatagaagaactgaaaaagaagcttgaagaaggagaagaaatatcaggctctgatatcagtgggtcagaggaagatgatgatgaagagggtgaggttggagaagatggagagaaaaggaaaaaaagaaggggaaaaaagaaagtctccccagacaagatgattgaaatgcaagcaaaaattgatgaggagag

SEQ ID NO: 3007 - protein, 428 aa, Homosapiens
MPINKSEKPESCDNVKVVVRCRPLNEREKSMCYKQAVSVDEMRGTITVHKTDSSNEPPKTFTFDTVFGPESKQLDVYNLTARPIIDSVLEGYNGTIFAYGQTGTGKTFTMEGVRAIPELRGIIPNSFAHIFGHIAKAEGDTRFLVRVSYLEIYNEEVRDLLGKDQTQRLEVKERPDVGVYIKDLSAYVVNNADDMDRIMTLGHKNRSVGATNMNEHSSRSHAIFTITIECSEKGIDGNMHVRMGKLHLVDLAGSERQAKTGATGQRLKEATKINLSLSTLGNVISALVDGKSTHVPYRNSKLTRLLQDSLGGNSKTMMCANIGPADYNYDETISTLRYANRAKNIKNKARINEDPKDALLRQFQKEIEELKKKLEEGEEISGSDISGSEEDDDEEGEVGEDGEKRKKRRGKKKVSPDKMIEMQAKIDE

SEQ ID NO: 3008 - DNA, 1254 bp, Homosapiens
tgcctggtcagggatgcgacgtggagggaaggattcctctgaggcagcagctccaacacatggggccagctcaggaccaccagggcatggaactggagaccatggtttttaatgttagaacagaaaacgccatacttttcctatatcaatgatcaaaagtgcaaacaatttaaatttccatcagggaacatcaaatgttgcccaacccttttcattcctatccatggctccgtaaggggcttgaggcttaatgcccatcctgtggccaagctgagcttccactccgggaccaaaaaaaaaaaaaagtctgctttgtgacatcatcgttatgagcggaaagtacctagatgacaatgtttccattctgaaaaatagaaacatactattcaagaccaaggtagcagaaaagttacttgtatctgcttatcataagacgaaactctgcaacttggcaacggtggccagttttcgtaatgaaacagtctttagtaatttaatcttcatgcttcataacaaaccaaaaccccatgagatttccacattgcataattttgccttactaacagaatcatatccttaaggatgaccatcattcccccaactaaaacaaatacaaactaatgtatgatatttttttaagtgccagatcaatatggtctaaagcttcaataaggattgtgtgtaggtgaataaagacagctaagtgaatgtgtgtaaagtgtagcaaaagcagacagatatttatgtacagtattcatagaatggaaagttaaatatttttgcagtgtgtatttaaaagagaaactcaccataatagtgccgtctaaaaatctttgtaaagttaatttaatgtcctttagaagtgggagtctggtggaactgtgttggatttaagataccttttcactcttccgtatgtcatgagccttgtgcgtcacctcactgtggtgcatgtgcaagggcgtgtgcacgcctgtgctttgccatcccatgttgtaaacagctgttccaaaggcacaaacgagtttagggtagactctgtaaacacctccttactcactatagtcaagaagtccagcggcgtcccaatatagaggtcccagtgcagtctgtccagaatagccagctccatcctcagcagctcattcggggaatagtcagagccatagtgctttgtgaagtcttttacttgtggaataaactcctcttcttcattaacttttgcagcgagcctcaaggaagtaattgtggcgc

SEQ ID NO: 3009 - protein, 83 aa, Homosapiens [sequence omitted]

SEQ ID NO: 3010 - DNA, 3465 bp, Homosapiens
atggaccaaaacctgaacattcttcctatggctcctgaatctgaaaggaagcagatgaatcccagcctaaactgcgcatcctgctcgttggttgcacaaggagccgaaggctggtcccttgcccgggaaggccgcctggccggacgcgcgggtcccgccggggttcccgccttagctccggccggagcatcaggtggggcccaagacacccgcagactaggctgccgcggcctctcccggatccgacgggtctcccgcagcttgtccacactctggttggtggtcccagcacatttgcaggctccagcgggtggagacggcttggtgggggagatctctagggcgcacgccgtgccccacttcccccttacgggaaaggctttccagcgcgcggacccaggagactctcacctaggctcggccccaggctccaggggacacgcagaggcccgccgggcaccagccccgagccccccgacactgccgtcccggtcccccaacgcgcggactacaagtcccagcagtccccgcagctggcacctcccgcctcgccgcggagacccccggccgtccaagcggcggggctccggctgcgctcgtggccgggccgggcggggaggccggtcccgcgggcgggggcaggggcggctccgcggcttctcccgccgccgccgccaaggggagtttccaggaagtggccatattggatccattcagccgcagccgcccgggcggagcgcgtcccgcagccggctggtccctgtcgctgcccctgcgctcgtcccagcccacccgcccggtgcggagctcgccatggcggccaccgacctggagcgcttctcgaatgcagagccagagccccggagcctctccctgggcggccatgtgggtttcgacagcctccccgaccagctggtcagcaagtcggtcactcagggcttcagcttcaacatcctctgtgtgggggagaccggcattggcaaatccacactgatgaacacactcttcaacacgaccttcgagactgaggaagccagtcaccatgaggcatgcgtgcgcctgcggccccagacctatgacctccaggagagcaacgtgcagctcaagctgaccattgtggatgccgtgggctttggggatcagatcaataaggatgagagttacaggcccatagttgactacatcgatgcgcagtttgaaaattatctgcaggaggagctgaagatccgccgctcgctcttcgactaccatgacacaaggatccacgtttgcctctacttcatcacgcccacagggcactccctgaagtctctagatctagtgaccatgaagaaactagacagcaaggtgaacattattcccatcatcgccaaggctgacaccatctccaagagcgagctccacaagttcaagatcaagatcatgggcgagttggtcagcaatggggtccagatctaccagttccccacggatgatgaggctgttgcagagattaacgcagtcatgaatgcacatctgccctttgccgtggtgggcagcaccgaggaggtgaaggtggggaacaagctggtccgagcacggcagtacccctggggagtggtgcaggtggagaatgagaatcactgcgacttcgtgaagctgcgggagatgttgatccgggtgaacatggaagacctccgcgagcagacccacagccggcactacgagctctaccggcgctgcaagttggaggagatgggctttcaggacagcgatggtgacagccagcccttcagcctacaagagacatacgaggccaagaggaaggagttcctaagtgagctgcagaggaaggaggaagagatgaggcagatgtttgtcaacaaagtgaaggagacagagctggagctgaaggagaaggaaagggagctccatgagaagtttgagcacctgaagcgggtccaccaggaggagaagcgcaaggtggaggaaaagcgccgggaactggaggaggagaccaacgccttcaatcgccggaaggctgcggtggaggccctgcagtcgcaggccttgcacgccacctcgcagcagcccctgaggaaggacaaggacaagaagaacagatcagatataggagcacaccagccgggcatgagcctctccagctctaaggtgatgatgaccaaggccagtgtggagcccttgaactgcagcagctggtggcccgccatacagtgctgcagctgcctggtcagggatgcgacgtggagggaaggattcctctgaggcagcagctccaacacatggggccagctcaggaccaccagggcatggaactggagaccatggtttttaatgttagaacagaaaacgccatacttttcctatatcaatgatcaaaagtgcaaacaatttaaatttccatcagggaacatcaaatgttgcccaacccttttcattcctatccatggctccgtaaggggcttgaggcttaatgcccatcctgtggccaagctgagcttccactccgggaccaaaaaaaaaaaaaagtctgctttgtgacatcatcgttatgagcggaaagtacctagatgacaatgtttccattctgaaaaatagaaacatactattcaagaccaaggtagcagaaaagttacttgtatctgcttatcataagacgaaactctgcaacttggcaacggtggccagttttcgtaatgaaacagtctttagtaatttaatcttcatgcttcataacaaaccaaaaccccatgagatttccacattgcataattttgccttactaacagaatcatatccttaaggatgaccatcattcccccaactaaaacaaatacaaactaatgtatgatatttttttaagtgccagatcaatatggtctaaagcttcaataaggattgtgtgtaggtgaataaagacagctaagtgaatgtgtgtaaagtgtagcaaaagcagacagatatttatgtacagtattcatagaatggaaagttaaatatttttgcagtgtgtatttaaaagagaaactcaccataatagtgccgtctaaaaatctttgtaaagttaatttaatgtcctttagaagtgggagtctggtggaactgtgttggatttaagataccttttcactcttccgtatgtcatgagccttgtgcgtcacctcactgtggtgcatgtgcaagggcgtgtgcacgcctgtgctttgccatcccatgttgtaaacagctgttccaaaggcacaaacgagtttagggtagactctgtaaacacctccttactcactatagtcaagaagtccagcggcgtcccaatatagaggtcccagtgcagtctgtccagaatagccagctccatcctcagcagctcattcggggaatagtcagagccatagtgctttgtgaagtcttttacttgtggaataaactgtaaaaagaaaataaagaggccaaagccctacatcatgt

SEQ ID NO: 3011 - protein, 754 aa, Homosapiens
MDQNLNILPMAPESERKQMNPSLNCASCSLVAQGAEGWSLAREGRLAGRAGPAGVPALAPAGASGGAQDTRRLGCRGLSRIRRVSRSLSTLWLVVPAHLQAPAGGDGLVGEISRAHAVPHFPLTGKAFQRADPGDSHLGSAPGSRGHAEARRAPAPSPPTLPSRSPNARTTSPSSPRSWHLPPRRGDPRPSKRRGSGCARGRAGRGGRSRGRGQGRLRGFSRRRRQGEFPGSGHIGSIQPQPPGRSASRSRLVPVAAPALVPAHPPGAELAMAATDLERFSNAEPEPRSLSLGGHVGFDSLPDQLVSKSVTQGFSFNILCVGETGIGKSTLMNTLFNTTFETEEASHHEACVRLRPQTYDLQESNVQLKLTIVDAVGFGDQINKDESYRPIVDYIDAQFENYLQEELKIRRSLFDYHDTRIHVCLYFITPTGHSLKSLDLVTMKKLDSKVNIIPIIAKADTISKSELHKFKIKIMGELVSNGVQIYQFPTDDEAVAEINAVMNAHLPFAVVGSTEEVKVGNKLVRARQYPWGVVQVENENHCDFVKLREMLIRVNMEDLREQTHSRHYELYRRCKLEEMGFQDSDGDSQPFSLQETYEAKRKEFLSELQRKEEEMRQMFVNKVKETELELKEKERELHEKFEHLKRVHQEEKRKVEEKRRELEEETNAFNRRKAAVEALQSQALHATSQQPLRKDKDKKNRSDIGAHQPGMSLSSSKVMMTKASVEPLNCSSWWPAIQCCSCLVRDATWREGFL

SEQ ID NO: 3012 - DNA, 508 bp, Homosapiens
tctggacagactgcactgggacctctatattgggacgccgctggacttcttgactataaatggaaacattgtcatctaggtactttccgctcataacgatgatgtcacaaagcagacttttttttttttttggtcccggagtggaagctcagcttggccacaggatgggcattaagcctcaagccccttacggagccatggataggaatgaaaagggttgggcaacatttgatgttccctgatggaaatttaaattgtttgcacttttgatcattgatataggaaaagtatggcgttttctgttctaacattaaaaaccatggtctccagttccatgccctggtggtcctgagctggccccatgtgttggagctgctgcctcagaggaatccttccctccacgtcgcatccctgaccaggcagctgcagcactgtatggcgggccaccagctgctgcagttcaagggctccacactggccttggtcatcatcaccttagagctggaga

SEQ ID NO: 3013 - protein, 60 aa, Homosapiens [sequence omitted]

SEQ ID NO: 3014 - DNA, 4097 bp, Homosapiens
gacccccggccgtccaagcggcggggctccggctgcgctcgtggccgggccgggcggggaggccggtcccgcgggcgggggcaggggcggctccgcggcttctcccgccgccgccgccaaggggagtttccaggaagtggccatattggatccattcagccgcagccgcccgggcggagcgcgtcccgcagccggctggtccctgtcgctgcccctgcgctcgtcccagcccacccgcccggtgcggagctcgccatggcggccaccgacctggagcgcttctcgaatgcagagccagagccccggagcctctccctgggcggccatgtgggtttcgacagcctccccgaccagctggtcagcaagtcggtcactcagggcttcagcttcaacatcctctgtgtgggggagaccggcattggcaaatccacactgatgaacacactcttcaacacgaccttcgagactgaggaagccagtcaccatgaggcatgcgtgcgcctgcggccccagacctatgacctccaggagagcaacgtgcagctcaagctgaccattgtggatgccgtgggctttggggatcagatcaataaggatgagagttacaggcccatagttgactacatcgatgcgcagtttgaaaattatctgcaggaggagctgaagatccgccgctcgctcttcgactaccatgacacaaggatccacgtttgcctctacttcatcacgcccacagggcactccctgaagtctctagatctagtgaccatgaagaaactagacagcaaggtgaacattattcccatcatcgccaaggctgacaccatctccaagagcgagctccacaagttcaagatcaagatcatgggcgagttggtcagcaatggggtccagatctaccagttccccacggatgatgaggctgttgcagagattaacgcagtcatgaatgcacatctgccctttgccgtggtgggcagcaccgaggaggtgaaggtggggaacaagctggtccgagcacggcagtacccctggggagtggtgcaggtggagaatgagaatcactgcgacttcgtgaagctgcgggagatgttgatccgggtgaacatggaagacctccgcgagcagacccacagccggcactacgagctctaccggcgctgcaagttggaggagatgggctttcaggacagcgatggtgacagccagcccttcagcctacaagagacatacgaggccaagaggaaggagttcctaagtgagctgcagaggaaggaggaagagatgaggcagatgtttgtcaacaaagtgaaggagacagagctggagctgaaggagaaggaaagggagctccatgagaagtttgagcacctgaagcgggtccaccaggaggagaagcgcaaggtggaggaaaagcgccgggaactggaggaggagaccaacgccttcaatcgccggaaggctgcggtggaggccctgcagtcgcaggccttgcacgccacctcgcagcagcccctgaggaaggacaaggacaagaagaaagccagtggctggtcttccatttacagtgtcactattccctgacggagctgttatgtgccgctctagcgaaggccccagccgggatgctaggcctaattgttcagcgtggagatggcaactcacgtggtgccctaggtgcagctgcgtggtctggtatacatgctgcaaaattcacccagttcccctcattttaatttttctaacctacagcttaattttaataactttaaaacacttctaaatatttattttggcaccagcgtcaagacaaataatatcctctcccattattttcataagtaacacagattccctgatttttaaaaactaaaaatacagctaaacctttcttatgtataaagtatgcctatcatatacagggagaggtgggtaataaacttcctgtaatgacagtgtttggcatttctttatggatggaattggaacatgaacaagaccatgtccagcgtttttactgtgaatgtaaatggaacagcagcccaaagctgttgtctgtgccccagaggtgctacctgtagacagggaccaactccatgtgtgtgtgttaagtgtttgactccaattaagactcccaagcaaatcctgcatattccaaatgtaaagagtactcagtgggaaaaaggttgttacctcaaagtcattgcttctttcctggctgggtcacagggtgaagagatgaaggtgtctgatgtatatagacaattagggaaaaatgagcggcaaaggagctttccccttcagctgcactctaaaggggaacattttaaggaagtactagcagctttgactcttctatgctcctgttggtttacaagccaccaagaatgtcagtgttgagaatacggcctggtaaaatgggagatgtaaaatgactaaatgaaaggaagggtagttttaatgttgaagcaccgtgctgggcactggagctacccagaggaatgcacaacgctcccctcaaggagctcacagtctagcctactccctggctggaagcctcaggaagacgtgctaatttattgtggaattggtagtttgcttttcatgcccctgtcttccttctcatgaccatttccccctttctgtctggcttgcattattgatttccaggaccaagtcctggcttcctcctgccttcctgagatgatgttctgctcagggagaagtggaggggtgagctgtgtgtgtccaccgaggcacggccaggaagaggcagcctttacctgtgaggggctccatgctccagcagcagagcaggttctagtgacaattcaactttttatgctatgaccaggggtggatctaaattttatggggctgaaagcttgaattatttagaaagacttctttaagaaaaacaatgttaatataaaattaggtacagggtcttggaaggggccctgaagattaagcttccttagcgtcacaataagtccgtatctggttgcaattgaaaactgatgcttcagtgagggtatctaaaaaggtaaactggcatatccagggcaaatgtgggctgccaatggctcatctctagggtaattttatgtctgaaagtgtatgcagttgggtcagagcatgacctttaagatagcctctctcagctaacatatttatgaagatgaggcctggtgacccagcaggttcattggatacataagaaatgagaattcctggttcatgggccaacctaggactctggagtatgcagacttggccattcgtccattgtggcctgcgggtcgcaccccaggcatactgaaaggccatactcgtggctggctgcctgcgggcctaagccttcccaggatcttcaggacacttgacagacttgtgttttctggtctgagctgcctccacaggtccctccagcaagcctcactgcacctctcccctgctgtttgtgtttggaattttgtcttctttagctgagaccaaattaaaccttggtgcataaagtgagcttaaaacttgccactgtttagtaagttagcccccatagaatgtgaccctgtctgcagagtctcatttacccctctttttctcattgtcatttgttggctttattagggctgtcttacaggatcatgttggcatttactatcatgtctttatcataaaccatgtttgtttgaggtagaagaatcaccatataattcgttgcccaaattgggactattgagagagaaaggggatgctattaattacaccagatcaaaaggcataaaccagacctgtcccaggccgatgtggaaatatgttctttctagttgtgggtaccctgatctaggtggtttgtaattgtgcattactgactgcatatgtttgtgtatgtgtaaatgtgggctccctgttaagtggggctcatggatacgaggcctgaggaagtgtggcttgctagtctgttacgttaacatgcttttctaaaattgcttcacgtgttaattcatttactcctgcattcattgactgtttttgttcttttccattcactttgtacttatttttttcattaaattttgcatttattttgagtt

SEQ ID NO: 3015 - protein, 442 aa, Homosapiens
MAATDLERFSNAEPEPRSLSLGGHVGFDSLPDQLVSKSVTQGFSFNILCVGETGIGKSTLMNTLFNTTFETEEASHHEACVRLRPQTYDLQESNVQLKLTIVDAVGFGDQINKDESYRPIVDYIDAQFENYLQEELKIRRSLFDYHDTRIHVCLYFITPTGHSLKSLDLVTMKKLDSKVNIIPIIAKADTISKSELHKFKIKIMGELVSNGVQIYQFPTDDEAVAEINAVMNAHLPFAVVGSTEEVKVGNKLVRARQYPWGVVQVENENHCDFVKLREMLIRVNMEDLREQTHSRHYELYRRCKLEEMGFQDSDGDSQPFSLQETYEAKRKEFLSELQRKEEEMRQMFVNKVKETELELKEKERELHEKFEHLKRVHQEEKRKVEEKRRELEEETNAFNRRKAAVEALQSQALHATSQQPLRKDKDKKKASGWSSIYSVTIP

SEQ ID NO: 3016 - DNA, 4365 bp, Homosapiens
gacccccggccgtccaagcggcggggctccggctgcgctcgtggccgggccgggcggggaggccggtcccgcgggcgggggcaggggcggctccgcggcttctcccgccgccgccgccaaggggagtttccaggaagtggccatattggatccattcagccgcagccgcccgggcggagcgcgtcccgcagccggctggtccctgtcgctgcccctgcgctcgtcccagcccacccgcccggtgcggagctcgccatggcggccaccgacctggagcgcttctcgaatgcagagccagagccccggagcctctccctgggcggccatgtgggtttcgacagcctccccgaccagctggtcagcaagtcggtcactcagggcttcagcttcaacatcctctgtgtgggggagaccggcattggcaaatccacactgatgaacacactcttcaacacgaccttcgagactgaggaagccagtcaccatgaggcatgcgtgcgcctgcggccccagacctatgacctccaggagagcaacgtgcagctcaagctgaccattgtggatgccgtgggctttggggatcagatcaataaggatgagagttacaggcccatagttgactacatcgatgcgcagtttgaaaattatctgcaggaggagctgaagatccgccgctcgctcttcgactaccatgacacaaggatccacgtttgcctctacttcatcacgcccacagggcactccctgaagtctctagatctagtgaccatgaagaaactagacagcaaggtgaacattattcccatcatcgccaaggctgacaccatctccaagagcgagctccacaagttcaagatcaagatcatgggcgagttggtcagcaatggggtccagatctaccagttccccacggatgatgaggctgttgcagagattaacgcagtcatgaatgcacatctgccctttgccgtggtgggcagcaccgaggaggtgaaggtggggaacaagctggtccgagcacggcagtacccctggggagtggtgcaggtggagaatgagaatcactgcgacttcgtgaagctgcgggagatgttgatccgggtgaacatggaagacctccgcgagcagacccacagccggcactacgagctctaccggcgctgcaagttggaggagatgggctttcaggacagcgatggtgacagccagcccttcagcctacaagagacatacgaggccaagaggaaggagttcctaagtgagctgcagaggaaggaggaagagatgaggcagatgtttgtcaacaaagtgaaggagacagagctggagctgaaggagaaggaaagggagctccatgagaagtttgagcacctgaagcgggtccaccaggaggagaagcgcaaggtggaggaaaagcgccgggaactggaggaggagaccaacgccttcaatcgccggaaggctgcggtggaggccctgcagtcgcaggccttgcacgccacctcgcagcagcccctgaggaaggacaaggacaagaagaattaacgcacgcacagacttacatgtcaagagtggactttagactttcatgtgttaagttgcttgagttacaccttgtgacccttctcccataacatggtgtgaggacggactgggagccggtacagactccagtgtttacagccttgctttcctcccaccgaccctggccccaggctgccccgggcctggcgggccacccctctctatgcaaacacgtaaaagccatgaatgctggaatccaaaactgacgaggtttatttttttcagagccagtggctggtcttccatttacagtgtcactattccctgacggagctgttatgtgccgctctagcgaaggccccagccgggatgctaggcctaattgttcagcgtggagatggcaactcacgtggtgccctaggtgcagctgcgtggtctggtatacatgctgcaaaattcacccagttcccctcattttaatttttctaacctacagcttaattttaataactttaaaacacttctaaatatttattttggcaccagcgtcaagacaaataatatcctctcccattattttcataagtaacacagattccctgatttttaaaaactaaaaatacagctaaacctttcttatgtataaagtatgcctatcatatacagggagaggtgggtaataaacttcctgtaatgacagtgtttggcatttctttatggatggaattggaacatgaacaagaccatgtccagcgtttttactgtgaatgtaaatggaacagcagcccaaagctgttgtctgtgccccagaggtgctacctgtagacagggaccaactccatgtgtgtgtgttaagtgtttgactccaattaagactcccaagcaaatcctgcatattccaaatgtaaagagtactcagtgggaaaaaggttgttacctcaaagtcattgcttctttcctggctgggtcacagggtgaagagatgaaggtgtctgatgtatatagacaattagggaaaaatgagcggcaaaggagctttccccttcagctgcactctaaaggggaacattttaaggaagtactagcagctttgactcttctatgctcctgttggtttacaagccaccaagaatgtcagtgttgagaatacggcctggtaaaatgggagatgtaaaatgactaaatgaaaggaagggtagttttaatgttgaagcaccgtgctgggcactggagctacccagaggaatgcacaacgctcccctcaaggagctcacagtctagcctactccctggctggaagcctcaggaagacgtgctaatttattgtggaattggtagtttgcttttcatgcccctgtcttccttctcatgaccatttccccctttctgtctggcttgcattattgatttccaggaccaagtcctggcttcctcctgccttcctgagatgatgttctgctcagggagaagtggaggggtgagctgtgtgtgtccaccgaggcacggccaggaagaggcagcctttacctgtgaggggctccatgctccagcagcagagcaggttctagtgacaattcaactttttatgctatgaccaggggtggatctaaattttatggggctgaaagcttgaattatttagaaagacttctttaagaaaaacaatgttaatataaaattaggtacagggtcttggaaggggccctgaagattaagcttccttagcgtcacaataagtccgtatctggttgcaattgaaaactgatgcttcagtgagggtatctaaaaaggtaaactggcatatccagggcaaatgtgggctgccaatggctcatctctagggtaattttatgtctgaaagtgtatgcagttgggtcagagcatgacctttaagatagcctctctcagctaacatatttatgaagatgaggcctggtgacccagcaggttcattggatacataagaaatgagaattcctggttcatgggccaacctaggactctggagtatgcagacttggccattcgtccattgtggcctgcgggtcgcaccccaggcatactgaaaggccatactcgtggctggctgcctgcgggcctaagccttcccaggatcttcaggacacttgacagacttgtgttttctggtctgagctgcctccacaggtccctccagcaagcctcactgcacctctcccctgctgtttgtgtttggaattttgtcttctttagctgagaccaaattaaaccttggtgcataaagtgagcttaaaacttgccactgtttagtaagttagcccccatagaatgtgaccctgtctgcagagtctcatttacccctctttttctcattgtcatttgttggctttattagggctgtcttacaggatcatgttggcatttactatcatgtctttatcataaaccatgtttgtttgaggtagaagaatcaccatataattcgttgcccaaattgggactattgagagagaaaggggatgctattaattacaccagatcaaaaggcataaaccagacctgtcccaggccgatgtggaaatatgttctttctagttgtgggtaccctgatctaggtggtttgtaattgtgcattactgactgcatatgtttgtgtatgtgtaaatgtgggctccctgttaagtggggctcatggatacgaggcctgaggaagtgtggcttgctagtctgttacgttaacatgcttttctaaaattgcttcacgtgttaattcatttactcctgcattcattgactgtttttgttcttttccattcactttgtacttatttttttcattaaattttgcatttattttgagtt

SEQ ID NO: 3017 - protein, 429 aa, Homosapiens
MAATDLERFSNAEPEPRSLSLGGHVGFDSLPDQLVSKSVTQGFSFNILCVGETGIGKSTLMNTLFNTTFETEEASHHEACVRLRPQTYDLQESNVQLKLTIVDAVGFGDQINKDESYRPIVDYIDAQFENYLQEELKIRRSLFDYHDTRIHVCLYFITPTGHSLKSLDLVTMKKLDSKVNIIPIIAKADTISKSELHKFKIKIMGELVSNGVQIYQFPTDDEAVAEINAVMNAHLPFAVVGSTEEVKVGNKLVRARQYPWGVVQVENENHCDFVKLREMLIRVNMEDLREQTHSRHYELYRRCKLEEMGFQDSDGDSQPFSLQETYEAKRKEFLSELQRKEEEMRQMFVNKVKETELELKEKERELHEKFEHLKRVHQEEKRKVEEKRRELEEETNAFNRRKAAVEALQSQALHATSQQPLRKDKDKKN

SEQ ID NO: 3018 - DNA, 4231 bp, Homosapiens
gggaaggccgcctggccggacgcgcgggtcccgccggggttcccgccttagctccggccggagcatcaggtggggcccaagacacccgcagactaggctgccgcggcctctcccggatccgacgggtctcccgcagcttgtccacactctgaatgcagagccagagccccggagcctctccctgggcggccatgtgggtttcgacagcctccccgaccagctggtcagcaagtcggtcactcagggcttcagcttcaacatcctctgtgtgggggagaccggcattggcaaatccacactgatgaacacactcttcaacacgaccttcgagactgaggaagccagtcaccatgaggcatgcgtgcgcctgcggccccagacctatgacctccaggagagcaacgtgcagctcaagctgaccattgtggatgccgtgggctttggggatcagatcaataaggatgagagttacaggcccatagttgactacatcgatgcgcagtttgaaaattatctgcaggaggagctgaagatccgccgctcgctcttcgactaccatgacacaaggatccacgtttgcctctacttcatcacgcccacagggcactccctgaagtctctagatctagtgaccatgaagaaactagacagcaaggtgaacattattcccatcatcgccaaggctgacaccatctccaagagcgagctccacaagttcaagatcaagatcatgggcgagttggtcagcaatggggtccagatctaccagttccccacggatgatgaggctgttgcagagattaacgcagtcatgaatgcacatctgccctttgccgtggtgggcagcaccgaggaggtgaaggtggggaacaagctggtccgagcacggcagtacccctggggagtggtgcaggtggagaatgagaatcactgcgacttcgtgaagctgcgggagatgttgatccgggtgaacatggaagacctccgcgagcagacccacagccggcactacgagctctaccggcgctgcaagttggaggagatgggctttcaggacagcgatggtgacagccagcccttcagcctacaagagacatacgaggccaagaggaaggagttcctaagtgagctgcagaggaaggaggaagagatgaggcagatgtttgtcaacaaagtgaaggagacagagctggagctgaaggagaaggaaagggagctccatgagaagtttgagcacctgaagcgggtccaccaggaggagaagcgcaaggtggaggaaaagcgccgggaactggaggaggagaccaacgccttcaatcgccggaaggctgcggtggaggccctgcagtcgcaggccttgcacgccacctcgcagcagcccctgaggaaggacaaggacaagaagaattaacgcacgcacagacttacatgtcaagagtggactttagactttcatgtgttaagttgcttgagttacaccttgtgacccttctcccataacatggtgtgaggacggactgggagccggtacagactccagtgtttacagccttgctttcctcccaccgaccctggccccaggctgccccgggcctggcgggccacccctctctatgcaaacacgtaaaagccatgaatgctggaatccaaaactgacgaggtttatttttttcagagccagtggctggtcttccatttacagtgtcactattccctgacggagctgttatgtgccgctctagcgaaggccccagccgggatgctaggcctaattgttcagcgtggagatggcaactcacgtggtgccctaggtgcagctgcgtggtctggtatacatgctgcaaaattcacccagttcccctcattttaatttttctaacctacagcttaattttaataactttaaaacacttctaaatatttattttggcaccagcgtcaagacaaataatatcctctcccattattttcataagtaacacagattccctgatttttaaaaactaaaaatacagctaaacctttcttatgtataaagtatgcctatcatatacagggagaggtgggtaataaacttcctgtaatgacagtgtttggcatttctttatggatggaattggaacatgaacaagaccatgtccagcgtttttactgtgaatgtaaatggaacagcagcccaaagctgttgtctgtgccccagaggtgctacctgtagacagggaccaactccatgtgtgtgtgttaagtgtttgactccaattaagactcccaagcaaatcctgcatattccaaatgtaaagagtactcagtgggaaaaaggttgttacctcaaagtcattgcttctttcctggctgggtcacagggtgaagagatgaaggtgtctgatgtatatagacaattagggaaaaatgagcggcaaaggagctttccccttcagctgcactctaaaggggaacattttaaggaagtactagcagctttgactcttctatgctcctgttggtttacaagccaccaagaatgtcagtgttgagaatacggcctggtaaaatgggagatgtaaaatgactaaatgaaaggaagggtagttttaatgttgaagcaccgtgctgggcactggagctacccagaggaatgcacaacgctcccctcaaggagctcacagtctagcctactccctggctggaagcctcaggaagacgtgctaatttattgtggaattggtagtttgcttttcatgcccctgtcttccttctcatgaccatttccccctttctgtctggcttgcattattgatttccaggaccaagtcctggcttcctcctgccttcctgagatgatgttctgctcagggagaagtggaggggtgagctgtgtgtgtccaccgaggcacggccaggaagaggcagcctttacctgtgaggggctccatgctccagcagcagagcaggttctagtgacaattcaactttttatgctatgaccaggggtggatctaaattttatggggctgaaagcttgaattatttagaaagacttctttaagaaaaacaatgttaatataaaattaggtacagggtcttggaaggggccctgaagattaagcttccttagcgtcacaataagtccgtatctggttgcaattgaaaactgatgcttcagtgagggtatctaaaaaggtaaactggcatatccagggcaaatgtgggctgccaatggctcatctctagggtaattttatgtctgaaagtgtatgcagttgggtcagagcatgacctttaagatagcctctctcagctaacatatttatgaagatgaggcctggtgacccagcaggttcattggatacataagaaatgagaattcctggttcatgggccaacctaggactctggagtatgcagacttggccattcgtccattgtggcctgcgggtcgcaccccaggcatactgaaaggccatactcgtggctggctgcctgcgggcctaagccttcccaggatcttcaggacacttgacagacttgtgttttctggtctgagctgcctccacaggtccctccagcaagcctcactgcacctctcccctgctgtttgtgtttggaattttgtcttctttagctgagaccaaattaaaccttggtgcataaagtgagcttaaaacttgccactgtttagtaagttagcccccatagaatgtgaccctgtctgcagagtctcatttacccctctttttctcattgtcatttgttggctttattagggctgtcttacaggatcatgttggcatttactatcatgtctttatcataaaccatgtttgtttgaggtagaagaatcaccatataattcgttgcccaaattgggactattgagagagaaaggggatgctattaattacaccagatcaaaaggcataaaccagacctgtcccaggccgatgtggaaatatgttctttctagttgtgggtaccctgatctaggtggtttgtaattgtgcattactgactgcatatgtttgtgtatgtgtaaatgtgggctccctgttaagtggggctcatggatacgaggcctgaggaagtgtggcttgctagtctgttacgttaacatgcttttctaaaattgcttcacgtgttaattcatttactcctgcattcattgactgtttttgttcttttccattcactttgtacttatttttttcattaaattttgcatttattttgagtt

SEQ ID NO: 3019 - protein, 369 aa, Homosapiens
MNTLFNTTFETEEASHHEACVRLRPQTYDLQESNVQLKLTIVDAVGFGDQINKDESYRPIVDYIDAQFENYLQEELKIRRSLFDYHDTRIHVCLYFITPTGHSLKSLDLVTMKKLDSKVNIIPIIAKADTISKSELHKFKIKIMGELVSNGVQIYQFPTDDEAVAEINAVMNAHLPFAVVGSTEEVKVGNKLVRARQYPWGVVQVENENHCDFVKLREMLIRVNMEDLREQTHSRHYELYRRCKLEEMGFQDSDGDSQPFSLQETYEAKRKEFLSELQRKEEEMRQMFVNKVKETELELKEKERELHEKFEHLKRVHQEEKRKVEEKRRELEEETNAFNRRKAAVEALQSQALHATSQQPLRKDKDKKN

SEQ ID NO: 3020 - DNA, 1954 bp, Homosapiens
gacccccggccgtccaagcggcggggctccggctgcgctcgtggccgggccgggcggggaggccggtcccgcgggcgggggcaggggcggctccgcggcttctcccgccgccgccgccaaggggagtttccaggaagtggccatattggatccattcagccgcagccgcccgggcggagcgcgtcccgcagccggctggtccctgtcgctgcccctgcgctcgtcccagcccacccgcccggtgcggagctcgccatggcggccaccgacctggagcgcttctcgaatgcagagccagagccccggagcctctccctgggcggccatgtgggtttcgacagcctccccgaccagctggtcagcaagtcggtcactcagggcttcagcttcaacatcctctgtgtgggggagaccggcattggcaaatccacactgatgaacacactcttcaacacgaccttcgagactgaggaagccagtcaccatgaggcatgcgtgcgcctgcggccccagacctatgacctccaggagagcaacgtgcagctcaagctgaccattgtggatgccgtgggctttggggatcagatcaataaggatgagagttacaggcccatagttgactacatcgatgcgcagtttgaaaattatctgcaggaggagctgaagatccgccgctcgctcttcgactaccatgacacaaggatccacgtttgcctctacttcatcacgcccacagggcactccctgaagtctctagatctagtgaccatgaagaaactagacagcaaggtgaacattattcccatcatcgccaaggctgacaccatctccaagagcgagctccacaagttcaagatcaagatcatgggcgagttggtcagcaatggggtccagatctaccagttccccacggatgatgaggctgttgcagagattaacgcagtcatgaatgcacatctgccctttgccgtggtgggcagcaccgaggaggtgaaggtggggaacaagctggtccgagcacggcagtacccctggggagtggtgcaggtggagaatgagaatcactgcgacttcgtgaagctgcgggagatgttgatccgggtgaacatggaagacctccgcgagcagacccacagccggcactacgagctctaccggcgctgcaagttggaggagatgggctttcaggacagcgatggtgacagccagcccttcagcctacaagagacatacgaggccaagaggaaggagttcctaagtgagctgcagaggaaggaggaagagatgaggcagatgtttgtcaacaaagtgaaggagacagagctggagctgaaggagaaggaaagggagctccatgagaagtttgagcacctgaagcgggtccaccaggaggagaagcgcaaggtggaggaaaagcgccgggaactggaggaggagaccaacgccttcaatcgccggaaggctgcggtggaggccctgcagtcgcaggccttgcacgccacctcgcagcagcccctgaggaaggacaaggacaagaagaaagccagtggctggtcttccatttacagtgtcactattccctgacggagctgttatgtgccgctctagcgaaggccccagccgggatgctaggcctaattgttcagcgtggagatggcaactcacgtggtgccctaggtgcagctgcgtggtctggtatacatgctgcaaaattcacccagttcccctcattttaatttttctaacctacagcttaattttaataactttaaaacacttctaaatatttattttggcaccagcgtcaagacaaataatatcctctcccattattttcataagtaacacagattccctgatttttaaaaactaaaaatacagctaaacctttcttatgtataaagtatgcctatcatatacagggagaggtgggtaataaacttcctgtaatgac

SEQ ID NO: 3021 - protein, 442 aa, Homosapiens; identical to SEQ ID NO: 3015

SEQ ID NO: 3022 - DNA, 696 bp, Homosapiens
gggcggagcgcgtcccgcagccggctggtccctgtcgctgcccctgcgctcgtcccagcccacccgcccggtgcggagctcgccatggcggccaccgacctggagcgcttctcgaatgcagagccagagccccggagcctctccctgggcggccatgtgggtttcgacagcctccccgaccagctggtcagcaagtcggtcactcagggcttcagcttcaacatcctctgtgtgggggagaccggcattggcaaatccacactgatgaacacactcttcaacacgaccttcgagactgaggaagccagtcaccatgaggcatgcgtgcgcctgcggccccagacctatgacctccaggagagcaacgtgcagctcaagctgaccattgtggatgccgtgggctttggggatcagatcaataaggatgagaggcaagaggcgggaagggcggccccacccagcctcctcccaccccacctacattggcccctataacagtagcccagccctcacactgcagggggccagggagggcctcttggggaatatctgaggctctgtggtcaccaacagaccagttactcctttaggtgtctggagaaggggtcagctgcctgtatccagtcagggatctcaggcagaagctgttcccagaaagaaaaggccagggggcagcctggcttggccccgagccct

SEQ ID NO: 3023 - protein, 136 aa, Homosapiens [sequence omitted]

SEQ ID NO: 3024 - DNA, 3210 bp, Homosapiens
acccgccccgggagccaggaacccagggccccaccatggcgctggccgccgccgccgccgctgcggctgccggggtgagccaggcggcggtgctgggcttcctgcaggagcacggcgggaaggtgcgcaactccgagctgctgagccgcttcaagccgctgctcgatgccggcgacccgcggggccgcgccgcccgcagggaccgcttcaagcagttcgtcaacaacgtggcggtggtgaaggagctcgacggcgtcaagttcgtggtgctgaggaagaagccccggcccccggagcccgagcccgcacccttcggccccccgggggcagcggcccagccgtcgaaacccacttcgacggtcttgccgcggagcgcctctgccccgggagctccgcccttggtccgggtgccgcggccagtggagccgccaggggacctgggtctgccaacagagccacaggacaccccgggggggccggcctccgagcccgctcagccgcccggggagcggtccgccgacccaccgcttccagcccttgagctagcccaggccaccgagagaccctccgcagacgcggccccaccgcctagggccccttctgaggcggcatcgccctgctctgatccgccagacgcggagcccgggcccggggcagcgaaagggccgccgcagcagaagccctgtatgctgccggtgcgctgcgtcccggcccccgccacgctccgcctccgggcggaggagcccggcctgcgccggcagctgtcggaggagccgagcccgcggagctcccctctgctgctgaggcggctctcggtggaagagtccggtctgggcctcggcctgggcccgggccgctccccgcacctgaggcgcctgtcgcgcgccggcccgcgtctgctgagccctgacgccgaggagttgcccgccgcgccgccgccgtccgcggtgcccctggagccgtccgagcacgagtggctcgtgcggactgccgggggccgctggacccaccagctgcacgggctgctgctgcgcgaccgcggcttggcggccaagcgcgacttcatgtctggcttcacggccctgcattgggccgccaagagcggcgacggcgagatggcgctgcagctggtggaggtcgcgcggcgcagtggcgcaccagtcgacgtgaacgcacgctcccacggcggctacacgccgctgcacctggctgcactgcacggccacgaggacgctgccgtgctgctggtggtgcgtctgggtgcccaggtgcacgtgcgtgatcacagcgggcgtcgcgcctaccagtacctgcggcccggctcctcgtacgcgctgcgccgccttcttggcgatccaggcctgcgaggcaccacggagccagatgcgaccggtggtggaagtggcagtcttgctgccaggcgccccgtacaggtggccgccaccatcctcagttccaccaccagtgcatttctgggcgtcctggctgacgacctcatgctccaggacctggcccgaggcttgaagaagtcgagctccttcagcaagttcttgagcgcctcgcccatggctccacgtaaaaagacaaagatccgcggtggtctgccagccttctcagaaatctctcgtcgacctactccggggcctttagctggtctagtgcccagttttcctccaacaacctgaaggtccctggggctaccacctggttgatctatcgtggcctgctcgtcgcagtccaaacccgcccaagactgcagcccaatcaacgcctggagcctcattctgtttccagctttgtccagggcagcctgttttacccagatgggcctgcacctccagcttctttctgaagcatgacccatctccagagatgggatttgagaaatcagtgagagcttcctataaagaactccaggagacaggcctgaactctagagggaacttgaaatccagggtcaaaggttaaggggcagcagctggtctggcccctgaaagccttcacctgatgcctctgcagctacacaatcccaagacagagctagagcaagggtctctttaaatgttgaaagatgttaggttgtcagctttaagatatgtggtggttttgtaatttgatgcttttattctgtttttaaattgaaatgaggtaatgcaactttcgtaataaccttttggaattatatttttccacttttaggcaaagtgcttagacattttcaattttttttttgctaaatactttggaattctatttaaaaaatagatgatcaagatctaaaggaaattaatcccaaccaacaaacttaaaagtttatctacctcgttttaggcaatcaagattctggagagtcttgaacacagaataacgattgtgaccattatgaatgtaactaatttcagttgtactgtgaatgctaaatatttgcaaacaagtacatcttgaaagtaaaggtgacttagagaaaagagacattttgacagatacttttaatttgtggttgtctccatcatgaaatagaaacgtgtttggcacttgtgggtggctattttgatttggcatgactacttaattttttaaaaaaattgtggtttgtgaattgcacctttgtgccatgtttctgaatctggttttcaaatccagtggagcctttcagtgaaataggtgactattaaaaaagtaatagtattacagaaaaatgagcgattaaatagtaatggatacaattaaggagcaactattttatatgactgttctgtacaaacaaaaagtatgtaatacccattttaaaaaaccatttgaaagtagacaacttattccaaaatagcaaatgcagaatctctgctcagtgagcttggatgagtggcttaacttctctgggcctttgttcctatctgtaaatgagaaagtttgtagatattgccaagatttcccaggctcaatacagtgtaattattttatgttttaaagatatgaaatctgtttactcaaccaattttttaaatgtcatattgtgataatgctctgcttttgcaaattgtgtttgcatgtcattagttatatcaaatagttttgtggcatggggtagtggagcttccctccccacccccatatgtatcagtgaagcctttgaaattacttaaggcagtctttcatggaatgttttgattgagcaatgaaataaacagtcctccattttgtttctgcttg

SEQ ID NO: 3025 - protein, 549 aa, Homosapiens
MALAAAAAAAAAGVSQAAVLGFLQEHGGKVRNSELLSRFKPLLDAGDPRGRAARRDRFKQFVNNVAVVKELDGVKFVVLRKKPRPPEPEPAPFGPPGAAAQPSKPTSTVLPRSASAPGAPPLVRVPRPVEPPGDLGLPTEPQDTPGGPASEPAQPPGERSADPPLPALELAQATERPSADAAPPPRAPSEAASPCSDPPDAEPGPGAAKGPPQQKPCMLPVRCVPAPATLRLRAEEPGLRRQLSEEPSPRSSPLLLRRLSVEESGLGLGLGPGRSPHLRRLSRAGPRLLSPDAEELPAAPPPSAVPLEPSEHEWLVRTAGGRWTHQLHGLLLRDRGLAAKRDFMSGFTALHWAAKSGDGEMALQLVEVARRSGAPVDVNARSHGGYTPLHLAALHGHEDAAVLLVVRLGAQVHVRDHSGRRAYQYLRPGSSYALRRLLGDPGLRGTTEPDATGGGSGSLAARRPVQVAATILSSTTSAFLGVLADDLMLQDLARGLKKSSSFSKFLSASPMAPRKKTKIRGGLPAFSEISRRPTPGPLAGLVPSFPPTT

SEQ ID NO: 3026 - DNA, 3384 bp, Homosapiens
agcgcttgtgacggtgtgaccagggaggggaagtgtaagtgtctggccgtccgtggtggcggggccagcaggctgtcccagccctcacccggagctcctcacccggcaccacatctgtgttttcccaggacccacgcagccacccagcctcagcactcatctgcgcagccatggaggccctgggacctgggggcgaccgcgcctccccggcctcgtccactagcagcctggacctgtggcatctgtccatgcgcgcggactcggcctacagctctttctccgcagcctccggcggccccgagccgcgcacgcagtcgccggggacagacctccttccttacctagactgggactacgtgcgtgtggtttggggcggcccgggccccgccccgcccgacgctgccctttgcacatccccgcggccccggcccgcggttgcagcccgcagtgggccgcagccaacagaggtcccggggaccccgggaccactgaacaggcaggccaccccgctgctgtacgcgctggcggccgaggcggaggccgcggcgcaggctgccgagccgcccagcccgccggcctcgagggccgcctaccgccagcggcttcagggcgcgcagcggcgagtgctccgggagacgtcgttccagcgcaaggagctccgcatgagcctgcccgcccgtctgcggcccactgtcccagcgcggcccccggcgactcacccgcgctccgcctcgctcagccacccgggcggggagggggagccggcgcgctcccgggctcccgcgccaggaactgccggccggggtcccctcgccaaccagcagcggaagtggtgcttctcagagccaggaaagctggatcgtgtgggtcggggcggtgggccggcgcgggaatgcctgggtgaggcctgctccagctctggcctccctgggcccgagcccttggagttccagcatccggcgctggctaagtttgaagatcacgaggtcggatggctgcccgagacgcaaccccaaggctccatgaacctggactccgggtccttgaagctcggtgatgccttcaggcccgccagtcggagtcggagcgcttcaggcgaagtcttgggttcctggggaggatcaggagggaccatacccattgtccaggctgttccccaaggagcagaaacccccagaccattgtttcagaccaaactttccaggttcttgcctcagaaagaggctgcggtgatgtatcctgcagagttaccccagagcagccctgctgacagtgaacagagggtctcagagacctgcattgtgcctgcctggctcccctcccttcctgatgaagtgttcctagaagaggccccactggtcagaatgagatcaccaccagacccccatgcctcccaggggcccccagccagtgtccatgcctctgaccagccgtatggaactggcttaggccaaagaactggccaggttacagtccccacagagtacccgctccatgagtgtccaggaactgcaggggcagatgactgctggcagggggtgaatggttctgtaggtatttccaggcccacaagccacacccccactgggactgcaaatgataacatcccaactattgaccccactggactgaccaccaatccccccacagctgcagagagtgacctcctcaaacctgtcccagctgatgccttgggactttcaggcaatgatactccaggtccctctcacaatactgccctagccaggggcactggccagcctggttccaggcccacatggcctagtcagtgcctcgaggagctggttcaggagctggccagattagatccctctctatgtgaccctcttgcttcccagcccagcccagagccacccctgggcctgctggatggactgattcctttagcagaggtccgggctgcaatgcggcctgcctgtggggaggctggagaggaggctgccagtacttttgagccagggtcctatcagttcagcttcacccagctcctgccggctcctcgggaggagacaaggcttgaaaaccctgccacccaccctgtgcttgaccagccatgtgggcaggggctccctgcaccaaacaacagcatccagggcaagaaagtggagctggccgcccgcctccaaaagatgcttcaggaccttcacacggagcaggagcggctgcagggggaggcacaagcgtgggccaggcgccaagcggctctggaggctgcagtgcgccaggcctgtgcccctcaggagctggagcggttcagccggttcatggccgacctagagcgcgtgcttggccttctgctgctgctgggcagtcgcctggcgcgcgtgcgccgcgccctggcccgggcggcctcagacagcgaccctgatgagcaggcctccctgctgcagcgactccggctcctgcagcggcaggaggaggacgccaaggagctgaaggagcacgtagcgcggcgcgagcgggccgtgcgggaggtgctggtgcgagcactaccggtggaggagctgcgcgtctattgcgccctgctggcgggcaaggccgccgtcctggcccagcagcgcaacctggacgagcgcatccgcctccttcaggaccaactggacgccatcagggacgaccttggccatcatgccccgtctcccagcccggcgcggcccccagggacctgtcctccagttcagccgcccttccctcttctccttacatagttataggtggagagggtggggtgcaccgcccctatctctcacccacgtaagtggggtgatgctgatttagtctctgcttttcccttgagggattggggaggacccagtccaggcctttctaagatactcctccagccgggcgcggtggctcacgcctgtaatcccagcactttgggaggccgaggcgggcggatcacaaggtcaggagatcgagaccatcctggctaacacggtgaaaccccgtctctactaaaaatataaaaaattagccgggcgtggtggcgggtgcctgtattgccagctactcggaaggctgaggcaggagaatggcgtgaacctgggaggtggagcttgcagtgagcggacatcgcgccactgcactccagcctgggcgacagagcaagactccgtctcaaaaaaaaaaaaaaaaaaaaaaaaaaaaaagatacttctccaaagtgttctcatgtggcctcacccaggtcttgtgtattatttggtaattaatttatggatcttaaaaactgcagtattcccccattttgtgatgagagtgtggggctggcaggggttggttggagggaggagagaagacagaggagcacttaaggtgcaaagcagcctattttttcttcaataaaaattgttaagagaa

SEQ ID NO: 3027 - protein, 852 aa, Homosapiens
MEALGPGGDRASPASSTSSLDLWHLSMRADSAYSSFSAASGGPEPRTQSPGTDLLPYLDWDYVRVVWGGPGPAPPDAALCTSPRPRPAVAARSGPQPTEVPGTPGPLNRQATPLLYALAAEAEAAAQAAEPPSPPASRAAYRQRLQGAQRRVLRETSFQRKELRMSLPARLRPTVPARPPATHPRSASLSHPGGEGEPARSRAPAPGTAGRGPLANQQRKWCFSEPGKLDRVGRGGGPARECLGEACSSSGLPGPEPLEFQHPALAKFEDHEVGWLPETQPQGSMNLDSGSLKLGDAFRPASRSRSASGEVLGSWGGSGGTIPIVQAVPQGAETPRPLFQTKLSRFLPQKEAAVMYPAELPQSSPADSEQRVSETCIVPAWLPSLPDEVFLEEAPLVRMRSPPDPHASQGPPASVHASDQPYGTGLGQRTGQVTVPTEYPLHECPGTAGADDCWQGVNGSVGISRPTSHTPTGTANDNIPTIDPTGLTTNPPTAAESDLLKPVPADALGLSGNDTPGPSHNTALARGTGQPGSRPTWPSQCLEELVQELARLDPSLCDPLASQPSPEPPLGLLDGLIPLAEVRAAMRPACGEAGEEAASTFEPGSYQFSFTQLLPAPREETRLENPATHPVLDQPCGQGLPAPNNSIQGKKVELAARLQKMLQDLHTEQERLQGEAQAWARRQAALEAAVRQACAPQELERFSRFMADLERVLGLLLLLGSRLARVRRALARAASDSDPDEQASLLQRLRLLQRQEEDAKELKEHVARRERAVREVLVRALPVEELRVYCALLAGKAAVLAQQRNLDERIRLLQDQLDAIRDDLGHHAPSPSPARPPGTCPPVQPPFPLLLT

SEQ ID NO: 3028 - DNA, 1025 bp, Homosapiens
gaaatactttgcaaaagaggtccccaaccctaagtgtgagggctaagctcctgggcttagtaggcatatacaaatgcccccaggtgggtgacatcaagatgttctggtcctaggtctgctgagagcctctcctgggaatgttgtaggtactgcctttcccttttaggaaacaccatatcctcctaccactaacccccatccttgccctaaccagcaatctgtaacatcctgggcctcagggacgtgggtggagggtgactctgagctccagatagtgtctaggaggctcaaataagcctgctttttggtcctcaccctagccgtgggccaccctactctgcactccctaccaagcagctcagagaatggaggccagcgcccaaaagtctccatagttcatagggagccccaaacctcaacactgccctttcccaagcctcaaaatttctcttaccctgacccaggcacacccactcaactcttacccttgatccccctcccaggaccagaagggattgatttctggtgagtcctgccccaagctgtgcttgcctgctctgttcgtacctaatattgcatgaggaacctggccagtgtctatggtggcaagtgcttcacccattctgtcctcttccccagaaaagactaatagggagggaagaagcgtgcgcagaagctaaggaactctcttccttctctaccaaggccacccctacatctactccctgcaaatctgttatttcccttgacatccagcctgggcgacagagcaagactccgtctcaaaaaaaaaaaaaaaaaaaaaaaaaaaaaagatacttctccaaagtgttctcatgtggcctcacccaggtcttgtgtattatttggtaattaatttatggatcttaaaaactgcagtattcccccattttgtgatgagagtgtggggctggcaggggttggttggagggaggagagaagacagaggagcacttaaggtgcaaagcagcctattttttcttcaataaaaattgttaagagaa

SEQ ID NO: 3029 - protein, 57 aa, Homosapiens
MWPHPGLVYYLVINLWILKTAVFPHFVMRVWGWQGLVGGRREDRGALKVQSSLFFLQ

SEQ ID NO: 3030 - DNA, 738 bp, Homosapiens
agaaagagtaggaagagaaagggctaatgtctgagcagtcgggtgggcttcctagatgaggggactgtcctcccaggagctgctactcagagtagtttcttgtcctcctaaagtttagagtggaaatactttgcaaaagaggtccccaaccctaagtgtgagggctaagctcctgggcttagtaggcatatacaaatgcccccaggtgggtgacatcaagatgttctggtcctaggtctgctgagagcctctcctgggaatgttgtaggtactgcctttcccttttaggaaacaccatatcctcctaccactaacccccatccttgccctaaccagcaatctgtaacatcctgggcctcagggacgtgggtggagggtgactctgagctccagatagtgtctaggaggctcaaataagcctgctttttggtcctcaccctagccgtgggccaccctactctgcatccagcctgggcgacagagcaagactccgtctcaaaaaaaaaaaaaaaaaaaaaaaaaaaaaagatacttctccaaagtgttctcatgtggcctcacccaggtcttgtgtattatttggtaattaatttatggatcttaaaaactgcagtattcccccattttgtgatgagagtgtggggctggcaggggttggttggagggaggagagaagacagaggagcacttaaggtgcaaagcagcctattttttcttcaataaaaattgttaagagaa

SEQ ID NO: 3031 - protein, 57 aa, Homosapiens; identical to SEQ ID NO: 3029

SEQ ID NO: 3032 - DNA, 3343 bp, Homosapiens
cggagtcagagcccggggctctgatgtcaccgcgcggctgcgacggcccaggagcgcgtctcggcgggagcctcaggtacgcggcgggggcgggggagcgggaagcgggcggctgggtccgcttcccccgggaggccggcggggctgcgggcggacgggggtgaagagcgggcggcgaggcggtggtcgcggggcagcccgggcatcgttcggccgggacgtgtctggctcggcgccgcgtcaggttgcgccagtggagtcggaccccagcgcgcctctcccagctgcagagctgcagggcggagaggcggcccactctaagctggcggcgcggctcaggggcgcggctgggcgcgccgcgtgtggcgccggcgggcagcgcggtctcactccgccaccctccgctcctgccctttgtcgccaagcatctggagaagccgggtccttccctcccgggctcgcgctgtcccctgcgcgcgatccttccccgacggtgaacccaacgggaaaggcccagaactgcgcggggctgcggccatctgctgtcgagccgctccgcgtgtctctgccgccccctgcggccgccggggcctgcgcctctctccctcccgtgcctcggctcccagagattgaaccccaggtaaccgggtctgtccacgcccgcggccgcctctccccgggtgtcgccagcttcctgcatttcctgtgcatggcacggagctcgggtctccagagactctgcatctggggtgcagcgaccgatgagcccgtaaaccagtcgcacactcggagcgtggatgctgcgtggggtgcgctgtcagcgcggacaggctgggagaacgggggacgctggggacagggagagccggtgaacttcccagaacgtccgcctagccagacccagctgcgggtactgggttttgagacgtggtccagtacccaggaactcagtctgacagggagacagcgcctacacagtgagcccagtactgagggaagacccgctgggaggggcggcctggatagcccctccacagagaggtcagatgtgaggtggccttgagggaggtatgatgtaaatcctgatcattcgttgtatttgaggctgtccgttctcctgtgcctcctcggtcgccttacttggatctgttcccattgccttggtgtgattttatccaccggaaactgtcttcagctatttccccagtaacctctaactaaaaacctgggtcttgcctggtctaccctcccctgctgaactccagagccacatcccaactgctgcctgacttgtcacagacaccatgaagcccagactgaaggagcactggcccccttgacaattcctcagccccagctcctcctttcagactggtgcctccacctgccagacccctagctttgaaggccaatctcatcttcgtctccttcctctctggctccttcattcaggtgacaagtatacatcaaatgcccaccccaactccccctcccaggactccaatctggtgtctttctagcggggagtctaggttgctccctctgctctggagaggcttggcaaaatgcctgcagagctccttgagctccacctctgaactccctttcagcagccggcacaggcataacagcccagcccacaggtaccactgccactgaggcagggacccctaaggtagggctacccccagccacaggggctggctggactgcaagaggctccctgcagccagacaagtatgaaaatgccttgttgttttgtgctgaggccccccaaaacacaccaaagcagctgggccctcttggcatggtaggttctgcaaagcacccactgtgaggagcctgcgtgaacatcaacctgatagggccaccagtgcaaaagcatcttcaacaagttacagtcaataaggaaacacatgtgtagacacatttttattgcccattcaagctgtttttatttgctgaattcagaatcctttaacatagtaactcacaaataagatagattttcatagattttcaagacctcttttgaggaaacatcttgtgtttggtgatccccatctgtagctgcagcaagccaaaatgggcaggatgggtgacatgagctagtgctcccaagctggactcagaaagagtaggaagagaaagggctaatgtctgagcagtcgggtgggcttcctagatgaggggactgtcctcccaggagctgctactcagagtagtttcttgtcctcctaaagtttagagtggaaatactttgcaaaagaggtccccaaccctaagtgtgagggctaagctcctgggcttagtaggcatatacaaatgcccccaggtgggtgacatcaagatgttctggtcctaggtctgctgagagcctctcctgggaatgttgtaggtactgcctttcccttttaggaaacaccatatcctcctaccactaacccccatccttgccctaaccagcaatctgtaacatcctgggcctcagggacgtgggtggagggtgactctgagctccagatagtgtctaggaggctcaaataagcctgctttttggtcctcaccctagccgtgggccaccctactctgcactccctaccaagcagctcagagaatggaggccagcgcccaaaagtctccatagttcatagggagccccaaacctcaacactgccctttcccaagcctcaaaatttctcttaccctgacccaggcacacccactcaactcttacccttgatccccctcccaggaccagaagggattgatttctggtgagtcctgccccaagctgtgcttgcctgctctgttcgtacctaatattgcatgaggaacctggccagtgtctatggtggcaagtgcttcacccattctgtcctcttccccagaaaagactaatagggagggaagaagcgtgcgcagaagctaaggaactctcttccttctctaccaaggccacccctacatctactccctgcaaatctgttatttcccttgacattcagcaaatatttggggttttgttttgttttgttttgttttgttttgttttgagacagagcctcatccagcctgggcgacagagcaagactccgtctcaaaaaaaaaaaaaaaaaaaaaaaaaaaaaagatacttctccaaagtgttctcatgtggcctcacccaggtcttgtgtattatttggtaattaatttatggatcttaaaaactgcagtattcccccattttgtgatgagagtgtggggctggcaggggttggttggagggaggagagaagacagaggagcacttaaggtgcaaagcagcctattttttcttcaataaaaattgttaagagaa

SEQ ID NO: 3033 - protein, 117 aa, Homosapiens
MARSSGLQRLCIWGAATDEPVNQSHTRSVDAAWGALSARTGWENGGRWGQGEPVNFPERPPSQTQLRVLGFETWSSTQELSLTGRQRLHSEPSTEGRPAGRGGLDSPSTERSDVRWP

SEQ ID NO: 3034 - DNA, 4019 bp, Homosapiens
cggacgcgctggaggccggtgggcggtcgccgtagtcgccctcccaccacctcgctcaggtttctccggcctggggcaagaggcctgtggcccgcgcgggaacgcactgtccaccctcagacctgggactgggccggcgcgcggacgctaccaagaggctgcggctcccgcccccgcggccggacgtggcgcctcccctgaggccgcggccggagcctggaggtggggtcggagtcagagcccggggctctgatgtcaccgcgcggctgcgacggcccaggagcgcgtctcggcgggagcctcagagcctcactttgtcgccaggctggagtgcagtggcgcgatctcggctcactacaacttccgcctcccgggttcaagcgattcttctgcctcagcctcccgagtagctgggactacaggcgtgtgccaccacgcccagctaatttttgggaaagatcacatggagaagccaacagaacggccaggaagcagcctgggtggaacagggttggggaggaaaggaacatgggtacattctcagcgttccaggaggtctcagggtaaaggctgcttgtgtgggcaaggggagcctggcagggaatgagctggtcccaattccttcccctgagctgggccctcaaccttcagaggtgctccctgggactggtcctacttcctctgccacctctgatcccaaggtgactctgccaaaatctgggggatgccagcgcttgtgacggtgtgaccagggaggggaagtgacccacgcagccacccagcctcagcactcatctgcgcagccatggaggccctgggacctgggggcgaccgcgcctccccggcctcgtccactagcagcctggacctgtggcatctgtccatgcgcgcggactcggcctacagctctttctccgcagcctccggcggccccgagccgcgcacgcagtcgccggggacagacctccttccttacctagactgggactacgtgcgtgtggtttggggcggcccgggccccgccccgcccgacgctgccctttgcacatccccgcggccccggcccgcggttgcagcccgcagtgggccgcagccaacagaggtcccggggaccccgggaccactgaacaggcaggccaccccgctgctgtacgcgctggcggccgaggcggaggccgcggcgcaggctgccgagccgcccagcccgccggcctcgagggccgcctaccgccagcggcttcagggcgcgcagcggcgagtgctccgggagacgtcgttccagcgcaaggagctccgcatgagcctgcccgcccgtctgcggcccactgtcccagcgcggcccccggcgactcacccgcgctccgcctcgctcagccacccgggcggggagggggagccggcgcgctcccgggctcccgcgccaggaactgccggccggggtcccctcgccaaccagcagcggaagtggtgcttctcagagccaggaaagctggatcgtgtgggtcggggcggtgggccggcgcgggaatgcctgggtgaggcctgctccagctctggcctccctgggcccgagcccttggagttccagcatccggcgctggctaagtttgaagatcacgaggtcggatggctgcccgagacgcaaccccaaggctccatgaacctggactccgggtccttgaagctcggtgatgccttcaggcccgccagtcggagtcggagcgcttcaggcgaagtcttgggttcctggggaggatcaggagggaccatacccattgtccaggctgttccccaaggagcagaaacccccagaccattgtttcagaccaaactttccaggttcttgcctcagaaagaggctgcggtgatgtatcctgcagagttaccccagagcagccctgctgacagtgaacagagggtctcagagacctgcattgtgcctgcctggctcccctcccttcctgatgaagtgttcctagaagaggccccactggtcagaatgagatcaccaccagacccccatgcctcccaggggcccccagccagtgtccatgcctctgaccagccgtatggaactggcttaggccaaagaactggccaggttacagtccccacagagtacccgctccatgagtgtccaggaactgcaggggcagatgactgctggcagggggtgaatggttctgtaggtatttccaggcccacaagccacacccccactgggactgcaaatgataacatcccaactattgaccccactggactgaccaccaatccccccacagctgcagagagtgacctcctcaaacctgtcccagctgatgccttgggactttcaggcaatgatactccaggtccctctcacaatactgccctagccaggggcactggccagcctggttccaggcccacatggcctagtcagtgcctcgaggagctggttcaggagctggccagattagatccctctctatgtgaccctcttgcttcccagcccagcccagagccacccctgggcctgctggatggactgattcctttagcagaggtccgggctgcaatgcggcctgcctgtggggaggctggagaggaggctgccagtacttttgagccagggtcctatcagttcagcttcacccagctcctgccggctcctcgggaggagacaaggcttgaaaaccctgccacccaccctgtgcttgaccagccatgtgggcaggggctccctgcaccaaacaacagcatccagggcaagaaagtggagctggccgcccgcctccaaaagatgcttcaggaccttcacacggagcaggagcggctgcagggggaggcacaagcgtgggccaggcgccaagcggctctggaggctgcagtgcgccaggcctgtgcccctcaggagctggagcggttcagccggttcatggccgacctagagcgcgtgcttggccttctgctgctgctgggcagtcgcctggcgcgcgtgcgccgcgccctggcccgggcggcctcagacagcgaccctgatgagcaggcctccctgctgcagcgactccggctcctgcagcggcaggaggaggacgccaaggagctgaaggagcacgtagcgcggcgcgagcgggccgtgcgggaggtgctggtgcgagcactaccggtggaggagctgcgcgtctattgcgccctgctggcgggcaaggccgccgtcctggcccagcagcgcaacctggacgagcgcatccgcctccttcaggaccaactggacgccatcagggacgaccttggccatcatgccccgtctcccagcccggcgcggcccccagggacctgtcctccagttcagccgcccttccctcttctccttacatagttataggtggagagggtggggtgcaccgcccctatctctcacccacgtaagtggggtgatgctgatttagtctctgcttttcccttgagggattggggaggacccagtccaggcctttctaagatactcctccagccgggcgcggtggctcacgcctgtaatcccagcactttgggaggccgaggcgggcggatcacaaggtcaggagatcgagaccatcctggctaacacggtgaaaccccgtctctactaaaaatataaaaaattagccgggcgtggtggcgggtgcctgtattgccagctactcggaaggctgaggcaggagaatggcgtgaacctgggaggtggagcttgcagtgagcggacatcgcgccactgcactccagcctgggcgacagagcaagactccgtctcaaaaaaaaaaaaaaaaaaaaaaaaaaaaaagatacttctccaaagtgttctcatgtggcctcacccaggtcttgtgtattatttggtaattaatttatggatcttaaaaactgcagtattcccccattttgtgatgagagtgtggggctggcaggggttggttggagggaggagagaagacagaggagcacttaaggtgcaaagcagcctattttttcttcaataaaaattgttaagagaa

SEQ ID NO: 3035 - protein, 852 aa, Homosapiens; identical to SEQ ID NO: 3027

SEQ ID NO: 3036 - DNA, 205 bp, Homosapiens
ttggggacaggaaacccagggagctctggttttgttcccaggtcctatcagttcagcttcacccagctcctgccggctcctcgggaggagacaaggcttgaaaaccctgccacccaccctgtgcttgaccagccatgtgggcaggggctccctgcaccaaacaacagcatccagggcaagaaagtggagctggccgcccgcctcc

SEQ ID NO: 3037 - protein, 67 aa, Homosapiens
LGTGNPGSSGFVPRSYQFSFTQLLPAPREETRLENPATHPVLDQPCGQGLPAPNNSIQGKKVELAAR

SEQ ID NO: 3038 - DNA, 474 bp, Homosapiens
agtgtccatgcctctgaccagccgtatggaactggcttaggccaaagaactggccaggttacagtccccacagagtacccgctccatgagtgtccaggaactgcaggggcagatgactgctggcagggggtgaatggttctctgcagagagtgacctcctcaaacctgtcccagctgatgccttgggactttcaggcaatgatactccaggtccctctcacaatactgccctagccaggggcactggccagcctggttccaggcccacatggcctagtcagtgcctcgaggagctggttcaggagctggccagattagatccctctctatgtgaccctcttgcttcccagcccagcccagagccacccctgggcctgctggatggactgattcctttagcagaggtccgggctgcaatgcggcctgcctgtggggaggctggagaggaggctgccagtacttttgagccagggt

SEQ ID NO: 3039 - protein, 43 aa, Homosapiens
PSCFPAQPRATPGPAGWTDSFSRGPGCNAACLWGGWRGGCQYF

SEQ ID NO: 3040 - DNA, 2471 bp, Homosapiens
atcgcaaatacaattccagtactccaagtacgtattctgtacccagccacctgggaggactgagagacctaatggttttctgctttctggaacttctatgccaattgtgactttctcacccaaatttgtaaattcgcaaattaacatgcagcgaataattacaattgtaaacacctggaagtggaaaaggccgtgaggataaattgagaggaagagtaaacctaataccataagttgcataccagcagatctgagtatcgtcatgaataattggttagcttttccacatgccttagaagtttcagcaagcacctagcgaacatcttaatccaaatttctcaaaaaatgagagattttatttaagatcattcctcaatttatcttagactttcagctacatagttagtccggtagtgtaacagtaacgggttttacgtaaatgccaggggaaaagagaggaaagctaaataaccaagtaaatctgtatctaattaacaaattggctaaataaggtgttatcagctgcttgatatagagctgataaaatcttcagctaggcatacttgaggcctgattacagaagtgaccgtagtccacccacacacctgaaatttatttaagagaccaagctaggctcttcctggcctttaggaagaggactggcatggagaaatatgttcctcactagttctcccaagccatggcacgtcccaacaaattcctcctttggttttgctgctttgcctggctgtgttttcctattagccttggttctcaggcttctgggggagaagctcagattgctgctagtgctgagttggaatctggggctatgccttggtccttgctgcagcatatagatgagagagacagagctggcctccttcccgcgcttttcaaagttctatctgttgggcgaggtgggtcacctaggctgcagccagactccagagctttgcactacatgaagaagctctataagacatatgctaccaaggaagggattcctaaatccaatagaagtcacctctacaacactgttcggctcttcaccccctgtacccggcacaagcaggctcctggagaccaggtaacaggaatccttccatcagtggaactgctatttaacctggatcgcattactaccgttgaacacttactcaagtcagtcttgctgtacaatatcaacaactcagtttctttttcctctgctgtcaaatgtgtgtgcaatctaatgataaaggagccaaagtcttctagcaggactctcggcagagctccatactcatttacctttaactcacagtttgaatttggaaagaaacacaaatggattcagattgatgtgaccagcctccttcaacctttagtggcctccaacaagagaagtattcacatgtctataaattttacttgcatgaaagaccagctggagcatccttcagcacagaatggtttgtttaacatgactctggtgtccccctcactgatcttatatttgaatgacacaagtgctcaggcttatcacagctggtattcccttcactataaaaggaggccttcccagggtcctgaccaggagagaagtctgtctgcctatcctgtgggagaagaggctgctgaggatgggagatcttcccatcaccgtcaccgcagaggtcaggaaactgtcagttctgaattgaagaagcccttgggcccagcttccttcaatctgagtgaatacttcagacaatttcttcttccccaaaatgagtgtgagctccatgactttagacttagctttagtcagctgaagtgggacaactggattgtggctccgcacaggtacaaccctcgatactgtaaaggggactgtccaagggcagttggacatcggtatggctctccagttcacaccatggtacagaacatcatctatgagaagctggactcctcagtgccaagaccgtcatgtgtacctgccaaatacagccccttgagtgttttgaccattgagcccgatggctcaattgcctataaagagtacgaagatatgatagctacaaagtgcacctgtcgttaacaaatggtcctcttaaaaccttgagcctatttggcaaagtaactactgtgtgcctatgtgtgccttcaagagaaagcttcatatattaagtctctaaatgtagcatatgttatataaagaggagcctgtgtaggttagtaccttctatggcatctatcaggataaagggataacatcaattgttgctacagagcctttttttatttccaaatttaaatgaaatataattattgtggagaactttacatttttttccttgagtgattttttttcttttcataggagtcttattcttgatagggaaaaaaccttaattagcatcaatcctggatggacttgcagctataaataggcaattcagattgctgtagtcttaatagaagaataaatttctgtcaatggcata

SEQ ID NO: 3041 - protein, 454 aa, Homosapiens; identical to SEQ ID NO: 417

SEQ ID NO: 3042 - DNA, 508 bp, Homosapiens
cttagagacagtaggaaaatggtatctcccggaagttacctcacgacctccaagagcggcttccaaccttgccggaaatgacgaacgagtcaaccggatcggtgactgtggagggcgagctgagccctggccgccgccacaatgggccgcgagtttgggaatctgacgcggatgcggcatgtgatcagctacagcttgtcaccgttcgagcagcgcgcctatccgcacgtcttcactaaaggaatccccaatgttctgcgccgcattcgggagtctttctttcgcgtggtgccgcagtttgtagtgttttatcttatctacacatgggggactgaagagttcgagagatccaagaggaagaatccagctgcctatgaaaatgacaaatgagcaacgcatccggatgacggttccctgtctctgaaagacctttctctggaagaggagtctgcattgtagtgtctcaaagacacaataaacttcctatggtctgcactgttgtgatatt

SEQ ID NO: 3043 - protein, 82 aa, Homosapiens; identical to SEQ ID NO: 419

SEQ ID NO: 3044 - DNA, 1652 bp, Homosapiens
cttagagacagtaggaaaatggtatctcccggaagttacctcacgacctccaagagcggcttccaaccttgccggaaatgacgaacgagtcaaccggatcggtgactgtggagggcgagctgagccctggccgccgccacaatgggccgcgagtttgggaatctgacgcggatgcggcatgtgatcagctacagcttgtcaccgttcgagcagcgcgcctatccgcacgtcttcactaaaggaatccccaatgttctgcgccgcattcgggagtctttctttcgcgtggtgccgcagtttgtagtgttttatcttatctacacatgggggactgaagagttcgagagatccaagaggaagaatccagctgcctatgaaaatgacaaatgagcaacgcatccggatgacggttccctgtctctgaaagacctttctctggaagaggagtctgcattgtagtgtctcaaagacacaataaacttcctatggtctgcactgttgtgatattacatttttgtgagtagaatcctgtgtgaccactaatattcaagttcatgaagcgcccctcctcagcatgagtcttgaagttttgcctggtctcgggttttggtgaaagagcagggctccccctttgttccattatctacaagaaagtagctgcaggtactcctgcatctaaccatttgtgggtgacatgggctatggcgagtgctggttcttggccctctgctcccatagcaacaataaagtctactaactatattgtaattagtatgtgtcagggacgcttttattttttattttttgagatggagtcttgctctctcacccaggctggagtgcagtggtgtgatctcggctcactgccatctgtgcctcctgggttcaaacgattctcctgtctcagcctccgagtagctgggattacaggtgcaggacaccacacctggctaattttttgtatttttagtagagacaggtttcaccatgttggccaggctggtctggaactcctgacctcagatgatctgtgcgcctcagcctcccaaagtgctgggattacaggcgtaagccatggtgctctgggcctcaaatactcttcttagctacacaaatgaactgttaaacctcacaagcacctttaacgtatcctcatttggcagatgaggaaatgggcacagagagattaagtaatttgccagaaattatacagcagtgaatggtggagtcttgcactaaagtgatgctcttaaaactatgctctattgcaggggtgtccaatcttttagcttccctgggccacacataaaatacgctaacattacaatagctgataagctttaaaaaatggcaaaaaaaaccctcagcgttttagaaagtttacaaatttttgttgggtcggattcaaagccatcctgggctgcttgctgcccaggactgcggttggacaagcttgctctactgcctttcctcctaaggcaggccttagcctgaggggatatcagctataaaacggatgaggtgatctcttagcctccacagcagttttctgtttctgtgccaggaggccaacaatgttttcaaccatatgtggttcataaagcctcaaagatttactctggccctttatgaataaagtttacccctgatct

SEQ ID NO: 3045 - protein, 82 aa, Homosapiens; identical to SEQ ID NO: 419

SEQ ID NO: 3046 - DNA, 875 bp, Homosapiens
ggaaatgacgaacgagtcaaccggatcggtgactgtggagggcgagctgagccctggccgccgccacaatgggccgcgagtttgggaatctgacgcggatgcggcatgtgatcagctacagcttgtcaccgttcgagcagcgcgcctatccgcacgtcttcactaaaggaatccccaatgttctgcgccgcattcgggagtctttctttcgcgtggtgccgcgtgagtgccttgggcccgcgggagcgggaggctggaccccagcagcagcagcagtcactgcgcctcccctctgagcgctggcggccgggcaggcgctctgtaacttgccgtacacacctttctcattgaatattcctgaccgcccttaagctggtcatattatcctccccatcttacacggggaaaactgagctacagaactgaaatgactggcccaaggtcactcgggtgattccagcatgttcctctgaggtcacctttatttagttcttaccagtggtgaaatgctttgtgttaaacgtgcagcagatagtgatgatagttgcatggccttggatatgctaagaactactgaagtgtatgctttaaagaagacaagaggactgagacctttttttttcttctatatgtcttatatgtgtgctctctgtttactctcttaatttttaaagagtttgtagtgttttatcttatctacacatgggggactgaagagttcgagagatccaagaggaagaatccagctgcctatgaaaatgacaaatgagcaacgcatccggatgacggttccctgtctctgaaagacctttctctggaagaggagtctgcattgtagtgtctcaaagacacaataaacttcctatggtctgcac

SEQ ID NO: 3047 - protein, 53 aa, Homosapiens
MTNESTGSVTVEGELSPGRRHNGPRVWESDADAACDQLQLVTVRAARLSARLH

SEQ ID NO: 3048 - DNA, 2031 bp, Homosapiens
ggaaatgacgaacgagtcaaccggatcggtgactgtggagggcgagctgagccctggccgccgccacaatgggccgcgagtttgggaatctgacgcggatgcggcatgtgatcagctacagcttgtcaccgttcgagcagcgcgcctatccgcacgtcttcactaaaggaatccccaatgttctgcgccgcattcgggagtctttctttcgcgtggtgccgcgtgagtgccttgggcccgcgggagcgggaggctggaccccagcagcagcagcagtcactgcgcctcccctctgagcgctggcggccgggcaggcgctctgtaacttgccgtacacacctttctcattgaatattcctgaccgcccttaagctggtcatattatcctccccatcttacacggggaaaactgagctacagaactgaaatgactggcccaaggtcactcgggtgattccagcatgttcctctgaggtcacctttatttagttcttaccagtggtgaaatgctttgtgttaaacgtgcagcagatagtgatgatagttgcatggccttggatatgctaagaactactgaagtgtatgctttaaagaagacaagaggactgagacctttttttttcttctatatgtcttatatgtgtgctctctgtttactctcttaatttttaaagagtttgtagtgttttatcttatctacacatgggggactgaagagttcgagagatccaagaggaagaatccagctgcctatgaaaatgacaaatgagcaacgcatccggatgacggttccctgtctctgaaagacctttctctggaagaggagtctgcattgtagtgtctcaaagacacaataaacttcctatggtctgcactgttgtgatattacatttttgtgagtagaatcctgtgtgaccactaatattcaagttcatgaagcgcccctcctcagcatgagtcttgaagttttgcctggtctcgggttttggtgaaagagcagggctccccctttgttccattatctacaagaaagtagctgcaggtactcctgcatctaaccatttgtgggtgacatgggctatggcgagtgctggttcttggccctctgctcccatagcaacaataaagtctactaactatattgtaattagtatgtgtcagggacgcttttattttttattttttgagatggagtcttgctctctcacccaggctggagtgcagtggtgtgatctcggctcactgccatctgtgcctcctgggttcaaacgattctcctgtctcagcctccgagtagctgggattacaggtgcaggacaccacacctggctaattttttgtatttttagtagagacaggtttcaccatgttggccaggctggtctggaactcctgacctcagatgatctgtgcgcctcagcctcccaaagtgctgggattacaggcgtaagccatggtgctctgggcctcaaatactcttcttagctacacaaatgaactgttaaacctcacaagcacctttaacgtatcctcatttggcagatgaggaaatgggcacagagagattaagtaatttgccagaaattatacagcagtgaatggtggagtcttgcactaaagtgatgctcttaaaactatgctctattgcaggggtgtccaatcttttagcttccctgggccacacataaaatacgctaacattacaatagctgataagctttaaaaaatggcaaaaaaaaccctcagcgttttagaaagtttacaaatttttgttgggtcggattcaaagccatcctgggctgcttgctgcccaggactgcggttggacaagcttgctctactgcctttcctcctaaggcaggccttagcctgaggggatatcagctataaaacggatgaggtgatctcttagcctccacagcagttttctgtttctgtgccaggaggccaacaatgttttcaaccatatgtggttcataaagcctcaaagatttactctggccctttatgaataaagtttacccctgatct

SEQ ID NO: 3049 - protein, 53 aa, Homosapiens; identical to SEQ ID NO: 3047

SEQ ID NO: 3050 - DNA, 591 bp, Homosapiens
gagtcaaccggatcggtgactgtggagggcgagctgagccctgtgcgtgagtggggtctggttgtgcagtgttcgtggaccctgggaggctaggggcgccccgctgggctgggaaaggataaggagtgcaggggcaggagtctggggttggggatggacccccgcggggactgcggcgcttcgcgaaagcgagccaagcgcctgtccaccctcggtcctgcagggccgccgccacaatgggccgcgagtttgggaatctgacgcggatgcggcatgtgatcagctacagcttgtcaccgttcgagcagcgcgcctatccgcacgtcttcactaaaggaatccccaatgttctgcgccgcattcgggagtctttctttcgcgtggtgccgcagtttgtagtgttttatcttatctacacatgggggactgaagagttcgagagatccaagaggaagaatccagctgcctatgaaaatgacaaatgagcaacgcatccggatgacggttccctgtctctgaaagacctttctctggaagaggagtctgcattgtagtgtctcaaagacacaataaacttcctatggtctgcac

SEQ ID NO: 3051 - protein, 82 aa, Homosapiens; identical to SEQ ID NO: 419

SEQ ID NO: 3052 - DNA, 1747 bp, Homosapiens
gagtcaaccggatcggtgactgtggagggcgagctgagccctgtgcgtgagtggggtctggttgtgcagtgttcgtggaccctgggaggctaggggcgccccgctgggctgggaaaggataaggagtgcaggggcaggagtctggggttggggatggacccccgcggggactgcggcgcttcgcgaaagcgagccaagcgcctgtccaccctcggtcctgcagggccgccgccacaatgggccgcgagtttgggaatctgacgcggatgcggcatgtgatcagctacagcttgtcaccgttcgagcagcgcgcctatccgcacgtcttcactaaaggaatccccaatgttctgcgccgcattcgggagtctttctttcgcgtggtgccgcagtttgtagtgttttatcttatctacacatgggggactgaagagttcgagagatccaagaggaagaatccagctgcctatgaaaatgacaaatgagcaacgcatccggatgacggttccctgtctctgaaagacctttctctggaagaggagtctgcattgtagtgtctcaaagacacaataaacttcctatggtctgcactgttgtgatattacatttttgtgagtagaatcctgtgtgaccactaatattcaagttcatgaagcgcccctcctcagcatgagtcttgaagttttgcctggtctcgggttttggtgaaagagcagggctccccctttgttccattatctacaagaaagtagctgcaggtactcctgcatctaaccatttgtgggtgacatgggctatggcgagtgctggttcttggccctctgctcccatagcaacaataaagtctactaactatattgtaattagtatgtgtcagggacgcttttattttttattttttgagatggagtcttgctctctcacccaggctggagtgcagtggtgtgatctcggctcactgccatctgtgcctcctgggttcaaacgattctcctgtctcagcctccgagtagctgggattacaggtgcaggacaccacacctggctaattttttgtatttttagtagagacaggtttcaccatgttggccaggctggtctggaactcctgacctcagatgatctgtgcgcctcagcctcccaaagtgctgggattacaggcgtaagccatggtgctctgggcctcaaatactcttcttagctacacaaatgaactgttaaacctcacaagcacctttaacgtatcctcatttggcagatgaggaaatgggcacagagagattaagtaatttgccagaaattatacagcagtgaatggtggagtcttgcactaaagtgatgctcttaaaactatgctctattgcaggggtgtccaatcttttagcttccctgggccacacataaaatacgctaacattacaatagctgataagctttaaaaaatggcaaaaaaaaccctcagcgttttagaaagtttacaaatttttgttgggtcggattcaaagccatcctgggctgcttgctgcccaggactgcggttggacaagcttgctctactgcctttcctcctaaggcaggccttagcctgaggggatatcagctataaaacggatgaggtgatctcttagcctccacagcagttttctgtttctgtgccaggaggccaacaatgttttcaaccatatgtggttcataaagcctcaaagatttactctggccctttatgaataaagtttacccctgatct

SEQ ID NO: 3053 - protein, 82 aa, Homosapiens; identical to SEQ ID NO: 419

SEQ ID NO: 3054 - DNA, 2384 bp, Homosapiens
cactcatgaggatgaatggtcctttccgcctacacacagaggggcaagggcttcaagctctttctttccttgactgtgttatcagctttacaaattaacaccatgctagtttgatcctgctagaagtacaggaaggcagaaatggaggattaggagaattactcatcttttggatgaacagtttccaaatcccatttggcacatcactctagactggtaaaggggaggctgacactgaggccacagacccaactggctctaggacatcacgttgttcagtcctttgcttatctaatcatttgtgttcttacccagtgctcactaggtcacccacatagccacttcccctcccagcaaaagttcccagtttaggcacctgtctgggatcatccagtatccaagcttaggggtgaagggagggagcagagaactagtctcaactggttcgttggtatataggtctcttctcaatgttcctaaagtgcatgcagtggcatccccctcaaggcctggctccatgattctgagaggactagaatcaggacagtcagatctgtggtcacatcctgcccaattccagctctgaggtccatcaaaccatctgcttctcccttggcaagaagctccctctgtctgactggcagcagggtcagtggccatccttttctaccttcagctgttgtgcatctcctccacgttttcctggagtaaaggaacaagcaggttcttatccaaatacccaacctgtgaagatgagacggcccttgggaagaggtattagccaagttttcagtatgatgcccggcagaaagaatttgttgtctttgtcttaagcttattatcctcccaggtcataggaagatctaaagtccaatcagtctccttactcagaattcacagctttcccctcaaacttaaaatgcccatgtcatttcacgagtacccataactacccatcgtttagatacatgtcctcccttggtctagaaatctgcagcagttcctacttaaactgatggatgctttgggctttggaggtatctcatccctatgcctgttgccctgaagctgccggaaggaaaggccccactcaactactgggaagaaagcccataattcaaggcttttaatacagtcactacacaagctctccctctgatttaggagatcttgttacctcctcatctacatgtgcttaaaaacaaaaagaaacctataattattcaattcacctgtggtccaaataagtctcacatccagccattcccctgagagggcaggaggccagactttgaactttccacagctgggtcttcattttactagtgagataaagaggtgcagattagggtgacagtccatctaagcaagtggacgatctggggaactgtaggccttgctgaagcatcctcccacagaaaggagataagggccttatccaattggctgtacacaatagatcagtgcttctttcctagacaaggctgaaaggggccaacattatttctgaagacttcattattggaattctatgggagtgatctcactgagctattttggaatagaaatgtggctagttgcctgacctccctcaatggtttcacgtggctttcaaagggaaggaagggcagtgctgacttttggtaaaatgggcgaaagggtccatgccagcaacacaatcactcaaagtccagatgagggatcagtaaatacaacgtgcctgaaaggtggcccttgagcacattcctccggtagacattaacttattaaattgattctgattacaaatataaactttgcccccatctcacccagtaacaatgcaagagttgatgtcagtctataaaaggaagtaggaactgtccctggctttcaggctccaacatcctccccctgtcaagatgtggcacctcaaactttgtgcagtcctcatgatcttcctgttgctgttgggccagatagatggctccccaataccagaagtgagttcggcaaagagaaggccacggagaatgaccccattttggagaggggtttccctcaggcctattggagcctcctgccgggatgattctgagtgtatcacaaggctatgcagaaaaagacgctgttccttaagtgtggcccaggaatgatgtacataccagggaaagaaaggacagcagtcacctccgacaatgctccgttctatggaatattgattaactgcattttggctggagacacccaagtgaagcaatcttgtatttttaatatttaaaggcagatgtacgctttaaattggtctccatttcttcttagaatgttgatatatggataagcataactaaacttgtcaatttagagtttatttttctatggatactattaaatgtctcaaattg

SEQ ID NO: 3055 - protein, 77 aa, Homosapiens; identical to SEQ ID NO: 421

SEQ ID NO: 3056 - DNA, 2737 bp, Homosapiens
cactcatgaggatgaatggtcctttccgcctacacacagaggggcaagggcttcaagctctttctttccttgactgtgttatcagctttacaaattaacaccatgctagtttgatcctgctagaagtacaggaaggcagaaatggaggattaggagaattactcatcttttggatgaacagtttccaaatcccatttggcacatcactctagactggtaaaggggaggctgacactgaggccacagacccaactggctctaggacatcacgttgttcagtcctttgcttatctaatcatttgtgttcttacccagtgctcactaggtcacccacatagccacttcccctcccagcaaaagttcccagtttaggcacctgtctgggatcatccagtatccaagcttaggggtgaagggagggagcagagaactagtctcaactggttcgttggtatataggtctcttctcaatgttcctaaagtgcatgcagtggcatccccctcaaggcctggctccatgattctgagaggactagaatcaggacagtcagatctgtggtcacatcctgcccaattccagctctgaggtccatcaaaccatctgcttctcccttggcaagaagctccctctgtctgactggcagcagggtcagtggccatccttttctaccttcagctgttgtgcatctcctccacgttttcctggagtaaaggaacaagcaggttcttatccaaatacccaacctgtgaagatgagacggcccttgggaagaggtattagccaagttttcagtatgatgcccggcagaaagaatttgttgtctttgtcttaagcttattatcctcccaggtcataggaagatctaaagtccaatcagtctccttactcagaattcacagctttcccctcaaacttaaaatgcccatgtcatttcacgagtacccataactacccatcgtttagatacatgtcctcccttggtctagaaatctgcagcagttcctacttaaactgatggatgctttgggctttggaggtatctcatccctatgcctgttgccctgaagctgccggaaggaaaggccccactcaactactgggaagaaagcccataattcaaggcttttaatacagtcactacacaagctctccctctgatttaggagatcttgttacctcctcatctacatgtgcttaaaaacaaaaagaaacctataattattcaattcacctgtggtccaaataagtctcacatccagccattcccctgagagggcaggaggccagactttgaactttccacagctgggtcttcattttactagtgagataaagaggtgcagattagggtgacagtccatctaagcaagtggacgatctggggaactgtaggccttgctgaagcatcctcccacagaaaggagataagggccttatccaattggctgtacacaatagatcagtgcttctttcctagacaaggctgaaaggggccaacattatttctgaagacttcattattggaattctatgggagtgatctcactgagctattttggaatagaaatgtggctagttgcctgacctccctcaatggtttcacgtggctttcaaagggaaggaagggcagtgctgacttttggtaaaatgggcgaaagggtccatgccagcaacacaatcactcaaagtccagatgagggatcagtaaatacaacgtgcctgaaaggtggcccttgagcacattcctccggtagacattaacttattaaattgattctgattacaaatataaactttgcccccatctcacccagtaacaatgcaagagttgatgtcagtctataaaaggaagtaggaactgtccctggctttcaggctccaacatcctccccctgtcaagatgtggcacctcaaactttgtgcagtcctcatgatcttcctgttgctgttgggccagatagatggctccccaataccagaagtgagttcggcaaagagaaggccacggagaatgaccccattttggagaggggtttccctcaggcctattggagcctcctgccgggatgattctgagtgtatcacaaggctatgcagaaaaagacgctgttccttaagtgtggcccaggaatgatgtacataccagggaaagaaaggacagcagtcacctccgacaatgctccgttctatggaatattgattaactgcattttggctggagacacccaagtgaagcaatcttgtatttttaatatttaaaggcagatgtacgctttaaattggtctccatttcttcttagaatgttgatatatggataagcataactaaacttgtcaatttagagtttatttttctatggatactattaaatgtctcaaattgaaattttagcagtctggaattcaagcttttgagggaaagaaggattcattttgtatactaaagaaaaaaacagcattgcccaataatgtgttaacttctcaatctggaaagtgtagtgagagctacataatcaatagctacgtaatcaacttcagcaagttcctaagctgtggccctggatcccttcactccatactcttcagggaggtgtcaaaggtggtcaagcttgggaggctgaggcaggagaatcacttgaacctgggaggtggaggttgcagtgagccaagatcatgccactgcaccccagcctgggtgacatagagagactctgtctcaaaaaaaaaaaaaaaaaa

SEQ ID NO: 3057 - protein, 77 aa, Homosapiens; identical to SEQ ID NO: 421

SEQ ID NO: 3058 - DNA, 932 bp, Homosapiens
gggcgaaagggtccatgccagcaacacaatcactcaaagtccagatgagggatcagtaaatacaacgtgcctgaaaggtggcccttgagcacattcctccggtagacattaacttattaaattgattctgattacaaatataaactttgcccccatctcacccagtaacaatgcaagagttgatgtcagtctataaaaggaagtaggaactgtccctggctttcaggctccaacatcctccccctgtcaagatgtggcacctcaaactttgtgcagtcctcatgatcttcctgttgctgttgggccaggtaaggagggaaggatacttatgtgtgtgtgtggagtgtggagatgatagtggtggtggaacttgaaagctagattcagtcctgaggaatggttcctctgttctgagtctacagcatctgcggaatggaatgatcactcttccaaggtgtgcagcagggtgtcaacactttcatatctgaatgtctttgcccttacagatagatggctccccaataccagaagtgagttcggcaaagagaaggccacggagaatgaccccattttggagaggggtttccctcaggcctattggagcctcctgccgggatgattctgagtgtatcacaaggctatgcagaaaaagacgctgttccttaagtgtggcccaggaatgatgtacataccagggaaagaaaggacagcagtcacctccgacaatgctccgttctatggaatattgattaactgcattttggctggagacacccaagtgaagcaatcttgtatttttaatatttaaaggcagatgtacgctttaaattggtctccatttcttcttagaatgttgatatatggataagcataactaaacttgtcaatttagagtttatttttctatggatactattaaatgtctcaaattg

SEQ ID NO: 3059 - protein, 64 aa, Homosapiens
MSLPLQIDGSPIPEVSSAKRRPRRMTPFWRGVSLRPIGASCRDDSECITRLCRKRRCSLSVAQE

SEQ ID NO: 3060 - DNA, 1260 bp, Homosapiens
ggcgaaagggtccatgccagcaacacaatcactcaaagtccagatgagggatcagtaaatacaacgtgcctgaaaggtggcccttgagcacattcctccggtagacattaacttattaaattgattctgattacaaatataaactttgcccccatctcacccagtaacaatgcaagagttgatgtcagtctataaaaggaagtaggaactgtccctggctttcaggctccaacatcctccccctgtcaagatgtggcacctcaaactttgtgcagtcctcatgatcttcctgttgctgttgggccaggtaaggagggaaggatacttatgtgtgtgtgtggagtgtggagatgatagtggtggtggaacttgaaagctagattcagtcctgaggaatggttcctctgttctgagtctacagcatctgcggaatggaatgatcactcttccaaggtgtgcagcagggtgtcaacactttcatatctgaatgtctttgcccttacagatagatggctccccaataccagaagtgagttcggcaaagagaaggccacggagaatgaccccattttggagaggggtttccctcaggcctattggagcctcctgccgggatgattctgagtgtatcacaaggctatgcagaaaaagacgctgttccttaagtgtggcccaggaatgatgtacataccagggaaagaaaggacagcagtcacctccgacaatgctccgttctatggaatattgattaactgcattttggctggagacacccaagtgaagcaatcttgtatttttaatatttaaaggcagatgtacgctttaaattggtctccatttcttcttagaatgttgatatatggataagcataactaaacttgtcaatttagagtttatttttctatggatactattaaatgtctcaaattgaaattttagcagtctggaattcaagcttttgagggaaagaaggattcattttgtatactaaagaaaaaaacagcattgcccaataatgtgttaacttctcaatctggaaagtgtagtgagagctacataatcaatagctacgtaatcaacttcagcaagttcctaagctgtggccctggatcccttcactccatactcttcagggaggtgtcaaaggtggtcaagcttgggaggctgaggcaggagaatcacttgaacctgggaggtggaggttgcagtgagccaagatcatgccactgcaccccagcctgggtgacatagagagactc

SEQ ID NO: 3061 - protein, 64 aa, Homosapiens; identical to SEQ ID NO: 3059

SEQ ID NO: 3062 - DNA, 786 bp, Homosapiens
tcaggctccaacatcctccccctgtcaagatgtggcacctcaaactttgtgcagtcctcatgatcttcctgttgctgttgggccagatagatggctccccaataccagaagtgagttcggcaaagagaaggccacggagaatgaccccattttggagaggggtttccctcaggcctattggagcctcctgccgggatgattctgagtgtatcacaaggctatgcagaaaggacagcagtcacctccgacaatgctccgttctatggaatattgattaactgcattttggctggagacacccaagtgaagcaatcttgtatttttaatatttaaaggcagatgtacgctttaaattggtctccatttcttcttagaatgttgatatatggataagcataactaaacttgtcaatttagagtttatttttctatggatactattaaatgtctcaaattgaaattttagcagtctggaattcaagcttttgagggaaagaaggattcattttgtatactaaagaaaaaaacagcattgcccaataatgtgttaacttctcaatctggaaagtgtagtgagagctacataatcaatagctacgtaatcaacttcagcaagttcctaagctgtggccctggatcccttcactccatactcttcagggaggtgtcaaaggtggtcaagcttgggaggctgaggcaggagaatcacttgaacctgggaggtggaggttgcagtgagccaagatcatgccactgcaccccagcctgggtgacatagagagactc

SEQ ID NO: 3063 - protein, 82 aa, Homosapiens
MWHLKLCAVLMIFLLLLGQIDGSPIPEVSSAKRRPRRMTPFWRGVSLRPIGASCRDDSECITRLCRKDSSHLRQCSVLWNID

SEQ ID NO: 3064 - DNA, 8192 bp, Homosapiens
gtcagtcacagccctggctgcaggagtccagctgccgtcgccgccgccagcggacggggcggggatcctggtgccaggtcttcgttaacccgcccccgccgcctcagtcagctgtcccagcccgggcccgaccgtcatggagcggtgcggggcctacgcctgttccgtgtgaggcgcatcgctgccgccgccgccgacgccgccttcgtttgtcgaggcctccggaacccccgccgcctcccggagcccctcgcccttggcagcctgtcaccgccccctgggcgggctcgaatgcgcgtccggtgaaggtgcaggcccggcgccgccactgccgcagccaggagatggttcgggcctagcggagccgggactggagcaacatgaaccgtgaagaccggaatgtgctgcgtatgaaagaacgggaaaggcggaatcaggaaattcagcagggcgaagacgccttcccacctagctctcctctctttgcagagccatacaaagttactagcaaagaagataagttatcaagtcgtattcagagtatgcttggaaactacgatgaaatgaaggatttcataggagacagatctataccaaagcttgttgcaattcccaagcctacagtaccaccatcagcagatgaaaaatctaacccaaatttctttgaacagagacatggaggctctcatcagagtagcaaatggactccagtaggacccgcacccagcacttctcagtctcagaaacggtcctcaggcttacagagtggacatagtagccagcggaccagcgcaggtagcagtagtggcactaacagtagtggtcagaggcacgaccgtgagtcatataacaatagtgggagcagtagccggaaaaaaggccagcatggatcagaacactccaaatcacgttcttccagccctggaaaaccccaggctgtttcttcattaaactctagtcattccaggtctcatgggaatgatcaccatagcaaggaacatcaacgctccaaatcacctcgggaccctgatgcaaactgggattctccttcccgtgtacctttttcaagtgggcagcactcaactcaatctttcccaccctcattgatgtcaaagtccaattcaatgttacagaaacccactgcctatgtgcggcccatggacggacaggagtccatggaaccaaagctgtcctctgagcactacagcagccaatcccatggcaacagcatgactgagctgaagcccagcagcaaagcacatctcaccaagctgaaaataccttcccaaccactggatgcatcagcttctggtgatgtgagctgtgtggatgaaatcctaaaagagatgacgcattcatggcctccccctctaacggctattcatacaccatgcaaaacagaaccttccaaatttccttttccaactaaggagtctcagcagtccaattttggcactggagaacaaaaaagatataatccttctaaaacttcaaatgggcaccagtctaaatctatgttaaaagatgacttaaaactaagcagcagtgaagacagtgatggggaacaggattgtgataagacaatgccgaggagtacaccaggaagtaactctgaaccttcacaccataatagtgaaggagcagataactccagggatgattctagtagccacagtggatctgaaagcagctctggatctgactcagagagtgaaagtagttccagtgacagtgaggcaaatgagccatcccagagtgcatctcccgagcctgaacccccgccaacaaacaaatggcaacttgataattggctgaataaagtgaacccacataaagtgtcacccgcctcttcagtggacagtaacatcccatcatctcaaggctacaaaaaggaaggccgagagcagggcactgggaatagctacactgatacaagtggacctaaagaaacgagttccgctactccgggacgagactccaaaaccatccaaaagggatcagaaagtgggcgtgggaggcagaaatctcctgcacagagtgacagcacaacacagagaagaactgtaggcaaaaaacaacccaaaaaggctgagaaggcagctgctgaagagcctcgtggaggcctgaagatagaaagtgaaacccctgtagacttggctagcagcatgccctccagcagacacaaagcagccaccaaaggctcaaggaaacccaatataaagaaggagtctaagtcttcccctcgacctacagcagagaaaaagaaatataagtcaacaagtaaatcttcccagaaatcaagggaaatcatagaaacagatacctcatcctcagattcagatgaaagtgagagccttcctccttcctcacaaactcctaagtaccccgagagcaataggactcctgttaaaccctcctcagtggaggaagaagatagcttttttcggcaacgaatgttctctcctatggaagagaaggaacttctttcacccctcagtgagcctgatgacaggtacccacttattgtgaagattgacctgaatcttttgactagaataccaggaaagccttacaaagaaacagagccgcccaagggggaaaagaaaaatgtgccagaaaagcacacgagagaggctcagaaacaagcctcagaaaaagtttccaacaaaggcaagaggaagcataagaatgaagatgataaccgagccagtgagagcaagaaacccaaaacggaggacaagaattcagcaggccataagccatccagcaacagagagtcatctaagcagagtgctgcaaaagaaaaggatttgttgccttctcccgctgggcctgttccttcaaaagatccaaaaacagagcatggctctcggaagaggactattagtcagtcttcttccttaaagtcaagcagtaacagcaacaaggagacgagtggcagcagcaaaaacagttcctccacatcaaagcagaagaagaccgaagggaagacttccagtagctccaaggaggttaaggaaaaggctccaagtagctcctctaactgtcctccatctgcaccaactcttgattcttctaagcctcggagaacaaagcttgtctttgatgacagaaattattcagcagaccattatttacaagaagcaaaaaagctaaagcacaatgcagatgcattgtctgataggtttgagaaagctgtatactatcttgatgctgtggtatctttcattgaatgtgggaatgcattagagaagaatgctcaggaatccaaatccccattccctatgtattcagagacggtggatctcatcaaatacactatgaagctaaagaattacttggcaccagatgctacagctgcagataaacgactcacagtactttgcctgcgatgcgagtctttgctgtacctgaggctgttcaaactgaagaaggaaaatgctctgaagtactcaaagacactgacagagcacctgaagaattcttataataattctcaagcaccatcgcctggcttgggaagcaaagctgtggggatgccttcccctgtttctccaaagctgtcaccaggcaattcaggaaattattcatctggggccagtagtgcttctgcaagtggttcttcagtgaccattccacagaagatccaccagatggcagccagctatgttcaggtcacatccaacttcctctatgccaccgaaatttgggaccaagctgaacagctttccaaagagcaaaaagaattctttgctgaactggataaagtaatgggccctctcatctttaatgcaagcatcatgacagatctagttcgttatacccggcagggactgcactggcttcgccaggatgccaagttgatatcttgaactgaacacattctcgttgcctctgattttctccacaacactgtgtcacatcacgaaggaaaactgccataacataccacctagtcgacactaagaatgaggaatagttttctcctcgttggttcatgtgttgttgtttttgataatccaaagcgatcatgtcagttggccctttaatatttccaatgtgaaagattatttaaatgcttttaaatctgcagcacattgataagatggtttccgtgagctatgataagattgaaattccagttgcaattcataactaatgaattgaaattttatttattttaatttttttaagttcccagattggggctagtttaagacttagttatttctgcctataaatttactctgttgaatatttagcataaatttaatgtagacatttttatttatataccttgggagctttattacctaatatctttttgtggtagctgttctaagagtaagaattggttcgtctaaaataaggacatattctttctacacctgctacctgacctgatatttgaaatcttaactccaattttattattgtggaatttacagttagtattaaggatattcttctacacatgaaaaaatcacttaaatatgagaaaatggcattctacatgtatgtactatgaaatgtgtctgatttggtatgcattatttcaaaaactgtgaatgtgtgttaataacactacagcaatcacacagtgactatagcttgcatttaatgcattacaaaagagggaggacaaactttctagaagaagcatttcatgttgaagggtttcataaaaggacaatcctgaacgttacggattttattaaaaccatatgttattttttgttgctaatcatttgacacttaatcgaaacagaataagttactgtggaaaaaaggatgatccaactcctgaggattgccgcctgtgtgtctttaattgattatctttgatagttagagttatttttcagatttttccccctcatactggattgtgatgctctgatatgagcatgcaatgactgatacagaaataggctggagcttcggtgtgtgcttttgctatacagcttacagttctaatgcctgatgtagagatgatgaatttctcctttttaaacctatcttctgtttactccttttgcattatgaaggccctcttcaatgatgtatgtttctgatggaatcagaaaatttcacactagaaaagtgtacctaacttgattcagtgtgagctcttgggacagggagtggagccaggggtagagcttaaagaagctggctctgtaagagttgtatatcaaagtaccttttgctacaaggtgcatatagaagtctaagataagaaatgtaccctctatactttatttttcatgcccctatcatgtttggtgtgccttaaatcttacctttaaatgaagactctatggattgtttacaaatgaagttttacactaggaccagatcgtccatacatgattggtcttctacaataataatgttcaattctttcattttaaatctttctttagggtcatataaagattagttctttcagaaaagctattgctttggtacatgacttagtctaaccagttgggtaatgctgctttgaaaaatagtttgtccctctccccattccaaaaatgaatccattcagtcagaaaaaaagattatcctactatttgtagatgattgctaaggcttgaaataggaaaggggaaagaagggatagaaaagtttcaagtccagtagtgcagtgaatcctttgtgtttgagacttttttacacttatttctgaagttagtgaactttcattgtccctgtggcctcatatttatagagcttcttaactgttttgtacctcagattgtttttagatgtcattgaagattgagatgtacaaattatgttgaatttaacctgtttctcttggagaaattgcctctgatatctttctaacttaatcttagtgtgttctaggaacagttttccataagaggacaacttctcaatgatcatgatagttatttagtaagaaataatggttgttaatcaaatacatgttatgtcttgtccttctctgatttttctgacttggattccttaatttgcagtgatgtcttagaaatggaaaaagtatcctctgggctttcagactttcagcaacaacagccagtgggatacctctgagttcttgtgttctagtctcttgtatgtcctgaaaggcagcaggagcatttttggggtcacactgatattttgttaaagcagagtttcctgcatggtttatggtgctgctctaatattttctctttaaaactgtgtcaatttttggagaatgaatttttcaaccttttcattgtggaggatttttcccacaaggtagtaatgggcaatggatcaaaatcctatcataaatgattgaattttcaatgtcatagtgtgtggaaatactactccctttcctccatgtctatcttcttagatgttctgtctttgtcatcatctgctccagcacatactttggactcctttacaggtgaccttcccccctccctcctcaataggtgtcctcagtgttttctaagcatttaaaactgaatttgacaagtggctaaaaacttagtctgagacttgtacttagtatatggttaattatagaaacaacaactattttaaacagttactctgttgactgctctttatgactacacttgtatgccaggaggcagcagcctatacaccattagactctttacaagcaaccaacgaaccaattgcagtggttgcagttgtcacagtagtcttgcctgggccagactgggctgggctgtgggaagcattccccttcaggggagtttccacagctcagcccaggctccagtctggctagagagcatccagcccattccttgcctcagtgccacctttttctgggcaagtagccaagaagtgactttatatgcagtgagtacttcagataaacttacagctacagctgccgaagagtggagaaggttgaccaccatttatttaattctctagtgtaaaaacaattgagagcagtgtgcgtgagcccacagacacctgtgtttctgggagctctggcagtggcggattcataggcacttgggctgcactttgaatgacacacttggctttattagattcactagtttttaaaaaattgttgttcgtttcttttcattaaaggtttaatcagacagatcagacagcataattttgtatttaatgacagaaacgttggtacatttcttcatgaatgagcttgcattctgaagcaagagcctacaaaaggcacttgttataaatgaaagttctggctctagaggccagtactctggagtttcagagcagccagtgattgttccagtcagtgatgcctagttatatagaggaggagtacactgtgcactcttctaggtgtaagggtatgcaactttggatcttaaaattctgtacacatacacactttatatatatgtatgtatgtatgaaaacatgaaattagtttgtcaaatatgtgtgtgtttagtattttagcttagtgcaactatttccacattatttattaaattgatctaagacactttcttgttgacaccttgaatattaatgttcaagggtgcaatgtgtattcctttagattgttaaagcttaattactatgatttgtagtaaattaacttttaaaatgtatttgagcccttctgtagtgtcgtagggctcttacagggtgggaaagattttaattttccagttgctaattgaacagtatggcctcattatatattttgatttataggagtttgtgtctgggtcccaggaacatctactggggatgactgttaggcagcttgtgatgatgttttttaaaaaacctaagtaacttggggagacagagcatttcaaacccatatagacacctatcatacctgtatatcccctaatacatggaacataaatttcatttcagctttatgcattaatgtattgaagaggcaggctttttttccagtaataatactgtacatctaaggttgctattcagtaaaactaatagaagagataattattgaataccttggaatatgtagtgagaagaggccaaatttttcatgtttgtgagcatgtctttcagatactcgctaatggagaaattcactttagacctctagaccccaaaaccaagttagcaagtgacaaaaagtaaattattaatagtctgtaaagtggatgctggtcttacaaagctcctattcacatgaaccctat

SEQ ID NO: 3065 - protein, 1163 aa, Homosapiens; identical to SEQ ID NO: 423

SEQ ID NO: 3066 - DNA, 1785 bp, Homosapiens
gtcagtcacagccctggctgcaggagtccagctgccgtcgccgccgccagcggacggggcggggatcctggtgccaggtcttcgttaacccgcccccgccgcctcagtcagctgtcccagcccgggcccgaccgtcatggagcggtgcggggcctacgcctgttccgtgtgaggcgcatcgctgccgccgccgccgacgccgccttcgtttgtcgaggcctccggaacccccgccgcctcccggagcccctcgcccttggcagcctgtcaccgccccctgggcgggctcgaatgcgcgtccggtgaaggtgcaggcccggcgccgccactgccgcagccaggagatggttcgggcctagcggagccgggactggagcaacatgaaccgtgaagaccggaatgtgctgcgtatgaaagaacgggaaaggcggaatcaggaaattcagcagggcgaagacgccttcccacctagctctcctctctttgcagagccatacaaagttactagcaaagaagataagttatcaagtcgtattcagagtatgcttggaaactacgatgaaatgaaggatttcataggagacagatctataccaaagcttgttgcaattcccaagcctacagtaccaccatcagcagatgaaaaatctaacccaaatttctttgaacagagacatggaggctctcatcagagtagcaaatggactccagtaggacccgcacccagcacttctcagtctcagaaacggtcctcaggcttacagagtggacatagtagccagcggaccagcgcaggtagcagtagtggcactaacagtagtggtcagaggcacgaccgtgagtcatataacaatagtgggagcagtagccggaaaaaaggccagcatggatcagaacactccaaatcacgttcttccagccctggaaaaccccaggctgtttcttcattaaactctagtcattccaggtctcatgggaatgatcaccatagcaaggaacatcaacgctccaaatcacctcgggaccctgatgcaaactgggattctccttcccgtgtacctttttcaagtgggcagcactcaactcaatctttcccaccctcattgatgtcaaagtccaattcaatgttacagaaacccactgcctatgtgcggcccatggacggacaggagtccatggaaccaaagctgtcctctgagcactacagcagccaatcccatggcaacagcatgactgagctgaagcccagcagcaaagcacatctcaccaagctgaaaataccttcccaaccactggatgcatcagcttctggtgatgtgagctgtgtggatgaaatcctaaaagagatgacgcattcatggcctccccctctaacggctattcatacaccatgcaaaacagaaccttccaaatttccttttccaactaaggagtctcagcagtccaattttggcactggagaacaaaggctcaagtgatcctcctgcctcagcctactgagtagctgggactgtgggcacatgccactatgcctggctgattttttaaatttttagtagagatagggtctcactatgttgcacaggctggtctcgaactcctgagctcaagtgatccacctgcctcgcctcccaaagtgttgggattactggtgtgagccaccatgccctcgtatcctaatttttatgatctaatgggtagtagtgggttgagctgaaaaattgttatgctttaaaaaattcaagaactgtaagtcattggagatcaaaatacactacttttatt

SEQ ID NO: 3067 - protein, 365 aa, Homosapiens
MNREDRNVLRMKERERRNQEIQQGEDAFPPSSPLFAEPYKVTSKEDKLSSRIQSMLGNYDEMKDFIGDRSIPKLVAIPKPTVPPSADEKSNPNFFEQRHGGSHQSSKWTPVGPAPSTSQSQKRSSGLQSGHSSQRTSAGSSSGTNSSGQRHDRESYNNSGSSSRKKGQHGSEHSKSRSSSPGKPQAVSSLNSSHSRSHGNDHHSKEHQRSKSPRDPDANWDSPSRVPFSSGQHSTQSFPPSLMSKSNSMLQKPTAYVRPMDGQESMEPKLSSEHYSSQSHGNSMTELKPSSKAHLTKLKIPSQPLDASASGDVSCVDEILKEMTHSWPPPLTAIHTPCKTEPSKFPFPTKESQQSNFGTGEQRLK

SEQ ID NO: 3068 - DNA, 1826 bp, Homosapiens
gtcagtcacagccctggctgcaggagtccagctgccgtcgccgccgccagcggacggggcggggatcctggtgccaggtcttcgttaacccgcccccgccgcctcagtcagctgtcccagcccgggcccgaccgtcatggagcggtgcggggcctacgcctgttccgtgtgaggcgcatcgctgccgccgccgccgacgccgccttcgtttgtcgaggcctccggaacccccgccgcctcccggagcccctcgcccttggcagcctgtcaccgccccctgggcgggctcgaatgcgcgtccggtgaaggtgcaggcccggcgccgccactgccgcagccaggagatggttcgggcctagcggagccgggactggagcaacatgaaccgtgaagaccggaatgtgctgcgtatgaaagaacgggaaaggcggaatcaggaaattcagcagggcgaagacgccttcccacctagctctcctctctttgcagagccatacaaagttactagcaaagaagataagttatcaagtcgtattcagagtatgcttggaaactacgatgaaatgaaggatttcataggagacagatctataccaaagcttgttgcaattcccaagcctacagtaccaccatcagcagatgaaaaatctaacccaaatttctttgaacagagacatggaggctctcatcagagtagcaaatggactccagtaggacccgcacccagcacttctcagtctcagaaacggtcctcaggcttacagagtggacatagtagccagcggaccagcgcaggtagcagtagtggcactaacagtagtggtcagaggcacgaccgtgagtcatataacaatagtgggagcagtagccggaaaaaaggccagcatggatcagaacactccaaatcacgttcttccagccctggaaaaccccaggctgtttcttcattaaactctagtcattccaggtctcatgggaatgatcaccatagcaaggaacatcaacgctccaaatcacctcgggaccctgatgcaaactgggattctccttcccgtgtacctttttcaagtgggcagcactcaactcaatctttcccaccctcattgatgtcaaagtccaattcaatgttacagaaacccactgcctatgtgcggcccatggacggacaggagtccatggaaccaaagctgtcctctgagcactacagcagccaatcccatggcaacagcatgactgagctgaagcccagcagcaaagcacatctcaccaagctgaaaataccttcccaaccactggatgcatcagcttctggtgatgtgagctgtgtggatgaaatcctaaaagagatgacgcattcatggcctccccctctaacggctattcatacaccatgcaaaacagaaccttccaaatttccttttccaactaaggtaagtaaataaaatgtatctttcataatgtaagaaaactctaaatggcttgactaaaatcatatggattaaaaattgtcttgccattcctattctagtgggagacagacagtaaataagtgaataaatagataaattcagatagtgacaactgttatgaagataattagcagggtaatggaactgagagcatcttggatcaagaggtattaagaaagctttgaaggcaatatgcgagagagatttaaaagacattaatacagccggacacggtggctcactcctgtaatcccagcactttggaaggctgagccaagagactctcttgaggccaggagtttgcgaccagcctggtcaacatagcaagaccctgtctctaccaaaaattggaaggaa

SEQ ID NO: 3069 - protein, 353 aa, Homosapiens
MNREDRNVLRMKERERRNQEIQQGEDAFPPSSPLFAEPYKVTSKEDKLSSRIQSMLGNYDEMKDFIGDRSIPKLVAIPKPTVPPSADEKSNPNFFEQRHGGSHQSSKWTPVGPAPSTSQSQKRSSGLQSGHSSQRTSAGSSSGTNSSGQRHDRESYNNSGSSSRKKGQHGSEHSKSRSSSPGKPQAVSSLNSSHSRSHGNDHHSKEHQRSKSPRDPDANWDSPSRVPFSSGQHSTQSFPPSLMSKSNSMLQKPTAYVRPMDGQESMEPKLSSEHYSSQSHGNSMTELKPSSKAHLTKLKIPSQPLDASASGDVSCVDEILKEMTHSWPPPLTAIHTPCKTEPSKFPFPTKVSK

SEQ ID NO: 3070 - DNA, 2065 bp, Homosapiens
cgactcccatgcatcggctaatagcccggagacaagctgaagcaaataagcaacatgtaagatgtcagaaatgcttggaatttggacattggacttatgaatgcacaggaaaaagaaaatacctacataggccctcaaggacagcagaactaaagaaagctttaaaagaaaaagaaaacagattattattgcaacaaaggtctaagagtgtaaccagttccagtagcagtagcagtgacagttctgccagtgattcttcatcagagagtgaagaaacatctacctcttcctcctcagaggacagtgacactgatgaaagctcctctagttcctcatcctcagcctcctccacaacctcttcctcctcctctgattcagactcagattccagctcttccagtagcagtagcaccagcacagatagcagctctgacgatgaaccaccaaagaagaagaaaaagaaatagagttgctccattcatattggactgatggactgaaaacattgatgtgattcttgaaagggaatttagaatatgttaaggccaagtaggttaactggtgaacatttctagaattcaaaagtttctaaatgttttacattgtaagagcatagagaatattaataatggcttatagagagagacttttatttgaagggtgaatcttgttttttttatctttaaaatatatctctagaacttaaagctgaaatctgcaaatctgtttgtgtgatgaaactatcttttctctctgtgaaataaatgccatactttgttatatatgttagtggtatgtatcagacatattttcaggatggtgcgtcaggatatctggcagtggatttctaatgcttttggctgtatgttatgtaagatttaatatgttgttactgtaagcttaggagttttcctactattaataaatgtgctctatttttacatttatgttcagaaagttatctgactttttgtcctaagtggtatgttcaaggagcctattaatatatttatagtttttgaatgctgtaagtttcaaattgctgtgttacgtcattcattttcttctggttccttaagtttttcaagttatccttttctgaggaaaattattctagaggaacctaaaaagggacaaaaaaattgaaacttcttaggagtctaatcttggtgccttctgttaaaagtcagtgtatcagaaaagaaagcagccatgtaagaggctaacttaaatagaagtgctagaaatatctttgtgtattaacatgcaataaaaggtaccattcaaagcagggggaaaggtaggaagaagaggtaatttttactgaaaattagggcaatgttggtcgccttttattaaaagctttttttaagctttcataaagattgctttttgctatttttgaaaatatggtattatagtttgtatggtaactggtcatatatgacagtctactgcatatatatgaatgactaggattaatctggtgtgtttacataggatatacatagttgaaatctagcatgaaaggttaaaaaggagatactgcacaatatttcttaaaagtaaaatgctgttattgtgatgagtctttggtttaacatcacagtattctgtgatgtctttttaactttttggaaagaggtatcatttgtagaaaaaatttgatttgggttaaatataggtttttaaaactataaatgttgtcttttttatatttttatgaaaaagcagtagaaaattacttttgaagaaaacaggctatttaaatattgaaatatatgtatgttgtgagtttaaggagcctgtaattgtcagttttacaaaaccatctgtgttcaatggttgtaaataaattctcaaaacatcatttcaaaggctgcctacagaatattatcacttgacagatagagttaataaattaccaatcaggcacattttataatgtttgtctctgtaaaggtaatattagcagttaaagaacacggatgagaaaagaatgtgttacataggttgcatcacttgcagttaaataaaactcacaatttgtgctcacaagcttaaa

SEQ ID NO: 3071 - protein, 152 aa, Homosapiens
MHRLIARRQAEANKQHVRCQKCLEFGHWTYECTGKRKYLHRPSRTAELKKALKEKENRLLLQQRSKSVTSSSSSSSDSSASDSSSESEETSTSSSSEDSDTDESSSSSSSSASSTTSSSSSDSDSDSSSSSSSSTSTDSSSDDEPPKKKKKK

SEQ ID NO: 3072 - DNA, 2133 bp, Homosapiens
ggcgactcccatgcatcggctaatagcccggagacaagcattcgacacagagttgcagcctgtcaagaccttttggatcctgattcagccatccatcgttattagtgaagcaaataagcaacatgtaagatgtcagaaatgcttggaatttggacattggacttatgaatgcacaggaaaaagaaaatacctacataggccctcaaggacagcagaactaaagaaagctttaaaagaaaaagaaaacagattattattgcaacaaaggtctaagagtgtaaccagttccagtagcagtagcagtgacagttctgccagtgattcttcatcagagagtgaagaaacatctacctcttcctcctcagaggacagtgacactgatgaaagctcctctagttcctcatcctcagcctcctccacaacctcttcctcctcctctgattcagactcagattccagctcttccagtagcagtagcaccagcacagatagcagctctgacgatgaaccaccaaagaagaagaaaaagaaatagagttgctccattcatattggactgatggactgaaaacattgatgtgattcttgaaagggaatttagaatatgttaaggccaagtaggttaactggtgaacatttctagaattcaaaagtttctaaatgttttacattgtaagagcatagagaatattaataatggcttatagagagagacttttatttgaagggtgaatcttgttttttttatctttaaaatatatctctagaacttaaagctgaaatctgcaaatctgtttgtgtgatgaaactatcttttctctctgtgaaataaatgccatactttgttatatatgttagtggtatgtatcagacatattttcaggatggtgcgtcaggatatctggcagtggatttctaatgcttttggctgtatgttatgtaagatttaatatgttgttactgtaagcttaggagttttcctactattaataaatgtgctctatttttacatttatgttcagaaagttatctgactttttgtcctaagtggtatgttcaaggagcctattaatatatttatagtttttgaatgctgtaagtttcaaattgctgtgttacgtcattcattttcttctggttccttaagtttttcaagttatccttttctgaggaaaattattctagaggaacctaaaaagggacaaaaaaattgaaacttcttaggagtctaatcttggtgccttctgttaaaagtcagtgtatcagaaaagaaagcagccatgtaagaggctaacttaaatagaagtgctagaaatatctttgtgtattaacatgcaataaaaggtaccattcaaagcagggggaaaggtaggaagaagaggtaatttttactgaaaattagggcaatgttggtcgccttttattaaaagctttttttaagctttcataaagattgctttttgctatttttgaaaatatggtattatagtttgtatggtaactggtcatatatgacagtctactgcatatatatgaatgactaggattaatctggtgtgtttacataggatatacatagttgaaatctagcatgaaaggttaaaaaggagatactgcacaatatttcttaaaagtaaaatgctgttattgtgatgagtctttggtttaacatcacagtattctgtgatgtctttttaactttttggaaagaggtatcatttgtagaaaaaatttgatttgggttaaatataggtttttaaaactataaatgttgtcttttttatatttttatgaaaaagcagtagaaaattacttttgaagaaaacaggctatttaaatattgaaatatatgtatgttgtgagtttaaggagcctgtaattgtcagttttacaaaaccatctgtgttcaatggttgtaaataaattctcaaaacatcatttcaaaggctgcctacagaatattatcacttgacagatagagttaataaattaccaatcaggcacattttataatgtttgtctctgtaaaggtaatattagcagttaaagaacacggatgagaaaagaatgtgttacataggttgcatcacttgcagttaaataaaactcacaatttgtgctcacaagcttaaa

SEQ ID NO: 3073 - protein, 174 aa, Homosapiens
MHRLIARRQAFDTELQPVKTFWILIQPSIVISEANKQHVRCQKCLEFGHWTYECTGKRKYLHRPSRTAELKKALKEKENRLLLQQRSKSVTSSSSSSSDSSASDSSSESEETSTSSSSEDSDTDESSSSSSSSASSTTSSSSSDSDSDSSSSSSSSTSTDSSSDDEPPKKKKKK

SEQ ID NO: 3074 - DNA, 1906 bp, Homosapiens
tggcgactcccatgcatcggctaatagcccggagacaagcgtctaagagtgtaaccagttccagtagcagtagcagtgacagttctgccagtgattcttcatcagagagtgaagaaacatctacctcttcctcctcagaggacagtgacactgatgaaagctcctctagttcctcatcctcagcctcctccacaacctcttcctcctcctctgattcagactcagattccagctcttccagtagcagtagcaccagcacagatagcagctctgacgatgaaccaccaaagaagaagaaaaagaaatagagttgctccattcatattggactgatggactgaaaacattgatgtgattcttgaaagggaatttagaatatgttaaggccaagtaggttaactggtgaacatttctagaattcaaaagtttctaaatgttttacattgtaagagcatagagaatattaataatggcttatagagagagacttttatttgaagggtgaatcttgttttttttatctttaaaatatatctctagaacttaaagctgaaatctgcaaatctgtttgtgtgatgaaactatcttttctctctgtgaaataaatgccatactttgttatatatgttagtggtatgtatcagacatattttcaggatggtgcgtcaggatatctggcagtggatttctaatgcttttggctgtatgttatgtaagatttaatatgttgttactgtaagcttaggagttttcctactattaataaatgtgctctatttttacatttatgttcagaaagttatctgactttttgtcctaagtggtatgttcaaggagcctattaatatatttatagtttttgaatgctgtaagtttcaaattgctgtgttacgtcattcattttcttctggttccttaagtttttcaagttatccttttctgaggaaaattattctagaggaacctaaaaagggacaaaaaaattgaaacttcttaggagtctaatcttggtgccttctgttaaaagtcagtgtatcagaaaagaaagcagccatgtaagaggctaacttaaatagaagtgctagaaatatctttgtgtattaacatgcaataaaaggtaccattcaaagcagggggaaaggtaggaagaagaggtaatttttactgaaaattagggcaatgttggtcgccttttattaaaagctttttttaagctttcataaagattgctttttgctatttttgaaaatatggtattatagtttgtatggtaactggtcatatatgacagtctactgcatatatatgaatgactaggattaatctggtgtgtttacataggatatacatagttgaaatctagcatgaaaggttaaaaaggagatactgcacaatatttcttaaaagtaaaatgctgttattgtgatgagtctttggtttaacatcacagtattctgtgatgtctttttaactttttggaaagaggtatcatttgtagaaaaaatttgatttgggttaaatataggtttttaaaactataaatgttgtcttttttatatttttatgaaaaagcagtagaaaattacttttgaagaaaacaggctatttaaatattgaaatatatgtatgttgtgagtttaaggagcctgtaattgtcagttttacaaaaccatctgtgttcaatggttgtaaataaattctcaaaacatcatttcaaaggctgcctacagaatattatcacttgacagatagagttaataaattaccaatcaggcacattttataatgtttgtctctgtaaaggtaatattagcagttaaagaacacggatgagaaaagaatgtgttacataggttgcatcacttgcagttaaataaaactcacaatttgtgctcacaagcttaaa

SEQ ID NO: 3075 - protein, 98 aa, Homosapiens
MHRLIARRQASKSVTSSSSSSSDSSASDSSSESEETSTSSSSEDSDTDESSSSSSSSASSTTSSSSSDSDSDSSSSSSSSTSTDSSSDDEPPKKKKKK

SEQ ID NO: 3076 - DNA, 2223 bp, Homosapiens
gaggagtttcccaaaaccctgcgcggccggctttgaccgcgctaagatggcgactcccatgcatcggctaatagcccggagacaagcattcgacacagagttgcagcctgtcaagaccttttggatcctgattcagccatccatcgttattagtgaagcaaataagcaacatgtaagatgtcagaaatgcttggaatttggacattggacttatgaatgcacaggaaaaagaaaatacctacataggccctcaaggacagcagaactaaagaaagctttaaaagaaaaagaaaacagattattattgcaacaaagcattggagaaaccaatgtagaaagaaaggccaagaaaaaaaggtctaagagtgtaaccagttccagtagcagtagcagtgacagttctgccagtgattcttcatcagagagtgaagaaacatctacctcttcctcctcagaggacagtgacactgatgaaagctcctctagttcctcatcctcagcctcctccacaacctcttcctcctcctctgattcagactcagattccagctcttccagtagcagtagcaccagcacagatagcagctctgacgatgaaccaccaaagaagaagaaaaagaaatagagttgctccattcatattggactgatggactgaaaacattgatgtgattcttgaaagggaatttagaatatgttaaggccaagtaggttaactggtgaacatttctagaattcaaaagtttctaaatgttttacattgtaagagcatagagaatattaataatggcttatagagagagacttttatttgaagggtgaatcttgttttttttatctttaaaatatatctctagaacttaaagctgaaatctgcaaatctgtttgtgtgatgaaactatcttttctctctgtgaaataaatgccatactttgttatatatgttagtggtatgtatcagacatattttcaggatggtgcgtcaggatatctggcagtggatttctaatgcttttggctgtatgttatgtaagatttaatatgttgttactgtaagcttaggagttttcctactattaataaatgtgctctatttttacatttatgttcagaaagttatctgactttttgtcctaagtggtatgttcaaggagcctattaatatatttatagtttttgaatgctgtaagtttcaaattgctgtgttacgtcattcattttcttctggttccttaagtttttcaagttatccttttctgaggaaaattattctagaggaacctaaaaagggacaaaaaaattgaaacttcttaggagtctaatcttggtgccttctgttaaaagtcagtgtatcagaaaagaaagcagccatgtaagaggctaacttaaatagaagtgctagaaatatctttgtgtattaacatgcaataaaaggtaccattcaaagcagggggaaaggtaggaagaagaggtaatttttactgaaaattagggcaatgttggtcgccttttattaaaagctttttttaagctttcataaagattgctttttgctatttttgaaaatatggtattatagtttgtatggtaactggtcatatatgacagtctactgcatatatatgaatgactaggattaatctggtgtgtttacataggatatacatagttgaaatctagcatgaaaggttaaaaaggagatactgcacaatatttcttaaaagtaaaatgctgttattgtgatgagtctttggtttaacatcacagtattctgtgatgtctttttaactttttggaaagaggtatcatttgtagaaaaaatttgatttgggttaaatataggtttttaaaactataaatgttgtcttttttatatttttatgaaaaagcagtagaaaattacttttgaagaaaacaggctatttaaatattgaaatatatgtatgttgtgagtttaaggagcctgtaattgtcagttttacaaaaccatctgtgttcaatggttgtaaataaattctcaaaacatcatttcaaaggctgcctacagaatattatcacttgacagatagagttaataaattaccaatcaggcacattttataatgtttgtctctgtaaaggtaatattagcagttaaagaacacggatgagaaaagaatgtgttacataggttgcatcacttgcagttaaataaaactcacaatttgtgctcacaagcttaaa

SEQ ID NO: 3077 - protein, 192 aa, Homosapiens
MATPMHRLIARRQAFDTELQPVKTFWILIQPSIVISEANKQHVRCQKCLEFGHWTYECTGKRKYLHRPSRTAELKKALKEKENRLLLQQSIGETNVERKAKKKRSKSVTSSSSSSSDSSASDSSSESEETSTSSSSEDSDTDESSSSSSSSASSTTSSSSSDSDSDSSSSSSSSTSTDSSSDDEPPKKKKKK

SEQ ID NO: 3078 - DNA, 2178 bp, Homosapiens
ggttggaagccccgcccttccgaggagtttcccaaaaccctgcgcggccggctttgaccgcgctaagatggcgactcccatgcatcggctaatagcccggagacaagctgaagcaaataagcaacatgtaagatgtcagaaatgcttggaatttggacattggacttatgaatgcacaggaaaaagaaaatacctacataggccctcaaggacagcagaactaaagaaagctttaaaagaaaaagaaaacagattattattgcaacaaagcattggagaaaccaatgtagaaagaaaggccaagaaaaaaaggtctaagagtgtaaccagttccagtagcagtagcagtgacagttctgccagtgattcttcatcagagagtgaagaaacatctacctcttcctcctcagaggacagtgacactgatgaaagctcctctagttcctcatcctcagcctcctccacaacctcttcctcctcctctgattcagactcagattccagctcttccagtagcagtagcaccagcacagatagcagctctgacgatgaaccaccaaagaagaagaaaaagaaatagagttgctccattcatattggactgatggactgaaaacattgatgtgattcttgaaagggaatttagaatatgttaaggccaagtaggttaactggtgaacatttctagaattcaaaagtttctaaatgttttacattgtaagagcatagagaatattaataatggcttatagagagagacttttatttgaagggtgaatcttgttttttttatctttaaaatatatctctagaacttaaagctgaaatctgcaaatctgtttgtgtgatgaaactatcttttctctctgtgaaataaatgccatactttgttatatatgttagtggtatgtatcagacatattttcaggatggtgcgtcaggatatctggcagtggatttctaatgcttttggctgtatgttatgtaagatttaatatgttgttactgtaagcttaggagttttcctactattaataaatgtgctctatttttacatttatgttcagaaagttatctgactttttgtcctaagtggtatgttcaaggagcctattaatatatttatagtttttgaatgctgtaagtttcaaattgctgtgttacgtcattcattttcttctggttccttaagtttttcaagttatccttttctgaggaaaattattctagaggaacctaaaaagggacaaaaaaattgaaacttcttaggagtctaatcttggtgccttctgttaaaagtcagtgtatcagaaaagaaagcagccatgtaagaggctaacttaaatagaagtgctagaaatatctttgtgtattaacatgcaataaaaggtaccattcaaagcagggggaaaggtaggaagaagaggtaatttttactgaaaattagggcaatgttggtcgccttttattaaaagctttttttaagctttcataaagattgctttttgctatttttgaaaatatggtattatagtttgtatggtaactggtcatatatgacagtctactgcatatatatgaatgactaggattaatctggtgtgtttacataggatatacatagttgaaatctagcatgaaaggttaaaaaggagatactgcacaatatttcttaaaagtaaaatgctgttattgtgatgagtctttggtttaacatcacagtattctgtgatgtctttttaactttttggaaagaggtatcatttgtagaaaaaatttgatttgggttaaatataggtttttaaaactataaatgttgtcttttttatatttttatgaaaaagcagtagaaaattacttttgaagaaaacaggctatttaaatattgaaatatatgtatgttgtgagtttaaggagcctgtaattgtcagttttacaaaaccatctgtgttcaatggttgtaaataaattctcaaaacatcatttcaaaggctgcctacagaatattatcacttgacagatagagttaataaattaccaatcaggcacattttataatgtttgtctctgtaaaggtaatattagcagttaaagaacacggatgagaaaagaatgtgttacataggttgcatcacttgcagttaaataaaactcacaatttgtgctcacaagcttaaa

SEQ ID NO: 3079 - protein, 170 aa, Homosapiens; identical to SEQ ID NO: 425

SEQ ID NO: 3080 - DNA, 1110 bp, Homosapiens
gaggagtttcccaaaaccctgcgcggccggctttgaccgcgctaagatggcgactcccatgcatcggctaatagcccggagacaagcattcgacacagagttgcagcctgtcaagaccttttggatcctgattcagccatccatcgttattagtgaagcaaataagcaacatgtaagatgtcagaaatgcttggaatttggacattggacttatgaatgcacaggaaaaagaaaatacctacataggccctcaaggacagcagaactaaagaaagctttaaaagaaaaagaaaacagattattattgcaacaaagcattggagaaaccaatgtagaaagaaaggccaagaaaaaaaggtctaagagtgtaaccagttccagtagcagtagcagtgacagttctgccagtgattcttcatcagagagtgaagaaacatctacctcttcctcctcagaggacagtgacactgatgaaagctcctctagttcctcatcctcagcctcctccacaacctcttcctcctcctctgattcagactcagattccagctcttccagtagcagtagcaccagcacagatagcagctctgacgatgaaccaccaaagaagaagaaaaagaaatagagttgctccattcatattggactgatggactgaaaacattgatgtgattcttgaaagggaatttagaatatgttaaggccaagtaggttaactggtgaacatttctagaattcaaaagtttctaaatgttttacattgtaagagcatagagaatattaataatggcttatagagagagacttttatttgaagggtgaatcttgttttttttatctttaaaatatatctctagaacttaaagctgaaatctgcaaatctgtttgtgtgatgaaactatcttttctctctgtgaaataaatgccatactttgttatatatgttagtggtatgtatcagacatattttcaggatggtgcgtcaggatatctggcagtggatttctaatgcttttggctgtatgttatgtaagatttaatatgttgttactgtaagcttaggagttttcctactattaataaatgtgctctatttttacatttatgttc

SEQ ID NO: 3081 - protein, 192 aa, Homosapiens; identical to SEQ ID NO: 3077

SEQ ID NO: 3082 - DNA, 1063 bp, Homosapiens
ggttggaagccccgcccttccgaggagtttcccaaaaccctgcgcggccggctttgaccgcgctaagatggcgactcccatgcatcggctaatagcccggagacaagctgaagcaaataagcaacatgtaagatgtcagaaatgcttggaatttggacattggacttatgaatgcacaggaaaaagaaaatacctacataggccctcaaggacagcagaactaaagaaagctttaaaagaaaaagaaaacagattattattgcaacaaagcattggagaaaccaatgtagaaagaaaggccaagaaaaaaaggtctaagagtgtaaccagttccagtagcagtagcagtgacagttctgccagtgattcttcatcagagagtgaagaaacatctacctcttcctcctcagaggacagtgacactgatgaaagctcctctagttcctcatcctcagcctcctccacaacctcttcctcctcctctgattcagactcagattccagctcttccagtagcagtagcaccagcacagatagcagctctgacgatgaaccaccaaagaagaagaaaaagaaatagagttgctccattcatattggactgatggactgaaaacattgatgtgattcttgaaagggaatttagaatatgttaaggccaagtaggttaactggtgaacatttctagaattcaaaagtttctaaatgttttacattgtaagagcatagagaatattaataatggcttatagagagagacttttatttgaagggtgaatcttgttttttttatctttaaaatatatctctagaacttaaagctgaaatctgcaaatctgtttgtgtgatgaaactatcttttctctctgtgaaataaatgccatactttgttatatatgttagtggtatgtatcagacatattttcaggatggtgcgtcaggatatctggcagtggatttctaatgcttttggctgtatgttatgtaagatttaatatgttgttactgtaagcttaggagttttcctactattaataaatgtgctctatttttacatttatgt

SEQ ID NO: 3083 - protein, 170 aa, Homosapiens; identical to SEQ ID NO: 425

SEQ ID NO: 3084 - DNA, 947 bp, Homosapiens
cgactcccatgcatcggctaatagcccggagacaagctgaagcaaataagcaacatgtaagatgtcagaaatgcttggaatttggacattggacttatgaatgcacaggaaaaagaaaatacctacataggccctcaaggacagcagaactaaagaaagctttaaaagaaaaagaaaacagattattattgcaacaaaggtctaagagtgtaaccagttccagtagcagtagcagtgacagttctgccagtgattcttcatcagagagtgaagaaacatctacctcttcctcctcagaggacagtgacactgatgaaagctcctctagttcctcatcctcagcctcctccacaacctcttcctcctcctctgattcagactcagattccagctcttccagtagcagtagcaccagcacagatagcagctctgacgatgaaccaccaaagaagaagaaaaagaaatagagttgctccattcatattggactgatggactgaaaacattgatgtgattcttgaaagggaatttagaatatgttaaggccaagtaggttaactggtgaacatttctagaattcaaaagtttctaaatgttttacattgtaagagcatagagaatattaataatggcttatagagagagacttttatttgaagggtgaatcttgttttttttatctttaaaatatatctctagaacttaaagctgaaatctgcaaatctgtttgtgtgatgaaactatcttttctctctgtgaaataaatgccatactttgttatatatgttagtggtatgtatcagacatattttcaggatggtgcgtcaggatatctggcagtggatttctaatgcttttggctgtatgttatgtaagatttaatatgttgttactgtaagcttaggagttttcctactattaataaatgtgctctatttttacattta

SEQ ID NO: 3085 - protein, 152 aa, Homosapiens; identical to SEQ ID NO: 3071

SEQ ID NO: 3086 - DNA, 1015 bp, Homosapiens
ggcgactcccatgcatcggctaatagcccggagacaagcattcgacacagagttgcagcctgtcaagaccttttggatcctgattcagccatccatcgttattagtgaagcaaataagcaacatgtaagatgtcagaaatgcttggaatttggacattggacttatgaatgcacaggaaaaagaaaatacctacataggccctcaaggacagcagaactaaagaaagctttaaaagaaaaagaaaacagattattattgcaacaaaggtctaagagtgtaaccagttccagtagcagtagcagtgacagttctgccagtgattcttcatcagagagtgaagaaacatctacctcttcctcctcagaggacagtgacactgatgaaagctcctctagttcctcatcctcagcctcctccacaacctcttcctcctcctctgattcagactcagattccagctcttccagtagcagtagcaccagcacagatagcagctctgacgatgaaccaccaaagaagaagaaaaagaaatagagttgctccattcatattggactgatggactgaaaacattgatgtgattcttgaaagggaatttagaatatgttaaggccaagtaggttaactggtgaacatttctagaattcaaaagtttctaaatgttttacattgtaagagcatagagaatattaataatggcttatagagagagacttttatttgaagggtgaatcttgttttttttatctttaaaatatatctctagaacttaaagctgaaatctgcaaatctgtttgtgtgatgaaactatcttttctctctgtgaaataaatgccatactttgttatatatgttagtggtatgtatcagacatattttcaggatggtgcgtcaggatatctggcagtggatttctaatgcttttggctgtatgttatgtaagatttaatatgttgttactgtaagcttaggagttttcctactattaataaatgtgctctatttttacattta

SEQ ID NO: 3087 - protein, 174 aa, Homosapiens; identical to SEQ ID NO: 3073

SEQ ID NO: 3088 - DNA, 323 bp, Homosapiens
ccttccgaggagtttcccaaaaccctgcgcggccggctttgaccgcgctaagatggcgactcccatgcatcggctaatagcccggagacaagcattcgacacagagttgcagcctgtcaagaccttttggatcctgattcagccatccatcgttattagagacagtgttgcccaggctggtctcaaactcctgagctcgggtgatcctgccttggcctctcaaagtgccaggattataggcgtgagccactgcgtccagcctcatacctgagctttagatgatatttgtgaatgtcgtatttataacaataaaaaacaaactc

SEQ ID NO: 3089 - protein, 72 aa, Homosapiens
MATPMHRLIARRQAFDTELQPVKTFWILIQPSIVIRDSVAQAGLKLLSSGDPALASQSARIIGVSHCVQPHT

SEQ ID NO: 3090 - DNA, 2847 bp, Homosapiens
gctctggtgctgcggctccgctctcgtcgcaacgagatctttcgagatcttctccgcccccgctaccggcgcctcctctgcggccactgagccggagccggcctgagcagcgctctcggttgcagtacccactggaaggacttaggcgctcgcgtggacaccgcaagcccctcagtagcctcggcccaagaggcctgctttccactcgctagccccgccgggggtccgtgtcctgtctcggtggccggacccgggcccgagcccgagcagtagccggcgccatgtcggtggtgggcatagacctgggcttccagagctgctacgtcgctgtggcccgcgccggcggcatcgagactatcgctaatgagtatagcgaccgctgcacgccggcttgcatttcttttggtcctaagaatcgttcaattggagcagcagctaaaagccaggtaatttctaatgcaaagaacacagtccaaggatttaaaagattccatggccgagcattctctgatccatttgtggaggcagaaaaatctaaccttgcatatgatattgtgcagttgcctacaggattaacaggtataaaggtgacatatatggaggaagagcgaaattttaccactgagcaagtgactgccatgcttttgtccaaactgaaggagacagccgaaagtgttcttaagaagcctgtagttgactgtgttgtttcggttccttgtttctatactgatgcagaaagacgatcagtgatggatgcaacacagattgctggtcttaattgcttgcgattaatgaatgaaaccactgcagttgctcttgcatatggaatctataagcaggatcttcctgccttagaagagaaaccaagaaatgtagtttttgtagacatgggccactctgcttatcaagtttctgtatgtgcatttaatagaggaaaactgaaagttctggccactgcatttgacacgacattgggaggtagaaaatttgatgaagtgttagtaaatcacttctgtgaagaatttgggaagaaatacaagctagacattaagtccaaaatccgtgcattattacgactctctcaggagtgtgagaaactcaagaaattgatgagtgcaaatgcttcagatctccctttgagcattgaatgttttatgaatgatgttgatgtatctggaactatgaatagaggcaaatttctggagatgtgcaatgatctcttagctagagtggagccaccacttcgtagtgttttggaacaaaccaagttaaagaaagaagatatttatgcagtggagatagttggtggtgctacacgaatccctgcggtaaaagagaagatcagcaaatttttcggtaaagaacttagtacaacattaaatgctgatgaagctgtcactcgaggctgtgcattgcagtgtgccatcttatcgcctgctttcaaagtcagagaattttctatcactgatgtagtaccatatccaatatctctgagatggaattctccagctgaagaagggtcaagtgactgtgaagtcttttccaaaaatcatgctgctcctttctctaaagttcttacattttatagaaaggaacctttcactcttgaggcctactacagctctcctcaggatttgccctatccagatcctgctatagctcagttttcagttcagaaagtcactcctcagtctgatggctccagttcaaaagtgaaagtcaaagttcgagtaaatgtccatggcattttcagtgtgtccagtgcatctttagtggaggttcacaagtctgaggaaaatgaggagccaatggaaacagatcagaatgcaaaggaggaagagaagatgcaagtggaccaggaggaaccacatgttgaagagcaacagcagcagacaccagcagaaaataaggcagagtctgaagaaatggagacctctcaagctggatccaaggataaaaagatggaccaaccaccccaagccaagaaggcaaaagtgaagaccagtactgtggacctgccaatcgagaatcagctattatggcagatagacagagagatgctcaacttgtacattgaaaatgagggtaagatgatcatgcaggataaactggagaaggagcggaatgatgctaagaacgcagtggaggaatatgtgtatgaaatgagagacaagcttagtggtgaatatgagaagtttgtgagtgaagatgatcgtaacagttttactttgaaactggaagatactgaaaattggttgtatgaggatggagaagaccagccaaagcaagtttatgttgataagttggctgaattaaaaaatctaggtcaacctattaagatacgtttccaggaatctgaagaacgaccaaaattatttgaagaactagggaaacagatccaacagtatatgaaaataatcagctctttcaaaaacaaggaggaccagtatgatcatttggatgctgctgacatgacaaaggtagaaaaaagcacaaatgaagcaatggagtggatgaataacaagctaaatctgcagaacaagcagagtttgaccatggatccagttgtcaagtcaaaagagattgaagctaaaattaaggagctgacaagtacttgtagccctataatttcaaagcccaaacccaaagtggaacctccaaaagaggaacaaaaaaatgcagagcagaatggaccagtggatggacaaggagacaacccaggcccccaggctgctgagcagggtacagacacagctgtgccttcggattcagacaagaagcttcctgaaatggacattgattgattccaacacttgtttctattaaaacagactattataaagcttt

SEQ ID NO: 3091 - protein, 840 aa, Homosapiens; identical to SEQ ID NO: 427

SEQ ID NO: 3092 - DNA, 2382 bp, Homosapiens
gctctggtgctgcggctccgctctcgtcgcaacgagatctttcgagatcttctccgcccccgctaccggcgcctcctctgcggccactgagccggagccggcctgagcagcgctctcggttgcagtacccactggaaggacttaggcgctcgcgtggacaccgcaagcccctcagtagcctcggcccaagaggcctgctttccactcgctagccccgccgggggtccgtgtcctgtctcggtggccggacccgggcccgagcccgagcagtagccggcgccatgtcggtggtgggcatagacctgggcttccagagctgctacgtcgctgtggcccgcgccggcggcatcgagactatcgctaatgagtatagcgaccgctgcacgccggcttgcatttcttttggtcctaagaatcgttcaattggagcagcagctaaaagccaggtaatttctaatgcaaagaacacagtccaaggatttaaaagattccatggccgagcattctctgatccatttgtggaggcagaaaaatctaaccttgcatatgatattgtgcagttgcctacaggattaacaggtataaaggtgacatatatggaggaagagccagaatggaccagtggatggacaaggagacaacccaggcccccaggctgctgagcagggtacagacacagctgtgccttcggattcagacaagaagcttcctgaaatggacattgattgattccaacacttgtttctattaaaacagactattataaagctttaagttgtcaactttgttctaaatatcaactagcgcaagtgaatactgaagatttcttagtcagtttttaggggattttcggggaggggaaataggtaatgtatggagcattttcacttctaaatagttagatacagaaattaagtgcattgtatctttttcataatggtactatttagaagcccagttagtcttactgagcttatgcttcactcctttatgtttaaccatgtgtctacaagaataagtttgttttggaaagttgagctatagctacagctctagctatccagcagacttttcattatgacttacatggcaggagctctaattatgctttaaaaatctgttgtggagattgctttaaatgctccctgcctggtgtggggatggggtccccctctttgtgagggctggagcatggcacggcatggattaacacggcagaggaacaaaggtgtgctctgagcttcttcatatttcaccttcaccctcacctgtgttctcttccctctctcccaataaaagggctcccattataaatgccatgtacttctcttgggaaaatagacccccttgcctagagtaagttgttaactgagggctttaaacctggaggctcttcctgaaagtatgttcatgaataccccaagcatcaaggtctaaataattttcagaagattagaattgggtagatatactgttggatatagccatggtaaatttaactgaggaattaaatccttgttaattttggtgtaaagatttgtatcctggcctgtttattcaggtgggagatgttctgtataattttgaggtatagcttgaactcctagaacaagagttaaaagttctttttagctcattcacaatcacttgtgtgttaagtgttaatatctgtcatgaacctgccaatttgtacgtgttaagcagctgacagatgatgcaaaaaaaactaagatacactggattgtactggatgagtctgaaattagtgttaaagaagtgtggtgcctgatgttataacaacacctcattcttaactgtgtggccaatgtcaggtataccaaagcattcctctgactgctttttggggcagtgttgacaggagtgaggcattttggaaactccaagggaagcctgtgtttgaggccagagttggtacctgctttaagaaactgttacagggcttgttggtaatgttttgaatctttgtaaaaattgatattctgtataacagagtgcctctctgttacttttggcctatgttgttagaaataagatgctatcttgcatagttagaattaagcgtttgtccatctctagataacattgaaaagtttgagtgttacaggctctaaagtgcaatggagaacaattgcttaggaggaggaaggggaaagtatacttatgttggtgtgtaagcatgcatggaggcctcgaggcaccacaacaaggccaggttcttagcacatcctctgttctctacctgtcatgcttcaagagttccagctggcctgctgtgaagccagtagctattttaaaagtgctggctgcaggattaagccaaccctttacaactggcccagaccgtaatggccatttcttctt

SEQ ID NO: 3093 - protein, 126 aa, Homosapiens
MSVVGIDLGFQSCYVAVARAGGIETIANEYSDRCTPACISFGPKNRSIGAAAKSQVISNAKNTVQGFKRFHGRAFSDPFVEAEKSNLAYDIVQLPTGLTGIKVTYMEEEPEWTSGWTRRQPRPPGC

SEQ ID NO: 3094 - DNA, 4457 bp, Homosapiens
gctctggtgctgcggctccgctctcgtcgcaacgagatctttcgagatcttctccgcccccgctaccggcgcctcctctgcggccactgagccggagccggcctgagcagcgctctcggttgcagtacccactggaaggacttaggcgctcgcgtggacaccgcaagcccctcagtagcctcggcccaagaggcctgctttccactcgctagccccgccgggggtccgtgtcctgtctcggtggccggacccgggcccgagcccgagcagtagccggcgccatgtcggtggtgggcatagacctgggcttccagagctgctacgtcgctgtggcccgcgccggcggcatcgagactatcgctaatgagtatagcgaccgctgcacgccggcttgcatttcttttggtcctaagaatcgttcaattggagcagcagctaaaagccaggtaatttctaatgcaaagaacacagtccaaggatttaaaagattccatggccgagcattctctgatccatttgtggaggcagaaaaatctaaccttgcatatgatattgtgcagttgcctacaggattaacaggtataaaggtgacatatatggaggaagagcgaaattttaccactgagcaagtgactgccatgcttttgtccaaactgaaggagacagccgaaagtgttcttaagaagcctgtagttgactgtgttgtttcggttccttgtttctatactgatgcagaaagacgatcagtgatggatgcaacacagattgctggtcttaattgcttgcgattaatgaatgaaaccactgcagttgctcttgcatatggaatctataagcaggatcttcctgccttagaagagaaaccaagaaatgtagtttttgtagacatgggccactctgcttatcaagtttctgtatgtgcatttaatagaggaaaactgaaagttctggccactgcatttgacacgacattgggaggtagaaaatttgatgaagtgttagtaaatcacttctgtgaagaatttgggaagaaatacaagctagacattaagtccaaaatccgtgcattattacgactctctcaggagtgtgagaaactcaagaaattgatgagtgcaaatgcttcagatctccctttgagcattgaatgttttatgaatgatgttgatgtatctggaactatgaatagaggcaaatttctggagatgtgcaatgatctcttagctagagtggagccaccacttcgtagtgttttggaacaaaccaagttaaagaaagaagatatttatgcagtggagatagttggtggtgctacacgaatccctgcggtaaaagagaagatcagcaaatttttcggtaaagaacttagtacaacattaaatgctgatgaagctgtcactcgaggctgtgcattgcagtgtgccatcttatcgcctgctttcaaagtcagagaattttctatcactgatgtagtaccatatccaatatctctgagatggaattctccagctgaagaagggtcaagtgactgtgaagtcttttccaaaaatcatgctgctcctttctctaaagttcttacattttatagaaaggaacctttcactcttgaggcctactacagctctcctcaggatttgccctatccagatcctgctatagctcagttttcagttcagaaagtcactcctcagtctgatggctccagttcaaaagtgaaagtcaaagttcgagtaaatgtccatggcattttcagtgtgtccagtgcatctttagtggaggttcacaagtctgaggaaaatgaggagccaatggaaacagatcagaatgcaaaggaggaagagaagatgcaagtggaccaggaggaaccacatgttgaagagcaacagcagcagacaccagcagaaaataaggcagagtctgaagaaatggagacctctcaagctggatccaaggataaaaagatggaccaaccaccccaagccaagaaggcaaaagtgaagaccagtactgtggacctgccaatcgagaatcagctattatggcagatagacagagagatgctcaacttgtacattgaaaatgagggtaagatgatcatgcaggataaactggagaaggagcggaatgatgctaagaacgcagtggaggaatatgtgtatgaaatgagagacaagcttagtggtgaatatgagaagtttgtgagtgaagatgatcgtaacagttttactttgaaactggaagatactgaaaattggttgtatgaggatggagaagaccagccaaagcaagtttatgttgataagttggctgaattaaaaaatctaggtcaacctattaagatacgtttccaggaatctgaagaacgaccaaaattatttgaagaactagggaaacagatccaacagtatatgaaaataatcagctctttcaaaaacaaggaggaccagtatgatcatttggatgctgctgacatgacaaaggtagaaaaaagcacaaatgaagcaatggagtggatgaataacaagctaaatctgcagaacaagcagagtttgaccatggatccagttgtcaagtcaaaagagattgaagctaaaattaaggagctgacaagtacttgtagccctataatttcaaagcccaaacccaaagtggaacctccaaaagaggaacaaaaaaatgcagagcagaatggaccagtggatggacaaggagacaacccaggcccccaggctgctgagcagggtacagacacagctgtgccttcggattcagacaagaagcttcctgaaatggacattgattgattccaacacttgtttctattaaaacagactattataaagctttaagttgtcaactttgttctaaatatcaactagcgcaagtgaatactgaagatttcttagtcagtttttaggggattttcggggaggggaaataggtaatgtatggagcattttcacttctaaatagttagatacagaaattaagtgcattgtatctttttcataatggtactatttagaagcccagttagtcttactgagcttatgcttcactcctttatgtttaaccatgtgtctacaagaataagtttgttttggaaagttgagctatagctacagctctagctatccagcagacttttcattatgacttacatggcaggagctctaattatgctttaaaaatctgttgtggagattgctttaaatgctccctgcctggtgtggggatggggtccccctctttgtgagggctggagcatggcacggcatggattaacacggcagaggaacaaaggtgtgctctgagcttcttcatatttcaccttcaccctcacctgtgttctcttccctctctcccaataaaagggctcccattataaatgccatgtacttctcttgggaaaatagacccccttgcctagagtaagttgttaactgagggctttaaacctggaggctcttcctgaaagtatgttcatgaataccccaagcatcaaggtctaaataattttcagaagattagaattgggtagatatactgttggatatagccatggtaaatttaactgaggaattaaatccttgttaattttggtgtaaagatttgtatcctggcctgtttattcaggtgggagatgttctgtataattttgaggtatagcttgaactcctagaacaagagttaaaagttctttttagctcattcacaatcacttgtgtgttaagtgttaatatctgtcatgaacctgccaatttgtacgtgttaagcagctgacagatgatgcaaaaaaaactaagatacactggattgtactggatgagtctgaaattagtgttaaagaagtgtggtgcctgatgttataacaacacctcattcttaactgtgtggccaatgtcaggtataccaaagcattcctctgactgctttttggggcagtgttgacaggagtgaggcattttggaaactccaagggaagcctgtgtttgaggccagagttggtacctgctttaagaaactgttacagggcttgttggtaatgttttgaatctttgtaaaaattgatattctgtataacagagtgcctctctgttacttttggcctatgttgttagaaataagatgctatcttgcatagttagaattaagcgtttgtccatctctagataacattgaaaagtttgagtgttacaggctctaaagtgcaatggagaacaattgcttaggaggaggaaggggaaagtatacttatgttggtgtgtaagcatgcatggaggcctcgaggcaccacaacaaggccaggttcttagcacatcctctgttctctacctgtcatgcttcaagagttccagctggcctgctgtgaagccagtagctattttaaaagtgctggctgcaggattaagccaaccctttacaactggcccagaccgtaatggccatttcttctt

SEQ ID NO: 3095 - protein, 840 aa, Homosapiens; identical to SEQ ID NO: 427

SEQ ID NO: 3096 - DNA, 2742 bp, Homosapiens
gctctggtgctgcggctccgctctcgtcgcaacgagatctttcgagatcttctccgcccccgctaccggcgcctcctctgcggccactgagccggagccggcctgagcagcgctctcggttgcagtacccactggaaggacttaggcgctcgcgtggacaccgcaagcccctcagtagcctcggcccaagaggcctgctttccactcgctagccccgccgggggtccgtgtcctgtctcggtggccggacccgggcccgagcccgagcagtagccggcgccatgtcggtggtgggcatagacctgggcttccagagctgctacgtcgctgtggcccgcgccggcggcatcgagactatcgctaatgagtatagcgaccgctgcacgccggcttgcatttcttttggtcctaagaatcgttcaattggagcagcagctaaaagccaggtaatttctaatgcaaagaacacagtccaaggatttaaaagattccatggccgagcattctctgatccatttgtggaggcagaaaaatctaaccttgcatatgatattgtgcagttgcctacaggattaacaggtataaaggtgacatatatggaggaagagccagaatggaccagtggatggacaaggagacaacccaggcccccaggctgctgagcagggtacagacacagctgtgccttcggattcagacaagaagcttcctgaaatggacattgattgattccaacacttgtttctattaaaacagactattataaagctttaagttgtcaactttgttctaaatatcaactagcgcaagtgaatactgaagatttcttagtcagtttttaggggattttcggggaggggaaataggtaatgtatggagcattttcacttctaaatagttagatacagaaattaagtgcattgtatctttttcataatggtactatttagaagcccagttagtcttactgagcttatgcttcactcctttatgtttaaccatgtgtctacaagaataagtttgttttggaaagttgagctatagctacagctctagctatccagcagacttttcattatgacttacatggcaggagctctaattatgctttaaaaatctgttgtggagattgctttaaatgctccctgcctggtgtggggatggggtccccctctttgtgagggctggagcatggcacggcatggattaacacggcagaggaacaaaggtgtgctctgagcttcttcatatttcaccttcaccctcacctgtgttctcttccctctctcccaataaaagggctcccattataaatgccatgtacttctcttgggaaaatagacccccttgcctagagtaagttgttaactgagggctttaaacctggaggctcttcctgaaagtatgttcatgaataccccaagcatcaaggtctaaataattttcagaagattagaattgggtagatatactgttggatatagccatggtaaatttaactgaggaattaaatccttgttaattttggtgtaaagatttgtatcctggcctgtttattcaggtgggagatgttctgtataattttgaggtatagcttgaactcctagaacaagagttaaaagttctttttagctcattcacaatcacttgtgtgttaagtgttaatatctgtcatgaacctgccaatttgtacgtgttaagcagctgacagatgatgcaaaaaaaactaagatacactggattgtactggatgagtctgaaattagtgttaaagaagtgtggtgcctgatgttataacaacacctcattcttaactgtgtggccaatgtcaggtataccaaagcattcctctgactgctttttggggcagtgttgacaggagtgaggcattttggaaactccaagggaagcctgtgtttgaggccagagttggtacctgctttaagaaactgttacagggcttgttggtaatgttttgaatctttgtaaaaattgatattctgtataacagagtgcctctctgttacttttggcctatgttgttagaaataagatgctatcttgcatagttagaattaagcgtttgtccatctctagataacattgaaaagtttgagtgttacaggctctaaagtgcaatggagaacaattgcttaggaggaggaaggggaaagtatacttatgttggtgtgtaagcatgcatggaggcctcgaggcaccacaacaaggccaggttcttagcacatcctctgttctctacctgtcatgcttcaagagttccagctggcctgctgtgaagccagtagctattttaaaagtgctggctgcaggattaagccaaccctttacaactggcccagaccgtaatggccatttcttcttaaaaaaaaaaaaattttttttttttttttttttttttttttttttttttttggtgtgtgtgtgtgtgtgtgtggggaagggtgtgggtgctgggatgggggtgaatttcaagttgaaacacgatgatgtggtctgcttgctctctgcttagacaggctttaagaccaattggattttcatggaggccaggacagagagtggtaattgatggcttgtgtacagacaagcatttatccaggttgcgttatccaaactgatttgttaaagctccaggtcacgttcttacactaagaaaatcattcagtaaacatgagacaagtttaggaaaaactaataaaataaacctgtcttaaacttgaa

SEQ ID NO: 3097 - protein, 126 aa, Homosapiens; identical to SEQ ID NO: 3093

SEQ ID NO: 3098 - DNA, 4817 bp, Homosapiens
gctctggtgctgcggctccgctctcgtcgcaacgagatctttcgagatcttctccgcccccgctaccggcgcctcctctgcggccactgagccggagccggcctgagcagcgctctcggttgcagtacccactggaaggacttaggcgctcgcgtggacaccgcaagcccctcagtagcctcggcccaagaggcctgctttccactcgctagccccgccgggggtccgtgtcctgtctcggtggccggacccgggcccgagcccgagcagtagccggcgccatgtcggtggtgggcatagacctgggcttccagagctgctacgtcgctgtggcccgcgccggcggcatcgagactatcgctaatgagtatagcgaccgctgcacgccggcttgcatttcttttggtcctaagaatcgttcaattggagcagcagctaaaagccaggtaatttctaatgcaaagaacacagtccaaggatttaaaagattccatggccgagcattctctgatccatttgtggaggcagaaaaatctaaccttgcatatgatattgtgcagttgcctacaggattaacaggtataaaggtgacatatatggaggaagagcgaaattttaccactgagcaagtgactgccatgcttttgtccaaactgaaggagacagccgaaagtgttcttaagaagcctgtagttgactgtgttgtttcggttccttgtttctatactgatgcagaaagacgatcagtgatggatgcaacacagattgctggtcttaattgcttgcgattaatgaatgaaaccactgcagttgctcttgcatatggaatctataagcaggatcttcctgccttagaagagaaaccaagaaatgtagtttttgtagacatgggccactctgcttatcaagtttctgtatgtgcatttaatagaggaaaactgaaagttctggccactgcatttgacacgacattgggaggtagaaaatttgatgaagtgttagtaaatcacttctgtgaagaatttgggaagaaatacaagctagacattaagtccaaaatccgtgcattattacgactctctcaggagtgtgagaaactcaagaaattgatgagtgcaaatgcttcagatctccctttgagcattgaatgttttatgaatgatgttgatgtatctggaactatgaatagaggcaaatttctggagatgtgcaatgatctcttagctagagtggagccaccacttcgtagtgttttggaacaaaccaagttaaagaaagaagatatttatgcagtggagatagttggtggtgctacacgaatccctgcggtaaaagagaagatcagcaaatttttcggtaaagaacttagtacaacattaaatgctgatgaagctgtcactcgaggctgtgcattgcagtgtgccatcttatcgcctgctttcaaagtcagagaattttctatcactgatgtagtaccatatccaatatctctgagatggaattctccagctgaagaagggtcaagtgactgtgaagtcttttccaaaaatcatgctgctcctttctctaaagttcttacattttatagaaaggaacctttcactcttgaggcctactacagctctcctcaggatttgccctatccagatcctgctatagctcagttttcagttcagaaagtcactcctcagtctgatggctccagttcaaaagtgaaagtcaaagttcgagtaaatgtccatggcattttcagtgtgtccagtgcatctttagtggaggttcacaagtctgaggaaaatgaggagccaatggaaacagatcagaatgcaaaggaggaagagaagatgcaagtggaccaggaggaaccacatgttgaagagcaacagcagcagacaccagcagaaaataaggcagagtctgaagaaatggagacctctcaagctggatccaaggataaaaagatggaccaaccaccccaagccaagaaggcaaaagtgaagaccagtactgtggacctgccaatcgagaatcagctattatggcagatagacagagagatgctcaacttgtacattgaaaatgagggtaagatgatcatgcaggataaactggagaaggagcggaatgatgctaagaacgcagtggaggaatatgtgtatgaaatgagagacaagcttagtggtgaatatgagaagtttgtgagtgaagatgatcgtaacagttttactttgaaactggaagatactgaaaattggttgtatgaggatggagaagaccagccaaagcaagtttatgttgataagttggctgaattaaaaaatctaggtcaacctattaagatacgtttccaggaatctgaagaacgaccaaaattatttgaagaactagggaaacagatccaacagtatatgaaaataatcagctctttcaaaaacaaggaggaccagtatgatcatttggatgctgctgacatgacaaaggtagaaaaaagcacaaatgaagcaatggagtggatgaataacaagctaaatctgcagaacaagcagagtttgaccatggatccagttgtcaagtcaaaagagattgaagctaaaattaaggagctgacaagtacttgtagccctataatttcaaagcccaaacccaaagtggaacctccaaaagaggaacaaaaaaatgcagagcagaatggaccagtggatggacaaggagacaacccaggcccccaggctgctgagcagggtacagacacagctgtgccttcggattcagacaagaagcttcctgaaatggacattgattgattccaacacttgtttctattaaaacagactattataaagctttaagttgtcaactttgttctaaatatcaactagcgcaagtgaatactgaagatttcttagtcagtttttaggggattttcggggaggggaaataggtaatgtatggagcattttcacttctaaatagttagatacagaaattaagtgcattgtatctttttcataatggtactatttagaagcccagttagtcttactgagcttatgcttcactcctttatgtttaaccatgtgtctacaagaataagtttgttttggaaagttgagctatagctacagctctagctatccagcagacttttcattatgacttacatggcaggagctctaattatgctttaaaaatctgttgtggagattgctttaaatgctccctgcctggtgtggggatggggtccccctctttgtgagggctggagcatggcacggcatggattaacacggcagaggaacaaaggtgtgctctgagcttcttcatatttcaccttcaccctcacctgtgttctcttccctctctcccaataaaagggctcccattataaatgccatgtacttctcttgggaaaatagacccccttgcctagagtaagttgttaactgagggctttaaacctggaggctcttcctgaaagtatgttcatgaataccccaagcatcaaggtctaaataattttcagaagattagaattgggtagatatactgttggatatagccatggtaaatttaactgaggaattaaatccttgttaattttggtgtaaagatttgtatcctggcctgtttattcaggtgggagatgttctgtataattttgaggtatagcttgaactcctagaacaagagttaaaagttctttttagctcattcacaatcacttgtgtgttaagtgttaatatctgtcatgaacctgccaatttgtacgtgttaagcagctgacagatgatgcaaaaaaaactaagatacactggattgtactggatgagtctgaaattagtgttaaagaagtgtggtgcctgatgttataacaacacctcattcttaactgtgtggccaatgtcaggtataccaaagcattcctctgactgctttttggggcagtgttgacaggagtgaggcattttggaaactccaagggaagcctgtgtttgaggccagagttggtacctgctttaagaaactgttacagggcttgttggtaatgttttgaatctttgtaaaaattgatattctgtataacagagtgcctctctgttacttttggcctatgttgttagaaataagatgctatcttgcatagttagaattaagcgtttgtccatctctagataacattgaaaagtttgagtgttacaggctctaaagtgcaatggagaacaattgcttaggaggaggaaggggaaagtatacttatgttggtgtgtaagcatgcatggaggcctcgaggcaccacaacaaggccaggttcttagcacatcctctgttctctacctgtcatgcttcaagagttccagctggcctgctgtgaagccagtagctattttaaaagtgctggctgcaggattaagccaaccctttacaactggcccagaccgtaatggccatttcttcttaaaaaaaaaaaaattttttttttttttttttttttttttttttttttttttggtgtgtgtgtgtgtgtgtgtggggaagggtgtgggtgctgggatgggggtgaatttcaagttgaaacacgatgatgtggtctgcttgctctctgcttagacaggctttaagaccaattggattttcatggaggccaggacagagagtggtaattgatggcttgtgtacagacaagcatttatccaggttgcgttatccaaactgatttgttaaagctccaggtcacgttcttacactaagaaaatcattcagtaaacatgagacaagtttaggaaaaactaataaaataaacctgtcttaaacttgaa

SEQ ID NO: 3099 - protein, 840 aa, Homosapiens; identical to SEQ ID NO: 427

SEQ ID NO: 3100 - DNA, 754 bp, Homosapiens
tgcggctccgctctcgtcgcaacgagatctttcgagatcttctccgcccccgctaccggcgcctcctctgcggccactgagccggagccggcctgagcagcgctctcggttgcagtacccactggaaggacttaggcgctcgcgtggacaccgcaagcccctcagtagcctcggcccaagaggcctgctttccactcgctagccccgccgggggtccgtgtcctgtctcggtggccggacccgggcccgagcccgagcagtagccggcgccatgtcggtggtgggcatagacctgggcttccagagctgctacgtcgctgtggcccgcgccggcggcatcgagactatcgctaatgagtatagcgaccgctgcacgccggcttgcatttcttttggtcctaagaatcgttcaattggagcagcagctaaaagccaggtaatttctaatgcaaagaacacagtccaaggatttaaaagattccatggccgagcattctctgatccatttgtggaggcagaaaaatctaaccttgcatatgatattgtgcagttgcctacaggattaacaggtataaaggtaaggttgtcaggcagagcagaatggaccagtggatggacaaggagacaacccaggcccccaggctgctgagcagggtacagacacagctgtgccttcggattcagacaagaagcttcctgaaatggacattgattgattccaacacttgtttctattaaaacagactattataaa

SEQ ID NO: 3101 - protein, 125 aa, Homosapiens
MSVVGIDLGFQSCYVAVARAGGIETIANEYSDRCTPACISFGPKNRSIGAAAKSQVISNAKNTVQGFKRFHGRAFSDPFVEAEKSNLAYDIVQLPTGLTGIKVRLSGRAEWTSGWTRRQPRPPGC

SEQ ID NO: 3102 - DNA, 2369 bp, Homosapiens
tgcggctccgctctcgtcgcaacgagatctttcgagatcttctccgcccccgctaccggcgcctcctctgcggccactgagccggagccggcctgagcagcgctctcggttgcagtacccactggaaggacttaggcgctcgcgtggacaccgcaagcccctcagtagcctcggcccaagaggcctgctttccactcgctagccccgccgggggtccgtgtcctgtctcggtggccggacccgggcccgagcccgagcagtagccggcgccatgtcggtggtgggcatagacctgggcttccagagctgctacgtcgctgtggcccgcgccggcggcatcgagactatcgctaatgagtatagcgaccgctgcacgccggcttgcatttcttttggtcctaagaatcgttcaattggagcagcagctaaaagccaggtaatttctaatgcaaagaacacagtccaaggatttaaaagattccatggccgagcattctctgatccatttgtggaggcagaaaaatctaaccttgcatatgatattgtgcagttgcctacaggattaacaggtataaaggtaaggttgtcaggcagagcagaatggaccagtggatggacaaggagacaacccaggcccccaggctgctgagcagggtacagacacagctgtgccttcggattcagacaagaagcttcctgaaatggacattgattgattccaacacttgtttctattaaaacagactattataaagctttaagttgtcaactttgttctaaatatcaactagcgcaagtgaatactgaagatttcttagtcagtttttaggggattttcggggaggggaaataggtaatgtatggagcattttcacttctaaatagttagatacagaaattaagtgcattgtatctttttcataatggtactatttagaagcccagttagtcttactgagcttatgcttcactcctttatgtttaaccatgtgtctacaagaataagtttgttttggaaagttgagctatagctacagctctagctatccagcagacttttcattatgacttacatggcaggagctctaattatgctttaaaaatctgttgtggagattgctttaaatgctccctgcctggtgtggggatggggtccccctctttgtgagggctggagcatggcacggcatggattaacacggcagaggaacaaaggtgtgctctgagcttcttcatatttcaccttcaccctcacctgtgttctcttccctctctcccaataaaagggctcccattataaatgccatgtacttctcttgggaaaatagacccccttgcctagagtaagttgttaactgagggctttaaacctggaggctcttcctgaaagtatgttcatgaataccccaagcatcaaggtctaaataattttcagaagattagaattgggtagatatactgttggatatagccatggtaaatttaactgaggaattaaatccttgttaattttggtgtaaagatttgtatcctggcctgtttattcaggtgggagatgttctgtataattttgaggtatagcttgaactcctagaacaagagttaaaagttctttttagctcattcacaatcacttgtgtgttaagtgttaatatctgtcatgaacctgccaatttgtacgtgttaagcagctgacagatgatgcaaaaaaaactaagatacactggattgtactggatgagtctgaaattagtgttaaagaagtgtggtgcctgatgttataacaacacctcattcttaactgtgtggccaatgtcaggtataccaaagcattcctctgactgctttttggggcagtgttgacaggagtgaggcattttggaaactccaagggaagcctgtgtttgaggccagagttggtacctgctttaagaaactgttacagggcttgttggtaatgttttgaatctttgtaaaaattgatattctgtataacagagtgcctctctgttacttttggcctatgttgttagaaataagatgctatcttgcatagttagaattaagcgtttgtccatctctagataacattgaaaagtttgagtgttacaggctctaaagtgcaatggagaacaattgcttaggaggaggaaggggaaagtatacttatgttggtgtgtaagcatgcatggaggcctcgaggcaccacaacaaggccaggttcttagcacatcctctgttctctacctgtcatgcttcaagagttccagctggcctgctgtgaagccagtagctattttaaaagtgctggctgcaggattaagccaaccctttacaactggcccagaccgtaatggccatttcttctt

SEQ ID NO: 3103 - protein, 125 aa, Homosapiens; identical to SEQ ID NO: 3101

SEQ ID NO: 3104 - DNA, 2729 bp, Homosapiens
tgcggctccgctctcgtcgcaacgagatctttcgagatcttctccgcccccgctaccggcgcctcctctgcggccactgagccggagccggcctgagcagcgctctcggttgcagtacccactggaaggacttaggcgctcgcgtggacaccgcaagcccctcagtagcctcggcccaagaggcctgctttccactcgctagccccgccgggggtccgtgtcctgtctcggtggccggacccgggcccgagcccgagcagtagccggcgccatgtcggtggtgggcatagacctgggcttccagagctgctacgtcgctgtggcccgcgccggcggcatcgagactatcgctaatgagtatagcgaccgctgcacgccggcttgcatttcttttggtcctaagaatcgttcaattggagcagcagctaaaagccaggtaatttctaatgcaaagaacacagtccaaggatttaaaagattccatggccgagcattctctgatccatttgtggaggcagaaaaatctaaccttgcatatgatattgtgcagttgcctacaggattaacaggtataaaggtaaggttgtcaggcagagcagaatggaccagtggatggacaaggagacaacccaggcccccaggctgctgagcagggtacagacacagctgtgccttcggattcagacaagaagcttcctgaaatggacattgattgattccaacacttgtttctattaaaacagactattataaagctttaagttgtcaactttgttctaaatatcaactagcgcaagtgaatactgaagatttcttagtcagtttttaggggattttcggggaggggaaataggtaatgtatggagcattttcacttctaaatagttagatacagaaattaagtgcattgtatctttttcataatggtactatttagaagcccagttagtcttactgagcttatgcttcactcctttatgtttaaccatgtgtctacaagaataagtttgttttggaaagttgagctatagctacagctctagctatccagcagacttttcattatgacttacatggcaggagctctaattatgctttaaaaatctgttgtggagattgctttaaatgctccctgcctggtgtggggatggggtccccctctttgtgagggctggagcatggcacggcatggattaacacggcagaggaacaaaggtgtgctctgagcttcttcatatttcaccttcaccctcacctgtgttctcttccctctctcccaataaaagggctcccattataaatgccatgtacttctcttgggaaaatagacccccttgcctagagtaagttgttaactgagggctttaaacctggaggctcttcctgaaagtatgttcatgaataccccaagcatcaaggtctaaataattttcagaagattagaattgggtagatatactgttggatatagccatggtaaatttaactgaggaattaaatccttgttaattttggtgtaaagatttgtatcctggcctgtttattcaggtgggagatgttctgtataattttgaggtatagcttgaactcctagaacaagagttaaaagttctttttagctcattcacaatcacttgtgtgttaagtgttaatatctgtcatgaacctgccaatttgtacgtgttaagcagctgacagatgatgcaaaaaaaactaagatacactggattgtactggatgagtctgaaattagtgttaaagaagtgtggtgcctgatgttataacaacacctcattcttaactgtgtggccaatgtcaggtataccaaagcattcctctgactgctttttggggcagtgttgacaggagtgaggcattttggaaactccaagggaagcctgtgtttgaggccagagttggtacctgctttaagaaactgttacagggcttgttggtaatgttttgaatctttgtaaaaattgatattctgtataacagagtgcctctctgttacttttggcctatgttgttagaaataagatgctatcttgcatagttagaattaagcgtttgtccatctctagataacattgaaaagtttgagtgttacaggctctaaagtgcaatggagaacaattgcttaggaggaggaaggggaaagtatacttatgttggtgtgtaagcatgcatggaggcctcgaggcaccacaacaaggccaggttcttagcacatcctctgttctctacctgtcatgcttcaagagttccagctggcctgctgtgaagccagtagctattttaaaagtgctggctgcaggattaagccaaccctttacaactggcccagaccgtaatggccatttcttcttaaaaaaaaaaaaattttttttttttttttttttttttttttttttttttttggtgtgtgtgtgtgtgtgtgtggggaagggtgtgggtgctgggatgggggtgaatttcaagttgaaacacgatgatgtggtctgcttgctctctgcttagacaggctttaagaccaattggattttcatggaggccaggacagagagtggtaattgatggcttgtgtacagacaagcatttatccaggttgcgttatccaaactgatttgttaaagctccaggtcacgttcttacactaagaaaatcattcagtaaacatgagacaagtttaggaaaaactaataaaataaacctgtcttaaacttgaa

SEQ ID NO: 3105 - protein, 125 aa, Homosapiens; identical to SEQ ID NO: 3101

SEQ ID NO: 3106 - DNA, 1624 bp, Homosapiens
gatagaagcgcggtcaggaggggagctcagtccaccagccactccagggagagacggaaactacaaatcccatcaagccccgcagccggctccctcctcctccctctccttccccttcagcctgcggccgggcggcgctgggcttttatctgcggacccgccgggagggagccagatcccagcgatcttccccgacggcagcgctttacccagaggctgccggcggctcgtagctgggttcagctctgcgtccacgccagcccggagcccggggggcaaggggtctgtcccgggcgcagcgagaggatggtcatccgcgtgttcatcgcctcttcctcgggcttcgtggcgataaagaagaagcagcaagatgtggttagatttctggaagccaacaagatagagtttgaggaggtggatatcacaatgtcagaagaacagaggcaatggatgtacaaaaacgtccccccggaaaagaaacccactcagggcaaccccctgccacctcagatatttaatggcgaccgatactgtggagattatgacagtttttttgaatccaaggaaagcaacacagtcttttcatttttaggcctgaaaccacggttggcatcaaaggcagaaccttagagaagaagagtggaagatgacggagatgcattttgaagcacccctggtactcagcacacacatgcttacctaatgcatcactgtgacaaaagccacacgcattatcagtaactttgcttgccacggaaaaggtgtttttgaaagatgtggctataatgagaattgcatgattgctttaaaccaaatcaggtggtggattttttttttcttattctatttgcctgcagttgcctcactcacctggaaataccgtcacctgttacaggtgtactttcttaatgactgaaagataagtgggtagcaccgtcagagagaaaatgttggatctgccctaggttatagtagatgccggaattgcgtaaacccacttctctttaagctgcctggattgcacctttgaaatatgtctgccaagttgttagaatctttgaatcagaaggaaaaaaagcagcgctggttgacaaagggtgttgaagatttttgctgcagaatcagttacaaacatcacagttcccatgctttgtaataacacctggtgaaaaagttagatattctagacttgttttagtaatggaaactcttacctccacatattatcctacagatgtttccagaaatccctgttgtaacatcaagtgatcagaactaagttactgggatgacaataattgctatttgaaatatatgcttctttatttcttgcaaggggcaagtttcacccaaatgcctgagactgcttgaaagatatattttaagtggtgcactaattagtgaatatataggaaaattatctgacgagtatctgaaggcattttcagctctagcaatttatttataatatataagttcatatattttttaatccagctcccctaacagacagctgctgcttctattttgtgaagggactatattttttgagaaaggaaaatctcagttagatatattttgtgaacccttgattagacatattaaaatataccaatgttgtagt

SEQ ID NO: 3107 - protein, 107 aa, Homosapiens; identical to SEQ ID NO: 431

SEQ ID NO: 3108 - DNA, 3621 bp, Homosapiens
gatagaagcgcggtcaggaggggagctcagtccaccagccactccagggagagacggaaactacaaatcccatcaagccccgcagccggctccctcctcctccctctccttccccttcagcctgcggccgggcggcgctgggcttttatctgcggacccgccgggagggagccagatcccagcgatcttccccgacggcagcgctttacccagaggctgccggcggctcgtagctgggttcagctctgcgtccacgccagcccggagcccggggggcaaggggtctgtcccgggcgcagcgagaggatggtcatccgcgtgttcatcgcctcttcctcgggcttcgtggcgataaagaagaagcagcaagatgtggttagatttctggaagccaacaagatagagtttgaggaggtggatatcacaatgtcagaagaacagaggcaatggatgtacaaaaacgtccccccggaaaagaaacccactcagggcaaccccctgccacctcagatatttaatggcgaccgatactgtggagattatgacagtttttttgaatccaaggaaagcaacacagtcttttcatttttaggcctgaaaccacggttggcatcaaaggcagaaccttagagaagaagagtggaagatgacggagatgcattttgaagcacccctggtactcagcacacacatgcttacctaatgcatcactgtgacaaaagccacacgcattatcagtaactttgcttgccacggaaaaggtgtttttgaaagatgtggctataatgagaattgcatgattgctttaaaccaaatcaggtggtggattttttttttcttattctatttgcctgcagttgcctcactcacctggaaataccgtcacctgttacaggtgtactttcttaatgactgaaagataagtgggtagcaccgtcagagagaaaatgttggatctgccctaggttatagtagatgccggaattgcgtaaacccacttctctttaagctgcctggattgcacctttgaaatatgtctgccaagttgttagaatctttgaatcagaaggaaaaaaagcagcgctggttgacaaagggtgttgaagatttttgctgcagaatcagttacaaacatcacagttcccatgctttgtaataacacctggtgaaaaagttagatattctagacttgttttagtaatggaaactcttacctccacatattatcctacagatgtttccagaaatccctgttgtaacatcaagtgatcagaactaagttactgggatgacaataattgctatttgaaatatatgcttctttatttcttgcaaggggcaagtttcacccaaatgcctgagactgcttgaaagatatattttaagtggtgcactaattagtgaatatataggaaaattatctgacgagtatctgaaggcattttcagctctagcaatttatttataatatataagttcatatattttttaatccagctcccctaacagacagctgctgcttctattttgtgaagggactatattttttgagaaaggaaaatctcagttagatatattttgtgaacccttgattagacatattaaaatataccaatgttgtagtaaaatttaatttttccttttgttacttttcatttgcctctaattttgcttgctcatatttctggccaatgtacagcctcatatttttcagagtaatacagatacttgttctcattccgtatatgagcacaagtaaggtttcagagcaacacacatgagaaagagagtaacccggaattgtacttgtcaagcaaaatctatactcctattggagtggatgctgatgaacatcgaacatatctacttcattagagcagaggctatttttctgcattcttgtccctataacagggatgcttaattttttttttaacttagagttttaaattgccaaacatgggaacagccttgaataggataaattttcagagggctgcctaaaatattttatttctagcatcctgattctggacttttcattataattctgagcaggaaatttataagaaattgaaagagcagaagaattacagccctgtcacatgtgcccagcactccgccccatgccttgctaaatgtagactaaagaacttgttgaatgctaaggctgaaatcccaacctgagatttgtagtccaggattacaaccagaaggaaagtatgacagatttctacttaactagaatggacacatgatccacaattttctcttcaagggaagctgttgtcaaattatggatattactggttagttgtcattaagtaagatccaggtcaaattccatttgacaaatcccagggactatccaggaatttttttttaactggatattgtgtttgagtatgtgagtcttctgataaaactcagaatttctttttaagcagttgtaaaaattgtcatgttgtaattcattactcagctaacatttagtctactcttgctagtgagtgccaagaaccaacttggtaaggttgaggctttgcaagttaactgctggggttataggatcaataccatacttgctagacaaagctacccagatttgtcttatattataatttttgagttaaccgtagtatacctattatgattatagtaaacagactagtgggtagtaatgctaaattaccatcacagttatgtgccatctccccaccccatttttttttttttttttttgatcagcaaagaaatacaggagaccagtctcgagtggtgctgtacttgttatgagtgaggcagcagcacagtgtgtggcatttacatggtacccaggctccacagagtaccaagatgttgccctctgggaccacacttagctcagagaatatggggtccttacttgtattcttttatcagctgattttgaaacatataataatgattttcttgttcccttctttaactagctgcctttagattttgataatcacagtcttaaaatactaggaaagaagtggatgggaattgtaggcatagatttcatatcaagggcatttcaagacagaatttttatttcctgtagtaggcttgctggagcaaaggaaatgtgctgctaaaaatcaacttatgccattttaaaattagataaaatatggagtgccatcctgctaggtgagtacagaccagaagaaaatttagttgggaaaatacttgtttttccaaattccggtgttttattacaatcaaagaagaggaaagcaaggtattttttcacctcagattctaatatattctagatttgtttctgttttatagatttaattcaatacctccacatagatgtttttatattacatgaatttaataataaactaaacttttttttgtctcccgttattgaaaagtaccaaagcttctttctgttgtgtttgattttactataggggttttgctttttctagagatacttttcatttaacagcttttgttaagtgtcaggctgcactttgctccatataattattgttttcagatttcaacttgtatgtgtttgtctcttaaagcattggtgaaatcacatattttatattcagcataaaggagaataaattccag

SEQ ID NO: 3109 - protein, 107 aa, Homosapiens; identical to SEQ ID NO: 431

SEQ ID NO: 3110 - DNA, 4791 bp, Homosapiens
gatagaagcgcggtcaggaggggagctcagtccaccagccactccagggagagacggaaactacaaatcccatcaagccccgcagccggctccctcctcctccctctccttccccttcagcctgcggccgggcggcgctgggcttttatctgcggacccgccgggagggagccagatcccagcgatcttccccgacggcagcgctttacccagaggctgccggcggctcgtagctgggttcagctctgcgtccacgccagcccggagcccggggggcaaggggtctgtcccgggcgcagcgagaggatggtcatccgcgtgttcatcgcctcttcctcgggcttcgtggcgataaagaagaagcagcaagatgtggttagatttctggaagccaacaagatagagtttgaggaggtggatatcacaatgtcagaagaacagaggcaatggatgtacaaaaacgtccccccggaaaagaaacccactcagggcaaccccctgccacctcagatatttaatggcgaccgatactgtggagattatgacagtttttttgaatccaaggaaagcaacacagtcttttcatttttaggcctgaaaccacggttggcatcaaaggcagaaccttagagaagaagagtggaagatgacggagatgcattttgaagcacccctggtactcagcacacacatgcttacctaatgcatcactgtgacaaaagccacacgcattatcagtaactttgcttgccacggaaaaggtgtttttgaaagatgtggctataatgagaattgcatgattgctttaaaccaaatcaggtggtggattttttttttcttattctatttgcctgcagttgcctcactcacctggaaataccgtcacctgttacaggtgtactttcttaatgactgaaagataagtgggtagcaccgtcagagagaaaatgttggatctgccctaggttatagtagatgccggaattgcgtaaacccacttctctttaagctgcctggattgcacctttgaaatatgtctgccaagttgttagaatctttgaatcagaaggaaaaaaagcagcgctggttgacaaagggtgttgaagatttttgctgcagaatcagttacaaacatcacagttcccatgctttgtaataacacctggtgaaaaagttagatattctagacttgttttagtaatggaaactcttacctccacatattatcctacagatgtttccagaaatccctgttgtaacatcaagtgatcagaactaagttactgggatgacaataattgctatttgaaatatatgcttctttatttcttgcaaggggcaagtttcacccaaatgcctgagactgcttgaaagatatattttaagtggtgcactaattagtgaatatataggaaaattatctgacgagtatctgaaggcattttcagctctagcaatttatttataatatataagttcatatattttttaatccagctcccctaacagacagctgctgcttctattttgtgaagggactatattttttgagaaaggaaaatctcagttagatatattttgtgaacccttgattagacatattaaaatataccaatgttgtagtaaaatttaatttttccttttgttacttttcatttgcctctaattttgcttgctcatatttctggccaatgtacagcctcatatttttcagagtaatacagatacttgttctcattccgtatatgagcacaagtaaggtttcagagcaacacacatgagaaagagagtaacccggaattgtacttgtcaagcaaaatctatactcctattggagtggatgctgatgaacatcgaacatatctacttcattagagcagaggctatttttctgcattcttgtccctataacagggatgcttaattttttttttaacttagagttttaaattgccaaacatgggaacagccttgaataggataaattttcagagggctgcctaaaatattttatttctagcatcctgattctggacttttcattataattctgagcaggaaatttataagaaattgaaagagcagaagaattacagccctgtcacatgtgcccagcactccgccccatgccttgctaaatgtagactaaagaacttgttgaatgctaaggctgaaatcccaacctgagatttgtagtccaggattacaaccagaaggaaagtatgacagatttctacttaactagaatggacacatgatccacaattttctcttcaagggaagctgttgtcaaattatggatattactggttagttgtcattaagtaagatccaggtcaaattccatttgacaaatcccagggactatccaggaatttttttttaactggatattgtgtttgagtatgtgagtcttctgataaaactcagaatttctttttaagcagttgtaaaaattgtcatgttgtaattcattactcagctaacatttagtctactcttgctagtgagtgccaagaaccaacttggtaaggttgaggctttgcaagttaactgctggggttataggatcaataccatacttgctagacaaagctacccagatttgtcttatattataatttttgagttaaccgtagtatacctattatgattatagtaaacagactagtgggtagtaatgctaaattaccatcacagttatgtgccatctccccaccccatttttttttttttttttttgatcagcaaagaaatacaggagaccagtctcgagtggtgctgtacttgttatgagtgaggcagcagcacagtgtgtggcatttacatggtacccaggctccacagagtaccaagatgttgccctctgggaccacacttagctcagagaatatggggtccttacttgtattcttttatcagctgattttgaaacatataataatgattttcttgttcccttctttaactagctgcctttagattttgataatcacagtcttaaaatactaggaaagaagtggatgggaattgtaggcatagatttcatatcaagggcatttcaagacagaatttttatttcctgtagtaggcttgctggagcaaaggaaatgtgctgctaaaaatcaacttatgccattttaaaattagataaaatatggagtgccatcctgctaggtgagtacagaccagaagaaaatttagttgggaaaatacttgtttttccaaattccggtgttttattacaatcaaagaagaggaaagcaaggtattttttcacctcagattctaatatattctagatttgtttctgttttatagatttaattcaatacctccacatagatgtttttatattacatgaatttaataataaactaaacttttttttgtctcccgttattgaaaagtaccaaagcttctttctgttgtgtttgattttactataggggttttgctttttctagagatacttttcatttaacagcttttgttaagtgtcaggctgcactttgctccatataattattgttttcagatttcaacttgtatgtgtttgtctcttaaagcattggtgaaatcacatattttatattcagcataaaggagaataaattccagaaaacacatattctgaaaatggagtgtttgttccctgccatttttcacacctctcttaattttagttctgtttagttgagaggctgtgattttactcttgcctgtgaacctcatgcatgaaagcagcacattaaattgtaaaaatacaaacagatcgtgtgatcattcaaggagccagacatgaggtcctgcacgagggtgttgggaggacaccacagattcatctcagacagtgatcaggactgaggatggagttaaatcactcagcccctgggtggggtggggtggttcaaatggatgactgatctcctgagtacactgaagccacaggctggtggccatgttctctgaattgggtgcagaagacaagggcagagtggctgcggcccctattacctttgtagcagccacatcagaaagcagaagaaaacagtatttctgaaggcattgtttgaggttgatctcagcactgaacgatttcaagccctacgcaccagaacagaaggagggtggaggaagtgatcagagggaacgagctgtaggtttgcagaaatgtgtgaaaccaaaatgatcactgcctacttgtgattcaaatcttcagagttttcctagttcttctagaaatacatgtcaggtttgtttgttcatcctttctgtcagcatggatcaagcccctaaaatgtggtaagtgttgtcagagcagggcaatatctctactctcaagtatgaggggaatagaaacaaagcagcagttttagccagggttcaatgatagagtggaggtaaattaagagcctccaggctgtgattcaccatttgagacattatacataatttgtttttgttataagccatttgaatttttaaaaaatttcatacatgcaatggaatatagatatgtatatacacatataatatatatgctaaagtataaagagtaataataatgacaataaacaaacccctgtgtgcctaccacccaccttattgcctttcctttgaggtaccgtgtgcggtttcctgaacctatctctatccctgtctgatagagggaacccctgtactgaactttgtgttgaccatagccttcttgtctttcatcactttatctccatgtatgtatccttaaagaataataaatggaattaaactgaatgtattcttctgtca

SEQ ID NO: 3111 - protein, 107 aa, Homosapiens; identical to SEQ ID NO: 431

SEQ ID NO: 3112 - DNA, 1319 bp, Homosapiens
agaatgaagcaggagacctggaaggaagcagaaaagccactgagagataaagaagaagcagcaagatgtggttagatttctggaagccaacaagatagagtttgaggaggtggatatcacaatgtcagaagaacagaggcaatggatgtacaaaaacgtccccccggaaaagaaacccactcagggcaaccccctgccacctcagatatttaatggcgaccgatactgtggagattatgacagtttttttgaatccaaggaaagcaacacagtcttttcatttttaggcctgaaaccacggttggcatcaaaggcagaaccttagagaagaagagtggaagatgacggagatgcattttgaagcacccctggtactcagcacacacatgcttacctaatgcatcactgtgacaaaagccacacgcattatcagtaactttgcttgccacggaaaaggtgtttttgaaagatgtggctataatgagaattgcatgattgctttaaaccaaatcaggtggtggattttttttttcttattctatttgcctgcagttgcctcactcacctggaaataccgtcacctgttacaggtgtactttcttaatgactgaaagataagtgggtagcaccgtcagagagaaaatgttggatctgccctaggttatagtagatgccggaattgcgtaaacccacttctctttaagctgcctggattgcacctttgaaatatgtctgccaagttgttagaatctttgaatcagaaggaaaaaaagcagcgctggttgacaaagggtgttgaagatttttgctgcagaatcagttacaaacatcacagttcccatgctttgtaataacacctggtgaaaaagttagatattctagacttgttttagtaatggaaactcttacctccacatattatcctacagatgtttccagaaatccctgttgtaacatcaagtgatcagaactaagttactgggatgacaataattgctatttgaaatatatgcttctttatttcttgcaaggggcaagtttcacccaaatgcctgagactgcttgaaagatatattttaagtggtgcactaattagtgaatatataggaaaattatctgacgagtatctgaaggcattttcagctctagcaatttatttataatatataagttcatatattttttaatccagctcccctaacagacagctgctgcttctattttgtgaagggactatattttttgagaaaggaaaatctcagttagatatattttgtgaacccttgattagacatattaaaatataccaatgttgtagt

SEQ ID NO: 3113 - protein, 67 aa, Homosapiens [sequence omitted]

SEQ ID NO: 3114 - DNA, 3316 bp, Homosapiens
agaatgaagcaggagacctggaaggaagcagaaaagccactgagagataaagaagaagcagcaagatgtggttagatttctggaagccaacaagatagagtttgaggaggtggatatcacaatgtcagaagaacagaggcaatggatgtacaaaaacgtccccccggaaaagaaacccactcagggcaaccccctgccacctcagatatttaatggcgaccgatactgtggagattatgacagtttttttgaatccaaggaaagcaacacagtcttttcatttttaggcctgaaaccacggttggcatcaaaggcagaaccttagagaagaagagtggaagatgacggagatgcattttgaagcacccctggtactcagcacacacatgcttacctaatgcatcactgtgacaaaagccacacgcattatcagtaactttgcttgccacggaaaaggtgtttttgaaagatgtggctataatgagaattgcatgattgctttaaaccaaatcaggtggtggattttttttttcttattctatttgcctgcagttgcctcactcacctggaaataccgtcacctgttacaggtgtactttcttaatgactgaaagataagtgggtagcaccgtcagagagaaaatgttggatctgccctaggttatagtagatgccggaattgcgtaaacccacttctctttaagctgcctggattgcacctttgaaatatgtctgccaagttgttagaatctttgaatcagaaggaaaaaaagcagcgctggttgacaaagggtgttgaagatttttgctgcagaatcagttacaaacatcacagttcccatgctttgtaataacacctggtgaaaaagttagatattctagacttgttttagtaatggaaactcttacctccacatattatcctacagatgtttccagaaatccctgttgtaacatcaagtgatcagaactaagttactgggatgacaataattgctatttgaaatatatgcttctttatttcttgcaaggggcaagtttcacccaaatgcctgagactgcttgaaagatatattttaagtggtgcactaattagtgaatatataggaaaattatctgacgagtatctgaaggcattttcagctctagcaatttatttataatatataagttcatatattttttaatccagctcccctaacagacagctgctgcttctattttgtgaagggactatattttttgagaaaggaaaatctcagttagatatattttgtgaacccttgattagacatattaaaatataccaatgttgtagtaaaatttaatttttccttttgttacttttcatttgcctctaattttgcttgctcatatttctggccaatgtacagcctcatatttttcagagtaatacagatacttgttctcattccgtatatgagcacaagtaaggtttcagagcaacacacatgagaaagagagtaacccggaattgtacttgtcaagcaaaatctatactcctattggagtggatgctgatgaacatcgaacatatctacttcattagagcagaggctatttttctgcattcttgtccctataacagggatgcttaattttttttttaacttagagttttaaattgccaaacatgggaacagccttgaataggataaattttcagagggctgcctaaaatattttatttctagcatcctgattctggacttttcattataattctgagcaggaaatttataagaaattgaaagagcagaagaattacagccctgtcacatgtgcccagcactccgccccatgccttgctaaatgtagactaaagaacttgttgaatgctaaggctgaaatcccaacctgagatttgtagtccaggattacaaccagaaggaaagtatgacagatttctacttaactagaatggacacatgatccacaattttctcttcaagggaagctgttgtcaaattatggatattactggttagttgtcattaagtaagatccaggtcaaattccatttgacaaatcccagggactatccaggaatttttttttaactggatattgtgtttgagtatgtgagtcttctgataaaactcagaatttctttttaagcagttgtaaaaattgtcatgttgtaattcattactcagctaacatttagtctactcttgctagtgagtgccaagaaccaacttggtaaggttgaggctttgcaagttaactgctggggttataggatcaataccatacttgctagacaaagctacccagatttgtcttatattataatttttgagttaaccgtagtatacctattatgattatagtaaacagactagtgggtagtaatgctaaattaccatcacagttatgtgccatctccccaccccatttttttttttttttttttgatcagcaaagaaatacaggagaccagtctcgagtggtgctgtacttgttatgagtgaggcagcagcacagtgtgtggcatttacatggtacccaggctccacagagtaccaagatgttgccctctgggaccacacttagctcagagaatatggggtccttacttgtattcttttatcagctgattttgaaacatataataatgattttcttgttcccttctttaactagctgcctttagattttgataatcacagtcttaaaatactaggaaagaagtggatgggaattgtaggcatagatttcatatcaagggcatttcaagacagaatttttatttcctgtagtaggcttgctggagcaaaggaaatgtgctgctaaaaatcaacttatgccattttaaaattagataaaatatggagtgccatcctgctaggtgagtacagaccagaagaaaatttagttgggaaaatacttgtttttccaaattccggtgttttattacaatcaaagaagaggaaagcaaggtattttttcacctcagattctaatatattctagatttgtttctgttttatagatttaattcaatacctccacatagatgtttttatattacatgaatttaataataaactaaacttttttttgtctcccgttattgaaaagtaccaaagcttctttctgttgtgtttgattttactataggggttttgctttttctagagatacttttcatttaacagcttttgttaagtgtcaggctgcactttgctccatataattattgttttcagatttcaacttgtatgtgtttgtctcttaaagcattggtgaaatcacatattttatattcagcataaaggagaataaattccag

SEQ ID NO: 3115 - protein, 67 aa, Homosapiens [sequence omitted]

SEQ ID NO: 3116 - DNA, 4486 bp, Homosapiens
agaatgaagcaggagacctggaaggaagcagaaaagccactgagagataaagaagaagcagcaagatgtggttagatttctggaagccaacaagatagagtttgaggaggtggatatcacaatgtcagaagaacagaggcaatggatgtacaaaaacgtccccccggaaaagaaacccactcagggcaaccccctgccacctcagatatttaatggcgaccgatactgtggagattatgacagtttttttgaatccaaggaaagcaacacagtcttttcatttttaggcctgaaaccacggttggcatcaaaggcagaaccttagagaagaagagtggaagatgacggagatgcattttgaagcacccctggtactcagcacacacatgcttacctaatgcatcactgtgacaaaagccacacgcattatcagtaactttgcttgccacggaaaaggtgtttttgaaagatgtggctataatgagaattgcatgattgctttaaaccaaatcaggtggtggattttttttttcttattctatttgcctgcagttgcctcactcacctggaaataccgtcacctgttacaggtgtactttcttaatgactgaaagataagtgggtagcaccgtcagagagaaaatgttggatctgccctaggttatagtagatgccggaattgcgtaaacccacttctctttaagctgcctggattgcacctttgaaatatgtctgccaagttgttagaatctttgaatcagaaggaaaaaaagcagcgctggttgacaaagggtgttgaagatttttgctgcagaatcagttacaaacatcacagttcccatgctttgtaataacacctggtgaaaaagttagatattctagacttgttttagtaatggaaactcttacctccacatattatcctacagatgtttccagaaatccctgttgtaacatcaagtgatcagaactaagttactgggatgacaataattgctatttgaaatatatgcttctttatttcttgcaaggggcaagtttcacccaaatgcctgagactgcttgaaagatatattttaagtggtgcactaattagtgaatatataggaaaattatctgacgagtatctgaaggcattttcagctctagcaatttatttataatatataagttcatatattttttaatccagctcccctaacagacagctgctgcttctattttgtgaagggactatattttttgagaaaggaaaatctcagttagatatattttgtgaacccttgattagacatattaaaatataccaatgttgtagtaaaatttaatttttccttttgttacttttcatttgcctctaattttgcttgctcatatttctggccaatgtacagcctcatatttttcagagtaatacagatacttgttctcattccgtatatgagcacaagtaaggtttcagagcaacacacatgagaaagagagtaacccggaattgtacttgtcaagcaaaatctatactcctattggagtggatgctgatgaacatcgaacatatctacttcattagagcagaggctatttttctgcattcttgtccctataacagggatgcttaattttttttttaacttagagttttaaattgccaaacatgggaacagccttgaataggataaattttcagagggctgcctaaaatattttatttctagcatcctgattctggacttttcattataattctgagcaggaaatttataagaaattgaaagagcagaagaattacagccctgtcacatgtgcccagcactccgccccatgccttgctaaatgtagactaaagaacttgttgaatgctaaggctgaaatcccaacctgagatttgtagtccaggattacaaccagaaggaaagtatgacagatttctacttaactagaatggacacatgatccacaattttctcttcaagggaagctgttgtcaaattatggatattactggttagttgtcattaagtaagatccaggtcaaattccatttgacaaatcccagggactatccaggaatttttttttaactggatattgtgtttgagtatgtgagtcttctgataaaactcagaatttctttttaagcagttgtaaaaattgtcatgttgtaattcattactcagctaacatttagtctactcttgctagtgagtgccaagaaccaacttggtaaggttgaggctttgcaagttaactgctggggttataggatcaataccatacttgctagacaaagctacccagatttgtcttatattataatttttgagttaaccgtagtatacctattatgattatagtaaacagactagtgggtagtaatgctaaattaccatcacagttatgtgccatctccccaccccatttttttttttttttttttgatcagcaaagaaatacaggagaccagtctcgagtggtgctgtacttgttatgagtgaggcagcagcacagtgtgtggcatttacatggtacccaggctccacagagtaccaagatgttgccctctgggaccacacttagctcagagaatatggggtccttacttgtattcttttatcagctgattttgaaacatataataatgattttcttgttcccttctttaactagctgcctttagattttgataatcacagtcttaaaatactaggaaagaagtggatgggaattgtaggcatagatttcatatcaagggcatttcaagacagaatttttatttcctgtagtaggcttgctggagcaaaggaaatgtgctgctaaaaatcaacttatgccattttaaaattagataaaatatggagtgccatcctgctaggtgagtacagaccagaagaaaatttagttgggaaaatacttgtttttccaaattccggtgttttattacaatcaaagaagaggaaagcaaggtattttttcacctcagattctaatatattctagatttgtttctgttttatagatttaattcaatacctccacatagatgtttttatattacatgaatttaataataaactaaacttttttttgtctcccgttattgaaaagtaccaaagcttctttctgttgtgtttgattttactataggggttttgctttttctagagatacttttcatttaacagcttttgttaagtgtcaggctgcactttgctccatataattattgttttcagatttcaacttgtatgtgtttgtctcttaaagcattggtgaaatcacatattttatattcagcataaaggagaataaattccagaaaacacatattctgaaaatggagtgtttgttccctgccatttttcacacctctcttaattttagttctgtttagttgagaggctgtgattttactcttgcctgtgaacctcatgcatgaaagcagcacattaaattgtaaaaatacaaacagatcgtgtgatcattcaaggagccagacatgaggtcctgcacgagggtgttgggaggacaccacagattcatctcagacagtgatcaggactgaggatggagttaaatcactcagcccctgggtggggtggggtggttcaaatggatgactgatctcctgagtacactgaagccacaggctggtggccatgttctctgaattgggtgcagaagacaagggcagagtggctgcggcccctattacctttgtagcagccacatcagaaagcagaagaaaacagtatttctgaaggcattgtttgaggttgatctcagcactgaacgatttcaagccctacgcaccagaacagaaggagggtggaggaagtgatcagagggaacgagctgtaggtttgcagaaatgtgtgaaaccaaaatgatcactgcctacttgtgattcaaatcttcagagttttcctagttcttctagaaatacatgtcaggtttgtttgttcatcctttctgtcagcatggatcaagcccctaaaatgtggtaagtgttgtcagagcagggcaatatctctactctcaagtatgaggggaatagaaacaaagcagcagttttagccagggttcaatgatagagtggaggtaaattaagagcctccaggctgtgattcaccatttgagacattatacataatttgtttttgttataagccatttgaatttttaaaaaatttcatacatgcaatggaatatagatatgtatatacacatataatatatatgctaaagtataaagagtaataataatgacaataaacaaacccctgtgtgcctaccacccaccttattgcctttcctttgaggtaccgtgtgcggtttcctgaacctatctctatccctgtctgatagagggaacccctgtactgaactttgtgttgaccatagccttcttgtctttcatcactttatctccatgtatgtatccttaaagaataataaatggaattaaactgaatgtattcttctgtca

SEQ ID NO: 3117 - protein, 67 aa, Homosapiens [sequence omitted]

SEQ ID NO: 3118 - DNA, 1102 bp, Homosapiens
atcagctgattttgaaacatataataatgattttcttgttcccttctttaactagctgcctttagattttgataatcacagtcttaaaatactaggaaagaagtggatgggaattgtaggcatagatttcatatcaagggcatttcaagacagaatttttatttcctgtagtaggcttgctggagcaaaggaaatgtgctgctaaaaatcaacttatgccattttaaaattagataaaatatggagtgccatcctgctaggtgagtacagaccagaagaaaatttagttgggaaaatacttgtttttccaaattccggtgttttattacaatcaaagaagaggaaagcaaggtattttttcacctcagattctaatatattctagatttgtttctgttttatagatttaattcaatacctccacatagatgtttttatattacatgaatttaataataaactaaacttttttttgtctcccgttattgaaaagtaccaaagcttctttctgttgtgtttgattttactataggggttttgctttttctagagatacttttcatttaacagcttttgttaagtgtcaggctgcactttgctccatataattattgttttcagatttcaacttgtatgtgtttgtctcttaaagcattggtgaaatcacatattttatattcacagttttagccagggttcaatgatagagtggaggtaaattaagagcctccaggctgtgattcaccatttgagacattatacataatttgtttttgttataagccatttgaatttttaaaaaatttcatacatgcaatggaatatagatatgtatatacacatataatatatatgctaaagtataaagagtaataataatgacaataaacaaacccctgtgtgcctaccacccaccttattgcctttcctttgaggtaccgtgtgcggtttcctgaacctatctctatccctgtctgatagagggaacccctgtactgaactttgtgttgaccatagccttcttgtctttcatcactttatctccatgtatgtatccttaaagaataataaatggaattaaactgaatgtattcttctgtca

SEQ ID NO: 3119 - protein, 32 aa, Homosapiens
MGIVGIDFISRAFQDRIFISCSRLAGAKEMCC

SEQ ID NO: 3120 - DNA, 367 bp, Homosapiens
tcaaccaaagggtgaatgggctttgtcctttcttcgctggaggctaaattcttaaggattctttgtttgttgaatagcatcaagtagcatctcaaggaacaccctttgggaaatgctgctgagagaagctaagaacttgcttcacgatcgtcaagcactgaaaaggattcatacttgggaaactggcaaactgtttttctgaccctgacccttgccagtagtataatcatgggcaagtcacttgatttcttcacatgtaaaacaaaatgataatatatcctccatggacagccatagagagaagattcattacaaaatgcatttacggtaggaacagaagttgacaataaaagttaatattgtcaca

SEQ ID NO: 3121 - DNA, 6129 bp, Homosapiens
aattggaagcaaatgacatcacagcaggtcagagaaaaagggttgagcggcaggcacccagagtagtaggtctttggcattaggagcttgagcccagacggccctagcagggaccccagcgcccgagagaccatgcagaggtcgcctctggaaaaggccagcgttgtctccaaactttttttcagctggaccagaccaattttgaggaaaggatacagacagcgcctggaattgtcagacatataccaaatcccttctgttgattctgctgacaatctatctgaaaaattggaaagagaatgggatagagagctggcttcaaagaaaaatcctaaactcattaatgcccttcggcgatgttttttctggagatttatgttctatggaatctttttatatttaggggaagtcaccaaagcagtacagcctctcttactgggaagaatcatagcttcctatgacccggataacaaggaggaacgctctatcgcgatttatctaggcataggcttatgccttctctttattgtgaggacactgctcctacacccagccatttttggccttcatcacattggaatgcagatgagaatagctatgtttagtttgatttataagaagactttaaagctgtcaagccgtgttctagataaaataagtattggacaacttgttagtctcctttccaacaacctgaacaaatttgatgaaggacttgcattggcacatttcgtgtggatcgctcctttgcaagtggcactcctcatggggctaatctgggagttgttacaggcgtctgccttctgtggacttggtttcctgatagtccttgccctttttcaggctgggctagggagaatgatgatgaagtacagagatcagagagctgggaagatcagtgaaagacttgtgattacctcagaaatgattgaaaatatccaatctgttaaggcatactgctgggaagaagcaatggaaaaaatgattgaaaacttaagacaaacagaactgaaactgactcggaaggcagcctatgtgagatacttcaatagctcagccttcttcttctcagggttctttgtggtgtttttatctgtgcttccctatgcactaatcaaaggaatcatcctccggaaaatattcaccaccatctcattctgcattgttctgcgcatggcggtcactcggcaatttccctgggctgtacaaacatggtatgactctcttggagcaataaacaaaatacaggatttcttacaaaagcaagaatataagacattggaatataacttaacgactacagaagtagtgatggagaatgtaacagccttctgggaggagggatttggggaattatttgagaaagcaaaacaaaacaataacaatagaaaaacttctaatggtgatgacagcctcttcttcagtaatttctcacttcttggtactcctgtcctgaaagatattaatttcaagatagaaagaggacagttgttggcggttgctggatccactggagcaggcaagacttcacttctaatggtgattatgggagaactggagccttcagagggtaaaattaagcacagtggaagaatttcattctgttctcagttttcctggattatgcctggcaccattaaagaaaatatcatctttggtgtttcctatgatgaatatagatacagaagcgtcatcaaagcatgccaactagaagaggacatctccaagtttgcagagaaagacaatatagttcttggagaaggtggaatcacactgagtggaggtcaacgagcaagaatttctttagcaagagcagtatacaaagatgctgatttgtatttattagactctccttttggatacctagatgttttaacagaaaaagaaatatttgaaagctgtgtctgtaaactgatggctaacaaaactaggattttggtcacttctaaaatggaacatttaaagaaagctgacaaaatattaattttgcatgaaggtagcagctatttttatgggacattttcagaactccaaaatctacagccagactttagctcaaaactcatgggatgtgattctttcgaccaatttagtgcagaaagaagaaattcaatcctaactgagaccttacaccgtttctcattagaaggagatgctcctgtctcctggacagaaacaaaaaaacaatcttttaaacagactggagagtttggggaaaaaaggaagaattctattctcaatccaatcaactctatacgaaaattttccattgtgcaaaagactcccttacaaatgaatggcatcgaagaggattctgatgagcctttagagagaaggctgtccttagtaccagattctgagcagggagaggcgatactgcctcgcatcagcgtgatcagcactggccccacgcttcaggcacgaaggaggcagtctgtcctgaacctgatgacacactcagttaaccaaggtcagaacattcaccgaaagacaacagcatccacacgaaaagtgtcactggcccctcaggcaaacttgactgaactggatatatattcaagaaggttatctcaagaaactggcttggaaataagtgaagaaattaacgaagaagacttaaaggagtgcttttttgatgatatggagagcataccagcagtgactacatggaacacataccttcgatatattactgtccacaagagcttaatttttgtgctaatttggtgcttagtaatttttctggcagaggtggctgcttctttggttgtgctgtggctccttggaaacactcctcttcaagacaaagggaatagtactcatagtagaaataacagctatgcagtgattatcaccagcaccagttcgtattatgtgttttacatttacgtgggagtagccgacactttgcttgctatgggattcttcagaggtctaccactggtgcatactctaatcacagtgtcgaaaattttacaccacaaaatgttacattctgttcttcaagcacctatgtcaaccctcaacacgttgaaagcaggtgggattcttaatagattctccaaagatatagcaattttggatgaccttctgcctcttaccatatttgacttcatccagttgttattaattgtgattggagctatagcagttgtcgcagttttacaaccctacatctttgttgcaacagtgccagtgatagtggcttttattatgttgagagcatatttcctccaaacctcacagcaactcaaacaactggaatctgaaggcaggagtccaattttcactcatcttgttacaagcttaaaaggactatggacacttcgtgccttcggacggcagccttactttgaaactctgttccacaaagctctgaatttacatactgccaactggttcttgtacctgtcaacactgcgctggttccaaatgagaatagaaatgatttttgtcatcttcttcattgctgttaccttcatttccattttaacaacaggagaaggagaaggaagagttggtattatcctgactttagccatgaatatcatgagtacattgcagtgggctgtaaactccagcatagatgtggatagcttgatgcgatctgtgagccgagtctttaagttcattgacatgccaacagaaggtaaacctaccaagtcaaccaaaccatacaagaatggccaactctcgaaagttatgattattgagaattcacacgtgaagaaagatgacatctggccctcagggggccaaatgactgtcaaagatctcacagcaaaatacacagaaggtggaaatgccatattagagaacatttccttctcaataagtcctggccagagggtgggcctcttgggaagaactggatcagggaagagtactttgttatcagcttttttgagactactgaacactgaaggagaaatccagatcgatggtgtgtcttgggattcaataactttgcaacagtggaggaaagcctttggagtgataccacagaaagtatttattttttctggaacatttagaaaaaacttggatccctatgaacagtggagtgatcaagaaatatggaaagttgcagatgaggttgggctcagatctgtgatagaacagtttcctgggaagcttgactttgtccttgtggatgggggctgtgtcctaagccatggccacaagcagttgatgtgcttggctagatctgttctcagtaaggcgaagatcttgctgcttgatgaacccagtgctcatttggatccagtaacataccaaataattagaagaactctaaaacaagcatttgctgattgcacagtaattctctgtgaacacaggatagaagcaatgctggaatgccaacaatttttggtcatagaagagaacaaagtgcggcagtacgattccatccagaaactgctgaacgagaggagcctcttccggcaagccatcagcccctccgacagggtgaagctctttccccaccggaactcaagcaagtgcaagtctaagccccagattgctgctctgaaagaggagacagaagaagaggtgcaagatacaaggctttagagagcagcataaatgttgacatgggacatttgctcatggaattggagctcgtgggacagtcacctcatggaattggagctcgtggaacagttacctctgcctcagaaaacaaggatgaattaagtttttttttaaaaaagaaacatttggtaaggggaattgaggacactgatatgggtcttgataaatggcttcctggcaatagtcaaattgtgtgaaaggtacttcaaatccttgaagatttaccacttgtgttttgcaagccagattttcctgaaaacccttgccatgtgctagtaattggaaaggcagctctaaatgtcaatcagcctagttgatcagcttattgtctagtgaaactcgttaatttgtagtgttggagaagaactgaaatcatacttcttagggttatgattaagtaatgataactggaaacttcagcggtttatataagcttgtattcctttttctctcctctccccatgatgtttagaaacacaactatattgtttgctaagcattccaactatctcatttccaagcaagtattagaataccacaggaaccacaagactgcacatcaaaatatgccccattcaacatctagtgagcagtcaggaaagagaacttccagatcctggaaatcagggttagtattgtccaggtctaccaaaaatctcaatatttcagataatcacaatacatcccttacctgggaaagggctgttataatctttcacaggggacaggatggttcccttgatgaagaagttgatatgccttttcccaactccagaaagtgacaagctcacagacctttgaactagagtttagctggaaaagtatgttagtgcaaattgtcacaggacagcccttctttccacagaagctccaggtagagggtgtgtaagtagataggccatgggcactgtgggtagacacacatgaagtccaagcatttagatgtataggttgatggtggtatgttttcaggctagatgtatgtacttcatgctgtctacactaagagagaatgagagacacactgaagaagcaccaatcatgaattagttttatatgcttctgttttataattttgtgaagcaaaattttttctctaggaaatatttattttaataatgtttcaaacatatataacaatgctgtattttaaaagaatgattatgaattacatttgtataaaataatttttatatttgaaatattgactttttatggcactagtatttctatgaaatattatgttaaaactgggacaggggagaacctagggtgatattaaccaggggccatgaatcaccttttggtctggagggaagccttggggctgatgcagttgttgcccacagctgtatgattcccagccagcacagcctcttagatgcagttctgaagaagatggtaccaccagtctgactgtttccatcaagggtacactgccttctcaactccaaactgactcttaagaagactgcattatatttattactgtaagaaaatatcacttgtcaataaaatccatacatttgtgtg

SEQ ID NO: 3122 - protein, 1480 aa, Homosapiens; identical to SEQ ID NO: 433

SEQ ID NO: 3123 - DNA, 6262 bp, Homosapiens
aattggaagcaaatgacatcacagcaggtcagagaaaaagggttgagcggcaggcacccagagtagtaggtctttggcattaggagcttgagcccagacggccctagcagggaccccagcgcccgagagaccatgcagaggtcgcctctggaaaaggccagcgttgtctccaaactttttttcagctggaccagaccaattttgaggaaaggatacagacagcgcctggaattgtcagacatataccaaatcccttctgttgattctgctgacaatctatctgaaaaattggaaagagaatgggatagagagctggcttcaaagaaaaatcctaaactcattaatgcccttcggcgatgttttttctggagatttatgttctatggaatctttttatatttaggggaagtcaccaaagcagtacagcctctcttactgggaagaatcatagcttcctatgacccggataacaaggaggaacgctctatcgcgatttatctaggcataggcttatgccttctctttattgtgaggacactgctcctacacccagccatttttggccttcatcacattggaatgcagatgagaatagctatgtttagtttgatttataagaagactttaaagctgtcaagccgtgttctagataaaataagtattggacaacttgttagtctcctttccaacaacctgaacaaatttgatgaaggacttgcattggcacatttcgtgtggatcgctcctttgcaagtggcactcctcatggggctaatctgggagttgttacaggcgtctgccttctgtggacttggtttcctgatagtccttgccctttttcaggctgggctagggagaatgatgatgaagtacagagatcagagagctgggaagatcagtgaaagacttgtgattacctcagaaatgattgaaaatatccaatctgttaaggcatactgctgggaagaagcaatggaaaaaatgattgaaaacttaagacaaacagaactgaaactgactcggaaggcagcctatgtgagatacttcaatagctcagccttcttcttctcagggttctttgtggtgtttttatctgtgcttccctatgcactaatcaaaggaatcatcctccggaaaatattcaccaccatctcattctgcattgttctgcgcatggcggtcactcggcaatttccctgggctgtacaaacatggtatgactctcttggagcaataaacaaaatacaggatttcttacaaaagcaagaatataagacattggaatataacttaacgactacagaagtagtgatggagaatgtaacagccttctgggaggagggatttggggaattatttgagaaagcaaaacaaaacaataacaatagaaaaacttctaatggtgatgacagcctcttcttcagtaatttctcacttcttggtactcctgtcctgaaagatattaatttcaagatagaaagaggacagttgttggcggttgctggatccactggagcaggcaagacttcacttctaatggtgattatgggagaactggagccttcagagggtaaaattaagcacagtggaagaatttcattctgttctcagttttcctggattatgcctggcaccattaaagaaaatatcatctttggtgtttcctatgatgaatatagatacagaagcgtcatcaaagcatgccaactagaagaggacatctccaagtttgcagagaaagacaatatagttcttggagaaggtggaatcacactgagtggaggtcaacgagcaagaatttctttagcaagagcagtatacaaagatgctgatttgtatttattagactctccttttggatacctagatgttttaacagaaaaagaaatatttgaaagctgtgtctgtaaactgatggctaacaaaactaggattttggtcacttctaaaatggaacatttaaagaaagctgacaaaatattaattttgcatgaaggtagcagctatttttatgggacattttcagaactccaaaatctacagccagactttagctcaaaactcatgggatgtgattctttcgaccaatttagtgcagaaagaagaaattcaatcctaactgagaccttacaccgtttctcattagaaggagatgctcctgtctcctggacagaaacaaaaaaacaatcttttaaacagactggagagtttggggaaaaaaggaagaattctattctcaatccaatcaactctatacgaaaattttccattgtgcaaaagactcccttacaaatgaatggcatcgaagaggattctgatgagcctttagagagaaggctgtccttagtaccagattctgagcagggagaggcgatactgcctcgcatcagcgtgatcagcactggccccacgcttcaggcacgaaggaggcagtctgtcctgaacctgatgacacactcagttaaccaaggtcagaacattcaccgaaagacaacagcatccacacgaaaagtgtcactggcccctcaggcaaacttgactgaactggatatatattcaagaaggttatctcaagaaactggcttggaaataagtgaagaaattaacgaagaagacttaaaggagtgcttttttgatgatatggagagcataccagcagtgactacatggaacacataccttcgatatattactgtccacaagagcttaatttttgtgctaatttggtgcttagtaatttttctggcagaggtggctgcttctttggttgtgctgtggctccttggaaacactcctcttcaagacaaagggaatagtactcatagtagaaataacagctatgcagtgattatcaccagcaccagttcgtattatgtgttttacatttacgtgggagtagccgacactttgcttgctatgggattcttcagaggtctaccactggtgcatactctaatcacagtgtcgaaaattttacaccacaaaatgttacattctgttcttcaagcacctatgtcaaccctcaacacgttgaaagcaggtgggattcttaatagattctccaaagatatagcaattttggatgaccttctgcctcttaccatatttgacttcatccagttgttattaattgtgattggagctatagcagttgtcgcagttttacaaccctacatctttgttgcaacagtgccagtgatagtggcttttattatgttgagagcatatttcctccaaacctcacagcaactcaaacaactggaatctgaaggcaggagtccaattttcactcatcttgttacaagcttaaaaggactatggacacttcgtgccttcggacggcagccttactttgaaactctgttccacaaagctctgaatttacatactgccaactggttcttgtacctgtcaacactgcgctggttccaaatgagaatagaaatgatttttgtcatcttcttcattgctgttaccttcatttccattttaacaacaggagaaggagaaggaagagttggtattatcctgactttagccatgaatatcatgagtacattgcagtgggctgtaaactccagcatagatgtggatagcttgatgcgatctgtgagccgagtctttaagttcattgacatgccaacagaaggtaaacctaccaagtcaaccaaaccatacaagaatggccaactctcgaaagttatgattattgagaattcacacgtgaagaaagatgacatctggccctcagggggccaaatgactgtcaaagatctcacagcaaaatacacagaaggtggaaatgccatattagagaacatttccttctcaataagtcctggccagagggtgggcctcttgggaagaactggatcagggaagagtactttgttatcagcttttttgagactactgaacactgaaggagaaatccagatcgatggtgtgtcttgggattcaataactttgcaacagtggaggaaagcctttggagtgataccacagaaagtatttattttttctggaacatttagaaaaaacttggatccctatgaacagtggagtgatcaagaaatatggaaagttgcagatgaggttgggctcagatctgtgatagaacagtttcctgggaagcttgactttgtccttgtggatgggggctgtgtcctaagccatggccacaagcagttgatgtgcttggctagatctgttctcagtaaggcgaagatcttgctgcttgatgaacccagtgctcatttggatccagtaacataccaaataattagaagaactctaaaacaagcatttgctgattgcacagtaattctctgtgaacacaggatagaagcaatgctggaatgccaacaatttttggtcatagaagagaacaaagtgcggcagtacgattccatccagaaactgctgaacgagaggagcctcttccggcaagccatcagcccctccgacagggtgaagctctttccccaccggaactcaagcaagtgcaagtctaagccccagattgctgctctgaaagaggagacagaagaagaggtgcaagatacaaggctttagagagcagcataaatgttgacatgggacatttgctcatggaattggagctcgtgggacagtcacctcatggaattggagctcgtggaacagttacctctgcctcagaaaacaaggatgaattaagtttttttttaaaaaagaaacatttggtaaggggaattgaggacactgatatgggtcttgataaatggcttcctggcaatagtcaaattgtgtgaaaggtacttcaaatccttgaagatttaccacttgtgttttgcaagccagattttcctgaaaacccttgccatgtgctagtaattggaaaggcagctctaaatgtcaatcagcctagttgatcagcttattgtctagtgaaactcgttaatttgtagtgttggagaagaactgaaatcatacttcttagggttatgattaagtaatgataactggaaacttcagcggtttatataagcttgtattcctttttctctcctctccccatgatgtttagaaacacaactatattgtttgctaagcattccaactatctcatttccaagcaagtattagaataccacaggaaccacaagactgcacatcaaaatatgccccattcaacatctagtgagcagtcaggaaagagaacttccagatcctggaaatcagggttagtattgtccaggtctaccaaaaatctcaatatttcagataatcacaatacatcccttacctgggaaagggctgttataatctttcacaggggacaggatggttcccttgatgaagaagttgatatgccttttcccaactccagaaagtgacaagctcacagacctttgaactagagtttagctggaaaagtatgttagtgcaaattgtcacaggacagcccttctttccacagaagctccaggtagagggtgtgtaagtagataggccatgggcactgtgggtagacacacatgaagtccaagcatttagatgtataggttgatggtggtatgttttcaggctagatgtatgtacttcatgctgtctacactaagagagaatgagagacacactgaagaagcaccaatcatgaattagttttatatgcttctgttttataattttgtgaagcaaaattttttctctaggaaatatttattttaataatgtttcaaacatatataacaatgctgtattttaaaagaatgattatgaattacatttgtataaaataatttttatatttgaaatattgactttttatggcactagtatttctatgaaatattatgttaaaactgggacaggggagaacctagggtgatattaaccaggggccatgaatcaccttttggtctggagggaagccttggggctgatgcagttgttgcccacagctgtatgattcccagccagcacagcctcttagatgcagttctgaagaagatggtaccaccagtctgactgtttccatcaagggtacactgccttctcaactccaaactgactcttaagaagactgcattatatttattactgtaagaaaatatcacttgtcaataaaatccatacatttgtgtgaaactttgttgttttcagatgcgttcacttgtcatgtttcatcagtctctcactccaatttctaagcttcatggaacatgaaacacgaatctgtcttttagatatagcctcttttgagaattcacatgaatta

SEQ ID NO: 3124 - protein, 1480 aa, Homosapiens; identical to SEQ ID NO: 433

SEQ ID NO: 3125 - DNA, 374 bp, Homosapiens
tgaaaacttcctgaggcctcctcagaagcagatgctgctatgcttcccgtacagcctgaagaaccaaacatttctatacatttatgagacccaactccaaaagcatactggaatggaattaaagaccgaactacagaagctaaagagagctgatcaaactaaaaaaaaaagttaaaggtgaggaggccaaggctcagaagagtcacttgcccatgatcactgctcttatagcgccaactcagagctcaggcaatgctcatgttctttccactgtgcctcatcgctcatgtctgactcttctagaaatgtgggcaaatcccctgccttctgtgggtctcagatttccataaaaaataaaatcaatggatcaactt

SEQ ID NO: 3126 - protein, 47 aa, Homosapiens
MLLCFPYSLKNQTFLYIYETQLQKHTGMELKTELQKLKRADQTKKKS

SEQ ID NO: 3127 - DNA, 5969 bp, Homosapiens
ggacagcagcgggttaagtgccgcccgcgcggagacggctgagtccggagccgcggctccgagctcgcattcggatccgctagagcaggaagatggcgacggacggcgcgagctgcgagcccgacttgtcccgggccccggaggacgcggcgggggccgcggcggaggcggcgaaaaaagagtttgatgtggatactctcagtaaatccgagctgcggatgctcctcagcgtgatggaaggggagctggaggccagagaccttgtcatcgaggccctgcgggctcgcaggaaggaggtatttatccaggaacggtatgggagatttaatctaaatgacccgttcctggcactccagagagactatgaagcaggtgctggtgacaaagagaagaagccagtttgtaccaaccccctctccatccttgaagcagtcatggcccactgcaagaaaatgcaagaaaggatgtccgcacagctggctgctgctgagagcagacaaaagaagctggaaatggagaagcttcagctacaagcccttgagcaagagcacaagaagctggctgcccgccttgaggaagagcgtggcaagaacaagcaggtggtcctgatgctggtcaaagagtgcaagcagctctcaggcaaagtcatagaggaggcccagaagctcgaagacgtaatggccaaactggaagaggaaaagaaaaagacgaatgaattagaagaggaactctccgctgagaaacgaagaagcacagaaatggaagctcagatggaaaaacaactctctgagtttgacactgagcgggaacagcttcgtgccaagctgaaccgggaagaagcacacaccactgacctcaaagaggagatagacaagatgaggaaaatgattgagcaactgaaaaggggaagtgacagcaaaccaagcctctctcttccacggaagacaaaagataggcgtttggtttccatatctgtgggaacagaaggaactgtgacaaggtctgttgcatgccagacagacctagtgacagaaaatgctgaccacatgaaaaagttgcctttaaccatgcctgtaaaaccttccacagggagtcccctagtttctgcaaatgcaaaagggagcgtgtgcaccagtgccaccatggccagaccaggtattgacaggcaggcttcctatggtgacttgattggcgcttctgtacccgctttcccacctccaagtgcaaacaaaattgaggaaaatggaccaagcactggctcaacaccagatccaaccagtagcacacccccacttcccagtaacgctgcccctcccaccgctcaaacaccaggcatagctcctcagaactcgcaagctccacctatgcacagtttacattcaccatgtgccaacacctctttgcatccaggtctaaacccacgaatccaagcagctagatttagatttcagggcaatgctaacgacccagaccaaaatggaaatactacccaaagtcctccgtcaagagatgtctcgcctacaagtcgtgacaacctagtggccaaacaactagctcggaatactgtgacccaagcactgtcaagatttacaagccctcaagcaggtgctccctcaaggcctggagtgcccccaacaggggatgttggcacccaccctccagttggtcggaccagtttaaagactcatggtgtagcacgagttgacagaggaaatcctcctcctatccctccaaaaaagccagggctctcccaaactccttctccaccacacccccaactcaaggttattatagacagcagcagggcctcgaacacaggggccaaagttgataacaaaactgtggcttcgactccttccagtttgccacaagggaacagggtgatcaatgaggagaaccttcctaagtcatcctcccctcagctgccaccaaaaccatccatagatttaactgtggcacctgcaggctgtgccgtttcagccctggccacgtctcaggtgggtgcctggcctgctgcaacccccggactgaaccaacctgcatgttcagacagttcccttgtcattcctaccaccattgccttttgctcttccataaaccccgttagtgcctcatcctgtagaccaggtgcctcagacagcctcctggtaacagcatcaggctggtcaccctccctaacccctttgctaatgagtggtggtcctgcccccctggctggcaggcccacccttcttcagcaagctgctgcccagggaaatgtcactttattatcaatgctgcttaatgaagaaggactggacattaattactcctgtgaagatggccattctgccttgtattctgctgctaagaatggacatacagactgtgtgagattgctgctgagtgcagaagcccaagtcaatgctgctgataaaaatggcttcacacccttgtgtgctgcagctgctcagggacatttcgagtgtgtagaattattaatttcatatgatgctaacattaatcatgctgctgatggaggacagacacctctatacctggcctgtaaaaatggaaataaagaatgtattaaactcttgttggaagctggaaccaatcgaagtgtaaaaaccacagatggctggacaccagttcacgcagctgtggacactggtaatgtggacagcctcaagcttcttatgtaccatagaataccagctcatggaaattctttcaatgaggaggagtccgagtcaagtgtctttgacttggatggaggagaagagagtcctgaaggcatatccaagcctgttgttcctgcagacctcattaaccacgccaacagagaaggctggactgctgcccacattgctgcttccaaaggttttaagaactgcctagaaatcttgtgtaggcacggagggcttgagccagaaaggagagacaagtgcaatcggactgtgcatgatgttgccactgatgactgcaagcatttgctggagaatctgaatgctcttaaaatacccttaaggatttcagtgggtgagattgaaccaagcaactatggttctgatgacttggaatgtgaaaacacaatatgtgctttaaatatccgcaaacagacatcatgggatgatttttcaaaagcagtgagtcaagctctgacaaatcatttccaggcaatctcttctgatggatggtggagtctggaagacgtgacttgcaataacaccactgattccaacatcggcctcagtgcaagaagcatacgatccatcacgctaggaaatgtgccgtggtcagtgggtcagagcttcgcgcagtccccgtgggactttatgaggaagaataaggcagagcacatcactgtgcttttgtcaggtcctcaagaaggctgtctcagtagtgtgacttatgcctccatgatccctctccagatgatgcagaactacctcaggctggttgagcaatatcataatgtcattttccacggcccagaaggaagcttgcaagactacatagtacatcagcttgcactctgcctgaagcacagacaaatggctgcaggattctcctgtgaaatagtgagagctgaagtagatgctggtttttccaaggaacagctactagacctgttcattagtagcgcttgtctgatcccagtgaaacaatctcccagtaagaagaaaatcatcatcattttagaaaatttagaaaaatcttcactgtcggagttattgagggactttttggcacctcttgaaaatcgcagcactgaaagcccctgcactttccaaaaaggaaatggactgtccgaatgttattactttcatgagaactgctttctgatgggaaccatcgccaaggcctgtctccagggctccgacttgctggtgcagcagcatttccgctgggtgcagctgcggtgggatggcgagcccatgcaaggactgctgcagaggttcttacgaaggaaagttgtgaataagttcaaaggtcaggcgccctccccctgcgatcctgtgtgcaagattgtcgactgggctctgtccgtctggcgtcagcttaactcctgcctggcccgcttgggcacacctgaagcacttcttggaccaaaatatttcctgtcttgtcctgtagttcctgggcatgcccaagtgacagtgaagtggatgtctaagctgtggaatggcgtcatcgcacccagagttcaagaagcaatattgtcaagagcctctgtgaaaagacaacctggctttgggcagacaactgctaaaagacaccctagccaaggacagcaggctgtggtcaaagctgctctcagcatcttgctaaataaagctgtactgcatggctgtcccctccccagagcagagctagaccagcatacagctgatttcaaaggaggaagtttccctttatccatagtttccagttataacacttgtaacaagaagaaaggagagagtggtgcctggagaaaggtgaacaccagtcctcgcaggaagtctggccgcttctctttacccacctggaataagccagacctaagcactgaaggtatgaaaaataagactatatcacagctgaattgtaacaggaatgcttctctgtcaaaacaaaagtctttagagaatgatctatcactgacgttgaatttggatcagagactctctctgggttcagatgacgaagcagatcttgtcaaggaacttcagagcatgtgctccagcaagtctgagtctgatatcagcaagattgctgattccagggatgatttaaggatgtttgatagttctggaaacaaccctgtactttcagcaactattaataatctgagaatgccagtgtcacaaaaggaggtcagtcctctcagcagccatcaaactactgaatgcagcaacagtaaatcaaagactgagttgggtgtttcaagagttaaatcttttcttcctgttcctagaagtaaagtcacccagtgttcccagaacaccaaaagaagcagcagcagcagtaatacaaggcaaatagaaatcaacaacaactcaaaagaagtgaattggaacttacacaaaaatgaacacctagaaaaacctaacaaataggcctgcctacaatattctcattattaacttcctctatttcacacagaaaccaaggacaacaagatacaaatacctttaaattgataaaatgttttcactgtaatataaattatgagtgcgggaccactattcaatttttttttgtaaagaatgtatttataaccaacattttgttgcttttttttttaattctgtaggattgaacttcaataccaggaagttatgccaacttttcaagtagttttataatagaaaaattgtaatagttttaatcaagatgttcaggggtattaaaacagaactgtgtactgtatatctgtatatatgtatatatgtatgtatatttaaggaagtccagaaatcatactgcatacatgctacaaaaaagtagcaaaaaagtacaaagttggcttagataacttgtaccgttttaaatggagatcataattttatgttcacttgatggggaatgactagaatggggcaataacaaatcatttctaaacagttattttccattaaaagccatattaagtattttgcttgttaaattctagttttatgttttaaatctcttagtggttacattgccatttggtagcatcatgtatatatttatgcttataagtttgcattatgactcctgtaaaatatgaaattataatgcaataaaagtgttatctttcttacaaaagttttgtacctaagtggatatagataactgcataaatgaataaattcagaattaactccttcaatatttctagtagcacaactgataatattgatattttctacaaatgttacttctaaaattacagacaaaattacttacacaattcagttaagatgctttgacactgaataaaatattgatttcatgaa

SEQ ID NO: 3128 - protein, 1663 aa, Homosapiens; identical to SEQ ID NO: 435

SEQ ID NO: 3129 - DNA, 774 bp, Homosapiens
tttatagaactgcctagaaatcttgtgtaggcacggagggcttgagccagaaaggagagacaagtgcaatcggactgtgcatgatgttgccactgatgactgcaagcatttgctggagaatctgaatgctcttaaaatacccttaaggatttcagtgggtgagattgaaccaagcaactatggttctgatgacttggaatgtgaaaacacaatatgtgctttaaatatccgcaaacagacatcatgggatgatttttcaaaagcagtgagtcaagctctgacaaatcatttccaggcaatctcttctgatggatggtggagtctggaagacgtgacttgcaataacaccactgattccaacatcggcctcagtgcaagaagcatacgatccatcacgctaggaaatgtgccgtggtcagtgggtcagagcttcgcgcagtccccgtgggactttatgaggaagaataaggcagagcacatcactgtgcttttgtcaggtcctcaagaaggctgtctcagtagtgtgacttatgcctccatgatccctctccagatgatgcagaactacctcaggctgatggggaaactgaacagagagaggtaaaatgctcaaagtcatgcatctagcaagtgatgaagccaggattgtgcaagtctctgatgtgtatgagatcaatctgaaactaatactactggtataaaacattaaacataattttgcttgctgccttaatttcgatgacctttttaaataaatgagttggaactatgacc

SEQ ID NO: 3130 - protein, 49 aa, Homosapiens
MRKNKAEHITVLLSGPQEGCLSSVTYASMIPLQMMQNYLRLMGKLNRER

SEQ ID NO: 3131 - DNA, 576 bp, Homosapiens
ctcttgtctttatagaactgcctagaaatcttgtgtaggcacggagggcttgagccagaaaggagagacaagtgcaatcggactgtgcatgatgttgccactgatgactgcaagcatttgctggagaatctgaatgctcttaaaatacccttaaggatttcagtgggtgagattgaaccaagcaactatggttctgatgacttggaatgtgaaaacacaatatgtgctttaaatatccgcaaacagacatcatgggatgatttttcaaaagcagtgagtcaagctctgacaaatcatttccaggcaatctcttctgatggatggtggagtctggaagacgtgacttgcaataacaccactgattccaacatcggcctcagtgcaagaagcatacgatccatcacgctaggtatcagcagtcctatgacggagagaaagtgaaatttctgggtttatttatgtttgtgggtttcataacctgattcttagttcattgattaagcacattcaaagcttacttgtggcagctgccggtgctgaaaaacttgagtattcacaatgtagccattatgtaat

SEQ ID NO: 3132 - protein, 48 aa, Homosapiens
RRESEISGFIYVCGFHNLILSSLIKHIQSLLVAAAGAEKLEYSQCSHY

SEQ ID NO: 3133 - DNA, 572 bp, Homosapiens
agatcgtaaacaaaacccaggacgccaggcagatttctgtgttaacaagaaaaaagagtttgatgtggatactctcagtaaatccgagctgcggatgctcctcagcgtgatggaaggggagctggaggccagagaccttgtcatcgaggccctgcgggctcgcaggaaggaggtatttatccaggaacggtatgggagatttaatctaaatgacccgttcctggcactccagagagactatgaagcaggtgctggtgacaaagagaagaagccagtttgtaccaaccccctctccatccttgaagcagtcatggcccactgcaagaaaatgcaagaaaggatgtccgcacagctggctgctgctgagagcagacaaaagaagctggaaatggagaagcttcagctacaagcccttgagcaagagcacaagaagctggctgcccgccttgaggaagagcgtggcaagaacaagcaggtggtcctgatgctggtcaaagagtgcaagcagctctcaggcaaagtcatagaggaggcccagaagctcgaagacgtaatggccaaactggaagagg

SEQ ID NO: 3134 - protein, 158 aa, Homosapiens
MLLSVMEGELEARDLVIEALRARRKEVFIQERYGRFNLNDPFLALQRDYEAGAGDKEKKPVCTNPLSILEAVMAHCKKMQERMSAQLAAAESRQKKLEMEKLQLQALEQEHKKLAARLEEERGKNKQVVLMLVKECKQLSGKVIEEAQKLEDVMAKLE

SEQ ID NO: 3135 - DNA, 379 bp, Homosapiens
actcaccctcccacaggtcactcttgtgccatgcgcacatggcttactgcaggagcgctacgggaaggtgtgtggtgggaatcccatgcagagagaacagcaaggacaaagaccccgaggcaggaccatgtttaggaaactccgggcatccagcgaagctaagggagtaagcaggatcaaagtaggagacaagctggaaatggagaagcttcagctacaagcccttgagcaagagcacaagaagctggctgcccgccttgaggaagagcgtggcaagaacaagcaggtggtcctgatgctggtcaaagagtgcaagcagctctcaggcaaagtcatagaggaggcccagaagctcgaagacgtaatggccaaactggaa

SEQ ID NO: 3136 - protein, 97 aa, Homosapiens
MQREQQGQRPRGRTMFRKLRASSEAKGVSRIKVGDKLEMEKLQLQALEQEHKKLAARLEEERGKNKQVVLMLVKECKQLSGKVIEEAQKLEDVMAKL

SEQ ID NO: 3137 - DNA, 2138 bp, Homosapiens
gtcttccttttttccgcctctcgttcgcttttgtcttacgaggcttccggaacacggcccagaattacagagaaaacacactgcgcacgcgcactctctcgtcaccgctgtgcggcttctgtttggttggccagttcgtcccaatttccgactcacagggctgcggagcagcaactctcacgatatttgctgcgacccgcaggcgctatccgctgccgggttctggcgcgccctttcagttctgcttgctgtcggcaccgctgcgttacccggaaccgccgggccgaacagcatgacgtccgctttggagaactacatcaaccgtatcctcaagctggccgccgcgggcgtgagccggggtcgcggagaggccgcggtcggggatcggtgggaggttgggaggcctggcctcggcgggatcctgggggcgggcgaggagatgagggccccggaacgacccagagttcgccggcggcgcctcgagccttcccgctgctgcgggcccaggggtcctttccattttgcctgcaaaacccaaataaaaacccagtgtgattattccgaacttttctgtcttaaaaaaaatgtacgctcttgattcttacttactatttccctatggcataagtgttaaagtttgtgaataagatgaacagtcgtcctggcggcgacaacagttttgcaaatctttgtacttgttttattcacataatttgctcgttcgaggatagcaaaaagtttaacgatggttcacagactgtttctgtccctttaccacttgaagtcccaacttgttggtagaatgaaaaaaaatggttgctgttgtaatggattatagtgaggagcaagtaacaaccccatgggaagtcttaaaatagactttacaagtgttaccgttttaaagtcttaggacaaaaacactacgttaagctcaggtacaaactgggtgacaaaaattaaataccgaatgcttttaatgatgcgttattggtaccctgtgacactgcttatatagtttctttacttttgaattacagaagcctgtcctggaagacagttttttaacatgctggaaaatcgtccaacatcgattaatttagtactcatccacttttcattttagaaataaacaggcctaagaaacgaaatatcctgcctgaaataatagattggtaaccttcctagtagaaaagtgtcaaaaatccaggatattttgagataagatacaccgatcacatacagaaagaggttttctttttctattttttcccttttttaatcatgtaattatcacaaagacaaaaacagaagctttttttaagtttttttttttttttctttttttgagtcgagggtctcactctgttgcccaggctggagtgcagtggcttgatcatggctcaatgcaaccttgaactcctgagcccaagcaatcctcctgcctctgcctctgcctcctgagtagctgggactataggtcaccaggccagggtaatagagatgggggtatcgctgtgttgcccaagctggtctcacctcaagtgatcctcctgccttggcgtctaagaaacttttaacgtttttatgtagtgaacttagtggctgtgttgaatacttatacctagttgtcatatttattctaaaaattcaaatcattcccttgccagagtctgttttcaatttgcattccctaagaaacactttctttgattcagttatcaggaactgttgccgttattacatcagatgggagaatgattgtgggaacactgaaaggttttgaccagaccattaatttgattttggatgaaagccatgaacgagtattcagctcttcacagggggtagaacaagtggtactaggattatacattgtaagaggtgacaacgttgcagtcattggagaaatcgatgaagaaacagattctgcgcttgatttggggaatattcgagcagaacctttaaattctgtagcacactgaggaaaaactacatacttggacatctgtaaatctttgtacagaaactgattattctgaggatgatatatggagtttttatgagtgtgtcactggattttgactccttattgattcattgtaatatgtaaattaaaatatttctacattttattgaaa

SEQ ID NO: 3138 - protein, 75 aa, Homosapiens
MIVGTLKGFDQTINLILDESHERVFSSSQGVEQVVLGLYIVRGDNVAVIGEIDEETDSALDLGNIRAEPLNSVAH

SEQ ID NO: 3139 - DNA, 611 bp, Homosapiens
gactcacagggctgcggagcagcaactctcacgatatttgctgcgacccgcaggcgctatccgctgccgggttctggcgcgccctttcagttctgcttgctgtcggcaccgctgcgttacccggaaccgccgggccgaacagcatgacgtccgctttggagaactacatcaaccgaactgttgccgttattacatcagatgggagaatgattgtgggaacactgaaaggttttgaccagaccattaatttgattttggatgaaagccatgaacgagtattcagctcttcacagggggtagaacaagtggtactaggattatacattgtaagaggtgacaacgttgcagtcattggagaaatcgatgaagaaacagattctgcgcttgatttggggaatattcgagcagaacctttaaattctgtagcacactgaggaaaaactacatacttggacatctgtaaatctttgtacagaaactgattattctgaggatgatatatggagtttttatgagtgtgtcactggattttgactccttattgattcattgtaatatgtaaattaaaatatttctacattttattgaaaaaaaaacctttttttttgcct

SEQ ID NO: 3140 - protein, 96 aa, Homosapiens; identical to SEQ ID NO: 437

SEQ ID NO: 3141 - DNA, 1256 bp, Homosapiens
gactcacagggctgcggagcagcaactctcacgatatttgctgcgacccgcaggcgctatccgctgccgggttctggcgcgccctttcagttctgcttgctgtcggcaccgctgcgttacccggaaccgccgggccgaacagcatgacgtccgctttggagaactacatcaaccgaactgttgccgttattacatcagatgggagaatgattgtgggaacactgaaaggttttgaccagaccattaatttgattttggatgaaagccatgaacgagtattcagctcttcacagggggtagaacaagtggtactaggattatacattgtaagaggtgacaacgttgcagtcattggagaaatcgatgaagaaacagattctgcgcttgatttggggaatattcgagcagaacctttaaattctgtagcacactgaggaaaaactacatacttggacatctgtaaatctttgtacagaaactgattattctgaggatgatatatggagtttttatgagtgtgtcactggattttgactccttattgattcattgtaatatgtaaattaaaatatttctacattttattgaaaaaaaaacctttttttttgcctaaatataagtttggtagcttggtttcttttttttattaaatagtgtgaaaatataatgggcattttgaaaacttttagaaaaaagtagtactttttgatactttagtatttatggaaactagtggaaaagagaaattagtgtgctatataaatcaggcattcaagtaacagtaatacaggatatatgtgttttctttccctgatgtttaggaaaatcacaggagggtaaatctttgctggagttatctgaatcattggcatttatccgattccactggtggtagtttgctagtgcttctaaaagttgctccctagcactgagaggtgtgggtaggtaaaaatgtgtttgcttgagaaaagcaaaaatgctaacaaggttttgatagattggcccaaaattctaacttgaatattaagaatgactaggaatggtagaattgacagagatgattagtaaagtctcttgatgcccaattggttaggtatgaaagtaatatgaacacattaatgttgaattttacagacagtatatttgaaaaaaattgattccatgtagtcttcaatttttaatttttaagaattggagaatttctaatgttaaagttagtttataaatgtgagtaaataaactctaagtttgtattg

SEQ ID NO: 3142 - protein, 96 aa, Homosapiens; identical to SEQ ID NO: 437

SEQ ID NO: 3143 - DNA, 4178 bp, Homosapiens
gactcacagggctgcggagcagcaactctcacgatatttgctgcgacccgcaggcgctatccgctgccgggttctggcgcgccctttcagttctgcttgctgtcggcaccgctgcgttacccggaaccgccgggccgaacagcatgacgtccgctttggagaactacatcaaccgaactgttgccgttattacatcagatgggagaatgattgtgggaacactgaaaggttttgaccagaccattaatttgattttggatgaaagccatgaacgagtattcagctcttcacagggggtagaacaagtggtactaggattatacattgtaagaggtgacaacgttgcagtcattggagaaatcgatgaagaaacagattctgcgcttgatttggggaatattcgagcagaacctttaaattctgtagcacactgaggaaaaactacatacttggacatctgtaaatctttgtacagaaactgattattctgaggatgatatatggagtttttatgagtgtgtcactggattttgactccttattgattcattgtaatatgtaaattaaaatatttctacattttattgaaaaaaaaacctttttttttgcctaaatataagtttggtagcttggtttcttttttttattaaatagtgtgaaaatataatgggcattttgaaaacttttagaaaaaagtagtactttttgatactttagtatttatggaaactagtggaaaagagaaattagtgtgctatataaatcaggcattcaagtaacagtaatacaggatatatgtgttttctttccctgatgtttaggaaaatcacaggagggtaaatctttgctggagttatctgaatcattggcatttatccgattccactggtggtagtttgctagtgcttctaaaagttgctccctagcactgagaggtgtgggtaggtaaaaatgtgtttgcttgagaaaagcaaaaatgctaacaaggttttgatagattggcccaaaattctaacttgaatattaagaatgactaggaatggtagaattgacagagatgattagtaaagtctcttgatgcccaattggttaggtatgaaagtaatatgaacacattaatgttgaattttacagacagtatatttgaaaaaaattgattccatgtagtcttcaatttttaatttttaagaattggagaatttctaatgttaaagttagtttataaatgtgagtaaataaactctaagtttgtattgaagtagtgctagctattattgtcagcaattttccatgattcattatccataaacctgatttcagaagacgtcaactcagttttttaaataattgaaagaaacaatgtaagtagtgtttagatattcaggctagtccataaaatttctgatcaactcatgtataggcccaagtgtgtgtctttgtgatgagaagaacatagaaaaatatttacatccttgtaattgaaacaaatttaaatagtttatttgttttgtttttatgaaagtgcttaaaaatagtagttggcaagctttttctatgaagatccagatagtcttttaggctttgaaggccatgtggtctgtcacagctactcacctctgctattgtggcctacaaataaccatagataatacataaatgaatagtggctgtcttccagtaaaacttcatttataaaaatggaggtgggggttggattgggcttgaaggcatagttgctgacccttggcttaatacaagttcaataagaaaaaatgaacaatttgtataaattctggaatagatccttatagagagtttagaggtgggtttcattcatattttaaaatattttaaacttcatacttattaaacataatagctttttgggggaggaaaatatcttcactcaaatcagccttataaggggagaagcactattctctagaattatttggttgatgttaagggctgtctctgggagaattagagaagttagctagtattggctattcataagtacttgacttgtagtataatgttttataatcaatttattaataaaatgatggaaagtgggtaaggcaaacaggcaaatttagggactgtgaatgaaatattgtagtatatggcattttgaattggtaaagtaattccaaaaattaaataagaatacacattgttcagttgctaagaaaaatgcattctaacagtacaaatgaagtccagagtcagatcttttctcaaaatacttggcatatcaacacattacacataaacaaataaaaaccagtcctgtccctcatgataatgggtttctaatgtgatgtattcttgcaatctgaaacaccttataaagctgtattttcctgattgatgttggaaaaagcattcccaaaatgtgaattattgtttttatgaatagttacagaggatgtgatgacaatatgccagataatctatgtaattctttattcctggatacaagcacatggtggactgttttctcacaaccgattaaaattggatttatttttgcatgagaattgtaagggagccacaaccatgagtagtaacataattaatatacagtgtcaatattttatatttaatgagacatttattctataatcagttcttatttataaagaggcgcaaatcaatttcaacctgtaattacctctgtgctttgtgactcaggcacaatctaaacccagcttaatgaatcaaagagatgtttcttggcaagatattttcattaaagttatttggaaagggcaattaactgcaaaagggacttttttttttttaactgacaagatactatctaaactaatagtttaaaataacattgcttttatgtcaaagcactttggtaacttggcctcacatgctgacagttttggctaaatattacaaatcttgatcccagaagagcaagagagaaagttttactaatatttgcttaaacatcctgtttaacaactttataacatccttcggaatttttaaggtaataatgtgagatataagtatgataaaaacaacttttaaatggtatttaatgcaaatacagaataacgatgtcaacattttcctcagccgtgtaacctgagattcatcatgggaatgagaaagtaaaggccctttgtaatggcatgtgaaccagacaatttagtagccagggttgtaaggcaactcttaactgacaatatagttagtatattctgggccttcatcttcaaaattagtaggtagtatttattgagtgcatatcatgtgccaggcctggtgctgagtgcttacaatgatcattttatatatgggaaaattgaggctcagcagggtcaagtgacttgtaagaggtagcactagtaagtaacagtgctcaaattcaactaggtctttcagctttttatacaatactgcctgttatcagaaagtatagtcttaaaatctgctatcaagcatctatcagaagcctgatgagaaatattcagatgatctaacgcagttcccaaacctgcattgtgggccgttttcattacaattacctaaggtgctttaaaaattttcttgggccctactcgttgtggttcagcagctgtgtaatggagcaaaaaggaatagtcactaaacagcgaaggaaagtggtggaattattaaaagacctagcacttacctgctgggatgagtctctaaccccacagaattgatttcaaacacaggatcttattcaagataaggataataacagctatcttcttgggttgtaaaaagtagcattagactgcattttaaacatttggtatgattttgaggacataaccgtaaacagctatttaatactattccaggtagtcaaaggccaatgtataaaagttaaaaatataggtcttgtcagctttttaagcgtctgtcccactgactaccatatctctacaagagaatagatgaggaattgaggttatgtgggaagtacgtgtaagtttacagtattaagaaatgtacaataaaatttgtttctatgtcagcgaatattcttgactcaaggagtttgaaagtgtaaactcaaaggtctttcacatgtaaagaggaacctctccattctgtacttgtatagtcattacctcatatagatttaattttattaaattaaattttacttattttgggtttaa

SEQ ID NO: 3144 - protein, 96 aa, Homosapiens; identical to SEQ ID NO: 437

SEQ ID NO: 3145 - DNA, 798 bp, Homosapiens
acagggctgcggagcagcaactctcacgatatttgctgcgacccgcaggcgctatccgctgccgggttctggcgcgccctttcagttctgcttgctgtcggcaccgctgcgttacccggaaccgccgggccgaacagcatgacgtccgctttggagaactacatcaaccgaactgttgccgttattacatcagatgggagaatgattgtgggaacactgaaaggttttgaccagaccattaatttgattttggatgaaagccatgaacgagtattcagctcttcacagggggtagaacaagtggtactaggattatacattgtaagaggtgacaacgtaatttggccgggcacagtggctcacacctgtagtcccagcactttgggaggctgaggctggcgaattaccagaggtcagaggttcgagacctgcctagccaacgtggtgaaaccctgtctctactaaaaatacaaaaattagccgggtgtggtggcatgcgcctgtaatcccagctactcgggaggctgaagcatgagaatcgcttgaacctgtgcagtcattggagaaatcgatgaagaaacagattctgcgcttgatttggggaatattcgagcagaacctttaaattctgtagcacactgaggaaaaactacatacttggacatctgtaaatctttgtacagaaactgattattctgaggatgatatatggagtttttatgagtgtgtcactggattttgactccttattgattcattgtaatatgtaaattaaaatatttctacattttattgaaa

SEQ ID NO: 3146 - protein, 84 aa, Homosapiens
MTSALENYINRTVAVITSDGRMIVGTLKGFDQTINLILDESHERVFSSSQGVEQVVLGLYIVRGDNVIWPGTVAHTCSPSTLGG

SEQ ID NO: 3147 - DNA, 1464 bp, Homosapiens
acagggctgcggagcagcaactctcacgatatttgctgcgacccgcaggcgctatccgctgccgggttctggcgcgccctttcagttctgcttgctgtcggcaccgctgcgttacccggaaccgccgggccgaacagcatgacgtccgctttggagaactacatcaaccgaactgttgccgttattacatcagatgggagaatgattgtgggaacactgaaaggttttgaccagaccattaatttgattttggatgaaagccatgaacgagtattcagctcttcacagggggtagaacaagtggtactaggattatacattgtaagaggtgacaacgtaatttggccgggcacagtggctcacacctgtagtcccagcactttgggaggctgaggctggcgaattaccagaggtcagaggttcgagacctgcctagccaacgtggtgaaaccctgtctctactaaaaatacaaaaattagccgggtgtggtggcatgcgcctgtaatcccagctactcgggaggctgaagcatgagaatcgcttgaacctgtgcagtcattggagaaatcgatgaagaaacagattctgcgcttgatttggggaatattcgagcagaacctttaaattctgtagcacactgaggaaaaactacatacttggacatctgtaaatctttgtacagaaactgattattctgaggatgatatatggagtttttatgagtgtgtcactggattttgactccttattgattcattgtaatatgtaaattaaaatatttctacattttattgaaaaaaaaacctttttttttgcctaaatataagtttggtagcttggtttcttttttttattaaatagtgtgaaaatataatgggcattttgaaaacttttagaaaaaagtagtactttttgatactttagtatttatggaaactagtggaaaagagaaattagtgtgctatataaatcaggcattcaagtaacagtaatacaggatatatgtgttttctttccctgatgtttaggaaaatcacaggagggtaaatctttgctggagttatctgaatcattggcatttatccgattccactggtggtagtttgctagtgcttctaaaagttgctccctagcactgagaggtgtgggtaggtaaaaatgtgtttgcttgagaaaagcaaaaatgctaacaaggttttgatagattggcccaaaattctaacttgaatattaagaatgactaggaatggtagaattgacagagatgattagtaaagtctcttgatgcccaattggttaggtatgaaagtaatatgaacacattaatgttgaattttacagacagtatatttgaaaaaaattgattccatgtagtcttcaatttttaatttttaagaattggagaatttctaatgttaaagttagtttataaatgtgagtaaataaactctaagtttgtattg

SEQ ID NO: 3148 - protein, 84 aa, Homosapiens; identical to SEQ ID NO: 3146

SEQ ID NO: 3149 - DNA, 4386 bp, Homosapiens
acagggctgcggagcagcaactctcacgatatttgctgcgacccgcaggcgctatccgctgccgggttctggcgcgccctttcagttctgcttgctgtcggcaccgctgcgttacccggaaccgccgggccgaacagcatgacgtccgctttggagaactacatcaaccgaactgttgccgttattacatcagatgggagaatgattgtgggaacactgaaaggttttgaccagaccattaatttgattttggatgaaagccatgaacgagtattcagctcttcacagggggtagaacaagtggtactaggattatacattgtaagaggtgacaacgtaatttggccgggcacagtggctcacacctgtagtcccagcactttgggaggctgaggctggcgaattaccagaggtcagaggttcgagacctgcctagccaacgtggtgaaaccctgtctctactaaaaatacaaaaattagccgggtgtggtggcatgcgcctgtaatcccagctactcgggaggctgaagcatgagaatcgcttgaacctgtgcagtcattggagaaatcgatgaagaaacagattctgcgcttgatttggggaatattcgagcagaacctttaaattctgtagcacactgaggaaaaactacatacttggacatctgtaaatctttgtacagaaactgattattctgaggatgatatatggagtttttatgagtgtgtcactggattttgactccttattgattcattgtaatatgtaaattaaaatatttctacattttattgaaaaaaaaacctttttttttgcctaaatataagtttggtagcttggtttcttttttttattaaatagtgtgaaaatataatgggcattttgaaaacttttagaaaaaagtagtactttttgatactttagtatttatggaaactagtggaaaagagaaattagtgtgctatataaatcaggcattcaagtaacagtaatacaggatatatgtgttttctttccctgatgtttaggaaaatcacaggagggtaaatctttgctggagttatctgaatcattggcatttatccgattccactggtggtagtttgctagtgcttctaaaagttgctccctagcactgagaggtgtgggtaggtaaaaatgtgtttgcttgagaaaagcaaaaatgctaacaaggttttgatagattggcccaaaattctaacttgaatattaagaatgactaggaatggtagaattgacagagatgattagtaaagtctcttgatgcccaattggttaggtatgaaagtaatatgaacacattaatgttgaattttacagacagtatatttgaaaaaaattgattccatgtagtcttcaatttttaatttttaagaattggagaatttctaatgttaaagttagtttataaatgtgagtaaataaactctaagtttgtattgaagtagtgctagctattattgtcagcaattttccatgattcattatccataaacctgatttcagaagacgtcaactcagttttttaaataattgaaagaaacaatgtaagtagtgtttagatattcaggctagtccataaaatttctgatcaactcatgtataggcccaagtgtgtgtctttgtgatgagaagaacatagaaaaatatttacatccttgtaattgaaacaaatttaaatagtttatttgttttgtttttatgaaagtgcttaaaaatagtagttggcaagctttttctatgaagatccagatagtcttttaggctttgaaggccatgtggtctgtcacagctactcacctctgctattgtggcctacaaataaccatagataatacataaatgaatagtggctgtcttccagtaaaacttcatttataaaaatggaggtgggggttggattgggcttgaaggcatagttgctgacccttggcttaatacaagttcaataagaaaaaatgaacaatttgtataaattctggaatagatccttatagagagtttagaggtgggtttcattcatattttaaaatattttaaacttcatacttattaaacataatagctttttgggggaggaaaatatcttcactcaaatcagccttataaggggagaagcactattctctagaattatttggttgatgttaagggctgtctctgggagaattagagaagttagctagtattggctattcataagtacttgacttgtagtataatgttttataatcaatttattaataaaatgatggaaagtgggtaaggcaaacaggcaaatttagggactgtgaatgaaatattgtagtatatggcattttgaattggtaaagtaattccaaaaattaaataagaatacacattgttcagttgctaagaaaaatgcattctaacagtacaaatgaagtccagagtcagatcttttctcaaaatacttggcatatcaacacattacacataaacaaataaaaaccagtcctgtccctcatgataatgggtttctaatgtgatgtattcttgcaatctgaaacaccttataaagctgtattttcctgattgatgttggaaaaagcattcccaaaatgtgaattattgtttttatgaatagttacagaggatgtgatgacaatatgccagataatctatgtaattctttattcctggatacaagcacatggtggactgttttctcacaaccgattaaaattggatttatttttgcatgagaattgtaagggagccacaaccatgagtagtaacataattaatatacagtgtcaatattttatatttaatgagacatttattctataatcagttcttatttataaagaggcgcaaatcaatttcaacctgtaattacctctgtgctttgtgactcaggcacaatctaaacccagcttaatgaatcaaagagatgtttcttggcaagatattttcattaaagttatttggaaagggcaattaactgcaaaagggacttttttttttttaactgacaagatactatctaaactaatagtttaaaataacattgcttttatgtcaaagcactttggtaacttggcctcacatgctgacagttttggctaaatattacaaatcttgatcccagaagagcaagagagaaagttttactaatatttgcttaaacatcctgtttaacaactttataacatccttcggaatttttaaggtaataatgtgagatataagtatgataaaaacaacttttaaatggtatttaatgcaaatacagaataacgatgtcaacattttcctcagccgtgtaacctgagattcatcatgggaatgagaaagtaaaggccctttgtaatggcatgtgaaccagacaatttagtagccagggttgtaaggcaactcttaactgacaatatagttagtatattctgggccttcatcttcaaaattagtaggtagtatttattgagtgcatatcatgtgccaggcctggtgctgagtgcttacaatgatcattttatatatgggaaaattgaggctcagcagggtcaagtgacttgtaagaggtagcactagtaagtaacagtgctcaaattcaactaggtctttcagctttttatacaatactgcctgttatcagaaagtatagtcttaaaatctgctatcaagcatctatcagaagcctgatgagaaatattcagatgatctaacgcagttcccaaacctgcattgtgggccgttttcattacaattacctaaggtgctttaaaaattttcttgggccctactcgttgtggttcagcagctgtgtaatggagcaaaaaggaatagtcactaaacagcgaaggaaagtggtggaattattaaaagacctagcacttacctgctgggatgagtctctaaccccacagaattgatttcaaacacaggatcttattcaagataaggataataacagctatcttcttgggttgtaaaaagtagcattagactgcattttaaacatttggtatgattttgaggacataaccgtaaacagctatttaatactattccaggtagtcaaaggccaatgtataaaagttaaaaatataggtcttgtcagctttttaagcgtctgtcccactgactaccatatctctacaagagaatagatgaggaattgaggttatgtgggaagtacgtgtaagtttacagtattaagaaatgtacaataaaatttgtttctatgtcagcgaatattcttgactcaaggagtttgaaagtgtaaactcaaaggtctttcacatgtaaagaggaacctctccattctgtacttgtatagtcattacctcatatagatttaattttattaaattaaattttacttattttgggtttaa

SEQ ID NO: 3150 - protein, 84 aa, Homosapiens; identical to SEQ ID NO: 3146

SEQ ID NO: 3151 - DNA, 4077 bp, Homosapiens
gctgccgggttctggcgcgccctttcagttctgcttgctgtcggcaccgctgcgttacccggaaccgccgggccgaacagcatgacgtccgctttggagaactacatcaaccgaactgttgccgttattacatcagatgggagaatgattgtgggaacactgaaaggttttgaccagaccattaatttgattttggatgaaagccatgaacgagtattcagctcttcacagggggtagaacaagtggtactaggattatacattgtaagaggtgacaacgtgtaagtaaaatatatctgttaaaattataaatgatactgccttactttatggagaagaggctttccccaaaataccctactgtattgtccatacatagttaatagaatcttgcattcatttctttcgtaaatataccttttcttatgtttgtgtaaaataaggcatatgtatacattttatgtcagcacttctttaggtttcaaccaaagctgtctctctacaaattaaacttttacctgagatttgcccatttttctactagttaagtagcctgggtagagtccagaaagggctctgccttatattaaatacttcattagagagacttcttaaaacgttctttcaaatacccagaattttagaggaacatatttctagagtccaaggccaaagtttgaaaaatgttttgaaatctctgatttgaacaatattaattcatgctcaataacataggtgtatttataaataagtacttactcgttattcattttcttttaattttttagtatcattgacacacttaagatgtccctgtggcctcagtttacttgggacagacagatataaaagttcaagagtaattggccaggcatggtgcctgtaatcccagcactttgggagtctgaggcaagtggatcaggtcaggagttcaagaccggcctcgccaacatggcaaaacactgtctctactaaaaatacaaaaattagccaggcttggtggcgtgcgcctgtagttccagctacttgggaggctgaggtgggagaatcacttgaacccaggaggtagaggttgcagtgagccgagatcaccctactgcactccagcctgggtgacagattgagacaccaattcaaaaaaaaaaaggccgggcacagtggttcaagcatgtaatcccagcactttgggaggtggaggcgggtggatcacttgaggtcaggagttcgagaccaacttggccaatgtggtgaaaccgcgtctttactaaaaatataaaaattagccaggcgtggtggcgcaagcctgtaatcccagctactcgggaggctgagtcaggagaattcgcctgggaggtggaagttgcagtgagccgagatcgcagcactgcattccagcctgggcaacaagagcaaaactccgtgtcaaaaaataaaaaagaaaagtggctaatgtggttcacgtgccgtggctcatgcctataatctcagcactttgagaggccaaggtgggtggatcacctgagcccaggagttcaagaccagcctggccagcatagtgaaaccccgtctctccttaaaatagaaaaattagcctggtgtggtggtgcatgcctgtaatcccagctacttgggaggctgaggcagaagaatttcttgaacctggtagatggaggttgcagtgagccaaggttgcgcctttgcactccagcctgggcaaaaagagtgaaactccatcttgaaaaaaaaaagaaaagtggctgatgtgacagaggaactgaattttaaattttatttaattgtaattaattttaatagttacatgtggccagtattagtatagttatagaggctagaagaatgccaaatcagttttctagtgagtactacactgaatcaaaatatagttggaaagaagcaaaagatacattagcaattttaagctagaacatttaacaaattctaggggactaactgtcccctggaataacttaaaaagtgcaggaataatttactcatttaagttgtttatgttagcatcacctttagatgaataaataatttgatctgtaatcaaaaatcaagagtttataaaatattttagagatgacttttaggtggagttacaaggtgagctgtaagtaatgagagagagacagagcagatagggcccaggtctctggatcagaacaacactgtttatattggagctgtgcatagtaattgattttaaggtttctcctacttaaaacaatttttttttcttgaacttcagtgaaaaaagtcttgtgctagagccagcttctactggcccatgaaagcatattgttatattttaaggaattttacaagctggttaattgatgtcttgttagtagcttgaaattggccgtggtgggagtgtttgcacaatggatattagtaaatgcagcaaatcagtctcccgctttttttccagagagctggtttttaaaaatgtatcagcatttccctgcttaccatagggattttaaatgatactgaatattatcatttaaaatttaagaatatttaagagtggaattgaggcctttagtttgagaaaacttaattcattctgccagagtttcatatttttcatttattagatgatttaagactttatatactttaaagcaaaatttggcaaatcccttattactagtattcgtctttagaatttggccgggcacagtggctcacacctgtagtcccagcactttgggaggctgaggctggcgaattaccagaggtcagaggttcgagacctgcctagccaacgtggtgaaaccctgtctctactaaaaatacaaaaattagccgggtgtggtggcatgcgcctgtaatcccagctactcgggaggctgaagcatgagaatcgcttgaacctggtaagtagaggttggagtgagtcaagatcgtgccactgcactccagcctgtgcaacaagagcgaaactctatctcaaaaaaaaaaaaaaagaatttactctcattaaaaccaaacaaatgtaaacccaaccaatactttttaaaaataatatttcatagacatcttgtggtctgagtgataacattgaatatttccagttagagggctatgggttggttatctagcgtggtattaatgaatttaaagttatagatactatgttagtgttgaacaagaaaaaattttctagcttttaacctgagccaatcacgtcaaaaatgatttgttagataccaaagtacttgttcctactattatttttgtatatgaagaactggctttggatttaactgaaaacttaggaaaacaatctaatcgctgttgtctatatcattgatttaattcatcaaagttactcaaatgattgatatttttacttgctaattattttaggagtgattttgtgaaatttatttttaatacagtcctagaattgaattgaaatatggtttggaagtttgagggttttttactgtgtctatccttgtgtgtctgtttcctttaaagattcatgatacaatcactgtgtacaatgtgtcctttaatattggttcctgtaataatgtgccttcaaattatttcttgagttttgtgacttaaatatgcagttcactgactcacgccaatgttgtttgctttttaccttaattctttttactgtgctctctcagttttattttttggaagaatggtactcagtgctttgatttgattagtaagatttttgaaacacatgtaatttatttcagaaatgtgattgttttaactctgacttttttagtgcagtcattggagaaatcgatgaagaaacagattctgcgcttgatttggggaatattcgagcagaacctttaaattctgtagcacactgaggaaaaactacatacttggacatctgtaaatctttgtacagaaactgattattctgaggatgatatatggagtttttatgagtgtgtcactggattttgactccttattgattcattgtaatatgtaaattaaaatatttctacattttattgaaaaaaaaacctttttttttgcctaaatataagtttggtagcttgg

SEQ ID NO: 3152 - protein, 67 aa, Homosapiens
MTSALENYINRTVAVITSDGRMIVGTLKGFDQTINLILDESHERVFSSSQGVEQVVLGLYIVRGDNV

SEQ ID NO: 3153 - DNA, 1459 bp, Homosapiens
gagtcgagggtctcactctgttgcccaggctggagtgcagtggcttgatcatggctcaatgcaaccttgaactcctgagcccaagcaatcctcctgcctctgcctctgcctcctgagtagctgggactataggtcaccaggccagggtaatagagatgggggtatcgctgtgttgcccaagctggtctcacctcaagtgatcctcctgccttggcgtctaagaaacttttaacgtttttatgtagtgaacttagtggctgtgttgaatacttatacctagttgtcatatttattctaaaaattcaaatcattcccttgccagagtctgttttcaatttgcattccctaagaaacactttctttgattcagttatcaggaactgttgccgttattacatcagatgggagaatgattgtgggaacactgaaaggttttgaccagaccattaatttgattttggatgaaagccatgaacgagtattcagctcttcacagggggtagaacaagtggtactaggattatacattgtaagaggtgacaacgttgcagtcattggagaaatcgatgaagaaacagattctgcgcttgatttggggaatattcgagcagaacctttaaattctgtagcacactgaggaaaaactacatacttggacatctgtaaatctttgtacagaaactgattattctgaggatgatatatggagtttttatgagtgtgtcactggattttgactccttattgattcattgtaatatgtaaattaaaatatttctacattttattgaaaaaaaaacctttttttttgcctaaatataagtttggtagcttggtttcttttttttattaaatagtgtgaaaatataatgggcattttgaaaacttttagaaaaaagtagtactttttgatactttagtatttatggaaactagtggaaaagagaaattagtgtgctatataaatcaggcattcaagtaacagtaatacaggatatatgtgttttctttccctgatgtttaggaaaatcacaggagggtaaatctttgctggagttatctgaatcattggcatttatccgattccactggtggtagtttgctagtgcttctaaaagttgctccctagcactgagaggtgtgggtaggtaaaaatgtgtttgcttgagaaaagcaaaaatgctaacaaggttttgatagattggcccaaaattctaacttgaatattaagaatgactaggaatggtagaattgacagagatgattagtaaagtctcttgatgcccaattggttaggtatgaaagtaatatgaacacattaatgttgaattttacagacagtatatttgaaaaaaattgattccatgtagtcttcaatttttaatttttaagaattggagaatttctaatgttaaagttagtttataaatgtgagtaaataaactctaagtttgtattg

SEQ ID NO: 3154 - protein, 75 aa, Homosapiens; identical to SEQ ID NO: 3138

SEQ ID NO: 3155 - DNA, 4381 bp, Homosapiens
gagtcgagggtctcactctgttgcccaggctggagtgcagtggcttgatcatggctcaatgcaaccttgaactcctgagcccaagcaatcctcctgcctctgcctctgcctcctgagtagctgggactataggtcaccaggccagggtaatagagatgggggtatcgctgtgttgcccaagctggtctcacctcaagtgatcctcctgccttggcgtctaagaaacttttaacgtttttatgtagtgaacttagtggctgtgttgaatacttatacctagttgtcatatttattctaaaaattcaaatcattcccttgccagagtctgttttcaatttgcattccctaagaaacactttctttgattcagttatcaggaactgttgccgttattacatcagatgggagaatgattgtgggaacactgaaaggttttgaccagaccattaatttgattttggatgaaagccatgaacgagtattcagctcttcacagggggtagaacaagtggtactaggattatacattgtaagaggtgacaacgttgcagtcattggagaaatcgatgaagaaacagattctgcgcttgatttggggaatattcgagcagaacctttaaattctgtagcacactgaggaaaaactacatacttggacatctgtaaatctttgtacagaaactgattattctgaggatgatatatggagtttttatgagtgtgtcactggattttgactccttattgattcattgtaatatgtaaattaaaatatttctacattttattgaaaaaaaaacctttttttttgcctaaatataagtttggtagcttggtttcttttttttattaaatagtgtgaaaatataatgggcattttgaaaacttttagaaaaaagtagtactttttgatactttagtatttatggaaactagtggaaaagagaaattagtgtgctatataaatcaggcattcaagtaacagtaatacaggatatatgtgttttctttccctgatgtttaggaaaatcacaggagggtaaatctttgctggagttatctgaatcattggcatttatccgattccactggtggtagtttgctagtgcttctaaaagttgctccctagcactgagaggtgtgggtaggtaaaaatgtgtttgcttgagaaaagcaaaaatgctaacaaggttttgatagattggcccaaaattctaacttgaatattaagaatgactaggaatggtagaattgacagagatgattagtaaagtctcttgatgcccaattggttaggtatgaaagtaatatgaacacattaatgttgaattttacagacagtatatttgaaaaaaattgattccatgtagtcttcaatttttaatttttaagaattggagaatttctaatgttaaagttagtttataaatgtgagtaaataaactctaagtttgtattgaagtagtgctagctattattgtcagcaattttccatgattcattatccataaacctgatttcagaagacgtcaactcagttttttaaataattgaaagaaacaatgtaagtagtgtttagatattcaggctagtccataaaatttctgatcaactcatgtataggcccaagtgtgtgtctttgtgatgagaagaacatagaaaaatatttacatccttgtaattgaaacaaatttaaatagtttatttgttttgtttttatgaaagtgcttaaaaatagtagttggcaagctttttctatgaagatccagatagtcttttaggctttgaaggccatgtggtctgtcacagctactcacctctgctattgtggcctacaaataaccatagataatacataaatgaatagtggctgtcttccagtaaaacttcatttataaaaatggaggtgggggttggattgggcttgaaggcatagttgctgacccttggcttaatacaagttcaataagaaaaaatgaacaatttgtataaattctggaatagatccttatagagagtttagaggtgggtttcattcatattttaaaatattttaaacttcatacttattaaacataatagctttttgggggaggaaaatatcttcactcaaatcagccttataaggggagaagcactattctctagaattatttggttgatgttaagggctgtctctgggagaattagagaagttagctagtattggctattcataagtacttgacttgtagtataatgttttataatcaatttattaataaaatgatggaaagtgggtaaggcaaacaggcaaatttagggactgtgaatgaaatattgtagtatatggcattttgaattggtaaagtaattccaaaaattaaataagaatacacattgttcagttgctaagaaaaatgcattctaacagtacaaatgaagtccagagtcagatcttttctcaaaatacttggcatatcaacacattacacataaacaaataaaaaccagtcctgtccctcatgataatgggtttctaatgtgatgtattcttgcaatctgaaacaccttataaagctgtattttcctgattgatgttggaaaaagcattcccaaaatgtgaattattgtttttatgaatagttacagaggatgtgatgacaatatgccagataatctatgtaattctttattcctggatacaagcacatggtggactgttttctcacaaccgattaaaattggatttatttttgcatgagaattgtaagggagccacaaccatgagtagtaacataattaatatacagtgtcaatattttatatttaatgagacatttattctataatcagttcttatttataaagaggcgcaaatcaatttcaacctgtaattacctctgtgctttgtgactcaggcacaatctaaacccagcttaatgaatcaaagagatgtttcttggcaagatattttcattaaagttatttggaaagggcaattaactgcaaaagggacttttttttttttaactgacaagatactatctaaactaatagtttaaaataacattgcttttatgtcaaagcactttggtaacttggcctcacatgctgacagttttggctaaatattacaaatcttgatcccagaagagcaagagagaaagttttactaatatttgcttaaacatcctgtttaacaactttataacatccttcggaatttttaaggtaataatgtgagatataagtatgataaaaacaacttttaaatggtatttaatgcaaatacagaataacgatgtcaacattttcctcagccgtgtaacctgagattcatcatgggaatgagaaagtaaaggccctttgtaatggcatgtgaaccagacaatttagtagccagggttgtaaggcaactcttaactgacaatatagttagtatattctgggccttcatcttcaaaattagtaggtagtatttattgagtgcatatcatgtgccaggcctggtgctgagtgcttacaatgatcattttatatatgggaaaattgaggctcagcagggtcaagtgacttgtaagaggtagcactagtaagtaacagtgctcaaattcaactaggtctttcagctttttatacaatactgcctgttatcagaaagtatagtcttaaaatctgctatcaagcatctatcagaagcctgatgagaaatattcagatgatctaacgcagttcccaaacctgcattgtgggccgttttcattacaattacctaaggtgctttaaaaattttcttgggccctactcgttgtggttcagcagctgtgtaatggagcaaaaaggaatagtcactaaacagcgaaggaaagtggtggaattattaaaagacctagcacttacctgctgggatgagtctctaaccccacagaattgatttcaaacacaggatcttattcaagataaggataataacagctatcttcttgggttgtaaaaagtagcattagactgcattttaaacatttggtatgattttgaggacataaccgtaaacagctatttaatactattccaggtagtcaaaggccaatgtataaaagttaaaaatataggtcttgtcagctttttaagcgtctgtcccactgactaccatatctctacaagagaatagatgaggaattgaggttatgtgggaagtacgtgtaagtttacagtattaagaaatgtacaataaaatttgtttctatgtcagcgaatattcttgactcaaggagtttgaaagtgtaaactcaaaggtctttcacatgtaaagaggaacctctccattctgtacttgtatagtcattacctcatatagatttaattttattaaattaaattttacttattttgggtttaa

SEQ ID NO: 3156 - protein, 75 aa, Homosapiens; identical to SEQ ID NO: 3138

SEQ ID NO: 3157 - DNA, 1751 bp, Homosapiens
ctactgcactccagcctgggtgacagattgagacaccaattcaaaaaaaaaaaggccgggcacagtggttcaagcatgtaatcccagcatcgggaggctgagtcaggagaattcgcctgggaggtggaagttgcagtgagccgagatcgcagcactgcattccagcctgggcaacaagagcaaaactccgtgtcaaaaaataaaaaagaaaagtggctaatgtggttcacgtgccgtggctcatgcctataatctcagcactttgagaggccaaggtgggtggatcacctgagcccaggagttcaagaccagcctggccagcatagtgaaaccccgtctctccttaaaatagaaaaattagcctggtgtggtggtgcatgcctgtaatcccagctacttgggaggctgaggcagaagaatttcttgaacctggtagatggaggttgcagtgagccaaggttgcgcctttgcactccagcctgggcaaaaagagtgaaactccatcttgaaaaaaaaaagaaaagtggctgatgtgacagaggaactgaattttaaattttatttaattgtaattaattttaatagttacatgtggccagtattagtatagttatagaggctagaagaatgccaaatcagttttctagtgagtactacactgaatcaaaatatagttggaaagaagcaaaagatacattagcaattttaagctagaacatttaacaaattctaggggactaactgtcccctggaataacttaaaaagtgcaggaataatttactcatttaagttgtttatgttagcatcacctttagatgaataaataatttgatctgtaatcaaaaatcaagagtttataaaatattttagagatgacttttaggtggagttacaaggtgagctgtaagtaatgagagagagacagagcagatagggcccaggtctctggatcagaacaacactgtttatattggagctgtgcatagtaattgattttaaggtttctcctacttaaaacaatttttttttcttgaacttcagtgaaaaaagtcttgtgctagagccagcttctactggcccatgaaagcatattgttatattttaaggaattttacaagctggttaattgatgtcttgttagtagcttgaaattggccgtggtgggagtgtttgcacaatggatattagtaaatgcagcaaatcagtctcccgctttttttccagagagctggtttttaaaaatgtatcagcatttccctgcttaccatagggattttaaatgatactgaatattatcatttaaaatttaagaatatttaagagtggaattgaggcctttagtttgagaaaacttaattcattctgccagagtttcatatttttcatttattagatgatttaagactttatatactttaaagcaaaatttggcaaatcccttattactagtattcgtctttagaatttggccgggcacagtggctcacacctgtagtcccagcactttgggaggctgaggctggcgaattaccagaggtcagaggttcgagacctgcctagccaacgtggtgaaaccctgtctctactaaaaatacaaaaattagccgggtgtggtggcatgcgcctgtaatcccagctactcgggaggctgaagcatgagaatcgcttgaacctggtaagtagaggttggagtgagtcaagatcgtgccactgcactccagcctgtgcaacaagagcgaaactctatctc

SEQ ID NO: 3158 - protein, 30 aa, Homosapiens
MDISKCSKSVSRFFSRELVFKNVSAFPCLP

SEQ ID NO: 3159 - DNA, 1508 bp, Homosapiens
agtttgcaagagttcaagcccttagatctgcttttgaaggagaagaggctatttgtaagaaagctggtaagtttctattccaaggttcatgatctaataggaagactgcaggtgtggccgtcaggcccaagtcctaggtgagaatgcaggtctgcgagcccctaggaccggaccataacgaccttaacagccataacggccgtaactgccataacggccggctgcgcgaggcccttccagcatttccactttcgtcaggtactggagagggctgccggccggatgccagggcagaggggcagggcggacggctaggagttcaagaaacatcctggtctgagggaaaggctgcagcctgcaccgccatgaataagcttttcagcttctggaagaggaagaatgagacccgcagccagggctacaaccttcgagaaaaggatttaaagaaacttcacagagctgcttcagtcggggatttgaagaagctgaaggaataccttcagatcaagaaatatgatgtaaatatgcaggacaaaaaatacagaacacctttgcacctagcctgtgctaatggacatacagatgttgtacttttcctaattgagcaacaatgcaaaataaatgtccgggatagtgaaaacaaatccccattgattaaggcagtacagtgtcaaaatgaggattgtgctactattcttctaaactttggtgcagacccagatctgagggatattcgttataatactgttcttcactatgctgtttgtggtcaaagtttgtcattagttgaaaaactgcttgaatacgaagctgatcttgaagcgaaaaataaggatgggtatactccactattagttgccgttattaacaataatccaaaaatggtaaaatttcttctggagaaaggggctgatgtgaatgcttcagataattatcaaagaacagcccttattcttgctgtcagtggtgaaccaccatgtttagtaaagcttcttcttcagcaaggtgtggaattatgttacgaaggtattgtggattcacagctgaggaatatgtttatttccatggttttactgcatagatacccacaattcactgcgagccatggaaagaagaaacatgctaaatagacaccttattcttggcactacatgtgactaaaggaagatatggaacccatttctacaatttctttgccgcttccttgaattggaaaaatgtactttgaaagaaccgttaagtgaactattataatatttttgctgactacccagttgaagaaaagtttgttaattggatgggattttttttttttcacgttagaagacatgaagaaattttaaaagataaacatctatattgtgaaccatcagctgaaaagataaatttgtgttcaatatataggcagaaaaaaatttgtgtcaaaatgttgaatggaataataatgaggaaactgtgttaggcatgtattaaaacatttaaataaaataaaaatacatttcagctac

SEQ ID NO: 3160 - protein, 328 aa, Homosapiens
MQVCEPLGPDHNDLNSHNGRNCHNGRLREALPAFPLSSGTGEGCRPDARAEGQGGRLGVQETSWSEGKAAACTAMNKLFSFWKRKNETRSQGYNLREKDLKKLHRAASVGDLKKLKEYLQIKKYDVNMQDKKYRTPLHLACANGHTDVVLFLIEQQCKINVRDSENKSPLIKAVQCQNEDCATILLNFGADPDLRDIRYNTVLHYAVCGQSLSLVEKLLEYEADLEAKNKDGYTPLLVAVINNNPKMVKFLLEKGADVNASDNYQRTALILAVSGEPPCLVKLLLQQGVELCYEGIVDSQLRNMFISMVLLHRYPQFTASHGKKKHAK

SEQ ID NO: 3161 - DNA, 1550 bp, Homosapiens
agtttgcaagagttcaagcccttagatctgcttttgaaggagaagaggctatttgtaagaaagctggtaagtttctattccaaggttcatgatctaataggaagactgcaggtgtggccgtcaggcccaagtcctaggtgagaatgcaggtctgcgagcccctaggaccggaccataacgaccttaacagccataacggccgtaactgccataacggccggctgcgcgaggcccttccagcatttccactttcgtcaggtactggagagggctgccggccggatgccagggcagaggggcagggcggacggctaggagttcaagaaacatcctggtctgagggaaaggctgcagcctgcaccgccatgaataagcttttcagcttctggaagaggaagaatgagacccgcagccagggctacaaccttcgagaaaaggatttaaagaaacttcacagagctgcttcagtcggggatttgaagaagctgaaggaataccttcagatcaagaaatatgatgtaaatatgcaggacaaaaaatacagaacacctttgcacctagcctgtgctaatggacatacagatgttgtacttttcctaattgagcaacaatgcaaaataaatgtccgggatagtgaaaacaaatccccattgattaaggcagtacagtgtcaaaatgaggattgtgctactattcttctaaactttggtgcagacccagatctgagggatattcgttataatactgttcttcactatgctgtttgtggtcaaagtttgtcattagttgaaaaactgcttgaatacgaagctgatcttgaagcgaaaaataaggatgggtatactccactattagttgccgttattaacaataatccaaaaatggtaaaatttcttctggagaaaggggctgatgtgaatgcttcagataattatcaaagaacagcccttattcttgctgtcagtggtgaaccaccatgtttagtaaagcttcttcttcagcaaggtgtggaattatgttacgaaggtattgtggattcacagctgaggaatatgtttatttccatggttttactgcatagatacccacaattcactgcgagccatggaaagaagaaacatgctaaatagacaccttattcttggcactacatgtgactaaaggaagatatggaacccatttctacaatttctttgccgcttccttgaattggaaaaatgtactttgaaagaaccgttaagtgaactattataatatttttgctgactacccagttgaagaaaagtttgttaattggatgggattttttttttttcacgttagaagacatgaagaaattttaaaagataaacatctatattgtgaaccatcagctgaaaagataaatttgtgttcaatatataggcagaaaaaaatttgtgtcaaaatgttgaatggaataataatgaggaaactgtgttaggcatgtattaaaacatttaaataaaataaaaatacatttcagctacaaagtgaaggaaaacattataaataatcctgtataaatcaaa

SEQ ID NO: 3162 - protein, 328 aa, Homosapiens; identical to SEQ ID NO: 3160

SEQ ID NO: 3163 - DNA, 924 bp, Homosapiens
aggttggggatctctaatctaaagaacagttatctaaaaggcaaataaatgcctgggacagattttcccttaaggacctcagagaaagcctaccccactggcacctcaataaatgtgcagccgacagaaccatgagaaaattagtttctgtttaagctgccccatttgtggtgttttgttatggcacctctagcaaatgaatacaccaactataaattaaagccatttttactatcttgatagtggcttttaaaaaaatcatatttgtgatagcaggaagaaaagaggtgccagagaatgggagtacatgaaataaaagtggtgtctgttgacagagttggctcaagaggaagcttgtcctcaagtgtgttacattcttggggcagcattggctggtacctaaggttttgatttgatacttatatgttaggaattaaatttctatgcatgctggcattcacacgtaatttcctttatagatagatacccacaattcactgcgagccatggaaagaagaaacatgctaaatagacaccttattcttggcactacatgtgactaaaggaagatatggaacccatttctacaatttctttgccgcttccttgaattggaaaaatgtactttgaaagaaccgttaagtgaactattataatatttttgctgactacccagttgaagaaaagtttgttaattggatgggattttttttttttcacgttagaagacatgaagaaattttaaaagataaacatctatattgtgaaccatcagctgaaaagataaatttgtgttcaatatataggcagaaaaaaatttgtgtcaaaatgttgaatggaataataatgaggaaactgtgttaggcatgtattaaaacatttaaataaaataaaaatacatttcagctacaaagtgaaggaaaa

SEQ ID NO: 3164 - protein, 54 aa, Homosapiens
MGFFFFHVRRHEEILKDKHLYCEPSAEKINLCSIYRQKKICVKMLNGIIMRKLC

SEQ ID NO: 3165 - DNA, 525 bp, Homosapiens
tgtgggaagatggtgtggtgtgcagtagtggtcactgttggagagatgtttatgtcttgtacatgaagagctgctctccctctgatagctgcctgccaagcggctccatccatcattgagagcgggcaccacacggctcactgccccaagcatcttagactaaacaccagctagaatgtggagttaggcaatcaagtgtgaaacttaacttgtacttgtcttagaagcagcaaaggcagctgggccagctgatagacaaggaacgctgtcctcccagaaccagccacgggtgcagatgatgggcactgcggagcctgctgtcttacagaagctgatcctggagggtgcctttcaatcctcgatgtcaggaggttttcttttagaaaacaatctgattcagaataatgactgcaatttttcactggatggaaaacaagtctagaggaattgacccttattttaagttcaaagatagtatatccttgttactactgttacatgttttatagccaatcttcaagacca

SEQ ID NO: 3166 - protein, 48 aa, Homosapiens
MMGTAEPAVLQKLILEGAFQSSMSGGFLLENNLIQNNDCNFSLDGKQV

SEQ ID NO: 3167 - DNA, 3480 bp, Homosapiens
gccgagtcctagcgcctggcctgcgcgccgctgcccgcgccacagatttgagttctgtgaacctgcatttgttgttggtaattgcctccagatagcttctgacagtcatcagtatgatcgaatttattgtggagctggagtgcagaaagaccatgaaaactacatgaaaatattactaaaagttggaggcatattagtcatgcctatagaggatcagttaacacagattatgcgaactggacagaacacttgggaaagtaaaaatatccttgctgtttcatttgctccacttgtgcaaccaagtaagaatgataatggcaaaccagattctgtgggactccctccctgtgctgtcaggaatctacaggacttggctcgtatttacattcgacgcacacttagaaatttcataaatgatgagatgcaggccaaggggattcctcaaagggctccacccaaaaggaaaagaaagagagttaaacagagaattaacacttacgtatttgtgggtaatcagcttattcctcagcctctagacagtgaagaggatgaaaaaatggaagaggataacaaagaagaggaggaaaaagatcacaatgaagcaatgaagccagaggagccacctcaaaatttactgagagaaaaaatcatgaagctgcccctccctgaatctttaaaagcttacttgacatattttagagacaaataacttagatcaagaagaaaaatgcctactgataattcctttagtcttgaaaatgtagcatttgttaggagttaaaagagagaattatttctttcatcagagcaaattatagtggaaaaaaaatcacttgtttctgtcagtaacacaaatgatgtattcagtgaataaaagaatcccttttataaaatctatttttctttaaatcttggaaaaatgttgttttagctcagagtgatttcaaagtggaatgcaacagtagtcaagacttgtgtactataaatccttttctgattccttacagatttgtagtgatgaggtttagatttaattttatatatggtttaaataattgttaagcttatataacctgatctgaattgcagttgtttgcatttcctctatgaaaacttcatttatctaataaggaagtcaaatgctttgtagactatttaccttacttttgttgcaatcactgttgttgggttgctgtatatatattccgggcaatatatgagtgcaataacaatacaagatattgaataatttagctttaaaaaatcccacaaattttatgaaattttacagccctgctacttttgcttttgaatctcttgccaaaagacatgggtaaaatatctgcctctctcatagagattttaagagcacagcaagtgaattattaaaacaaagtctatacttaatacaactctttatatggaccctttacattttcagtatttaaaaaaatgaggttatcttaactctatagaattttaaaagtatatttagaattgttttttctgtagttcactgtataaagtatttggttttttaaaaaaagcaaaaccattgttatgtgtgactcttgataggacacagaacgagtgaatgagcatgagtgaggccactttcttggatggctgtaagtagcagggccagggtagacctggtcagcggatgcactttagcagatggaacttctagtttatctgaatatttatctttgacaaggtagggctgagcctacatttgcttttgatctatctagtataagaaatattcacagaaattgtatgtagataccctttgttttgaaaatgctgttcagaatcatagtgtaatctttgggacctatgccatgttcatttcactccttcccatattttttgtgtttcttttggtaaaactataatggttttcattttttacttaatatcacacagttaaactgtccatatttgagctttattttagcttatcagtgataaaaaacaggtagtaactgccattgtttgtttgttttcctaataaggcctgaaaacagccattccttgttaagaaagtgtacaatgtaacatatttgctagagttacatggattatatatttcttaaagggaaaaatttgagagtatcatggactaccaccagcattattattacagtagttactcagatttggttaaggaagcccaagcaatgtatagtgaaaggattattatctctctgctaagattcagatattgtttcagaaatctcagctccagtaattccacaacatctaaaaacaaatgtttgtgatcatgtgtaagcatgaaattgttccaagtaagtgaggatattttagttatgtgaaagacagtttcatggaaggtatttgttttataccagtggctgggatggtggaattggggttatttctacaattattcttagacgattactaaactgttaagaaatgccccatatcatttttgtatctaggaaagaaaaaaatcagtttcatactgttgtcatctgtcagaaatgctcattttattttgaattaaatgtggcttttgaagtacctagttaccttgaattcctggtgaccacatgtttttatctggaaaacctggagaaagttatctgtcccatctcccctgcttgtttttttttttttttttggttggagctgctgtttagatgatgcttttactatgcaggagagagtttttgttaaggatatatttgaagattggcttttccatattgtccttcattctttgaccatggcaaagtgtacagtagattttcatgatcattgcatatttcttgtcattgaaatgtatcttttatgtttttaaatgcattcattttacacttgtgagtttatcattgactttaagaggtagaaatgaaaaatgaaaattaaagctaaagcctttttatctattaatgcagatatattagaataagaatattttgggtttgtgtttattttttaatgaatttatgtttacttgatatggaaaattacgctttataggtggaaaagtagcaaataaagattaagtaaaagtaagtgaaaatgatggggaatatagtattggaattttatagctagttaaaacagtaagtatcatctaatttgggtgtttattttgcagatgagaaaacagacctagaaccgtggcatgttttgcctgaaacatacagtgagttagagacagggcctaagatagcttctagcatcagatcaatcccaagaatccatcagcaacctcagaccaacccaagaagataatttaaatctatactgcttattggtcaatatatttggttctagtattaataaagaaaaatgttattaaaatagcatacatagtagtaaaataaaatacaaaaagtgtgttgatttatagctgtttgagatgataaaagtgaagcaaagcctgttaaatcattggaagacttggaaaattattttaaataaacaattacatgtaattaagca

SEQ ID NO: 3168 - protein, 181 aa, Homosapiens
MKILLKVGGILVMPIEDQLTQIMRTGQNTWESKNILAVSFAPLVQPSKNDNGKPDSVGLPPCAVRNLQDLARIYIRRTLRNFINDEMQAKGIPQRAPPKRKRKRVKQRINTYVFVGNQLIPQPLDSEEDEKMEEDNKEEEEKDHNEAMKPEEPPQNLLREKIMKLPLPESLKAYLTYFRDK

SEQ ID NO: 3169 - DNA, 4267 bp, Homosapiens
gcatgcccggaccccggcggctccggagtccgggaggctctggctgctccagtcgcgggtccgggccccgcctctccactcggcggtggcgtccgtgttgttattgtggtggtagcggcgtctggctgctgcggaccccgccgagtcctagcgcctggcctgcgcgccgctgcccgcgccacagccccatcactgagaagaattttttcactgtatagttgcctctgcacttaaagcaggcttggtccatgaatcccatgacaagagctttgaggacatgaggagcattctttgttcaaacatactgtgttttcctttggatcactggattaatttatttttggaaatcaagtgcaatattggaagccatttctactaattttatttcacttttaaatttatgatttgatttgaatactatcatgggaggagctgtgagtgctggggaagataatgatgacttaattgataatttaaaagaagctcagtatattcgtactgaaagagtggagcaagccttcagagcgattgatcgtggagattactatttggaaggctacagagacaatgcttacaaagacttagcctggaagcatggaaacatccacttgtcagcaccttgcatttattctgaagttatggaagcattgaaacttcaaccaggattgtcttttcttaacctgggaagtggaaccggatatttaagtacaatggtgggcttaattttaggtccttttggaataaatcatgggattgagcttcattcagatgtggtggaatatgccaaggaaaaactggagagcttcatcaaaaatagtgatagctttgataaatttgagttctgtgaacctgcatttgttgttggtaattgcctccagatagcttctgacagtcatcagtatgatcgaatttattgtggagctggagtgcagaaagaccatgaaaactacatgaaaatattactaaaagttggaggcatattagtcatgcctatagaggatcagttaacacagattatgcgaactggacagaacacttgggaaagtaaaaatatccttgctgtttcatttgctccacttgtgcaaccaagtaagaatgataatggcaaaccagattctgtgggactccctccctgtgctgtcaggaatctacaggacttggctcgtatttacattcgacgcacacttagaaatttcataaatgatgagatgcaggccaaggggattcctcaaagggctccacccaaaaggaaaagaaagagagttaaacagagaattaacacttacgtatttgtgggtaatcagcttattcctcagcctctagacagtgaagaggatgaaaaaatggaagaggataacaaagaagaggaggaaaaagatcacaatgaagcaatgaagccagaggagccacctcaaaatttactgagagaaaaaatcatgaagctgcccctccctgaatctttaaaagcttacttgacatattttagagacaaataacttagatcaagaagaaaaatgcctactgataattcctttagtcttgaaaatgtagcatttgttaggagttaaaagagagaattatttctttcatcagagcaaattatagtggaaaaaaaatcacttgtttctgtcagtaacacaaatgatgtattcagtgaataaaagaatcccttttataaaatctatttttctttaaatcttggaaaaatgttgttttagctcagagtgatttcaaagtggaatgcaacagtagtcaagacttgtgtactataaatccttttctgattccttacagatttgtagtgatgaggtttagatttaattttatatatggtttaaataattgttaagcttatataacctgatctgaattgcagttgtttgcatttcctctatgaaaacttcatttatctaataaggaagtcaaatgctttgtagactatttaccttacttttgttgcaatcactgttgttgggttgctgtatatatattccgggcaatatatgagtgcaataacaatacaagatattgaataatttagctttaaaaaatcccacaaattttatgaaattttacagccctgctacttttgcttttgaatctcttgccaaaagacatgggtaaaatatctgcctctctcatagagattttaagagcacagcaagtgaattattaaaacaaagtctatacttaatacaactctttatatggaccctttacattttcagtatttaaaaaaatgaggttatcttaactctatagaattttaaaagtatatttagaattgttttttctgtagttcactgtataaagtatttggttttttaaaaaaagcaaaaccattgttatgtgtgactcttgataggacacagaacgagtgaatgagcatgagtgaggccactttcttggatggctgtaagtagcagggccagggtagacctggtcagcggatgcactttagcagatggaacttctagtttatctgaatatttatctttgacaaggtagggctgagcctacatttgcttttgatctatctagtataagaaatattcacagaaattgtatgtagataccctttgttttgaaaatgctgttcagaatcatagtgtaatctttgggacctatgccatgttcatttcactccttcccatattttttgtgtttcttttggtaaaactataatggttttcattttttacttaatatcacacagttaaactgtccatatttgagctttattttagcttatcagtgataaaaaacaggtagtaactgccattgtttgtttgttttcctaataaggcctgaaaacagccattccttgttaagaaagtgtacaatgtaacatatttgctagagttacatggattatatatttcttaaagggaaaaatttgagagtatcatggactaccaccagcattattattacagtagttactcagatttggttaaggaagcccaagcaatgtatagtgaaaggattattatctctctgctaagattcagatattgtttcagaaatctcagctccagtaattccacaacatctaaaaacaaatgtttgtgatcatgtgtaagcatgaaattgttccaagtaagtgaggatattttagttatgtgaaagacagtttcatggaaggtatttgttttataccagtggctgggatggtggaattggggttatttctacaattattcttagacgattactaaactgttaagaaatgccccatatcatttttgtatctaggaaagaaaaaaatcagtttcatactgttgtcatctgtcagaaatgctcattttattttgaattaaatgtggcttttgaagtacctagttaccttgaattcctggtgaccacatgtttttatctggaaaacctggagaaagttatctgtcccatctcccctgcttgtttttttttttttttttggttggagctgctgtttagatgatgcttttactatgcaggagagagtttttgttaaggatatatttgaagattggcttttccatattgtccttcattctttgaccatggcaaagtgtacagtagattttcatgatcattgcatatttcttgtcattgaaatgtatcttttatgtttttaaatgcattcattttacacttgtgagtttatcattgactttaagaggtagaaatgaaaaatgaaaattaaagctaaagcctttttatctattaatgcagatatattagaataagaatattttgggtttgtgtttattttttaatgaatttatgtttacttgatatggaaaattacgctttataggtggaaaagtagcaaataaagattaagtaaaagtaagtgaaaatgatggggaatatagtattggaattttatagctagttaaaacagtaagtatcatctaatttgggtgtttattttgcagatgagaaaacagacctagaaccgtggcatgttttgcctgaaacatacagtgagttagagacagggcctaagatagcttctagcatcagatcaatcccaagaatccatcagcaacctcagaccaacccaagaagataatttaaatctatactgcttattggtcaatatatttggttctagtattaataaagaaaaatgttattaaaatagcatacatagtagtaaaataaaatacaaaaagtgtgttgatttatagctgtttgagatgataaaagtgaagcaaagcctgttaaatcattggaagacttggaaaattattttaaataaacaattacatgtaattaagca

SEQ ID NO: 3170 - protein, 357 aa, Homosapiens
MGGAVSAGEDNDDLIDNLKEAQYIRTERVEQAFRAIDRGDYYLEGYRDNAYKDLAWKHGNIHLSAPCIYSEVMEALKLQPGLSFLNLGSGTGYLSTMVGLILGPFGINHGIELHSDVVEYAKEKLESFIKNSDSFDKFEFCEPAFVVGNCLQIASDSHQYDRIYCGAGVQKDHENYMKILLKVGGILVMPIEDQLTQIMRTGQNTWESKNILAVSFAPLVQPSKNDNGKPDSVGLPPCAVRNLQDLARIYIRRTLRNFINDEMQAKGIPQRAPPKRKRKRVKQRINTYVFVGNQLIPQPLDSEEDEKMEEDNKEEEEKDHNEAMKPEEPPQNLLREKIMKLPLPESLKAYLTYFRDK

SEQ ID NO: 3171 - DNA, 4186 bp, Homosapiens
tctcccggccttgttgactttggcgtccgcggggagctgcccctgtgcccgtggttctctgcgcatgcccggaccccggcggctccggagtccgggaggctctggctgctccagtcgcgggtccgggccccgcctctccactcggcggtggcgtccgtgttgttattgtggtggtagcggcgtctggctgctgcggaccccgccgagtcctagcgcctggcctgcgcgccgctgcccgcgccacaggattaatttatttttggaaatcaagtgcaatattggaagccatttctactaattttatttcacttttaaatttatgatttgatttgaatactatcatgggaggagctgtgagtgctggggaagataatgatgacttaattgataatttaaaagaagctcagtatattcgtactgaaagagtggagcaagccttcagagcgattgatcgtggagattactatttggaaggctacagagacaatgcttacaaagacttagcctggaagcatggaaacatccacttgtcagcaccttgcatttattctgaagttatggaagcattgaaacttcaaccaggattgtcttttcttaacctgggaagtggaaccggatatttaagtacaatggtgggcttaattttaggtccttttggaataaatcatgggattgagcttcattcagatgtggtggaatatgccaaggaaaaactggagagcttcatcaaaaatagtgatagctttgataaatttgagttctgtgaacctgcatttgttgttggtaattgcctccagatagcttctgacagtcatcagtatgatcgaatttattgtggagctggagtgcagaaagaccatgaaaactacatgaaaatattactaaaagttggaggcatattagtcatgcctatagaggatcagttaacacagattatgcgaactggacagaacacttgggaaagtaaaaatatccttgctgtttcatttgctccacttgtgcaaccaagtaagaatgataatggcaaaccagattctgtgggactccctccctgtgctgtcaggaatctacaggacttggctcgtatttacattcgacgcacacttagaaatttcataaatgatgagatgcaggccaaggggattcctcaaagggctccacccaaaaggaaaagaaagagagttaaacagagaattaacacttacgtatttgtgggtaatcagcttattcctcagcctctagacagtgaagaggatgaaaaaatggaagaggataacaaagaagaggaggaaaaagatcacaatgaagcaatgaagccagaggagccacctcaaaatttactgagagaaaaaatcatgaagctgcccctccctgaatctttaaaagcttacttgacatattttagagacaaataacttagatcaagaagaaaaatgcctactgataattcctttagtcttgaaaatgtagcatttgttaggagttaaaagagagaattatttctttcatcagagcaaattatagtggaaaaaaaatcacttgtttctgtcagtaacacaaatgatgtattcagtgaataaaagaatcccttttataaaatctatttttctttaaatcttggaaaaatgttgttttagctcagagtgatttcaaagtggaatgcaacagtagtcaagacttgtgtactataaatccttttctgattccttacagatttgtagtgatgaggtttagatttaattttatatatggtttaaataattgttaagcttatataacctgatctgaattgcagttgtttgcatttcctctatgaaaacttcatttatctaataaggaagtcaaatgctttgtagactatttaccttacttttgttgcaatcactgttgttgggttgctgtatatatattccgggcaatatatgagtgcaataacaatacaagatattgaataatttagctttaaaaaatcccacaaattttatgaaattttacagccctgctacttttgcttttgaatctcttgccaaaagacatgggtaaaatatctgcctctctcatagagattttaagagcacagcaagtgaattattaaaacaaagtctatacttaatacaactctttatatggaccctttacattttcagtatttaaaaaaatgaggttatcttaactctatagaattttaaaagtatatttagaattgttttttctgtagttcactgtataaagtatttggttttttaaaaaaagcaaaaccattgttatgtgtgactcttgataggacacagaacgagtgaatgagcatgagtgaggccactttcttggatggctgtaagtagcagggccagggtagacctggtcagcggatgcactttagcagatggaacttctagtttatctgaatatttatctttgacaaggtagggctgagcctacatttgcttttgatctatctagtataagaaatattcacagaaattgtatgtagataccctttgttttgaaaatgctgttcagaatcatagtgtaatctttgggacctatgccatgttcatttcactccttcccatattttttgtgtttcttttggtaaaactataatggttttcattttttacttaatatcacacagttaaactgtccatatttgagctttattttagcttatcagtgataaaaaacaggtagtaactgccattgtttgtttgttttcctaataaggcctgaaaacagccattccttgttaagaaagtgtacaatgtaacatatttgctagagttacatggattatatatttcttaaagggaaaaatttgagagtatcatggactaccaccagcattattattacagtagttactcagatttggttaaggaagcccaagcaatgtatagtgaaaggattattatctctctgctaagattcagatattgtttcagaaatctcagctccagtaattccacaacatctaaaaacaaatgtttgtgatcatgtgtaagcatgaaattgttccaagtaagtgaggatattttagttatgtgaaagacagtttcatggaaggtatttgttttataccagtggctgggatggtggaattggggttatttctacaattattcttagacgattactaaactgttaagaaatgccccatatcatttttgtatctaggaaagaaaaaaatcagtttcatactgttgtcatctgtcagaaatgctcattttattttgaattaaatgtggcttttgaagtacctagttaccttgaattcctggtgaccacatgtttttatctggaaaacctggagaaagttatctgtcccatctcccctgcttgtttttttttttttttttggttggagctgctgtttagatgatgcttttactatgcaggagagagtttttgttaaggatatatttgaagattggcttttccatattgtccttcattctttgaccatggcaaagtgtacagtagattttcatgatcattgcatatttcttgtcattgaaatgtatcttttatgtttttaaatgcattcattttacacttgtgagtttatcattgactttaagaggtagaaatgaaaaatgaaaattaaagctaaagcctttttatctattaatgcagatatattagaataagaatattttgggtttgtgtttattttttaatgaatttatgtttacttgatatggaaaattacgctttataggtggaaaagtagcaaataaagattaagtaaaagtaagtgaaaatgatggggaatatagtattggaattttatagctagttaaaacagtaagtatcatctaatttgggtgtttattttgcagatgagaaaacagacctagaaccgtggcatgttttgcctgaaacatacagtgagttagagacagggcctaagatagcttctagcatcagatcaatcccaagaatccatcagcaacctcagaccaacccaagaagataatttaaatctatactgcttattggtcaatatatttggttctagtattaataaagaaaaatgttattaaaatagcatacatagtagtaaaataaaatacaaaaagtgtgttgatttatagctgtttgagatgataaaagtgaagcaaagcctgttaaatcattggaagacttggaaaattattttaaataaacaattacatgtaattaagca

SEQ ID NO: 3172 - protein, 357 aa, Homosapiens; identical to SEQ ID NO: 3170

SEQ ID NO: 3173 - DNA, 1602 bp, Homosapiens
tctcccggccttgttgactttggcgtccgcggggagctgcccctgtgcccgtggttctctgcgcatgcccggaccccggcggctccggagtccgggaggctctggctgctccagtcgcgggtccgggccccgcctctccactcggcggtggcgtccgtgttgttattgtggtggtagcggcgtctggctgctgcggaccccgccgagtcctagcgcctggcctgcgcgccgctgcccgcgccacaggattaatttatttttggaaatcaagtgcaatattggaagccatttctactaattttatttcacttttaaatttatgatttgatttgaatactatcatgggaggagctgtgagtgctggggaagataatgatgacttaattgataatttaaaagaagctcagtatattcgtactgaaagagtggagcaagccttcagagcgattgatcgtggagattactatttggaaggctacagagacaatgcttacaaagacttagcctggaagcatggaaacatccacttgtcagcaccttgcatttattctgaagttatggaagcattgaaacttcaaccaggattgtcttttcttaacctgggaagtggaaccggatatttaagtacaatggtgggcttaattttaggtccttttggaataaatcatgggattgagcttcattcagatgtggtggaatatgccaaggaaaaactggagagcttcatcaaaaatagtgatagctttgataaatttgagttctgtgaacctgcatttgttgttggtaattgcctccagatagcttctgacagtcatcagtatgatcgaatttattgtggagctggagtgcagaaagaccatgaaaactacatgaaaatattactaaaagttggaggcatattagtcatgcctatagaggatcagttaacacagattatgcgaactggacagaacacttgggaaagtaaaaatatccttgctgtttcatttgctccacttgtgcaaccaagtaagaatgataatggcaaaccagattctgtgggactccctccctgtgctgtcaggaatctacaggacttggctcgtatttacattcgacgcacacttagaaatttcataaatgatgagatgcaggccaaggggattcctcaaagggctccacccaaaaggaaaagaaagagagttaaacagagaattaacacttacgtatttgtgggtaatcagcttattcctcagcctctagacagtgaagaggatgaaaaaatggaagaggataacaaagaagaggaggaaaaagatcacaatgaagcaatgaagccagaggagccacctcaaaatttactgagagaaaaaatcatgaagctgcccctccctgaatctttaaaagcttacttgacatattttagagacaaataacttagatcaagaagaaaaatgcctactgataattcctttagtcttgaaaatgtagcatttgttaggagttaaaagagagaattatttctttcatcagagcaaattatagtggaaaaaaaatcacttgtttctgtcagtaacacaaatgatgtattcagtgaataaaagaatcccttttataaaatct

SEQ ID NO: 3174 - protein, 357 aa, Homosapiens; identical to SEQ ID NO: 3170

SEQ ID NO: 3175 - DNA, 898 bp, Homosapiens
tctcccggccttgttgactttggcgtccgcggggagctgcccctgtgcccgtggttctctgcgcatgcccggaccccggcggctccggagtccgggaggctctggctgctccagtcgcgggtccgggccccgcctctccactcggcggtggcgtccgtgttgttattgtggtggtagcggcgtctggctgctgcggaccccgccgagtcctagcgcctggcctgcgcgccgctgcccgcgccacaggattaatttatttttggaaatcaagtgcaatattggaagccatttctactaattttatttcacttttaaatttatgatttgatttgaatactatcatgggaggagctgtgagtgctggggaagataatgatgacttaattgataatttaaaagaagctcagtatattcgtactgaaagagtggagcaagccttcagagcgattgatcgtggagattactatttggaaggctacagagacaatgcttacaaagacttagcctggaagcatggaaacatccacttgtcagcaccttgcatttattctgaagttatggaagcattgaaacttcaaccaggattgtcttttcttaacctgggaagtggaaccggatatttaagtacaatggtgggcttaattttaggtccttttggaataaatcatgggattgagcttcattcagatgtggtggaatatgccaaggaaaaactggagagcttcatcaaaaatagtgatagctttgataattattaatagatttcacctattaatacatgaagacacagataattccattttgggtcattaattgagcagaacagactcaaggaagactcttgaatcagtgaagcaactctgtgcaagtgtctgtggagctcaagcttattgctggc

SEQ ID NO: 3176 - protein, 138 aa, Homosapiens
MGGAVSAGEDNDDLIDNLKEAQYIRTERVEQAFRAIDRGDYYLEGYRDNAYKDLAWKHGNIHLSAPCIYSEVMEALKLQPGLSFLNLGSGTGYLSTMVGLILGPFGINHGIELHSDVVEYAKEKLESFIKNSDSFDNY

SEQ ID NO: 3177 - DNA, 1603 bp, Homosapiens
tctcccggccttgttgactttggcgtccgcggggagctgcccctgtgcccgtggttctctgcgcatgcccggaccccggcggctccggagtccgggaggctctggctgctccagtcgcgggtccgggccccgcctctccactcggcggtggcgtccgtgttgttattgtggtggtagcggcgtctggctgctgcggaccccgccgagtcctagcgcctggcctgcgcgccgctgcccgcgccacaggattaatttatttttggaaatcaagtgcaatattggaagccatttctactaattttatttcacttttaaatttatgatttgatttgaatactatcatgggaggagctgtgagtgctggggaagataatgatgacttaattgataatttaaaagaagctcagtatattcgtactgaaagagtggagcaagccttcagagcgattgatcgtggagattactatttggaaggctacagagacaatgcttacaaagacttagcctggaagcatggaaacatccacttgtcagcaccttgcatttattctgaagttatggaagcattgaaacttcaaccaggattgtcttttcttaacctgggaagtggaaccggatatttaagtacaatggtgggcttaattttaggtccttttggaataaatcatgggattgagcttcattcagatgtggtggaatatgccaaggaaaaactggagagcttcatcaaaaatagtgatagctttgataagtaagtattcatatctatagttttggtttaaaatcacttaatagatacatgcaacatgtctattcttgaacactattattgatcctgactggctcaattgaatgcagcaaaaatcagtgcaccataaaatgagaaaaagttaagattattctgtggtataacttttactatatgtaattctatagtaaattataaataatgtgattttttgctactacaactttattagtaatgttgaattcattaaacattcagctatcttttctggagatacagtgtaataatgctgtgattgcaatatttgtctggaactggttttttaccttttggatagtaatttagtagttctgtcctcttcaggacatgagaggtggtaccagtcagtatacaaaggactttaacatattcagctactttgtaatatatccagaagaaatgatcatagaaatacattgatatatcttgtgataggattgttaataagaaattggtttataaaaccattgttttgaactcacaatataactcctcttagaagaaacattgcacgggctttggtccttgggctggcaggaaaagtccatttggtgtgtaatcctaaaattctgcattgctatagagcaagagcacttacgctgaaatccatgagctctttgaaattgtgtaaaatttggagagcttttacatctctcatttcactgtgtatctgattttcaaagagaaaaagtgttaaaaaggatagaaaacacaagcttagaacagtcactttaaagaacaaagttttaggcaaaaacactgagaatttcaactcggcttgttgggagttggccctcatttatatccagcccttgg

SEQ ID NO: 3178 - protein, 137 aa, Homosapiens
MGGAVSAGEDNDDLIDNLKEAQYIRTERVEQAFRAIDRGDYYLEGYRDNAYKDLAWKHGNIHLSAPCIYSEVMEALKLQPGLSFLNLGSGTGYLSTMVGLILGPFGINHGIELHSDVVEYAKEKLESFIKNSDSFDK

SEQ ID NO: 3179 - DNA, 915 bp, Homosapiens
gcatgcccggaccccggcggctccggagtccgggaggctctggctgctccagtcgcgggtccgggccccgcctctccactcggcggtggcgtccgtgttgttattgtggtggtagcggcgtctggctgctgcggaccccgccgagtcctagcgcctggcctgcgcgccgctgcccgcgccacaggattaatttatttttggaaatcaagtgcaatattggaagccatttctactaattttatttcacttttaaatttatgatttgatttgaatactatcatgggaggagctgtgagtgctggggaagataatgatgacttaattgataatttaaaagaagctcagtatattcgtactgaaagagtggagcaagccttcagagcgattgatcgtggagattactatttggaaggctacagagacaatgcttacaaagacttagcctggaagcatggaaacatccacttgtcagcaccttgcatttattctgaagttatggaagcattgaaacttcaaccaggattgtcttttcttaacctgggaagtggaaccggatatttaagtacaatggtgggcttaattttaggtaattttatttttgtaaaattctattttaaaaaataagccattttgtattatggtttatgatttataggagttgtaactttgtgtacagtatgtttgaatgtgtatacacagtgtaggtatcttccttacttagatgtgaaaacacaaagtagtagtaatcttttttcattccgagtccttacctcaacctacagtagctctggaaactaactgttctctgttagtcattgtctgtacttaaagtcaagcgctggtgggcaggaaactcaggagtaatatttaatctatttcagatagagtgttctgtcttctggcatataaagtttg

SEQ ID NO: 3180 - protein, 77 aa, Homosapiens
MPGPRRLRSPGGSGCSSRGSGPRLSTRRWRPCCYCGGSGVWLLRTPPSPSAWPARRCPRHRINLFLEIKCNIGSHFY

SEQ ID NO: 3181 - DNA, 276 bp, Homosapiens
ggtattttaaaatatttggtagtcacttaaaatgcataatgacagacaatagggtgtcataatatggtttattaatcttttttcattttccactagatgtggcaactacatagttggaagaaatgtggcggccgggggcagtggctcacgcctgtaatcctagcactttgggaggctgaggcaggagagtcgcttgaacctgcgagtcagaggttgcagtgagccaagatcgctccacttcactccagcctggtcaaaagagtgagactctgtctc

SEQ ID NO: 3182 - protein, 41 aa, Homosapiens
MWQLHSWKKCGGRGQWLTPVILALWEAEAGESLEPASQRLQ

SEQ ID NO: 3183 - DNA, 799 bp, Homosapiens
agtggtctcagggctacggcttgtcggtgcctcgccgcacagtcccctttgcattgaaggacacggtcttacggtgtaggagcatttttgaggtgcattcctggatttggaggcgaacccccaatggttacctccacagaggctttgcgaagggcgctcactgacttaggtgaagagcgaaggctcaagactgtgccgctttatagtggccccttgacgtccagaagttccccccagcgccggtcataagcactcccgccgcctgggccccgccctgcctgccaggcgccctccagcctcagctcccggacgcccggcgtggccgctttctcgcgtcttgctgacccgggccgggggcgtgtgctcctcctgcagcggacggaagatgctgggccacgcaagtttccctgggcttggttaaccaccccaaagcccatttccagaaggaaagggtgttgaggaggagggatagaaagtcgagaagagggccggggtcttgctctgttgctcaggctggagtgaagtagagcattcacagcccactgcaaccttgaacacctgggctcaagcaatcctcctgcctcagcctcctgagtagctgggaccacagatgtgtaccaccatgcccagctacatgtctttcttttggggggacagcagaaacctgggcagaggaggaatcctgatacccagttctgaaacaaagtggcagaatttgtaatacagaagaaggatcttgtgactggtattctgttatccacaagagtaaatgttcccaaataaacaaaactgggatatg

SEQ ID NO: 3184 - protein, 41 aa, Homosapiens
MVTSTEALRRALTDLGEERRLKTVPLYSGPLTSRSSPQRRS

SEQ ID NO: 3185 - DNA, 786 bp, Homosapiens
agtggtctcagggctacggcttgtcggtgcctcgccgcacagtcccctttgcattgaaggacacggtcttacggtgtaggagcatttttgaggtgcattcctggatttggaggcgaacccccaatggttacctccacagaggctttgcgaagggcgctcactgacttaggtgaagagcgaaggctcaagactgtgccgctttatagtggccccttgacgtccagaagttccccccagcgccggtcataagcactcccgccgcctgggccccgccctgcctgccaggcgccctccagcctcagctcccggacgcccggcgtggccgctttctcgcgtcttgctgacccgggccgggggcgtgtgctcctcctgcagcggacggaagatgctgggccacgcaagtttccctgggcttggttaaccaccccaaagcccatttccagaaggaaagggtgttgaggaggagggatagaaagtcgagaagagggccggagatgagatcttgctctgtcacccagactggagtgcagtggcacgatcatagctcactgcaccctcaaactcctggactcaaatcatcctctacctctgcctccatgagtaactggaactacaggtcaacacagattctcggaattaaacacttccatgtcccagaggatcaaagtcacttgcaaaaatacctcaaaatgtgtttgtcaagaaattacactttctcttgattttgtggaccactttctaatttccaacccagacaaaagcctcctagtgaagctggtctttcct

SEQ ID NO: 3186 - protein, 75 aa, Homosapiens
MRSCSVTQTGVQWHDHSSLHPQTPGLKSSSTSASMSNWNYRSTQILGIKHFHVPEDQSHLQKYLKMCLSRNYTFS

SEQ ID NO: 3187 - DNA, 374 bp, Homosapiens
gtctttagaagcagcttccaagggcaggaagacttccagagtgcaggactgagcgtgctgctaatcttgttctggtcgagagactgatgagagaaggtctcagagaaaccaacccaatgacatttcgtcttggatttccagcccccagaattactggaaaatacatttttcttgtttaggccacccaatctgtactactttgttatggcaaccctagcaaactaatgcagtcaccaacccagggtgaaaatgggacattcccaactctagctcttaggccaagcttatttgtaatagattcttgttttcaaaggatatagatattgagattctcaatgtatttgttaaaatacattgtttcttgttaaaagcat

SEQ ID NO: 3188 - protein, 30 aa, Homosapiens
MREGLRETNPMTFRLGFPAPRITGKYIFLV

SEQ ID NO: 3189 - DNA, 671 bp, Homosapiens
gacaaaggatcaagagatggtttccacactggcaaggagtaatcttggagacaggaagagactggtgattcaagagagagtagacagaagaaggcgctgtctgggggagacaggttaatattcatctgtagcctgagtgaccccaaaaagatgacactcttctgtccaccaaaaccttccagaggcttcctgtgctcacttgaagtaaaatccaaagtgctgactgtggttaccagctccccgggctggcctgctgcgggacggcttctccaccagcctcccgttcaaggcctccatttctgccactgcggcgtctgcatggttcctgagcatcccaagcacattcccacctcaaggccttggtgcttgcagttcatctgcttctctcctggtctatgcctggctggttcttatttcttttgaattcggacgaggtgcacctcatgagagaggccttccttgacctccctcctccattcctctcacaggccccatctgacatgcttgccctccccctcccctacccccatccccttgtgagccccatgagagaagggcctctgtccttaggtagatgtgattccccagaacccaggacaggacagccacacaggaggaaactgacacacttttcttaaatgatggaataaagtactgactgtgtttcaagc

SEQ ID NO: 3190 - protein, 33 aa, Homosapiens
MVSTLARSNLGDRKRLVIQERVDRRRRCLGETG

SEQ ID NO: 3191 - DNA, 598 bp, Homosapiens
actcttacaaggggctctgagtacatagtggggcacatctgcaatgctctggaagtttgccactctgccttaaccttgacttcctgtttgcataaggccttaaggtcacctccagatgagactacatctgacaggtgatgagatagatcatgttggttggagcacctaggttgagaggtccacacgaggctcaattgtttctaaatgggtgagtcagttagtcctgctattgtcctcattagagaaggactatccacaatagaattgtttttgtaaaaatagtgagaaggggcttgccttgctttaatcaagcacatctggggtggaatcctggctgcactgtttcctagttttacggtcttgagcaagttactaactttgctaaacaccagtttcctcatcagtttaattgtgcatggcgatatttgcttgatacattttgtcagatgaagtatacaaaacatcattgattgtgtctgacagcgtggatagttattagccaattaaatctgcttactttataattatctgctgaataatgagaggaaatagcagggcacttttcccagaccacaataaaatgaatgtaatgtgtgga

SEQ ID NO: 3192 - protein, 45 aa, Homosapiens
TLTRGSEYIVGHICNALEVCHSALTLTSCLHKALRSPPDETTSDR

SEQ ID NO: 3193 - DNA, 465 bp, Homosapiens
tttacttgtaaagaaaactaaaatgaagctcagcgctttccttacatgcaggaaagatgggtccaggccatggcccttgccccttaagtcgtcctagggtgtcccctccacaccctccagctacgagggactcacaattcctttcccaagctgcccatgcgcatccccagggccctttgctcctcttcctgggcctatgccccagaggctgggcttggcccccatttgtatccttagtccgaggaggactggcccagcggtagcttttgagagtcacaggctgcaatggtgcgggagggagccgcggctagcggaaagcgagaccacccggtccaccaccgcatcctagaggggcactcagaaaggcccagagctggaacgtcatgcctggactccctcactatttggaaagacttctttggagtcctgtcatctaagctacaataaagctttgttcttcattgg

SEQ ID NO: 3194 - protein, 53 aa, Homosapiens
MVREGAAASGKRDHPVHHRILEGHSERPRAGTSCLDSLTIWKDFFGVLSSKLQ

SEQ ID NO: 3195 - DNA, 6188 bp, Homosapiens
gtagggagaagggcaggatgtttttaactgaatgtgacctcaggggaatactagagaaaataataaaatttctgaatggggcagcgtggagaaatcctaagagaaatagcataagagcattttggaacacatccaggaaaagataactttcgacacacctgtagacgttcgccaggtaaaggagtgatggaaactctccagttcagatccagtagcttttagggaaggaactacagttgctgacttaagttgaagaagcatctatttaatgtctggtcaaatcctacaagaaacacagaaatctatgattaaaaagctgagcactttgatatactgcaaagggtagagaaggcaggacggtagaaattttctgcaagaaagaatgaatttcaggatttatcactaaataagacaaagtcatttatttagtccccctgacacagcagggcaaactgagttgacatacaagttacctggagaaaaagagagcaattccaggacttcctcttcagcctaaaagaaggtaccagatctgtgcactggggcgatgtggaagagacctgcttattgcccctgatgtaagctccagtaagaaaagacgtcaagtacaagtactaggaaatcactttatacatctgtttataggaatgacctcaggactttgtgttcatgttatagatggatgcagaggctgaagataaaacgctgcgtactcgctctaaaggaaccgaggtgccaatggattcactaatccaggagctcagtgttgcctatgattgctccatggcaaagaagagaacagctgaagatcaggctttgggggttccagtcaacaaaaggaaatccctgctaatgaagccccgacactacagcccaaaagcagactgccaagaagaccgcagtgacaggacagaggacgatggccccttggaaacacatggtcactctaccgcagaggaaatcatgataaaacctatggatgaaagtcttctttcaactgcacaagaaaactccagtaggaaggaagacagatactcttgttatcaagagctcatggtcaagtctttaatgcacttggggaaatttgaaaaaaatgtatctgttcagactgtaagtgaaaatttaaatgacagtggcatccagtctttaaaagcagagagcgatgaagcagacgagtgctttctgattcattctgatgatggaagagacaagattgatgattctcagccacccttctgctcctctgatgacaatgaaagtaactctgaaagtgcagaaaatggctgggacagtggctccaacttctcagaagaaaccaaaccacctagagtcccaaagtatgttttaacagatcataaaaaagacctattggaagttcctgaaataaaaactgaaggtgacaaatttatcccttgtgagaacaggtgtgattctgaaacagaaaggaaagacccgcagaatgctctcgcagaacccctggatggcaatgcccagccctcattccctgacgttgaggaggaagatagcgagagcctggcagtaatgacggaagagggtagtgacctggaaaaggccaaggggaatttaagtttgctggagcaggcaattgctctgcaggctgagcgaggttgtgttttccataacacctacaaagagctggataggttcctgctggagcacctagcaggggaaaggaggcaaaccaaagttatcgacatgggtggaagacaaatctttaacaataaacattcaccaaggcctgaaaagagggagaccaagtgcccgatccctggatgtgatggcacgggacacgtgacagggctctacccgcaccaccgcagcctttcggggtgcccccacaaagtgcgggttcccctggaaattcttgccatgcatgaaaatgtgctcaagtgtcccacgccgggatgcacaggaaggggtcatgtgaacagcaaccgcaacacccacaggagtctttctggttgtccaattgctgcagctgaaaaattggcaatgtcccaggataaaaatcagcttgattctccccaaactgggcagtgtcctgaccaggcccacaggacaagtttggtgaagcaaattgaattcaatttcccgtcacaagccatcacctctcccagagccacagtgtcaaaagaacaagagaagtttggaaaagtaccatttgattatgccagttttgatgcccaagttttcggtaaacgccctctcatacaaacagtgcaaggacgaaaaacaccaccatttcctgaatcaaagcattttccaaatccagtgaaatttcctaatcgactgcctagtgcaggcgcccacacccagagccctggccgtgccagctcttatagctacggtcaatgtagtgaagacacccacatagcagcagctgctgccatcctgaacctttccacccgctgcagggaagccacagacatcctctccaacaagccacagagtctgcatgccaagggagccgaaatagaagtggatgaaaatggcacattggacttaagcatgaaaaaaaatcgaatcctggacaagtctgcacccctaacttcctctaacacttctattccaactccttcctcttccccattcaaaacaagcagcattctggtcaatgcagcattctatcaggctctttgtgaccaagagggctgggacactcctatcaactatagcaaaactcacgggaagacagaggaggagaaagagaaagacccagtgagctctctagaaaatttagaggaaaaaaagtttcctggagaggcctctataccaagccctaaacccaagcttcatgcaagagatctcaaaaaggaactaatcacctgtccaacaccaggatgtgatggaagtggccacgtgacaggaaactatgcatctcatcgcagtgtttctggatgtcctttagcagataagactctaaaatccctcatggctgccaactctcaggagcttaagtgtccaaccccaggctgcgatggctcggggcacgtgactggaaactatgcttcccacagaagcttgtccggatgccctcgtgcaaggaaaggtggtgtcaaaatgacccctaccaaggaagaaaaagaagaccctgaactgaaatgtcctgtgatagggtgtgatggccaaggtcacatatcaggtaaatacacatcacaccgcacagcttctggctgtcctctggctgccaagagacagaaggagaatcctctcaatggagcctccctctcctggaaactgaacaaacaagagctaccacattgtcccttgccaggctgcaatgggctgggccatgtaaataatgtttttgtcacccaccgaagcttatctggatgtcctctcaatgcacaagttatcaaaaagggcaaggtttctgaagaactcatgaccatcaagctcaaagcaactgggggaatagagagtgatgaagaaattaggcatttggatgaagaaataaaggaactgaatgaatccaaccttaaaattgaagcagatatgatgaaacttcagacccagatcacatctatggagagcaacttaaagacgatagaggaggagaacaaactcatagaacagaacaatgaaagtctgctgaaagagctggcaggtctaagccaagctctcatttcaagccttgctgacatccagcttccacagatgggacctatcagtgagcagaattttgaagcatatgtaaatacactcacagatatgtacagcaatctggaacgggactattccccggaatgcaaagctctactggaaagtatcaaacaggcagtgaagggtatccatgtgtaggatcacagcgctgccgggcaacagaagttaccaacagcagtaaactccagatggatctgttagaggttcatgtactgctaaggcgtggaggttgccgtactgcatttacaatttgcaacattgcactaattttattttccccagctgatataaaaaggaaagaaaaactatgatagacttcttggattaaaagcaatgcagtcaattattagatcttatttattttcatatgtttttcttttatttcttcattgtactctttttttttttgtaaagtatatgtaaaataaatgtgacatttttataatttatttattactaatcaaagagttttttatcttttaactgcattttgaagtctgccgtatttttacaagtgtgtttattaatttattttccaataggatttaaatagaaatgctattctcaagtcatctttcttgctgggttttaatgaggaaacaggaaagggtgaaggaaatccttgtctaaggactgcactatagttgagtttgatttttattgcacacttcttcccccacctttcactgatttttgtatttataaatgaatttgcggtaaggtgagctgcacggaaggaataagaagacaaatggcgcccactagtggggaatccgcactcacaaaagcacaggatgctggaaaacagcctgctcagaatttgttagcaataattaaatatagcaatcagcaaagtattcgacttggctggacggttttcgttaatatgaattatttatttgaaatgttttaaagaaacataagcctttttagtgatgcagatttgtctgtttgtttttcaagtcatatcagatcgttggcaactcgtatcccaagatgaaaaataagacttggtgtgaccagccaggctttcctgccatatgttggtacaatatacaagtgacaatattggtgtagatttgtacttagcaaatacaaacacatccaaatgaaaaattttgtagataccatatcccctgaaatagcatttatcttactgggttgactggaaaggaatggaaaatatagtaacacatgaaaaaatgctactccaatctgaatgattacttcaaacactggcaccttgggtctcacccaccataggaaacaagacaacattcaatttgatagaaatcttgccacaaaacttcaaatgctacaaaatatacacacacactcacacacacaggcatactcacacacagacacacacacacacacacacacagactcatccacacttcaaattgagcccacaatcttgaatttctgaacggatcagagtttcatagtttctatagtaaaggcaatgtctatttcagggattgtaaagtagttaagcattgtttcaaaagtttttttatatttattttttttaaggaaaaggtatagacaaccagctaaactgcctttttggtgtgcacacacatttcatgtgcagacgtgcctctgtgtaaatgtacacatgaacttcatgtgggcttaattttctgtgctataaacaaaagtgtttattttttattaacctcatggatatttagatggaaagtgatggcattcacaggcttgatgtattccactgttattactgttacctgcacaaatgaaaaacaatactcaacagtaattccactcccatgaaactttggtcattgttatgcattaagtggggcttatctttggtttggagttcatttgaactcttgaaccttagtttagtgaagatgaactgtctgttcttaggtagaaacggtgtttatttaaaaatcagttttaaaaaatgagctaccatatgtgctgtctattataaatgggacaccaaacaaaattttctattacagttgtgtacttgcaaacattttgctatacagtacttcatagatgcatacaaatgagctcacttattacaaagacaaacgtttaatttgctaaatattttaacaagtttgttatatattttatttaatttaaaagaaatctcttaccaacctacatatttattactataatttgctatgacttcaggttaatttatttgtgtttgcatagtttgagcaggatgttttgtgaagtatgtttgtatttatttgcctactttgtacttgatgtgttttgtaatgtgcactgaatttgttttcttttcaactatgttaatgatcaatactgtaaattgggtcttttgtaaacaaaaaggcaatgatgtatgcattttttttaatttgaggtagtttgtttgtatactgtttctccaaacacttaatatttcttacatcaaagcaacaaaattgtgttcagtgctgtacatttggtgtatggtaggaaataaaaattgataacgagttttg

SEQ ID NO: 3196 - protein, 1047 aa, Homosapiens; identical to SEQ ID NO: 443

SEQ ID NO: 3197 - DNA, 1209 bp, Homosapiens
aactacaacttctcagcccatgctctcttcctgtgccttccaggtgtccaaccccaggctgcgatggctcggggcacgtgactggaaactatgcttcccacagaagcttgtccggatgccctcgtgcaaggaaaggtggtgtcaaaatgacccctaccaaggaagaaaaagaagaccctgaactgaaatgtcctgtgatagggtgtgatggccaaggtcacatatcaggtaaatacacatcacaccgcacagcttctggctgtcctctggctgccaagagacagaaggagaatcctctcaatggagcctccctctcctggaaactgaacaaacaagagctaccacattgtcccttgccaggctgcaatgggctgggccatgtaaataatgtttttgtcacccaccgaagcttatctggatgtcctctcaatgcacaagttatcaaaaagggcaaggtttctgaagaactcatgaccatcaagctcaaagcaactgggggaatagagagtgatgaagaaattaggcatttggatgaagaaataaaggaactgaatgaatccaaccttaaaattgaagcagatatgatgaaacttcagacccagatcacatctatggagagcaacttaaagacgatagaggaggagaacaaactcatagaacagaacaatgaaagtctgctgaaagagctggcaggtctaagccaagctctcatttcaagccttgctgacatccagcttccacagatgggacctatcagtgagcagaattttgaagcatatgtaaatacactcacagatatgtacagcaatctggaacgggactattccccggaatgcaaagctctactggaaagtatcaaacaggcagtgaagggtatccatgtgtaggatcacagcgctgccgggcaacagaagttaccaacagcagtaaactccagatggatctgttagaggttcatgtactgctaaggcgtggaggttgccgtactgcatttacaatttgcaacattgcactaattttattttccccagctgatataaaaaggaaagaaaaactatgatagacttcttggattaaaagcaatgcagtcaattattagatcttatttattttcatatgtttttcttttatttcttcattgtactctttttttttttgtaaagtatatgtaaaataaatgtgacatttttataatttatttattactaa

SEQ ID NO: 3198 - protein, 246 aa, Homosapiens [sequence omitted]

SEQ ID NO: 3199 - DNA, 565 bp, Homosapiens
atttcagcttgtccggatgccctcgtgcaaggaaaggtggtgtcaaaatgacccctaccaaggaagaaaaagaagaccctgaactgaaatgtcctgtgatagggtgtgatggccaaggtcacatatcaggtaaatacacatcacaccgcacagcttctggctgtcctctggctgccaagagacagaaggagaatcctctcaatggagcctccctctcctggaaactgaacaaacaagagctaccacattgtcccttgccaggctgcaatgggctgggccatgtaaataatgtttttgtcacccaccgaagcttatctggatgtcctctcaatgcacaagttatcaaaaagggcaaggtttctgaagaactcatgaccatcaagctcaaagcaactgggggtaagagcacagggctggctgtcaccacctcctgcagggtgtagaccctggctccccaaagcgttccgtgtgtcaaagtattctctaggtgggaagcataattttaatgtacaagaagaaaggtttcctcagatttgaactaaaattataactttgtttaaaaacc

SEQ ID NO: 3200 - protein, 131 aa, Homosapiens
MTPTKEEKEDPELKCPVIGCDGQGHISGKYTSHRTASGCPLAAKRQKENPLNGASLSWKLNKQELPHCPLPGCNGLGHVNNVFVTHRSLSGCPLNAQVIKKGKVSEELMTIKLKATGGKSTGLAVTTSCRV

SEQ ID NO: 3201 - DNA, 2568 bp, Homosapiens
ggtaaataacacagagcaaagttagcaagttgcagcgcctctgcgttctgattctatggaacctttttgtagggagaagggcaggatgtttttaactgaatgtgacctcaggggaatactagagaaaataataaaatttctgaatggggcagcgtggagaaatcctaagagaaatagcataagagcattttggaacacatccaggaaaagataactttcgacacacctgtagacgttcgccaggtaaaggagtgatggaaactctccagttcagatccagtagcttttagggaaggaactacagttgctgacttaagttgaagaagcatctatttaatgtctggtcaaatcctacaagaaacacagaaatctatgattaaaaagctgagcactttgatatactgcaaagggtagagaaggcaggacggtagaaattttctgcaagaaagaatgaatttcaggatttatcactaaataagacaaagtcatttatttagtccccctgacacagcagggcaaactgagttgacatacaagttacctggagaaaaagagagcaattccaggacttcctcttcagcctaaaagaaggtaccagatctgtgcactggggcgatgtggaagagacctgcttattgcccctgatgtaagctccagtaagaaaagacgtcaagtacaagtactaggaaatcactttatacatctgtttataggtttatggatgcagaggctgaagataaaacgctgcgtactcgctctaaaggaaccgaggtgccaatggattcactaatccaggagctcagtgttgcctatgattgctccatggcaaagaagagaacagctgaagatcaggctttgggggttccagtcaacaaaaggaaatccctgctaatgaagccccgacactacagcccaaaagcagactgccaagaagaccgcagtgacaggacagaggacgatggccccttggaaacacatggtcactctaccgcagaggaaatcatgataaaacctatggatgaaagtcttctttcaactgcacaagaaaactccagtaggaaggaagacagatactcttgttatcaagagctcatggtcaagtctttaatgcacttggggaaatttgaaaaaaatgtatctgttcagactgtaagtgaaaatttaaatgacagtggcatccagtctttaaaagcagagagcgatgaagcagacgagtgctttctgattcattctgatgatggaagagacaagattgatgattctcagccacccttctgctcctctgatgacaatgaaagtaactctgaaagtgcagaaaatggctgggacagtggctccaacttctcagaagaaaccaaaccacctagagtcccaaagtatgttttaacagatcataaaaaagacctattggaagttcctgaaataaaaactgaaggtgacaaatttatcccttgtgagaacaggtgtgattctgaaacagaaaggaaagacccgcagaatgctctcgcagaacccctggatggcaatgcccagccctcattccctgacgttgaggaggaagatagcgagagcctggcagtaatgacggaagagggtagtgacctggaaaaggccaaggggaatttaagtttgctggagcaggcaattgctctgcaggctgagcgaggttgtgttttccataacacctacaaagagctggataggttcctgctggagcacctagcaggggaaaggaggcaaaccaaagttatcgacatgggtggaagacaaatctttaacaataaacattcaccaaggcctgaaaagagggagaccaagtgcccgatccctggatgtgatggcacgggacacgtgacagggctctacccgcaccaccgcagcctttcggggtgcccccacaaagtgcgggttcccctggaaattcttgccatgcatgaaaatgtgctcaagtgtcccacgccgggatgcacaggaaggggtcatgtgaacagcaaccgcaacacccacaggagtctttctggttgtccaattgctgcagctgaaaaattggcaatgtcccaggataaaaatcagcttgattctccccaaactgggcagtgtcctgaccaggcccacaggacaagtttggtgaagcaaattgaattcaatttcccgtcacaagccatcacctctcccagagccacagtgtcaaaagaacaagagaagtttggaaaagtaccatttgattatgccagttttgatgcccaagttttcggtaaacgccctctcatacaaacagtgcaaggacgaaaaacaccaccatttcctgaatcaaagcattttccaaatccagtgaaatttcctaatcgactgcctagtgcaggcgcccacacccagagccctggccgtgccagctcttatagctacggtcaatgtagtgaagacacccacatagcagcagctgctgccatcctgaacctttccacccgctgcagggaagccacagacatcctctccaacaagccacagagtctgcatgccaagggagccgaaatagaagtggatgaaaatggcacattggacttaagc

SEQ ID NO: 3202 - protein, 616 aa, Homosapiens
MDAEAEDKTLRTRSKGTEVPMDSLIQELSVAYDCSMAKKRTAEDQALGVPVNKRKSLLMKPRHYSPKADCQEDRSDRTEDDGPLETHGHSTAEEIMIKPMDESLLSTAQENSSRKEDRYSCYQELMVKSLMHLGKFEKNVSVQTVSENLNDSGIQSLKAESDEADECFLIHSDDGRDKIDDSQPPFCSSDDNESNSESAENGWDSGSNFSEETKPPRVPKYVLTDHKKDLLEVPEIKTEGDKFIPCENRCDSETERKDPQNALAEPLDGNAQPSFPDVEEEDSESLAVMTEEGSDLEKAKGNLSLLEQAIALQAERGCVFHNTYKELDRFLLEHLAGERRQTKVIDMGGRQIFNNKHSPRPEKRETKCPIPGCDGTGHVTGLYPHHRSLSGCPHKVRVPLEILAMHENVLKCPTPGCTGRGHVNSNRNTHRSLSGCPIAAAEKLAMSQDKNQLDSPQTGQCPDQAHRTSLVKQIEFNFPSQAITSPRATVSKEQEKFGKVPFDYASFDAQVFGKRPLIQTVQGRKTPPFPESKHFPNPVKFPNRLPSAGAHTQSPGRASSYSYGQCSEDTHIAAAAAILNLSTRCREATDILSNKPQSLHAKGAEIEVDENGTLDL

SEQ ID NO: 3203 - DNA, 608 bp, Homosapiens
acagtaccccattctgtatttggttcaagctccagcaaactgctcacgtgcctcgtatgttctacaagattcgcacactgggatggctcatgtggtgtcatgaattgtgaacattactgtgcagtcattctcagaaggtggggaaaacaccaaaacaaacaacagaatgcctggcaagcagcagcgatgaggataaagatagactgcaaggcctgttcctacctctggtgatcagggtgggaggagggaagaaaacgggagtgcatctgcctggggcctgtaccggaggaagatgctcaggaggcccagcagacccaggactctctcccacctgtggccccgtggcaagaccaaaggggagctctttggagctgtggcccctttgtgtcttccaaatcatattaattccaaattaaaatgaaggacattatatgcatcttacaaccaagttctagaatcaggccgagtacagtggttcatgcctgtaatcctagaattttgggaggctgaggcaggagaatctcacatgagcccaggagttgaaggctgcaatgagctatgatcacatcactgcactccagcctaggtgacagagcagatcctctcag

SEQ ID NO: 3204 - protein, 43 aa, Homosapiens
MNCEHYCAVILRRWGKHQNKQQNAWQAAAMRIKIDCKACSYLW

SEQ ID NO: 3205 - DNA, 798 bp, Homosapiens
cttgattataaaccttatctctctacactataatcatcttcccagtaacctggaaacacctacaagagaacagaaactgtttcttgctcctttttatatctctggtgcataatatgaggtctgtgtgttaggagcatgctcagtgaaagaccactgaagttgagccccacccagatgtgagcatatgaagatgaatgttggtgaaagcatgcgtcttgcatctggagaactgccttcctccgggagagccatcaacaaccacccattactgtgcagatgatgggactaacttcccttatccatgtgggcttctctgcccagctccccgccactgaggatgtgtttttgcaagacagtcaaagaagagacaagaagtaagccagcagaagccggttattatacaactgctctttctggagaatgccaaagccatccgtgacacggttctgagccagaatctgttcatctagacaacatggacagtagcacccacctcctggtactacagatcaagcaagacaaggcattcaaaggggtctgcacagtttctgagacacaggcaatgcttcagggcatggaagggttcaggatgctgtgtttaccatttggccctcatgctggctggctggacttctgggagctatcctgcaaatgtaaatcattacttatagggctgttcccgtggtacacagggatcgtggggttaaaaacctgtctgcagccttggtctattgtgttgccaagaaattgccctgcatctgttataaatatagaaataaacagaacatcaaaccttta

SEQ ID NO: 3206 - protein, 45 aa, Homosapiens
MWASLPSSPPLRMCFCKTVKEETRSKPAEAGYYTTALSGECQSHP

SEQ ID NO: 3207 - DNA, 860 bp, Homosapiens
agcccccaattttgtgagtgtccctgaagcattgtgacaattccattttatgtgtctgcgtgctcatatcaagactaaggagtgatggaaactctccagttcagatccagtagcttttagggaaggaactacagttgctgacttaagttgaagaagcatctatttaatgtctggtcaaatcctacaagaaacacagaaatctatgattaaaaagctgagcactttgatatactgcaaagggtagagaaggcaggacggtagaaattttctgcaagaaagaatgaatttcaggatttatcactaaataagacaaagtcatttatttagtccccctgacacagcagggcaaactgagttgacatacaagttacctggagaaaaagagagatggatgcagaggctgaagataaaacgctgcgtactcgctctaaaggaaccgaggtgccaatggattcactaatccaggagctcaggccagacctgaacattagaatccaagaaactgacaccttcaagaaaaccctttttacctataagccactttgagagggactcaagactgatcacccaagaagctgatgataaaaattaatttagaagagaagtgtccctccagggtgtggcagaggcatctgtagggttcagccaccccggcatcggccttgtccatgcctctgtgtgatggaggggctccgtgtggaacatgaggctggaggcctcacaccaacagaagcattccagagattattttatgtttactgtactgttcttactagggcagaaaagtgtcttaaaatatattggggaagctttcaataagaataaaaacaaaaaaagactttgtaatttaacaagtaaag

SEQ ID NO: 3208 - protein, 52 aa, Homosapiens
MDAEAEDKTLRTRSKGTEVPMDSLIQELRPDLNIRIQETDTFKKTLFTYKPL

SEQ ID NO: 3209 - DNA, 818 bp, Homosapiens
agcccccaattttgtgagtgtccctgaagcattgtgacaattccattttatgtgtctgcgtgctcatatcaagactaaggagtgatggaaactctccagttcagatccagtagcttttagggaaggaactacagttgctgacttaagttgaagaagcatctatttaatgtctggtcaaatcctacaagaaacacagaaatctatgattaaaaagctgagcactttgatatactgcaaagggtagagaaggcaggacggtagaaattttctgcaagaaagaatgaatttcaggatttatcactaaataagacaaagtcatttatttagtccccctgacacagcagggcaaactgagttgacatacaagttacctggagaaaaagagagcaattccaggacttcctcttcagcctaaaagaaggtaccagatctgtgcactggggcgatgtggaagagacctgcttattgcccctgatatggatgcagaggctgaagataaaacgctgcgtactcgctctaaaggaaccgaggtgccaatggattcactaatccaggagctcagaatcagtgtgcccgtggacatgaggccacttacctggtgagggacaccagagtcctttaaaggaaccaagtcattcagagaaaaaaaggccagacctgaacattagaatccaagaaactgacaccttcaagaaaaccctttttacctataagccactttgagagggactcaagactgatcacccaagaagctgatgataaaaattaatttagaagagaagtgtccctccagggtgtggcagaggcatctgtagggt

SEQ ID NO: 3210 - protein, 41 aa, Homosapiens
MDAEAEDKTLRTRSKGTEVPMDSLIQELRISVPVDMRPLTW

SEQ ID NO: 3211 - DNA, 422 bp, Homosapiens
ggcccccaggaacttcctgttctaggacacccccagcaagtcagggcccctcctgaccagggaccaaggcttcggagaagactctggagaaggctcggaggaaactgggaagctggttctttggcccaaagtgcttttacagcctacctgtattttaccggccctcctagacggggggaactcccctgtcctctgcaggaatgtcaaaagccacccatctttaaccacctaatgctcccatcagcagagaggcacacagcacagtgaacgtcgagcatgcacaccaggaagcccaggttcgagttctgaccgtcacttactggtggtaatgatggtactagatgtcagagtcaagggagctgaggaaggcatccaagtaaggaggtggcgtgggcactccctgacaaggctacacgagtgca

SEQ ID NO: 3212 - protein, 30 aa, Homosapiens
MMVLDVRVKGAEEGIQVRRWRGHSLTRLHE

SEQ ID NO: 3213 - DNA, 4434 bp, Homosapiens
acatctcggaaaccatggcttttaataaggccacatgaagagagaagctggcatcatcccacgcaaaaaccagtgcctggcagagttgtggaagaaaataataaaatttctgaatggggcagcgtggagaaatcctaagagaaatagcataagagcattttggaacacatccaggaaaagataactttcgacacacctgtagacgttcgccaggtaaaggaaatccaggcccttgagcaatgtattgatgaattggggtggaaatggaggaggatggaaacgatggcggcactggactgttttccagaaaccatttacacaggctcaccagaagagggcagcgcagagcaatgaactctccgaggagtttccaaacagatgtcttgaaacttaaagtgaaaatctctgcatgaaagtagccgtttttggacagcgtcctccaccaaaaccatatatctctaaaataataataaaactccccaaacatgctaatctcgaaatgggtccctcaacatggaaggattgagttgcaagggacaaaattttacttccctgtcagagatgttttcacttcgattatccttttgatttattttattataaaagactatgtgaagtctagtattagtcatgtgcacaaatattcattatgcagctttttggggtgatttttttgataaaaatattgaaaaaatcacaaattcagattcgtggaagattccctacgcaacacagcgtttgaagcaaaatgcagcttaaggaagtttcccattaaatccatatttccttgatgcaaaatgatatcacattgttttacttgttaatttttttcttctcagaattaccacagaaaatattttttgttttataataaaacacgtgatactctacattggacatacattttacacttgaaatctggaaagaaaaacctactagactggaacagaattccaaagaacgtgaggggacaaatctatggagacatttatattttgttttagggttattataaaactctagtttcatcgtctatgcataaatgtttaggggatctaaatatcttcactaaattttattctgtaatcggaaagttggcatttaagatgatcattcttataggctaattaggatgataaaatcctttcctcttttcaaaagttcacgaacgcataacaaattggaactacttttacaagccgagtgtccctcttatgccattagctttcttggatttaccttctagatgactttggctcctgttaacttcagatctttgacatatcaagtatggttgttttcaaaggtttcccaggcaactgcaacaattcatctggttctagtcaaaagtgcccttgaactctcagctcacttcccttccctgtatgagtaatgtgtgtagcaaaaggaaaaacaccaaagacttcatgtaatggctaatgtgaatgatttggtgaagagaggaatggatttcacaaaaggatccacttggatgttaagacctcagctggctgcctgcgggttccctttgtcaagctctcatttgcatttagggggaaggccacaacccacatcatgtgttcggggttctgtttaactcttcctcacagttcctagggccccaaactcttaccctaggtggccccaaggactccttcaaggccagatcgctggcccgccagggagtgactgcccccaaatctctgagagatgcctcaggactccagctgactcacacacacgctgacctgtgagaatcattctgtgcttcttgtttctcacataacccactgggaagcaatggttggagtcttgttgcattttacttacaggaagagttttataattacctcccaagaagttcctgaagaacagaggagggagtaattggaatctctgatcctgttgtttgtgaaaggttcctctgctttacattaattacattctgtgttgcgtttaaaagaaaagatttcacctcatctaggcagacagtgcagttagaccatcaccttttttcccctttattttgactcttgtcttcacagctaatttactagtgactaaaatgatggcaaataaggcaatataatatggacagcctgcaaatcccactcatggagctctgtaagtgggagcagattgctgtctgagtacagggcttctgcagaagtctccctatcaactccacgtcgaactcaaagtctagagagcttcaacaattaatgatatgtcatctggatccagtcataaaagcatgatgaccaccccttcccccacccctcaccattcctttctccttggatttgttatatttcattctgttcaatataattactgagatgtaaacattccattgaaatgtgtctaagtaggcagatttttaagaatctacttttatgggtctataacaaattttaggaaggctatttcattgatatgtgaaagtgtataatagttgctttagctactagcccttccaacagctacatttaccactgtgattgtcactttgaataatccttgtgttattaaaattaatacagataaatataattttatagtaggaaatgtagttgtcaggatgtgaaacaatagtaatcaatttgaataaatatttgctatttgttttcataaaagttttaatcctcaaaagagaactctgaccaaaataggaatatagcaggatcaatgaaacaggtggcatgagtcatctcactggcttttaattaaaaaggatgctgtggttgttggcgtggactggactgcgcataggcagttttagaatttcttaagctgaaatccagctggagagttcttaatcagaatggacttattttgataatttataatctgtgtattcagagcattgatgttatagttttgatacctaaatcaccgttttaaaaattcaaagagatatatgaatcctgagtctcggacagttattcctgagccaaaggatttctgtgcaatgctaatatgtataatagagaatcagtctttcactgtacagttttgtcatcatgtttcaataactgaatgaatattctgaattaataagcataacgtttgtataagctaaagactaatctaagctctgcattcattgatgggaaccttaagcaaatgtttcttttcatcagcttgttcaaaaggcataaacataattacagttctgaggcgataacatatcgactggttaaatagtaagtgggtctggacaaggtaacttaaagttatgggctgcacgttgttttgagtacttggaagcatctggaaaaaataatttttttaaaaagatatttttactgtttatcttatagaaaaacagtatgagcattaaacccccactagaattttggaggttttctttttctaaagcgttggttaaaattcagataagttgatacttacagcttgagagaaaagatggggaagtggtagaaatatcaaatcatgagttagttttaaatttctcagaatgctcagggggcagtgagggaaagagggacttgctggccatgtccccacacctccgctttgcaccttttgctgaagttagttcccgaaaacagtgctgggtgtttgggttacatctggttcagccttcttttcctccttccttctttatccgtcacatggcctgccctctatctcttaaatcttaggtctgttgtgagactggggaaggagtgatgtgaacatgtgctcctgggcctggaaatgcccctctgccccgactccttctgtctcagcagtgcttgtcattaattctcccaacaaatacctgagcccttctctgtgcaggatgggtctcagtgctttgaatgtgctgtctcgtttaattctctcaaaagccctttattgacaatgctcttataatattttatacagaaagaatggaaagctaatccaatctttttctaatgtggttaatcaaatttatttatttttaattaatggtggcttagaaagctttctttcagcattactatcctttatgagattgtcataaatgtttactatttttcattgttcatggcaaggcggcaatagatcttattcagaattgataatcagtgtgatttatctggtagccaaaccaaaaatcaaactattatgctgtttagatataatggtagccactagaagatttacatcaaatgttagaccagaagccctttccatcagtgaccaggtttggtatctgctaggagggaaaagcctggtaactgatcaccagtgtttctgttctttttactttatagtttgtaatttaccaaggcatgattaattttgctgatgtttaagttacttacaatcatattaagagttagagaggagtgatatcagcaagatggctgactaaaagtgcccaacacccatttcctggactacccccacaaaaaatgaataaacaatgaataaacaact

SEQ ID NO: 3214 - protein, 49 aa, Homosapiens
MKREAGIIPRKNQCLAELWKKIIKFLNGAAWRNPKRNSIRAFWNTSRKR

SEQ ID NO: 3215 - DNA, 833 bp, Homosapiens
gcccgcttgttcgctcactctcagtgaaaagagttttgaaatgagttctgaatagacagcattttctttgtgcggttggtaaataacacagagcaaagttagcaagttgcagcgcctctgcgttctgattctatggaacctttttgtagggagaagggcaggatgtttttaactgaatgtgacctcaggggaatactagaggtaaggagagaaaaataattgaggtaactgtgggtgttttacatctcggaaaccatggcttttaataaggccacatgaagagagaagctggcatcatcccacgcaaaaaccagtgcctggcagagttgtggaaggtgctatcacattggcttggcatttgtgtagctttgattgaaaatcaatggttttcttatgataattttcacatcatattttttttcttctttagaaaataataaaatttctgaatggggcagcgtggagaaatcctaagagaaatagcataagagcattttggaacacatccaggaaaagataactttcgacacacctgtagacgttcgccaggtaaaggaaatccaggcccttgagcaatgtattgatgaattggggtggaaatggaggaggatggaaacgatggcggcactggactgttttccagaaaccatttacacaggctcaccagaagagggcagcgcagagcaatgaactctccgaggagtttccaaacagatgtcttgaaacttaaagtgaaaatctctgcatgaaagtagccgtttttggacagcgtcctccaccaaaaccatatatctctaaaataataataaaactccccaaacatgctaatctcg

SEQ ID NO: 3216 - protein, 53 aa, Homosapiens
MKREAGIIPRKNQCLAELWKVLSHWLGICVALIENQWFSYDNFHIIFFFFFRK

SEQ ID NO: 3217 - DNA, 547 bp, Homosapiens
agatgtgagttcttcaaaattgtcagacgacgtttcccttcagctggtttggagctcattttccaactgctttgcaaaaaataataaaatttctgaatggggcagcgtggagaaatcctaagagaaatagcataagagcattttggaacacatccaggaaaagataactttcgacacacctgtagacgttcgccaggtaaaggtaagaaaaaatattgtaaaatgcatttaagttattttattacatcgcactgggttgaactttgagagaaaacataccactggcgcaagatgcgcaaggaggagttaggagggctcaccttttgcccctccctctcgtgggcatgggcatggcagccctgtgtccaccatgaccatcagcggccacctgagttgtttctaatgccggctgtggagcagtcgaagacatgttcaccaggtcgaggggatctgactgagtatgatactcggcagacagttctgcgaaaaagtcaatgtatttaatactgcaaatgttacttgtacagtaaggaatttcttttagatt

SEQ ID NO: 3218 - protein, 70 aa, Homosapiens
MRKEELGGLTFCPSLSWAWAWQPCVHHDHQRPPELFLMPAVEQSKTCSPGRGDLTEYDTRQTVLRKSQCI

SEQ ID NO: 3219 - DNA, 1170 bp, Homosapiens
ttaggcttcggcacactgaggaccgagtcccagtgcagctccagccgacccccgggacgtagacaagggcaggcgcgcggtgaagactgcggccggccgcgtagccgcgctgtggtcccgctggccttctcttgggccgcgcaccctccggacctgcgtcgggatcctcccggagtctcccgctctctcctcccggcttgcgaacatgcggccccttaagcccggcgcccctttgcccgcactcttcctgctggcgctggctttgtccccgcacggagcccacgggaggccccgggggcgcaggggagcgcgcgtcacggataaggagcccaagccgttgcttttcctccccgcggccggggccggccggactcccagcggctcccggagcgcagaaatattcccaagagactctaacttaaaagacaaattcataaagcatttcacagggccggtcacattttcaccagaatgcagcaaacatttccaccgactctattacaataccagggagtgctcaacgccagcttattacaaaagatgtgctagattgttaacaagattagcagtgagtccactgtgctcccagacctagcaaaactaccctacatttcctaagaatgtacatctaatttgaagaaaaagtgcctcaaatcatgcaaaatgtaaaaaaagatgaaatttatatttttatggatattaagatgagtaaaataagagacttcccagaaataactggttagctgtttcctgtcatagaatggagtctttcttgctttatctttttgtgtatacagtaatttataattttgtaaaacagagtttgaatcgcatattgaaaattagatattaaaaattgtgtgattgtattttatttttactagatatattattttctttatatggttaacattctaattaaacatttaattgtgtaaattatatctgtgagtgccagtgagaaataatgatttttttgtatatgactgttagtatatatttgtcaaatcatcgtgtaccaagttaaattttataattcttatttaatatttaaatacatttatttagaacttgttgtcttcacttgcattaatttgaactgtgaattttattaaagttgaaatatgaaaaaatgtgttgtttcctttgaattaaagatgtttgtaatag

SEQ ID NO: 3220 - protein, 129 aa, Homosapiens; identical to SEQ ID NO: 445

SEQ ID NO: 3221 - DNA, 1059 bp, Homosapiens
ggcacactgaggaccgagtcccagtgcagctccagccgacccccgggacgtagacaagggcaggcgcgcggtgaagactgcggccggccgcgtagccgcgctgtggtcccgctggccttctcttgggccgcgcaccctccggacctgcgtcgggatcctcccggagtctcccgctctctcctcccggcttgcgaacatgcggccccttaagcccggcgcccctttgcccgcactcttcctgctggcgctggctttgtccccgcacggagcccacgggaggccccgggggcgcaggggagcgcgcgtcacggataaggagcccaagccgttgcttttcctccccgcggccggggccggccggactcccagcggctcccggagcgcagaaatattcccaagagactctaacttaaaagacaaattcataaagcatttcacagggccggtcacattttcaccagaatgcagcaaacatttccaccgactctattacaataccagggagtgctcaacgccagcttattacaaaagatgtgctagattgttaacaagattagcagtgagtccactgtgctcccagacctagcaaaactaccctacatttcctaagaatgtacatctaatttgaagaaaaagtgcctcaaatcatgcaaaatgtaaaaaaagatgaaatttatatttttatggatattaagatgagtaaaataagagacttcccagaaataactggttagctgtttcctgtcatagaatggagtctttcttgctttatctttttgtgtatacagtaatttataattttgtaaaacagagtttgaatcgcatattgaaaattagatattaaaaattgtgtgattgtattttatttttactagatatattattttctttatatggttaacattctaattaaacatttaattgtgtaaattatatctgtgagtgccagtgagaaataatgatttttttgtatatgactgttagtatatatttgtcaaatcatcgtgtaccaagttaaattttataattcttatttaatatttaaatacatttatttag

SEQ ID NO: 3222 - protein, 129 aa, Homosapiens; identical to SEQ ID NO: 445

SEQ ID NO: 3223 - DNA, 6751 bp, Homosapiens
acggagtcgacaataacaaaccaagccgcggcggtgtccgcggccctgccgagccctcggcgttgcctcagaatcccccagtcgcctgggcccctcggctctgacaggccgcggccttctgtcccccggccccagacccagagccgaggggcctgctcgcgtccttgtccgcccggacccctccctgcctcctagagttcggggccgcggcgggcgggcgcccgggacgccggcggttgtgtcggcttagcggtgccgaatgggcggttggtaaccgctgccgaggactaggcggcggcggaagatggtgccgggggtcgctggctctgctgctgccgccggcgaaggaggaggcgttgccggttttctgagtttaaccagtaatgccattcagttgccaatctcaagcaaagcaaacataagccagttttaatctactttttaagaaaagtggtagtccttttcacagtgcctgacgtaactgtatcagagggtgaggtataagctcacagaattcagataaatcatcatgaagttatatgtatttctggttaacactggaactactctaacatttgacactgaacttacagtgcaaactgtggcagaccttaagcatgccattcaaagcaaatacaagattgctattcaacaccaggtgctggtggtcaatggaggagaatgcatggctgcagatcgaagagtgtgtacctacagtgctgggacggatacaaatccaatttttctttttaacaaagaaatgatcttatgtgatcgtccacctgctattcctaaaactaccttttcgacagaaaatgacatggaaataaaagttgaagaatctcttatgatgcctgcagtttttcatactgttgcttcaaggacacagcttgcattggaaatgtatgaagttgccaagaaactttgttctttttgtgaaggtcttgtacatgatgaacatcttcaacaccaaggctgggctgcaatcatggccaacctggaggactgttcaaattcataccaaaagctacttttcaagtttgaaagtatttattcaaattatctgcagtccatagaagacatcaagttaaaacttactcatttaggaactgcagtttcagtaatggccaagattccactgttggagtgcctaaccagacatagttacagagaatgtttgggaagactggattctttacctgaacatgaagactcagaaaaagctgagatgaaaagatccactgaactggtgctctctcctgatatgcctagaacaactaacgaatctttgttaacctcatttcccaagtcagtggaacatgtgtccccagataccgcagatgctgaaagtggcaaagaaattagggaatcttgtcaaagtactgttcatcagcaagatgaaactacgattgacactaaagatggtgatctgcccttttttaatgtctctttgttagactggataaatgttcaagatagacctaatgatgtggaatctttggtcaggaagtgctttgattctatgagcaggcttgatccaaggattattcgaccatttatagcagaatgccgtcaaactattgccaaacttgataatcagaatatgaaagccattaaaggacttgaagatcggctctacgccctggaccagatgattgctagctgtggccgactggtgaatgaacagaaagagcttgctcagggatttttagctaatcagaagagagctgaaaacttaaaggatgcatctgtattacctgatttatgcctgagtcacgcaaatcagttgatgattatgttgcaaaatcatagaaaactgttagatattaagcagaagtgtaccactgccaaacaagaactagcaaataacctacatgtcagactgaagtggtgttgctttgtaatgcttcatgctgatcaagatggagagaagttacaagctttgctccgcctcgtaatagagctgttagaaagagtcaaaattgttgaagctcttagtacagttcctcagatgtactgcttagctgttgttgaggttgtaagaagaaaaatgttcataaaacactacagggagtgggctggtgctttagtcaaagatggaaagagattatatgaagcagaaaaatcaaaaagggaatcctttgggaaattatttaggaagtcttttttaagaaatcgtctgtttaggggactggactcctggcccccttccttttgtactcaaaagcctcgaaagtttgactgtgaacttccagatatttcattaaaagatttacagtttctgcaatcattttgtccttcggaagttcagccattcctcagggttcccttactttgtgactttgaacctctacaccagcatgtacttgctctacataatttggtaaaagcagcacaaagtttggatgaaatgtcacagaccattacagatctactgagtgaacaaaaggcatctgtgagtcagacatccccacagtctgcttcttcaccaaggatggaaagtacagcaggaattacaactactacctcaccgagaactcctccaccactgactgttcaggatcccttatgtcctgcagtttgtcccttagaagaattatctccagatagtattgatgcacatacgtttgattttgaaactattccccatccaaacatagaacagactattcaccaagtttctttagacttggattcattagcagaaagtcctgaatcagattttatgtctgctgtgaatgagtttgtaatagaagaaaatttgtcgtctcctaatcctataagtgatccacaaagcccagaaatgatggtggaatcactttattcatcagttatcaatgcgatagacagtagacgaatgcaggatacaaatgtatgtggtaaggaggattttggagatcatacttctctgaatgtccagttggaaagatgtagagttgttgcccaagactctcacttcagtatacaaaccattaaggaagacctttgccactttagaacatttgtacaaaaagaacagtgtgacttctcaaattcattaaaatgtacagcagtagaaataagaaacattattgaaaaagtaaaatgttctctggaaataacactaaaagaaaaacatcaaaaagaactactgtctttaaaaaatgaatatgaaggtaaacttgacggactaataaaggaaactgaagagaatgaaaacaaaattaaaaaattgaagggagagttagtatgccttgaggaggttttacaaaataaagataatgaatttgctttggttaaacatgaaaaagaagctgtaatctgcctgcagaatgaaaaggatcagaagttgttagagatggaaaatataatgcactctcaaaattgtgaaattaaagaactgaagcagtcacgagaaatagtgttagaagacttaaaaaagctccatgttgaaaatgatgagaagttacagttattgagggcagaacttcagtccttggagcaaagtcatctaaaggaattagaggacacacttcaggttaggcacatacaagagtttgagaaggttatgacagaccacagagtttctttggaggaattaaaaaaggaaaaccaacaaataattaatcaaatacaagaatctcatgctgaaattatccaggaaaaagaaaaacagttacaggaattaaaactcaaggtttctgatttgtcagacacgagatgcaagttagaggttgaacttgcgttgaaggaagcagaaactgatgaaataaaaattttgctggaagaaagcagagcccagcagaaggagaccttgaaatctcttcttgaacaagagacagaaaatttgagaacagaaattagtaaactcaaccaaaagattcaggataataatgaaaattatcaggtgggcttagcagagctaagaactttaatgacaattgaaaaagatcagtgtatttccgagttaattagtagacatgaagaagaatctaatatacttaaagctgaattaaacaaagtaacatctttgcataaccaagcatttgaaatagaaaaaaacctaaaagaacaaataattgaactgcagagtaaattggattcagaattgagtgctcttgaaagacaaaaagatgaaaaaattacccaacaagaagagaaatacgaagctattatccagaaccttgagaaagacagacaaaaattggtcagcagccaggagcaagacagagaacagttaattcagaagcttaattgtgaaaaagatgaagctattcagactgccctaaaagaatttaaattggagagagaagttgttgagaaagagttattagaaaaagttaaacatcttgagaatcaaatagcaaaaagtcctgccattgactctaccagaggagattcttcaagcttagttgctgaacttcaagaaaagcttcaggaagaaaaagctaagtttctagaacaacttgaagagcaagaaaaaagaaagaatgaagaaatgcaaaatgttcgaacatctttgattgcggaacaacagaccaattttaacactgttttaacaagagagaaaatgagaaaagaaaacataataaatgatcttagtgataagttgaaaagtacaatgcagcaacaagaacgggataaagatttgatagagtcactttctgaagatcgagctcgtttgcttgaggaaaagaaaaagcttgaagaagaagtcagtaagttgcgtagtagcagttttgttccttcaccatatgtagctacagccccagaactttatggagcttgtgcacctgaactcccaggtgaatcagatagatccgctgtggaaacagcagatgaaggaagagtggattcagcaatggagacaagcatgatgtctgtacaagaaaatattcatatgttgtctgaagaaaaacagcggataatgctgttagaacgaacattgcaattgaaagaagaagaaaataaacggttaaatcaaagactgatgtctcagagcatgtcttcagtatcttcaaggcattctgaaaagatagctattagagattttcaggtgggagatttggtactcatcatcctagacgaacgccatgacaattatgtgttatttactgttagtcctactttatattttctacattcagagtctctacctgccctggatctcaaaccagcttcaggtgcatctagaagaccctgggtacttggaaaagtaatggaaaaagaatactgtcaagccaaaaaggcacaaaacagatttaaagttcctttggggacaaagttttacagagtgaaagccgtatcatggaataagaaagtataacttatggacaaaattaatacattctatgacatttttttctgatttgtcctgcagtgctcattcatcactccaaaaacagcaggccatctttttatgcaaaagtcagcgtgacaatatacttcactggtgtacatcgtttactttttaactggcttcattttaggaataataaattcatcagaatccttggctgaattaaaatggtttttgttttttggtttttttttttacccagacaactctagaaatgcggaccaaactacttcattttctcaaagggcataccttgtgcattgtggcttatgatgagccatattaattgcctgttaaatatacactagcttgaacttagatgttaaatgttattattaccagcatttgtccttttgtgaaatcagtatcagaatacttgcactctttaacacattctttataaaatgtataaattattcagaactatttaaaataaagaggagtgttattgcatgctgataatcattttgagtttgcctcagtagatactaaagcaaattgtttcagtttttttaaatgccctttgatgtttcaaaaaaaaaaaggaactgtaatttgattgactgattttaagatcagccataagtaatcagcaatcttcaaaagcactttcagtggattggtcatctgggttctaaagggaagagtctgtgctactaaccatttcaaatgcagactcaaaccttcccaacatctttatgactctagaataatcatattgatgaaatcgtaattcatggttgagtttcagaacaaaagatattcattgcacattaaccatttagaggtcatttaaataacaaaatattgtattgtaaaagaactgtacaattttaaaacaataaagatttgaacctgtaaatgtgtgtgccttttaaagaaggatacatttttaatatatttgagtgattgctgggaagtgtgaaaatattgttatgtatcatatcaaagagaaacatgtttattacaaaaatgttctttaactatatactatgtaacagggtaaacagtgttatgtagaatagaattgtgtaaactagatctttagagaagttgccattgagcaaagttatttaaatgagttagttgagttggatgagaattgtttgaggtttgttgctagagaacaataataaaataattctttttcagaaaatatttaatttcttcataaaaataagttaaatatttttttaaatatgtatatctaatagtacaaaatggaataaacatcatagtgtatagaaaactgaatttgacaagttaatgaataaatgaacaaatgatttcacatgtttctatttaatctttccatgacatctttatgcaaagactgttaaagcaataactttatatagagggtgattttgttaagcagatctggttaggtgtaaataaatctgccaggtaggt

SEQ ID NO: 3224 - protein, 1591 aa, Homosapiens
MKLYVFLVNTGTTLTFDTELTVQTVADLKHAIQSKYKIAIQHQVLVVNGGECMAADRRVCTYSAGTDTNPIFLFNKEMILCDRPPAIPKTTFSTENDMEIKVEESLMMPAVFHTVASRTQLALEMYEVAKKLCSFCEGLVHDEHLQHQGWAAIMANLEDCSNSYQKLLFKFESIYSNYLQSIEDIKLKLTHLGTAVSVMAKIPLLECLTRHSYRECLGRLDSLPEHEDSEKAEMKRSTELVLSPDMPRTTNESLLTSFPKSVEHVSPDTADAESGKEIRESCQSTVHQQDETTIDTKDGDLPFFNVSLLDWINVQDRPNDVESLVRKCFDSMSRLDPRIIRPFIAECRQTIAKLDNQNMKAIKGLEDRLYALDQMIASCGRLVNEQKELAQGFLANQKRAENLKDASVLPDLCLSHANQLMIMLQNHRKLLDIKQKCTTAKQELANNLHVRLKWCCFVMLHADQDGEKLQALLRLVIELLERVKIVEALSTVPQMYCLAVVEVVRRKMFIKHYREWAGALVKDGKRLYEAEKSKRESFGKLFRKSFLRNRLFRGLDSWPPSFCTQKPRKFDCELPDISLKDLQFLQSFCPSEVQPFLRVPLLCDFEPLHQHVLALHNLVKAAQSLDEMSQTITDLLSEQKASVSQTSPQSASSPRMESTAGITTTTSPRTPPPLTVQDPLCPAVCPLEELSPDSIDAHTFDFETIPHPNIEQTIHQVSLDLDSLAESPESDFMSAVNEFVIEENLSSPNPISDPQSPEMMVESLYSSVINAIDSRRMQDTNVCGKEDFGDHTSLNVQLERCRVVAQDSHFSIQTIKEDLCHFRTFVQKEQCDFSNSLKCTAVEIRNIIEKVKCSLEITLKEKHQKELLSLKNEYEGKLDGLIKETEENENKIKKLKGELVCLEEVLQNKDNEFALVKHEKEAVICLQNEKDQKLLEMENIMHSQNCEIKELKQSREIVLEDLKKLHVENDEKLQLLRAELQSLEQSHLKELEDTLQVRHIQEFEKVMTDHRVSLEELKKENQQIINQIQESHAEIIQEKEKQLQELKLKVSDLSDTRCKLEVELALKEAETDEIKILLEESRAQQKETLKSLLEQETENLRTEISKLNQKIQDNNENYQVGLAELRTLMTIEKDQCISELISRHEEESNILKAELNKVTSLHNQAFEIEKNLKEQIIELQSKLDSELSALERQKDEKITQQEEKYEAIIQNLEKDRQKLVSSQEQDREQLIQKLNCEKDEAIQTALKEFKLEREVVEKELLEKVKHLENQIAKSPAIDSTRGDSSSLVAELQEKLQEEKAKFLEQLEEQEKRKNEEMQNVRTSLIAEQQTNFNTVLTREKMRKENIINDLSDKLKSTMQQQERDKDLIESLSEDRARLLEEKKKLEEEVSKLRSSSFVPSPYVATAPELYGACAPELPGESDRSAVETADEGRVDSAMETSMMSVQENIHMLSEEKQRIMLLERTLQLKEEENKRLNQRLMSQSMSSVSSRHSEKIAIRDFQVGDLVLIILDERHDNYVLFTVSPTLYFLHSESLPALDLKPASGASRRPWVLGKVMEKEYCQAKKAQNRFKVPLGTKFYRVKAVSWNKKV

SEQ ID NO: 3225 - DNA, 440 bp, Homosapiens
gatgtctcagagcatgtcttcagtatcttcaaggcattctgaaaagatagctattagagagtaaagtctctacctgccctggatctcaaaccagcttcaggtgcatctagaagaccctgggtacttggaaaagtaatggaaaaagaatactgtcaagccaaaaaggcacaaaacagatttaaagttcctttggggacaaagttttacagagtgaaagccgtatcatggaataagaaagtataacttatggacaaaattaatacattctatgacatttttttctgatttgtcctgcagtgctcattcatcactccaaaaacagcaggccatctttttatgcaaaagtcagcgtgacaatatacttcactggtgtacatcgtttactttttaactggcttcattttaggaataataaattcatcagaatccttggctgaatt

SEQ ID NO: 3226 - protein, 35 aa, Homosapiens
MEKEYCQAKKAQNRFKVPLGTKFYRVKAVSWNKKV

SEQ ID NO: 3227 - DNA, 1378 bp, Homosapiens
gacttctcaaattcattaaaatgtacagcagtagaaataagaaacattattgaaaaagtaaaatgttctctggaaataacactaaaagaaaaacatcaaaaagaactactgtctttaaaaaatgaatatgaaggtaaacttgacggactaataaaggaaactgaagagaatgaaaacaaaattaaaaaattgaagggagagttagtatgccttgaggaggttttacaaaataaagataatgaatttgctttggttaaacatgaaaaagaagctgtaatctgcctgcagaatgaaaaggatcagaagttgttagagatggaaaatataatgcactctcaaaattgtgaaattaaagaactgaagcagtcacgagaaatagtgttagaagacttaaaaaagctccatgttgaaaatgatgagaagttacagttattgagggcagaacttcagtccttggagcaaagtcatctaaaggaattagaggacacacttcaggttaggcacatacaagagtttgagaaggttatgacagaccacagagtttctttggaggaattaaaaaaggaaaaccaacaaataattaatcaaatacaagaatctcatgctgaaattatccaggaaaaagaaaaacagttacaggaattaaaactcaaggtttctgatttgtcagacacgagatgcaagttagaggttgaacttgcgttgaaggaagcagaaactgatgaaataaaaattttgctggaagaaagcagagcccagcagaaggagaccttgaaatctcttcttgaacaagagacagaaaatttgagaacagaaattagtaaactcaaccaaaagattcaggataataatgaaaattatcaggtgggcttagcagagctaagaactttaatgacaattgaaaaagatcagtgtatttccgagttaattagtagacatgaagaagaatctaatatacttaaagctgaattaaacaaagtaacatctttgcataaccaagcatttgaaatagaaaaaaacctaaaagaacaaataattgaactgcagagtaaattggattcagaattgagtgctcttgaaagacaaaaagatgaaaaaattacccaacaagaagagaaatacgaagctattatccagaaccttgagaaagacagacaaaaattggtcagcagccaggagcaagacagagaacagttaattcagaagcttaattgtgaaaaagatgaagctattcagactgccctaaaagaatttaaattggagagagaagttgttgagaaagagttattagaaaaagttaaacatcttgagaatcaaatagcaaaaaggaaacctttgaagaagaaagatgcttatgtgaggacacacagtccggcat

SEQ ID NO: 3228 - protein, 353 aa, Homosapiens
MENIMHSQNCEIKELKQSREIVLEDLKKLHVENDEKLQLLRAELQSLEQSHLKELEDTLQVRHIQEFEKVMTDHRVSLEELKKENQQIINQIQESHAEIIQEKEKQLQELKLKVSDLSDTRCKLEVELALKEAETDEIKILLEESRAQQKETLKSLLEQETENLRTEISKLNQKIQDNNENYQVGLAELRTLMTIEKDQCISELISRHEEESNILKAELNKVTSLHNQAFEIEKNLKEQIIELQSKLDSELSALERQKDEKITQQEEKYEAIIQNLEKDRQKLVSSQEQDREQLIQKLNCEKDEAIQTALKEFKLEREVVEKELLEKVKHLENQIAKRKPLKKKDAYVRTHSP

SEQ ID NO: 3229 - DNA, 1053 bp, Homosapiens
cattcagtagaattttataactttgacttagattacacaaaattggtctatgtaggtcatatgatacttcttttaataagagaacttaaaacattagcatgaataggtatattttattcatcctggtacccatacagagtatttaactaattttataaaccatacatttcaattaaaatctgaccagctttattacatgaccacataaagattaataatccagggattacaggcgtgagccaccatgcccggctgtatttttataattcttaatggaaatcaaaaacacagaaagataggcaatagaagaatgagctatgatgtacccatcattttgattcagttatcatcacgtcatggccaatcttgttttagctatacttccatctgcttctcattctcttgttacttttgacctgtaaattttgaagaacagatatcccctacagtagccctgtgaggaagatgttatctctacttttgagatgagaaaattgaatgttaggataaatttcttttctaaaatcacccagcttgtaagtggcagaataagaattttaaccaggtctgttaagttcttcctctgcagtcagttgtttttccttctgtttaggtcagattataaccaaggagggtggtgtattctgacagcagctaaatgttttactggagtattaccaattcagtacctacagacacttgttaattgttttgggttagggttagcttagagttagatttttttcctttcctctgcattatttttgaccatttaaaaaatcatattgaaggccgggtgcgctggttcatgcctgtaatcccagcactttgggaggctgaggcagacagatcacctgaggtgaggagttccagaccagcctagccaacatggcgaaaccctgccttactaaaaatacaaaacaattagccgggcgtggtggcaggcgcctgtagtcccagctactccgaggctgaggcaggagaatcacttgaattcgggaaggggaggttgcagttcactccagcctgggcgacagaccgagactctgtctc

SEQ ID NO: 3230 - protein, 81 aa, Homosapiens
MRKLNVRINFFSKITQLVSGRIRILTRSVKFFLCSQLFFLLFRSDYNQGGWCILTAAKCFTGVLPIQYLQTLVNCFGLGLA

SEQ ID NO: 3231 - DNA, 453 bp, Homosapiens
ctttaagagatggggtctctctatgttgctcaggctggtcatgaattccagccctcaaatgatcctcccaccttggcttctccaagtgctgggattacaggtgtgactcaccatgctcggccagatcatcacttttctgtcacttaaatctcttgataaagctgcttgatctcaaattttctcttctttaccttagctcctataccactaaagtcttctttgaaaaaaaaaaaaatcacttttttttttcttttgagatggagtctcactctgtcacccaggctggagtgcagtggcacaatctcagctcatgcattccagctggttggcagagtgagactcaaaaaaaaagaaaagaagaagaaaaaaatgtagataaaacaagaaaacaactttcttcatcaatacatgtctgtctaaatttccattctctaatctgtaaatggggatatt

SEQ ID NO: 3232 - protein, 64 aa, Homosapiens
MESHSVTQAGVQWHNLSSCIPAGWQSETQKKRKEEEKNVDKTRKQLSSSIHVCLNFHSLICKWG

SEQ ID NO: 3233 - DNA, 2686 bp, Homosapiens
gcctcagttctcctcacccggcatggccgcgcatcacctggagggcttggcaaggtcaacctgcgggcacagtcgcagcgcttccgatctgctaggtcgggtatggggcgcgagtcggtttccccaggaggcctaggcggcctgtctggtcccgcactctggcgccggctcctccctcgctggccaggagtggcgggcagttgcggagccggacgctgggggagtcaggctgccgcgcggcaagttatcagctggcggaggttcctgcggaagctggcgtccaggaaggcgtagaggaaggggttgaggcagctgttggcgtagctcaggctggtgatgaagtaggagatagcgatgaccagcggcgtctgcgggaggtcggtggtgagcgccaccacggtgctcaggtggtagggcgtccagcagaggaggcacaccgccaggattgccaccaccaggaaggtcacccgcttcttggcgcgctccagggccttggcgtggctgtccagccgcatggcatgcagccggcacagcagggtggtatagaggacacagatggtggacacggggatggcgaagcccagcacgagcgtgtagaggcggctcgcgcgccaccagaaggcctcgggctgcggaaagactagcacgcactggcgccggccctgctcgtcgtctagccgggcgaagactgcgaagggcagcacgacgagtgtgacgatcccccacacggccaggctcaccgcgcgcgcggcgctgtaggtgcggccggccacccggcgcgactccgcagtggccaacaccaccaggtagcggtcggcgctcatgacggtgaggaagtagaggctggagaaggtgttgtactggtcgatagccacgatgagcttgcacatgagctccccgaagggccactgccgcagcaggaagtcggcgatgttgatgggcagcaccagcgtgaagagctcgtcggcgatggccaggttgaggatgaacaggttggtgacggtcttcatgcggggcgcccgcagcaacacgtacagcacggcggagttgcccgccagacccacggcgcagatcaccgcgtagacaactggtacagccaccgccagcggcgccggcagcggcgccagagtcgacgcgttggagcagctcagcgccgggtccgggcccgatgcgttggcgggccagggctccgagaacgaggcgttgtccatctcaacgagggcagaggagccggcgacctggcgtcccccaaggacgccctacggagctcagcggtcctgaagcccggttctgcacggacctgctcgcggacgctcgtttcagctctccaagccgttctctggtttttccggaggaggggaccgttcccagccaccccacggcccaatgtcgccgcggactcacggggctggaaagaggaatttaaagcataggttagttcgtcgacgtgtaactttagaaataggcgcggtcccgaggaggggtgggggtggcgccgcggcgccccaaacctcctccacgtgagcgctctctgctacctgttgaaatctcacttctaccagttgaatacatcaaacgaaatgctagagagagaagaatcctccataggaaaaatgcaaacccttctcccctctttcaggaaacttccgtagacccaggttaccccacagaatcccgcagtggcaagcttcggtctccccagggtctgtgcgccctcagtaacagcaagctcaacagcagtctttaccttacctggctggctggggaaggggtctgcctttcctggagctgtcaggagaaaagcccgccggctgcggggaggctgagacgcctgccggctgggtgtccgcctccccctgtctgcctcccccgagttcgccagagtccgcagctcgcgtccccgccggtccctcccgcgcgcctggaagtgcagggatggcgcagccgcgactgcgttccactgccctgaccgccgcgcccacccccacaccccaagtaaaatggtcttagaacagagaacagaaattcccccaaatttaagggattcctttcttccatcccagtcgtgcaacctcactccatctgaaataatagaaagctctcctgttaagaatcgaatttaaggaaaacaaagttagggtgtaagtgatctatttttaaaggagaacaatgtagtggaggcgcctgttccattttttatacaccgtaacacaaataggctaatgtaatgtgaaatctgaaaggaggaaaaagtgagtgcaattttataatgcaaatcacctgttttctgctactctggtcttcaaggggatagaagattgttagtatgttttctaaaactacttctacttctacttttgtgtaagtaaagacttgattagtaaagacaaacggcttccgcaaagccttttagggaaccatgacaatgcgtatttcataaaacgttacaagttgttcaacacactctctacttatccacacacttgcccgattctcctgctaatgagagctatcctgcgatcgcagcggagagtagccaaggaaggactagcaggggcagtcttgaactcccctgtcgctatttccctggactttggattctttctctaggaagggaaaatcatcttaggctcctcaccagttcccctaagaatcgaatgaaataaactaaatattggttatttcc

SEQ ID NO: 3234 - protein, 85 aa, Homosapiens
MRWRARAPRTRRCPSQRGQRSRRPGVPQGRPTELSGPEARFCTDLLADARFSSPSRSLVFPEEGTVPSHPTAQCRRGLTGLERGI

SEQ ID NO: 3235 - DNA, 1872 bp, Homosapiens
gagctccgtgctgggaggtgggaagggggcttgaccctggggactcaggcagtctggggacagttccaccaggggccggtgcctagaattggtgagggaggcacctcaggggctgggggagaaggagcgagcgctcttcgcccctctctggcacccagcggcgcgcctgctggccggaaaggcagcgagaagtccgttctccctgtcctgcccccggcgacttgcggcccgggtgggagtccgcaggctccgggtccccagcgccgctggccagggcgcgggcaaagtttgcctctccgcgtccagccggttctttcgctcccgcagcgccgcaggtgccgcctgtcctcgccttcctgctgcaatcgccccaccatggactccccgatccagatcttccgcggggagccgggccctacctgcgccccgagcgcctgcctgccccccaacagcagcgcctggtttcccggctgggccgagcccgacagcaacggcagcgccggctcggaggacgcgcagctggagcccgcgcacatctccccggccatcccggtcatcatcacggcggtctactccgtagtgttcgtcgtgggcttggtgggcaactcgctggtcatgttcgtgatcatccgatacacaaagatgaagacagcaaccaacatttacatatttaacctggctttggcagatgctttagttactacaaccatgccctttcagagtacggtctacttgatgaattcctggccttttggggatgtgctgtgcaagatagtaatttccattgattactacaacatgttcaccagcatcttcaccttgaccatgatgagcgtggaccgctacattgccgtgtgccaccccgtgaaggctttggacttccgcacacccttgaaggcaaagatcatcaatatctgcatctggctgctgtcgtcatctgttggcatctctgcaatagtccttggaggcaccaaagtcagggaagacgtcgatgtcattgagtgctccttgcagttcccagatgatgactactcctggtgggacctcttcatgaagatctgcgtcttcatctttgccttcgtgatccctgtcctcatcatcatcgtctgctacaccctgatgatcctgcgtctcaagagcgtccggctcctttctggctcccgagagaaagatcgcaacctgcgtaggatcaccagactggtcctggtggtggtggcagtcttcgtcgtctgctggactcccattcacatattcatcctggtggaggctctggggagcacctcccacagcacagctgctctctccagctattacttctgcatcgccttaggctataccaacagtagcctgaatcccattctctacgcctttcttgatgaaaacttcaagcggtgtttccgggacttctgctttccactgaagatgaggatggagcggcagagcactagcagagtccgaaatacagttcaggatcctgcttacctgagggacatcgatgggatgaataaaccagtatgactagtcgtggagatgtcttcgtacagttcttcgggaagagaggagttcaatgatctaggtttaactcagatcactactgcagtctgacatgaaaagatagaatttaaaataaacttttagagatctcatggtctgaagtcatcagatgcagaccacgttcgtgatcagtggaaacatcaaggacaaaaggtccacgcaacacatgcacctcttctctagggcacagaagcgaggcagagcctcagttcctctgatgaacaagggaacaggtcttttccttctggtttgctaggtaaggttcagcacccatctgctgtggccttcctatgaaacgtagtttcaaaagctcggttt

SEQ ID NO: 3236 - protein, 380 aa, Homosapiens; identical to SEQ ID NO: 451

SEQ ID NO: 3237 - DNA, 1795 bp, Homosapiens
agccgcgtcccggctgcgtcccgccggtcccgccccgccccgccccgcagagccgccgccagtagtgggagacgtgcgctgagaggcgggggctgcgctcggcggaacagcagccctcgggcggagagcggggccggggtccgagagcaggtgatgccaagagctgagcgggactcgtgagcgcgcggttcagcacctaccagggcgtcccgtaaaaaacctcgccttcgcctgtctctgggaaccatagcgccgcaggtgccgcctgtcctcgccttcctgctgcaatcgccccaccatggactccccgatccagatcttccgcggggagccgggccctacctgcgccccgagcgcctgcctgccccccaacagcagcgcctggtttcccggctgggccgagcccgacagcaacggcagcgccggctcggaggacgcgcagctggagcccgcgcacatctccccggccatcccggtcatcatcacggcggtctactccgtagtgttcgtcgtgggcttggtgggcaactcgctggtcatgttcgtgatcatccgatacacaaagatgaagacagcaaccaacatttacatatttaacctggctttggcagatgctttagttactacaaccatgccctttcagagtacggtctacttgatgaattcctggccttttggggatgtgctgtgcaagatagtaatttccattgattactacaacatgttcaccagcatcttcaccttgaccatgatgagcgtggaccgctacattgccgtgtgccaccccgtgaaggctttggacttccgcacacccttgaaggcaaagatcatcaatatctgcatctggctgctgtcgtcatctgttggcatctctgcaatagtccttggaggcaccaaagtcagggaagacgtcgatgtcattgagtgctccttgcagttcccagatgatgactactcctggtgggacctcttcatgaagatctgcgtcttcatctttgccttcgtgatccctgtcctcatcatcatcgtctgctacaccctgatgatcctgcgtctcaagagcgtccggctcctttctggctcccgagagaaagatcgcaacctgcgtaggatcaccagactggtcctggtggtggtggcagtcttcgtcgtctgctggactcccattcacatattcatcctggtggaggctctggggagcacctcccacagcacagctgctctctccagctattacttctgcatcgccttaggctataccaacagtagcctgaatcccattctctacgcctttcttgatgaaaacttcaagcggtgtttccgggacttctgctttccactgaagatgaggatggagcggcagagcactagcagagtccgaaatacagttcaggatcctgcttacctgagggacatcgatgggatgaataaaccagtatgactagtcgtggagatgtcttcgtacagttcttcgggaagagaggagttcaatgatctaggtttaactcagatcactactgcagtctgacatgaaaagatagaatttaaaataaacttttagagatctcatggtctgaagtcatcagatgcagaccacgttcgtgatcagtggaaacatcaaggacaaaaggtccacgcaacacatgcacctcttctctagggcacagaagcgaggcagagcctcagttcctctgatgaacaagggaacaggtcttttccttctggtttgctaggtaaggttcagcacccatctgctgtggccttcctatgaaacgtagtttcaaaagctcggttt

SEQ ID NO: 3238 - protein, 380 aa, Homosapiens; identical to SEQ ID NO: 451

SEQ ID NO: 3239 - DNA, 469 bp, Homosapiens
agcttatatgctgccagcctcaccctccacaccttggccttgtacttctggcctccagaaccgcaggaaagtacatttctgttgcttaggccgctcagcctgtggcactttgttacagcttctcacccagttcaggcccttttaattgattgctgggcctttgcagttgtttttgcttctaatatattcatctctcaatttatttctggaggctgccacccgaggggcagaacttcaattgtgtccctaatgggaaaccttgctgggatcatgtggtctacagcacaaggttgctaaagcatcttctgccagaattctgtgagtatctggttaggtgggtctggaatatactgagtttaaaaaagttaaataggtttctttactgcaagatgtttcagagactttaatatgctactctgctgtatgaatctccaggcaggaaatcttataaaatgtgtttctgaaatga

SEQ ID NO: 3240 - protein, 45 aa, Homosapiens
MLPASPSTPWPCTSGLQNRRKVHFCCLGRSACGTLLQLLTQFRPF

SEQ ID NO: 3241 - DNA, 2387 bp, Homosapiens
agaaattctttctccctatgtcccagcctacccccactttaccgaggccaacagccgcctcagaaaccagattcaggagctaacatgccccaggtctcacgaggatcagagactccagaggccagggaaggagatcaaggtagtcaagcgggggtcgtctcagatctggttgtgctcgagctatgcaaatgcctctcacggagatgcgaggacctatctattatgatgaccagggccacatccggagggggcaacagactttcatctatcagcccttttcaaccactgatctactaaactggaaacactctgaaccctgccatcttgctcctggtatcagagagccctgtcgtgcataactgtgtagaagtgttggactcggtttactccagcagacctgatctccgggaccagccttgggcatcagtagactggaagctatatgtggacaggagcagcttcatcaacccacaaggagagagatgtgcgggatatgtggtggaaccctggacactgtcgttgaagccagatcgttgctccaaggcacttcagcccagaaagatgagctcattgctttaatttgggccttagaactcagttaaggccttctacggtcccaggctttctgctgcatacactgaagggccacgaagtacagtcatctggacttggcacctggaatacaaggatggaaagcatcatttctgccagcttcttatggtcctgaggcgagacagtcatgagagaggaaaactgcaatgacttctgaccactgccagcctcgcttcctgcattttcttcttcggcttactcttgccaagttggagttgcctaacttccaagagggtatttgctcttttttttttctcactccacaaactcttcccaggtagttcagtccactcccatctaccagtcactatacgccgatgaatgccaatattattatttccagcttagacattgttcttggattgcagatgtgaggtttgacttgtttactagacattgctggctgaggatccctagcataacatggcccaaattcaatttatttccaaagctgtctcatctcctttgttctctgtaatgatgttgctatccattcgatcaacatactcagaaatatcaccccctccttccttcttccaagataagtgagttgctcacgacatgatcatgttttggcagtgtactctgtccattcccatcacttagtaagaatcatctaggttatgctgaagtatgaagttaatctccaaatttctctggctcagtacagaaaaagtccatttctcccttctgcaatgcacccaatgcaggtctgcagggtctctgctgtgcgttgtccctcagggactcaggctgaagaggcccccttgtcttatctggccacctcctctgcacatggctcaggattttccaggcaaggggttgagcagaggcttttcagtgctgggcctggatgtgacataagatgcttctgctcacagccttgtggtcagaacaagtcacatcatccctcctacttgcaggggtgctgggcagcgtagtcatccacagatcaggagagggagcagaggcaggtgttcccgggctgcagcgatctccactgcactgctgtgggctgaactgtgccctccaccccaccaagcttatatgctgccagcctcaccctccacaccttagaatgtggctgtatctcgacatagggtccttacagaggtagttaagttaaagcagggtcattagggtgggccctaaggtactctgactggtgtttttatgagaagaggagattaggacttacagggagagacactaggtatgtgagcacacagagaaaagaccatgtgaagacgagaagaaggcaactgtctccaatccagacggagatgccaggcacagcccttctgtcacaaccctcagaaggaaccaaccctgccgacaccttggccttgtacttctggcctccagaaccgcaggaaagtacatttctgttgcttaggccgctcagcctgtggcactttgttacagcttctcacccagttcaggcccttttaattgattgctgggcctttgcagttgtttttgcttctaatatattcatctctcaatttatttctggaggctgccacccgaggggcagaacttcaattgtgtccctaatgggaaaccttgctgggatcatgtggtctacagcacaaggttgctaaagcatcttctgccagaattctgtgagtatctggttaggtgggtctggaatatactgagtttaaaaaagttaaataggtttctttactgcaagatgtttcagagactttaatatgctactctgctgtatgaatctccaggcaggaaatcttataaaatgtgtttctgaaatg

SEQ ID NO: 3242 - protein, 106 aa, Homosapiens
MPGTALLSQPSEGTNPADTLALYFWPPEPQESTFLLLRPLSLWHFVTASHPVQALLIDCWAFAVVFASNIFISQFISGGCHPRGRTSIVSLMGNLAGIMWSTAQGC

SEQ ID NO: 3243 - DNA, 456 bp, Homosapiens
atgtttatgcaaatctgtaagagaggtggtattatagatatcaagggaaggggtactgttcaaaaaggaatgccccacaagtgttaccatggcaaaacgaagagtctgcagtgttgcccagcatgctgttggcattgttgtaacaaacaagttaagggaaagattcttgccaagagaattaatgtgcgtattgagcacattaagcactctaagagccgagatagcttcctgaaacgcctgaaggaacatgatcagaaaaagaaagaagccaaagagaaaggtacctgggttcaactgaagcgccatcctgctccacccagagacacgcactgtgtgagaaccagtgggaaggagcctgagctgaggaagctattccctatggattcatggcatattaactgtttaaatgaaataaaagacttctggactgtaaaaatgtttctcttcattgagtag

SEQ ID NO: 3244 - protein, 151 aa, Homosapiens
MFMQICKRGGIIDIKGRGTVQKGMPHKCYHGKTKSLQCCPACCWHCCNKQVKGKILAKRINVRIEHIKHSKSRDSFLKRLKEHDQKKKEAKEKGTWVQLKRHPAPPRDTHCVRTSGKEPELRKLFPMDSWHINCLNEIKDFWTVKMFLFIE

SEQ ID NO: 3245 - DNA, 2095 bp, Homosapiens
aatgcagagagctgaggctagagaggcagccaggggccgatcgtgaagatgctgtgtgtgggtgtgtggttggaaggagtttggacttgatcctatcagtcagtgcttttcaagctgatttttaagctgtgaagcccatgattgatatgaagttagcatgtaaaacagatgaaaatgatagaatggaggtgggagtgtgtgtcccagagccctctttttgagaccattcaccattttccaaggagctgtaggtgttggaaaccaatgaatcttgtagccgggagttagaagaccatatctgcctcttgattgaattgttctactagcagcatgaagggggacagatgatttctgctgaagattgtgagtttattcagaggtttgaaatgaaacgaagccctgaagagaagcaagagatgcttcaaactgaaggcagccagtgtgctaaaacatttataaatctgatgactcatatctgcaaagaacagaccgttcagtatatactaactatggtggatgatatgctgcaggaaaatcatcagcgtgttagcattttctttgactatgcaagatgtagcaagaacactgcgtggccctactttctgccaatgttgaatcgccaggatcccttcactgttcatatggcagcaagaattattgccaagttagcagcttggggaaaagaactgatggaaggcagtgacttaaattactatttcaattggataaaaactcagctgagttcacagaaactgcgtggtagcggtgttgctgttgaaacaggaacagtctcttcaagtgatagttcgcagtatgtgcagtgcgtggccgggtgtttgcagctgatgctccgggtcaatgagtaccgctttgcttgggtggaagcagatggggtaaattgcataatgggagtgttgagtaacaagtgtggctttcagctccagtatcaaatgattttttcaatatggctcctggcattcagtcctcaaatgtgtgaacacctgcggcgctataatatcattccagttctgtctgatatccttcaggagtctgtcaaagagaaagtaacaagaatcattcttgcagcatttcgtaactttttagaaaaatcaactgaaagagaaactcgccaagaatatgccctggctatgattcagtgcaaagttctgaaacagttggagaacttggaacagcagaagtacgatgatgaagatatcagcgaagatatcaaatttcttttggaaaaacttggagagagtgtccaggaccttagttcatttgatgaatacagttcagaacttaaatctggaaggttggaatggagtcctgtgcacaaatctgagaaattttggagagagaatgctgtgaggttaaatgagaagaattatgaactcttgaaaatcttgacaaaacttttggaagtgtcagatgatccccaagtcttagctgttgctgctcacgatgttggagaatatgtgcggcattatccacgaggcaaacgggtcatcgagcagctcggtgggaagcagctggtcatgaaccacatgcatcatgaagaccagcaggtccgctataatgctctgctggccgtgcagaagctcatggtgcacaactgggaataccttggcaagcagctccagtccgagcagccccagaccgctgccgcccgaagctaagcctgcctctggccttcccctccgcctcaatgcagaaccagtagtgggagcactgtgtttagagttaagagtgaacactgtttgattttacttggaatttcctctgttatatagcttttcccaatgctaatttccaaacaacaacaacaaaataacatgtttgcctgttaagttgtataaaagtaggtgattctgtatttaaagaaaatattactgttacatatactgcttgcaatttctgtatttattgttctctggaaataaatatagttattaaaggattctcactccaaacatggcctctctctttacttggactttgaacaaaagtcaactgttgtctcttttcaaaccaaattgggagaattgttgcaaagtagtgaatggcaaataaatgttttaaaatctatcgctctatc

SEQ ID NO: 3246 - protein, 443 aa, Homosapiens
MISAEDCEFIQRFEMKRSPEEKQEMLQTEGSQCAKTFINLMTHICKEQTVQYILTMVDDMLQENHQRVSIFFDYARCSKNTAWPYFLPMLNRQDPFTVHMAARIIAKLAAWGKELMEGSDLNYYFNWIKTQLSSQKLRGSGVAVETGTVSSSDSSQYVQCVAGCLQLMLRVNEYRFAWVEADGVNCIMGVLSNKCGFQLQYQMIFSIWLLAFSPQMCEHLRRYNIIPVLSDILQESVKEKVTRIILAAFRNFLEKSTERETRQEYALAMIQCKVLKQLENLEQQKYDDEDISEDIKFLLEKLGESVQDLSSFDEYSSELKSGRLEWSPVHKSEKFWRENAVRLNEKNYELLKILTKLLEVSDDPQVLAVAAHDVGEYVRHYPRGKRVIEQLGGKQLVMNHMHHEDQQVRYNALLAVQKLMVHNWEYLGKQLQSEQPQTAAARS

SEQ ID NO: 3247 - DNA, 2036 bp, Homosapiens
tgcagaccaggtcaggcgactcttgcagtttctccagcttgcctggtgcgtgctggtgtctcgccgcttggtcctctcctgttcttcggcccccggttgccagattgcttttcttccaggcctcaaccagatttgttgaaagacattcaagattacgaagtttagatgaccaaaatggatatccgaggtgctgtggatgctgctgtccccaccaatattattgctgccaaggctgcagaagttcgtgcaaacaaagtcaactggcaatcctatcttcagggacagatgatttctgctgaagattgtgagtttattcagaggtttgaaatgaaacgaagccctgaagagaagcaagagatgcttcaaactgaaggcagccagtgtgctaaaacatttataaatctgatgactcatatctgcaaagaacagaccgttcagtatatactaactatggtggatgatatgctgcaggaaaatcatcagcgtgttagcattttctttgactatgcaagatgtagcaagaacactgcgtggccctactttctgccaatgttgaatcgccaggatcccttcactgttcatatggcagcaagaattattgccaagttagcagcttggggaaaagaactgatggaaggcagtgacttaaattactatttcaattggataaaaactcagctgagttcacagaaactgcgtggtagcggtgttgctgttgaaacaggaacagtctcttcaagtgatagttcgcagtatgtgcagtgcgtggccgggtgtttgcagctgatgctccgggtcaatgagtaccgctttgcttgggtggaagcagatggggtaaattgcataatgggagtgttgagtaacaagtgtggctttcagctccagtatcaaatgattttttcaatatggctcctggcattcagtcctcaaatgtgtgaacacctgcggcgctataatatcattccagttctgtctgatatccttcaggagtctgtcaaagagaaagtaacaagaatcattcttgcagcatttcgtaactttttagaaaaatcaactgaaagagaaactcgccaagaatatgccctggctatgattcagtgcaaagttctgaaacagttggagaacttggaacagcagaagtacgatgatgaagatatcagcgaagatatcaaatttcttttggaaaaacttggagagagtgtccaggaccttagttcatttgatgaatacagttcagaacttaaatctggaaggttggaatggagtcctgtgcacaaatctgagaaattttggagagagaatgctgtgaggttaaatgagaagaattatgaactcttgaaaatcttgacaaaacttttggaagtgtcagatgatccccaagtcttagctgttgctgctcacgatgttggagaatatgtgcggcattatccacgaggcaaacgggtcatcgagcagctcggtgggaagcagctggtcatgaaccacatgcatcatgaagaccagcaggtccgctataatgctctgctggccgtgcagaagctcatggtgcacaactgggaataccttggcaagcagctccagtccgagcagccccagaccgctgccgcccgaagctaagcctgcctctggccttcccctccgcctcaatgcagaaccagtagtgggagcactgtgtttagagttaagagtgaacactgtttgattttacttggaatttcctctgttatatagcttttcccaatgctaatttccaaacaacaacaacaaaataacatgtttgcctgttaagttgtataaaagtaggtgattctgtatttaaagaaaatattactgttacatatactgcttgcaatttctgtatttattgttctctggaaataaatatagttattaaaggattctcactccaaacatggcctctctctttacttggactttgaacaaaagtcaactgttgtctcttttcaaaccaaattgggagaattgttgcaaagtagtgaatggcaaataaatgttttaaaatctatcgctctatc

SEQ ID NO: 3248 - protein, 483 aa, Homosapiens; identical to SEQ ID NO: 453

SEQ ID NO: 3249 - DNA, 2431 bp, Homosapiens
agctgcttccgggcggaggtcctcggcctcccctaggcgaggcactaggtctgggggcggcgggtcttagcgtgcccgccacgctcgccgcctcccacctgccctggctggctggggcccgacccttgcgtcgctccggggcccaagttacggactcgggaatccagttgtccgcaccgaacaagccccgccgcagcgcccgcccctcctcttgctgctttggagtctcccggcttccgccttccgcagcagtcacgtgcctccgatcacgtgaccggcgcctctgtcattctactgcggccgccctggcttccttctacctgtgcggccctcaacgtctccttggtgcgggacccgcttcactttcggctcccggagtctccctccactgctcagacctctggacctgacaggagacgcctacttggctctgacgcggcgccccagcccggctgtgtccccggcgccccggaccaccctccctgccggctttgggtgcgttgtggggtcccgaggattcgcgagatttgttgaaagacattcaagattacgaagtttagatgaccaaaatggatatccgaggtgctgtggatgctgctgtccccaccaatattattgctgccaaggctgcagaagttcgtgcaaacaaagtcaactggcaatcctatcttcagggacagatgatttctgctgaagattgtgagtttattcagaggtttgaaatgaaacgaagccctgaagagaagcaagagatgcttcaaactgaaggcagccagtgtgctaaaacatttataaatctgatgactcatatctgcaaagaacagaccgttcagtatatactaactatggtggatgatatgctgcaggaaaatcatcagcgtgttagcattttctttgactatgcaagatgtagcaagaacactgcgtggccctactttctgccaatgttgaatcgccaggatcccttcactgttcatatggcagcaagaattattgccaagttagcagcttggggaaaagaactgatggaaggcagtgacttaaattactatttcaattggataaaaactcagctgagttcacagaaactgcgtggtagcggtgttgctgttgaaacaggaacagtctcttcaagtgatagttcgcagtatgtgcagtgcgtggccgggtgtttgcagctgatgctccgggtcaatgagtaccgctttgcttgggtggaagcagatggggtaaattgcataatgggagtgttgagtaacaagtgtggctttcagctccagtatcaaatgattttttcaatatggctcctggcattcagtcctcaaatgtgtgaacacctgcggcgctataatatcattccagttctgtctgatatccttcaggagtctgtcaaagagaaagtaacaagaatcattcttgcagcatttcgtaactttttagaaaaatcaactgaaagagaaactcgccaagaatatgccctggctatgattcagtgcaaagttctgaaacagttggagaacttggaacagcagaagtacgatgatgaagatatcagcgaagatatcaaatttcttttggaaaaacttggagagagtgtccaggaccttagttcatttgatgaatacagttcagaacttaaatctggaaggttggaatggagtcctgtgcacaaatctgagaaattttggagagagaatgctgtgaggttaaatgagaagaattatgaactcttgaaaatcttgacaaaacttttggaagtgtcagatgatccccaagtcttagctgttgctgctcacgatgttggagaatatgtgcggcattatccacgaggcaaacgggtcatcgagcagctcggtgggaagcagctggtcatgaaccacatgcatcatgaagaccagcaggtccgctataatgctctgctggccgtgcagaagctcatggtgcacaactgggaataccttggcaagcagctccagtccgagcagccccagaccgctgccgcccgaagctaagcctgcctctggccttcccctccgcctcaatgcagaaccagtagtgggagcactgtgtttagagttaagagtgaacactgtttgattttacttggaatttcctctgttatatagcttttcccaatgctaatttccaaacaacaacaacaaaataacatgtttgcctgttaagttgtataaaagtaggtgattctgtatttaaagaaaatattactgttacatatactgcttgcaatttctgtatttattgttctctggaaataaatatagttattaaaggattctcactccaaacatggcctctctctttacttggactttgaacaaaagtcaactgttgtctcttttcaaaccaaattgggagaattgttgcaaagtagtgaatggcaaataaatgttttaaaatctatcgctctatc

SEQ ID NO: 3250 - protein, 483 aa, Homosapiens; identical to SEQ ID NO: 453

SEQ ID NO: 3251 - DNA, 1967 bp, Homosapiens
aatgcagagagctgaggctagagaggcagccaggggccgatcgtgaagatgctgtgtgtgggtgtgtggttggaaggagtttggacttgatcctatcagtcagtgcttttcaagctgatttttaagctgtgaagcccatgattgatatgaagttagcatgtaaaacagatgaaaatgatagaatggaggtgggagtgtgtgtcccagagccctctttttgagaccattcaccattttccaaggagctgtaggtgttggaaaccaatgaatcttgtagccgggagttagaagaccatatctgcctcttgattgaattgttctactagcagcatgaagggggacagatgatttctgctgaagattgtgagtttattcagaggtttgaaatgaaacgaagccctgaagagaagcaagagatgcttcaaactgaaggcagccagtgtgctaaaacatttataaatctgatgactcatatctgcaaagaacagaccgttcagtatatactaactatggtggatgatatgctgcaggaaaatcatcagcgtgttagcattttctttgactatgcaagatgtagcaagaacactgcgtggccctactttctgccaatgttgaatcgccaggatcccttcactgttcatatggcagcaagaattattgccaagttagcagcttggggaaaagaactgatggaaggcagtgacttaaattactatttcaattggataaaaactcagctgagttcacagaaactgcgtggtagcggtgttgctgttgaaacaggaacagtctcttcaagtgatagttcgcagtatgtgcagtgcgtggccgggtgtttgcagctgatgctccgggtcaatgagtaccgctttgcttgggtggaagcagatggggtaaattgcataatgggagtgttgagtaacaagtgtggctttcagctccagtatcaaatgattttttcaatatggctcctggcattcagtcctcaaatgtgtgaacacctgcggcgctataatatcattccagttctgtctgatatccttcaggagtctgtcaaagagaaagtaacaagaatcattcttgcagcatttcgtaactttttagaaaaatcaactgaaagagaaactcgccaagaatatgccctggctatgattcagtgcaaagttctgaaacagttggagaacttggaacagcagaagtacgatgatgaagatatcagcgaagatatcaaatttcttttggaaaaacttggagagagtgtccaggaccttagttcatttgatgaatacagttcagaacttaaatctggaaggttggaatggagtcctgtgcacaaatctgagaaattttggagagagaatgctgtgaggttaaatgagaagaattatgaactcttgaaaatcttgacaaaacttttggaagtgtcagatgatccccaagtcttagctgttgctgctcacgatgttggagaatatgtgcggcattatccacgaggcaaacgggtcatcgagcagctcggtgggaagcagctggtcatgaaccacatgcatcatgaagaccagcaggtccgctataatgctctgctggccgtgcagaagctcatggtgcacaactgggaataccttggcaagcagctccagtccgagcagccccagaccgctgccgcccgaagctaagcctgcctctggccttcccctccgcctcaatgcagaaccagtagtgggagcactgtgtttagagttaagagtgaacactgtttgattttacttggaatttcctctgttatatagcttttcccaatgctaatttccaaacaacaacaacaaaataacatgtttgcctgttaagttgtataaaagtaggtgattctgtatttaaagaaaatattactgttacatatactgcttgcaatttctgtatttattgttctctggaaataaatatagttattaaaggattctcactcc

SEQ ID NO: 3252 - protein, 443 aa, Homosapiens; identical to SEQ ID NO: 3246

SEQ ID NO: 3253 - DNA, 2303 bp, Homosapiens
agctgcttccgggcggaggtcctcggcctcccctaggcgaggcactaggtctgggggcggcgggtcttagcgtgcccgccacgctcgccgcctcccacctgccctggctggctggggcccgacccttgcgtcgctccggggcccaagttacggactcgggaatccagttgtccgcaccgaacaagccccgccgcagcgcccgcccctcctcttgctgctttggagtctcccggcttccgccttccgcagcagtcacgtgcctccgatcacgtgaccggcgcctctgtcattctactgcggccgccctggcttccttctacctgtgcggccctcaacgtctccttggtgcgggacccgcttcactttcggctcccggagtctccctccactgctcagacctctggacctgacaggagacgcctacttggctctgacgcggcgccccagcccggctgtgtccccggcgccccggaccaccctccctgccggctttgggtgcgttgtggggtcccgaggattcgcgagatttgttgaaagacattcaagattacgaagtttagatgaccaaaatggatatccgaggtgctgtggatgctgctgtccccaccaatattattgctgccaaggctgcagaagttcgtgcaaacaaagtcaactggcaatcctatcttcagggacagatgatttctgctgaagattgtgagtttattcagaggtttgaaatgaaacgaagccctgaagagaagcaagagatgcttcaaactgaaggcagccagtgtgctaaaacatttataaatctgatgactcatatctgcaaagaacagaccgttcagtatatactaactatggtggatgatatgctgcaggaaaatcatcagcgtgttagcattttctttgactatgcaagatgtagcaagaacactgcgtggccctactttctgccaatgttgaatcgccaggatcccttcactgttcatatggcagcaagaattattgccaagttagcagcttggggaaaagaactgatggaaggcagtgacttaaattactatttcaattggataaaaactcagctgagttcacagaaactgcgtggtagcggtgttgctgttgaaacaggaacagtctcttcaagtgatagttcgcagtatgtgcagtgcgtggccgggtgtttgcagctgatgctccgggtcaatgagtaccgctttgcttgggtggaagcagatggggtaaattgcataatgggagtgttgagtaacaagtgtggctttcagctccagtatcaaatgattttttcaatatggctcctggcattcagtcctcaaatgtgtgaacacctgcggcgctataatatcattccagttctgtctgatatccttcaggagtctgtcaaagagaaagtaacaagaatcattcttgcagcatttcgtaactttttagaaaaatcaactgaaagagaaactcgccaagaatatgccctggctatgattcagtgcaaagttctgaaacagttggagaacttggaacagcagaagtacgatgatgaagatatcagcgaagatatcaaatttcttttggaaaaacttggagagagtgtccaggaccttagttcatttgatgaatacagttcagaacttaaatctggaaggttggaatggagtcctgtgcacaaatctgagaaattttggagagagaatgctgtgaggttaaatgagaagaattatgaactcttgaaaatcttgacaaaacttttggaagtgtcagatgatccccaagtcttagctgttgctgctcacgatgttggagaatatgtgcggcattatccacgaggcaaacgggtcatcgagcagctcggtgggaagcagctggtcatgaaccacatgcatcatgaagaccagcaggtccgctataatgctctgctggccgtgcagaagctcatggtgcacaactgggaataccttggcaagcagctccagtccgagcagccccagaccgctgccgcccgaagctaagcctgcctctggccttcccctccgcctcaatgcagaaccagtagtgggagcactgtgtttagagttaagagtgaacactgtttgattttacttggaatttcctctgttatatagcttttcccaatgctaatttccaaacaacaacaacaaaataacatgtttgcctgttaagttgtataaaagtaggtgattctgtatttaaagaaaatattactgttacatatactgcttgcaatttctgtatttattgttctctggaaataaatatagttattaaaggattctcactcc

SEQ ID NO: 3254 - protein, 483 aa, Homosapiens; identical to SEQ ID NO: 453

SEQ ID NO: 3255 - DNA, 2249 bp, Homosapiens
agctgcttccgggcggaggtcctcggcctcccctaggcgaggcactaggtctgggggcggcgggtcttagcgtgcccgccacgctcgccgcctcccacctgccctggctggctggggcccgacccttgcgtcgctccggggcccaagttacggactcgggaatccagttgtccgcaccgaacaagccccgccgcagcgcccgcccctcctcttgctgctttggagtctcccggcttccgccttccgcagcagtcacgtgcctccgatcacgtgaccggcgcctctgtcattctactgcggccgccctggcttccttctacctgtgcggccctcaacgtctccttggtgcgggacccgcttcactttcggctcccggagtctccctccactgctcagacctctggacctgacaggagacgcctacttggctctgacgcggcgccccagcccggctgtgtccccggcgccccggaccaccctccctgccggctttgggtgcgttgtggggtcccgaggattcgcgagatttgttgaaagacattcaagattacgaagtttagatgaccaaaatggatatccgaggtgctgtggatgctgctgtccccaccaatattattgctgccaaggctgcagaagttcgtgcaaacaaagtcaactggcaatcctatcttcagggacagatgatttctgctgaagattgtgagtttattcagaggtttgaaatgaaacgaagccctgaagagaagcaagagatgcttcaaactgaaggcagccagtgtgctaaaacatttataaatctgatgactcatatctgcaaagaacagaccgttcagtatatactaactatggtggatgatatgctgcaggaaaatcatcagcgtgttagcattttctttgactatgcaagatgtagcaagaacactgcgtggccctactttctgccaatgttgaatcgccaggatcccttcactgttcatatggcagcaagaattattgccaagttagcagcttggggaaaagaactgatggaaggcagtgacttaaattactatttcaattggataaaaactcagctgagttcacagagttcgcagtatgtgcagtgcgtggccgggtgtttgcagctgatgctccgggtcaatgagtaccgctttgcttgggtggaagcagatggggtaaattgcataatgggagtgttgagtaacaagtgtggctttcagctccagtatcaaatgattttttcaatatggctcctggcattcagtcctcaaatgtgtgaacacctgcggcgctataatatcattccagttctgtctgatatccttcaggagtctgtcaaagagaaagtaacaagaatcattcttgcagcatttcgtaactttttagaaaaatcaactgaaagagaaactcgccaagaatatgccctggctatgattcagtgcaaagttctgaaacagttggagaacttggaacagcagaagtacgatgatgaagatatcagcgaagatatcaaatttcttttggaaaaacttggagagagtgtccaggaccttagttcatttgatgaatacagttcagaacttaaatctggaaggttggaatggagtcctgtgcacaaatctgagaaattttggagagagaatgctgtgaggttaaatgagaagaattatgaactcttgaaaatcttgacaaaacttttggaagtgtcagatgatccccaagtcttagctgttgctgctcacgatgttggagaatatgtgcggcattatccacgaggcaaacgggtcatcgagcagctcggtgggaagcagctggtcatgaaccacatgcatcatgaagaccagcaggtccgctataatgctctgctggccgtgcagaagctcatggtgcacaactgggaataccttggcaagcagctccagtccgagcagccccagaccgctgccgcccgaagctaagcctgcctctggccttcccctccgcctcaatgcagaaccagtagtgggagcactgtgtttagagttaagagtgaacactgtttgattttacttggaatttcctctgttatatagcttttcccaatgctaatttccaaacaacaacaacaaaataacatgtttgcctgttaagttgtataaaagtaggtgattctgtatttaaagaaaatattactgttacatatactgcttgcaatttctgtatttattgttctctggaaataaatatagttattaaaggattctcactcc

SEQ ID NO: 3256 - protein, 465 aa, Homosapiens; identical to SEQ ID NO: 455

SEQ ID NO: 3257 - DNA, 1626 bp, Homosapiens
cctgacaggagacgcctacttggctctgacgcggcgccccagcccggctgtgtccccggccaaatcttcagatacagagattaagttccaaattgattaagatcgttggaaacccggaatataattttggatttgttgaaagacattcaagattacgaagtttagatgaccaaaatggatatccgaggtgctgtggatgctgctgtccccaccaatattattgctgccaaggctgcagaagttcgtgcaaacaaagtcaactggcaatcctatcttcagggacagatgatttctgctgaagattgtgagtttattcagaggtttgaaatgaaacgaagccctgaagagaagcaagagatgcttcaaactgaaggcagccagtgtgctaaaacatttataaatctgatgactcatatctgcaaagaacagaccgttcagtatatactaactatggtggatgatatgctgcaggaaaatcatcagcgtgttagcattttctttgactatgcaagatgtagcaagaacactgcgtggccctactttctgccaatgttgaatcgccaggatcccttcactgttcatatggcagcaagaattattgccaagttagcagcttggggaaaagaactgatggaaggcagtgacttaaattactatttcaattggataaaaactcagctgagttcacagaaactgcgtggtagcggtgttgctgttgaaacaggaacagtctcttcaagtgatagttcgcagtatgtgcagtgcgtggccgggtgtttgcagctgatgctccgggtcaatgagtaccgctttgcttgggtggaagcagatggggtaaattgcataatgggagtgttgagtaacaagtgtggctttcagctccagtatcaaatgattttttcaatatggctcctggcattcagtcctcaaatgtgtgaacacctgcggcgctataatatcattccagttctgtctgatatccttcaggagtctgtcaaagagaaagtaacaagaatcattcttgcagcatttcgtaactttttagaaaaatcaactgaaagagaaactcgccaagaatatgccctggctatgattcagtgcaaagttctgaaacagttggagaacttggaacagcagaagtacgatgatgaagatatcagcgaagatatcaaatttcttttggaaaaacttggagagagtgtccaggaccttagttcatttgatgaatacagttcagaacttaaatctggaaggttggaatggagtcctgtgcacaaatctgagaaattttggagagagaatgctgtgaggttaaatgagaagaattatgaactcttgaaaatcttgacaaaacttttggaagtgtcagatgatccccaagtcttagctgttgctgctcacgatgttggagaatatgtgcggcattatccacgaggcaaacggcaaagcaaatgaaatcaagattgccacaatagtgagaattatgataaacccagttaaaaatgagtagtataggccggttgcagtggctcacgcctgtaataccaccactttgggaggccgaggcaggcagatcacaaggtcaggagaccatcctggctaagatggtgaaaccccttctctact

SEQ ID NO: 3258 - protein, 429 aa, Homosapiens
MTKMDIRGAVDAAVPTNIIAAKAAEVRANKVNWQSYLQGQMISAEDCEFIQRFEMKRSPEEKQEMLQTEGSQCAKTFINLMTHICKEQTVQYILTMVDDMLQENHQRVSIFFDYARCSKNTAWPYFLPMLNRQDPFTVHMAARIIAKLAAWGKELMEGSDLNYYFNWIKTQLSSQKLRGSGVAVETGTVSSSDSSQYVQCVAGCLQLMLRVNEYRFAWVEADGVNCIMGVLSNKCGFQLQYQMIFSIWLLAFSPQMCEHLRRYNIIPVLSDILQESVKEKVTRIILAAFRNFLEKSTERETRQEYALAMIQCKVLKQLENLEQQKYDDEDISEDIKFLLEKLGESVQDLSSFDEYSSELKSGRLEWSPVHKSEKFWRENAVRLNEKNYELLKILTKLLEVSDDPQVLAVAAHDVGEYVRHYPRGKRQSK

SEQ ID NO: 3259 - DNA, 2104 bp, Homosapiens
cattaaccaaacaaagagaagcagagtggatcctgtgctaatattgggaaaaccaggcaacaggactcatttggggcctttattgtgaaaacatgccccagctttcccaagataaccaagagtgcctccagaaacatttctccaggccgtctatatggacacagtttctgcccctgttcagggctcagagatataatacagacattcaccaaatcacagaaaatgaaggagacctcagggctgttcctgatatcaagtccttcccgcctgcacagctcccagactcgcccgccgccccgaagctgttcggcctcctttctagcccgctttccagcctcgcaaggttcttctctcaccttctccggcgaccccctcccgaggctccccggaggcgcctggacttctcccccctgcttcccgccctgccggccgcccggctctcgagggggcacgaggagctgccgggccgcctctcgctcctgctcggggcggcgctggcactgcccggccgaccctcggggggtcgtccgctgaggcccccccatccggtagccaagcccagggaagaagacgccaccgctgggcagagctcgcctatgccgcagatgggatcagagcggatggagatgcggaagcggcagatgcccgccgcccaggacacaccaggcgccgccccaggccagcccggagcggggagtcgcgggtccaacgcatgctgcttctgctggtgctgctgttgtagctgctcgtgtctcactgttagaaaccaggaagatcagaggcccacaatagcttcccacgaactcagagcagatcttccaacctgggaagaaagccctgctcctactctggaagaagtcaacgcctgggctcagtcatttgacaaattaatggtcactccagcaggaaggaatgcattccgtgaattcctccgaacagaattcagtgaggaaaatatgctcttctggatggcctgtgaggaactgaaaaaggaagctaataaaaacattattgaagagaaagcaaggataatctatgaagactacatttctatactttctcctaaggaggtgagcttagactcccgggtgagagaagtgatcaacagaaacatggtggagccatcccaacacatattcgatgatgctcaacttcagatttacaccctgatgcacagagactcatatcctcgattcatgaactctgctgtctataaggacttgcttcagtccttatcggagaaatctattgaagcataggatttttcaaatatatttattattaataaaataataaaagaattcatgggctacaactagcacagggaatttagaggttgtagcatcttctgctggagtaatactcaggctattctaataacagatgattccttcaacagactgctatatattcaccatgtaaactgcagccacctttagtgatacttttgaaaaaaaaaaataaagggatatggctgttgtagaaagatagcgtatttgcatttacaataacagtagcatgttgtcagtggccaaggctacacagaaggctccctgctgcccggagcaggtacatccaccagagcaaagggaaccacttttattttgcatgagtttggtaactgattactctcccctcaaagaaaagacattcaggtgtttctcaacgacatcttctgtccagcaagctcggtttgaatacgtcacttaccagtgccattgcaggacccaaattcacagttcataaaagatgtgaccactacatgtaaaaatagcattctacttgatcttacagtatgtatgtatgtatgtatggagacatatgtgtgcgtgtggatgtctacatggttaatggaaagcactgtgctctgaagtggatcagtctcaagtgtctggtaacagcagcagtgcttagaaaattcttttgttgaaaagagttactgttattatcagaatttgccaacctaaagaatgaatttttaaattcataacttggtcatgttcacaacaaaactgtcaaataagcatatttccatttttattactgaaagaaatatgggcattttcattctttaaagaaataaagcacaagaattttatctcaa

SEQ ID NO: 3260 - protein, 388 aa, Homosapiens; identical to SEQ ID NO: 461

SEQ ID NO: 3261 - DNA, 1667 bp, Homosapiens
atgccccagctttcccaagataaccaagagtgcctccagaaacatttctccaggccgtctatatggacacagtttctgcccctgttcagggctcagagatataatacagacattcaccaaatcacagaaaatgaaggagacctcagggctgttcctgatatcaagcagatgggatcagagcggatggagatgcggaagcggcagatgcccgccgcccaggacacaccaggcgccgccccaggccagcccggagcggggagtcgcgggtccaacgcatgctgcttctgctggtgctgctgttgtagctgctcgtgtctcactgttagaaaccaggaagatcagaggcccacaatagcttcccacgaactcagagcagatcttccaacctgggaagaaagccctgctcctactctggaagaagtcaacgcctgggctcagtcatttgacaaattaatggtcactccagcaggaaggaatgcattccgtgaattcctccgaacagaattcagtgaggaaaatatgctcttctggatggcctgtgaggaactgaaaaaggaagctaataaaaacattattgaagagaaagcaaggataatctatgaagactacatttctatactttctcctaaggaggtgagcttagactcccgggtgagagaagtgatcaacagaaacatggtggagccatcccaacacatattcgatgatgctcaacttcagatttacaccctgatgcacagagactcatatcctcgattcatgaactctgctgtctataaggacttgcttcagtccttatcggagaaatctattgaagcataggatttttcaaatatatttattattaataaaataataaaagaattcatgggctacaactagcacagggaatttagaggttgtagcatcttctgctggagtaatactcaggctattctaataacagatgattccttcaacagactgctatatattcaccatgtaaactgcagccacctttagtgatacttttgaaaaaaaaaaataaagggatatggctgttgtagaaagatagcgtatttgcatttacaataacagtagcatgttgtcagtggccaaggctacacagaaggctccctgctgcccggagcaggtacatccaccagagcaaagggaaccacttttattttgcatgagtttggtaactgattactctcccctcaaagaaaagacattcaggtgtttctcaacgacatcttctgtccagcaagctcggtttgaatacgtcacttaccagtgccattgcaggacccaaattcacagttcataaaagatgtgaccactacatgtaaaaatagcattctacttgatcttacagtatgtatgtatgtatgtatggagacatatgtgtgcgtgtggatgtctacatggttaatggaaagcactgtgctctgaagtggatcagtctcaagtgtctggtaacagcagcagtgcttagaaaattcttttgttgaaaagagttactgttattatcagaatttgccaacctaaagaatgaatttttaaattcataacttggtcatgttcacaacaaaactgtcaaataagcatatttccatttttattactgaaagaaatatgggcattttcattctttaaagaaataaagcacaagaattttatctcaa

SEQ ID NO: 3262 - protein, 273 aa, Homosapiens
MPQLSQDNQECLQKHFSRPSIWTQFLPLFRAQRYNTDIHQITENEGDLRAVPDIKQMGSERMEMRKRQMPAAQDTPGAAPGQPGAGSRGSNACCFCWCCCCSCSCLTVRNQEDQRPTIASHELRADLPTWEESPAPTLEEVNAWAQSFDKLMVTPAGRNAFREFLRTEFSEENMLFWMACEELKKEANKNIIEEKARIIYEDYISILSPKEVSLDSRVREVINRNMVEPSQHIFDDAQLQIYTLMHRDSYPRFMNSAVYKDLLQSLSEKSIEA

SEQ ID NO: 3263 - DNA, 1434 bp, Homosapiens
atgccccagctttcccaagataaccaagagtgcctccagaaacatttctccaggccgtctatatggacacagtttctgcccctgttcagggctcagagatataatacagacattcaccaaatcacagaaaatgaaggagacctcagggctgttcctgatatcaagccctgctcctactctggaagaagtcaacgcctgggctcagtcatttgacaaattaatggtcactccagcaggaaggaatgcattccgtgaattcctccgaacagaattcagtgaggaaaatatgctcttctggatggcctgtgaggaactgaaaaaggaagctaataaaaacattattgaagagaaagcaaggataatctatgaagactacatttctatactttctcctaaggaggtgagcttagactcccgggtgagagaagtgatcaacagaaacatggtggagccatcccaacacatattcgatgatgctcaacttcagatttacaccctgatgcacagagactcatatcctcgattcatgaactctgctgtctataaggacttgcttcagtccttatcggagaaatctattgaagcataggatttttcaaatatatttattattaataaaataataaaagaattcatgggctacaactagcacagggaatttagaggttgtagcatcttctgctggagtaatactcaggctattctaataacagatgattccttcaacagactgctatatattcaccatgtaaactgcagccacctttagtgatacttttgaaaaaaaaaaataaagggatatggctgttgtagaaagatagcgtatttgcatttacaataacagtagcatgttgtcagtggccaaggctacacagaaggctccctgctgcccggagcaggtacatccaccagagcaaagggaaccacttttattttgcatgagtttggtaactgattactctcccctcaaagaaaagacattcaggtgtttctcaacgacatcttctgtccagcaagctcggtttgaatacgtcacttaccagtgccattgcaggacccaaattcacagttcataaaagatgtgaccactacatgtaaaaatagcattctacttgatcttacagtatgtatgtatgtatgtatggagacatatgtgtgcgtgtggatgtctacatggttaatggaaagcactgtgctctgaagtggatcagtctcaagtgtctggtaacagcagcagtgcttagaaaattcttttgttgaaaagagttactgttattatcagaatttgccaacctaaagaatgaatttttaaattcataacttggtcatgttcacaacaaaactgtcaaataagcatatttccatttttattactgaaagaaatatgggcattttcattctttaaagaaataaagcacaagaattttatctcaa

SEQ ID NO: 3264 - protein, 152 aa, Homosapiens
MKETSGLFLISSPAPTLEEVNAWAQSFDKLMVTPAGRNAFREFLRTEFSEENMLFWMACEELKKEANKNIIEEKARIIYEDYISILSPKEVSLDSRVREVINRNMVEPSQHIFDDAQLQIYTLMHRDSYPRFMNSAVYKDLLQSLSEKSIEA

SEQ ID NO: 3265 - DNA, 1518 bp, Homosapiens
atgccccagctttcccaagataaccaagagtgcctccagaaacatttctccaggccgtctatatggacacagtttctgcccctgttcagggctcagagatataatacagacattcaccaaatcacagaaaatgaaggagacctcagggctgttcctgatatcaagtctcactgttagaaaccaggaagatcagaggcccacaatagcttcccacgaactcagagcagatcttccaacctgggaagaaagccctgctcctactctggaagaagtcaacgcctgggctcagtcatttgacaaattaatggtcactccagcaggaaggaatgcattccgtgaattcctccgaacagaattcagtgaggaaaatatgctcttctggatggcctgtgaggaactgaaaaaggaagctaataaaaacattattgaagagaaagcaaggataatctatgaagactacatttctatactttctcctaaggaggtgagcttagactcccgggtgagagaagtgatcaacagaaacatggtggagccatcccaacacatattcgatgatgctcaacttcagatttacaccctgatgcacagagactcatatcctcgattcatgaactctgctgtctataaggacttgcttcagtccttatcggagaaatctattgaagcataggatttttcaaatatatttattattaataaaataataaaagaattcatgggctacaactagcacagggaatttagaggttgtagcatcttctgctggagtaatactcaggctattctaataacagatgattccttcaacagactgctatatattcaccatgtaaactgcagccacctttagtgatacttttgaaaaaaaaaaataaagggatatggctgttgtagaaagatagcgtatttgcatttacaataacagtagcatgttgtcagtggccaaggctacacagaaggctccctgctgcccggagcaggtacatccaccagagcaaagggaaccacttttattttgcatgagtttggtaactgattactctcccctcaaagaaaagacattcaggtgtttctcaacgacatcttctgtccagcaagctcggtttgaatacgtcacttaccagtgccattgcaggacccaaattcacagttcataaaagatgtgaccactacatgtaaaaatagcattctacttgatcttacagtatgtatgtatgtatgtatggagacatatgtgtgcgtgtggatgtctacatggttaatggaaagcactgtgctctgaagtggatcagtctcaagtgtctggtaacagcagcagtgcttagaaaattcttttgttgaaaagagttactgttattatcagaatttgccaacctaaagaatgaatttttaaattcataacttggtcatgttcacaacaaaactgtcaaataagcatatttccatttttattactgaaagaaatatgggcattttcattctttaaagaaataaagcacaagaattttatctcaa

SEQ ID NO: 3266 - protein, 180 aa, Homosapiens
MKETSGLFLISSLTVRNQEDQRPTIASHELRADLPTWEESPAPTLEEVNAWAQSFDKLMVTPAGRNAFREFLRTEFSEENMLFWMACEELKKEANKNIIEEKARIIYEDYISILSPKEVSLDSRVREVINRNMVEPSQHIFDDAQLQIYTLMHRDSYPRFMNSAVYKDLLQSLSEKSIEA

SEQ ID NO: 3267 - DNA, 1566 bp, Homosapiens
agagcaaggggaggaagaggccgggagaagagggctagagcaaagaccgagagccggagaaaggcgaaaggcgcggtgagcaatcgccgacgtagagagggcagccctccgcgctgcaatattgagaaggcacccgcgggacgcatgcgcacggcggacggaggcgagccggccggggcttcctccccggccggcagggtggacggtgggctctctcactgttagaaaccaggaagatcagaggcccacaatagcttcccacgaactcagagcagatcttccaacctgggaagaaagccctgctcctactctggaagaagtcaacgcctgggctcagtcatttgacaaattaatggtcactccagcaggaaggaatgcattccgtgaattcctccgaacagaattcagtgaggaaaatatgctcttctggatggcctgtgaggaactgaaaaaggaagctaataaaaacattattgaagagaaagcaaggataatctatgaagactacatttctatactttctcctaaggaggtgagcttagactcccgggtgagagaagtgatcaacagaaacatggtggagccatcccaacacatattcgatgatgctcaacttcagatttacaccctgatgcacagagactcatatcctcgattcatgaactctgctgtctataaggacttgcttcagtccttatcggagaaatctattgaagcataggatttttcaaatatatttattattaataaaataataaaagaattcatgggctacaactagcacagggaatttagaggttgtagcatcttctgctggagtaatactcaggctattctaataacagatgattccttcaacagactgctatatattcaccatgtaaactgcagccacctttagtgatacttttgaaaaaaaaaaataaagggatatggctgttgtagaaagatagcgtatttgcatttacaataacagtagcatgttgtcagtggccaaggctacacagaaggctccctgctgcccggagcaggtacatccaccagagcaaagggaaccacttttattttgcatgagtttggtaactgattactctcccctcaaagaaaagacattcaggtgtttctcaacgacatcttctgtccagcaagctcggtttgaatacgtcacttaccagtgccattgcaggacccaaattcacagttcataaaagatgtgaccactacatgtaaaaatagcattctacttgatcttacagtatgtatgtatgtatgtatggagacatatgtgtgcgtgtggatgtctacatggttaatggaaagcactgtgctctgaagtggatcagtctcaagtgtctggtaacagcagcagtgcttagaaaattcttttgttgaaaagagttactgttattatcagaatttgccaacctaaagaatgaatttttaaattcataacttggtcatgttcacaacaaaactgtcaaataagcatatttccatttttattactgaaagaaatatgggcattttcattctttaaagaaataaagcacaagaattttatctcaa

SEQ ID NO: 3268 - protein, 122 aa, Homosapiens
MVTPAGRNAFREFLRTEFSEENMLFWMACEELKKEANKNIIEEKARIIYEDYISILSPKEVSLDSRVREVINRNMVEPSQHIFDDAQLQIYTLMHRDSYPRFMNSAVYKDLLQSLSEKSIEA

SEQ ID NO: 3269 - DNA, 1705 bp, Homosapiens
gaggaagaggccgggagaagagggctagagcaaagaccgagagccggagaaaggcgaaaggcgcggtgagcaatcgccgacgtagagagggcagccctccgcgctgcaatattgagaaggcacccgcgggacgcatgcgcacggcggacggaggcgagccggccggggcttcctccccggccggcagggtggacggtgggctccagatgggatcagagcggatggagatgcggaagcggcagatgcccgccgcccaggacacaccaggcgccgccccaggccagcccggagcggggagtcgcgggtccaacgcatgctgcttctgctggtgctgctgttgtagctgctcgtgtctcactgttagaaaccaggaagatcagaggcccacaatagcttcccacgaactcagagcagatcttccaacctgggaagaaagccctgctcctactctggaagaagtcaacgcctgggctcagtcatttgacaaattaatggtcactccagcaggaaggaatgcattccgtgaattcctccgaacagaattcagtgaggaaaatatgctcttctggatggcctgtgaggaactgaaaaaggaagctaataaaaacattattgaagagaaagcaaggataatctatgaagactacatttctatactttctcctaaggaggtgagcttagactcccgggtgagagaagtgatcaacagaaacatggtggagccatcccaacacatattcgatgatgctcaacttcagatttacaccctgatgcacagagactcatatcctcgattcatgaactctgctgtctataaggacttgcttcagtccttatcggagaaatctattgaagcataggatttttcaaatatatttattattaataaaataataaaagaattcatgggctacaactagcacagggaatttagaggttgtagcatcttctgctggagtaatactcaggctattctaataacagatgattccttcaacagactgctatatattcaccatgtaaactgcagccacctttagtgatacttttgaaaaaaaaaaataaagggatatggctgttgtagaaagatagcgtatttgcatttacaataacagtagcatgttgtcagtggccaaggctacacagaaggctccctgctgcccggagcaggtacatccaccagagcaaagggaaccacttttattttgcatgagtttggtaactgattactctcccctcaaagaaaagacattcaggtgtttctcaacgacatcttctgtccagcaagctcggtttgaatacgtcacttaccagtgccattgcaggacccaaattcacagttcataaaagatgtgaccactacatgtaaaaatagcattctacttgatcttacagtatgtatgtatgtatgtatggagacatatgtgtgcgtgtggatgtctacatggttaatggaaagcactgtgctctgaagtggatcagtctcaagtgtctggtaacagcagcagtgcttagaaaattcttttgttgaaaagagttactgttattatcagaatttgccaacctaaagaatgaatttttaaattcataacttggtcatgttcacaacaaaactgtcaaataagcatatttccatttttattactgaaagaaatatgggcattttcattctttaaagaaataaagcacaagaattttatctcaa

SEQ ID NO: 3270 - protein, 241 aa, Homosapiens; identical to SEQ ID NO: 459

SEQ ID NO: 3271 - DNA, 610 bp, Homosapiens
gagggctagagcaaagaccgagagccggagaaaggcgaaaggcgcggtgagcaatcgccgacgtagagagggcagccctccgcgctgcaatattgagaaggcacccgcgggacgcatgcgcacggcggacggaggcgagccggccggggcttcctccccggccggcagggtggacggtgggctcggtctttgcatgcaccaccacatctggctaatcaagtgaagatgaggccaaactggatgaaggcgggcctgaaatccaacgactggtgaccttataaggagggagagcttcaaagacccaggcagtcatagagggaagaagggcaagtggcaaagaagacagagattgggtttctgttgccaccgaggctgccagaagaggcaaggaagaatcctcccctagagccttcagaggcagatgcctggccctgctgacggtttggttttgaacttttagcctccagaactgtgcaagaataaatttctgttgttttaagccatcgggtttgtggtaatttgttatggcagctctaggaaactaatccagatgttaaagtttattcttacatagaaattgaggtttctaataaaaggtgtgtggacgtgg

SEQ ID NO: 3272 - protein, 35 aa, Homosapiens
MRTADGGEPAGASSPAGRVDGGLGLCMHHHIWLIK

SEQ ID NO: 3273 - DNA, 466 bp, Homosapiens
gaaaggcgcggtgagcaatcgccgacgtagagagggcagccctccgcgctgcaatattgagaaggcacccgcgggacgcatgcgcacggcggacggaggcgagccggccggggcttcctccccggccggcagggtggacggtgggctcggtctttgcatgcaccaccacatctggctaatcaagtgaagatgaggccaaactggatgaaggcgggcctgaaatccaacgactggtgaccttataaggagggagagcttcaaagacccaggcagtcatagagggaagaagggcaagtggcaaagaagacagagattgggtttctgttgccaccgaggctgccagaagaggcaaggaagaatcctcccctagagccttcagaggcagatgcctggccctgctgacggtttggttttgaacttttagcctccagaactgtgcaagaataaatttctgttgttttaagcc

SEQ ID NO: 3274 - protein, 35 aa, Homosapiens; identical to SEQ ID NO: 3272

SEQ ID NO: 3275 - DNA, 2240 bp, Homosapiens
atattaaaatttctgctgttaggaactttatgttcccagctgtgatgtgttaacagcatttccttcagaagtcaggcagctggcccccacactaactacaatgctgtgcgatgctcctgtgtctgtcctcctggcaccacaatgcctgtgtgccatgtttgtcaccagcatgctacatgtgctatgtccactgccttttgtctctctattctctttattgggtattttttccttccttttctcaggtgtctcaggtttaagtcacagaatcatgactttatggaacagaaaggggaacgacttagccaacagcagcccagagcaggcagctgacttatgtcaggcgaacaagttagtgacagaacagaactcacaacctgcatttctgtactttttggtactcaatccactatgctgcctttaaggtaaattaaaataccagcatttaaaaactgttttatgacatccattcatagagatgtgtaaccatcactgcaattcattttagaatattttcatcactccaagaagagacccagcaccccttagccgtcaaccaccaagtcccttcctccagcagccccaggcagccactgagctactttctgtttccacagatttgcctgttccgaacattttatatagatgggttcatatgatacgtggccttttctagctggcttctctcactcagcatcctgtttgcacagttcagccatgtagtggtaggtaaccatggcatgtcagaaagagaagaaaaacttggtggtcattttgcctccagttcagaagacaaaaccaaggcctagggaggtggcttcaggctctagtcacaaagcccagcaggggaagagtgaggatccagctagacccctcaccactcaccgccctcagcagacctcctggtgcttccctgacctgcgtgcaaaggtgctctgcttggtgaactggcagatttacatgcctgccctctagtttttctgttctcagctttgcccagctatttttgtcaccgcttgcgtgtccttgaaggcattctgggttacttctagatttgtgaatggttgaggtgccagatgtctgagggtgggtaaatggggtccctgctatttcagtccctgctgaatatagacacaaaggtacaggaccaatttgtttacagtctttttttcccctaggttagaatgcagtggtgcaatcatagctcactgcagccttaaacccctgggctcaaacgatcctcccacctcagcctcctgaataggtggaactacaggtgtgtgccaccatgcctggctgatttttaaattttttttagagacggggtctcactatgttgcccaggctggtctcaaactcctggacttaagccatccacctgcctcagcctcccaaagtgctgagattacagttgtgagccactgtacccagccttgtttacaatcttaaaacacctataaggtctttctatattactcatcgtatttttacattaaatatcaatgtttatatagcaagaaatgtaaacaaaaaataaaatatcaataagtactaaatttaaagaaataaggcaccagagtagcacctagttttcagagacctttcacatacattctctcatttaatcctcttaacaaatctcaaggcagctaatgttatacacatgaggacgtggaggcttaggaaggtgaagtaatttggtccaggcctcacaagtggcaaaggtcaggatggcagggctcctctgactggacaccctatgctctcctcccgctattgcaccagactgctggacattcctggcccagttctctgttttaagcgagtgttctctagggaccagctgtgggccagaaggtcagcacagcactcagaggactcctccaagtaaacccaatattcccactcggccctctgaccccagtcacggcagggctgttcacgtcctgacctggctccatgggacactcctccacacccctcacagcatcccactgtactctctcgacctcggtctaccaacagcaacatgccctggccttcatacttgtctctttttttttttttttttttgagaccctgtctcaagataaataaataaataaacaaactatcatatcaacacagaaagttataaagcagcattcaaaatcatatatatactcttgtaatcatgtaaataatttttgtgaacaaagggaaggaaatgcaaaataaaatttaaaatattggcatgatgg

SEQ ID NO: 3276 - protein, 45 aa, Homosapiens [sequence omitted]

SEQ ID NO: 3277 - DNA, 725 bp, Homosapiens
taaaatatagtcatatggtagtagaagatcctaaactacgtagaaaaaatcgaaaaggtgttatgagatttgtccctaagaaaggcatcaggccctggccaggcacggtggctcattgcctgtaatcccagctccaaagtgctgggattacagacatgagccaccatgcccagcctaaaaataatattaataaattatcacactggttagtcaactcagctgtagattaaaatgtccagtcatctaatgcacttgacagttcgggacagaagcattaaagtggcttcacaggagatcctattcctcactccacgttggacattgttatgggttgaattgtgtccccccagaatatatgttgaagttctaaccatgatacctgtgaatatcaccttatttggaaacagggtctttgcatgcaccaccacatctggctaatcaagtgaagatgaggccaaactggatgaaggcgggcctgaaatccaacgactggtgaccttataaggagggagagcttcaaagacccaggcagtcatagagggaagaagggcaagtggcaaagaagacagagattgggtttctgttgccaccgaggctgccagaagaggcaaggaagaatcctcccctagagccttcagaggcagatgcctggccctgctgacggtttggttttgaacttttagcctccagaactgtgcaagaataaatttctgttgttttaagcc

SEQ ID NO: 3278 - protein, 68 aa, Homosapiens
MSSHLMHLTVRDRSIKVASQEILFLTPRWTLLWVELCPPRIYVEVLTMIPVNITLFGNRVFACTTTSG

SEQ ID NO: 3279 - DNA, 2746 bp, Homosapiens
agcaaaaccgggcgccttccacgaccctctagccggaagccacgcctgcccactagcccgacgcccgcctggcgggaacatgggctcgcccctcaccagcgatctgcagtcagttggtagcgcctgcacgtcgcgcgcggtgttcgattgtcgctgcctggggaggaggagccggagccgccgccgccgccgccgccgccgcgggcttcgttcgtaaggaagggggcctaggcccgggcctgcggtggtgggggttgctgcgcgccgggggtcgctcctgctgtgtcttccgctccagcttcgcccacttccccttgccagcggggtgggcgcggagaagacctgccggagccatggaggacgaagtggtccgctttgccaagaagatggacaagatggtgcagaagaagaacgcgtccacaagaatcggaatgtcagttaatgctattcgcaagcagagtacagatgaggaagttacatctttggcaaagtctctcatcaaatcctggaaaaaattattagatgggccatcaactgagaaagaccttgacgaaaagaagaaagaacctgcaattacatcgcagaacagccctgaggcaagagaagaaagtacttccagcggcaatgtaagcaacagaaaggatgagacaaatgctcgagatacttatgtttcatcctttcctcgggcaccaagcacttctgattctgtgcggttgaagtgtagggagatgcttgctgcagctcttcgaacaggggatgactacattgcaattggagctgatgaggaagaattaggatctcaaattgaagaagctatatatcaagaaataaggaatacagacatgaaatacaaaaatagagtacgaagtaggatatcaaatcttaaagatgcaaaaaatccaaatttaaggaaaaatgtcctctgtgggaatattcctcctgacttatttgctagaatgacagcagaggaaatggctagtgatgagctgaaagagatgcggaaaaacttgaccaaagaagccatcagagagcatcagatggccaagactggtgggacccagactgacttgttcacatgtggcaaatgtaaaaagaagaattgcacttacacacaggtacaaacccgtagtgctgatgaaccaatgacaacatttgttgtctgtaatgaatgtggaaatcgatggaagttctgttgagttggaagaattggcaaaatatctggaccattaagaaaacggattttgtaactagctttaaactaggccaagcaactagttttcctgcaaatcaaatttttaaagcaacttgggttagactttgtttttgacctaacatcccttccttaaatgccttctgtagtttcagatcagtagggagaccatataataattttatggtacctgtttcaaaacatattttttctgtttttataagtaagttgatattaattaaactcttggcaatatttcttctttcttaaaggaaaatataccttaactttttttcttttacactgtgaaacatacacagtagaaattctgttactctctgttattaatacataaatgaaaatacatttttttccatattggcatgtagctacaaatattaaaggaggagaaaaggtaatataattttaggtttaccaaatatggtgtgtattcaaataatacttgaccagcttatctaaaatgtacataattttgaggtagcttatgaatttgattttaattattatgttcacaagcttggaatattagatattattttgcatctgtaactaaccgtgatcatcatttcttgtaatttcttgtacatgtatattacttgttcttaatagatttttggaaacaagactttattgagatcagtttggttttcctgttaatttacctgtttgactttataatgtgttttagttttgcagaagaacactgttgtagtttagaaggcttttcataaatcccctcataggcaaagatgaaaacttcccactatttttttcccctcttaggaagacatactggaaagaaaatgtttagcatcttagtgtagtatagctattgtaaacagttcatgactagattttgattcggaaatctatactgaccaaggattaatcttaaggattgtataattcattaaagctgtggtctttccatgtggagactgatagaaaataattttgtcccaagtcttatttgctgactttttctgtcatgagtgagattgttgaacaaactgaatatatgggctatagcaagtagctttacagtacagatcttacaattaagttttgcttttgttaaagtgtgtaccattttttctgtttggagtaagacaaaaattgttttgacataggttccctagggtacacttgctctagcatactttaaaggccactgttgcaaagtctacattttatgctgaatctgcattctgtcaggcacccgtagaaagacctcagtacatgctttgcactctcctttgctccctttttccaatttcttattgcatatcattttgttgtaatacagaaagcagcatttttaaatgtccgtgttaagaattggcccactggtaccaactcacctctattttgtcagttcatagttgaagattttgttttatttcaaaaacaaagtacatttttgaaataatgtttcagaataaaataatctcacttttaagtgatccattttaaaatttgtaattcaataaagttttttttgttgttaaacatata

SEQ ID NO: 3280 - protein, 280 aa, Homosapiens; identical to SEQ ID NO: 465

SEQ ID NO: 3281 - DNA, 3185 bp, Homosapiens
agcaaaaccgggcgccttccacgaccctctagccggaagccacgcctgcccactagcccgacgcccgcctggcgggaacatgggctcgcccctcaccagcgatctgcagtcagttggtagcgcctgcacgtcgcgcgcggtgttcgattgtcgctgcctggggaggaggagccggagccgccgccgccgccgccgccgccgcgggcttcgttcgtaaggaagggggcctaggcccgggcctgcggtggtgggggttgctgcgcgccgggggtcgctcctgctgtgtcttccgctccagcttcgcccacttccccttgccagcggggtgggcgcggagaagacctgccggagccatggaggacgaagtggtccgctttgccaagaagatggacaagatggtgcagaagaagaacgcggctggagcattggatttgctaaaggagcttaagaatattcctatgaccctggaattactgcagatttagtggctaccttgagatcatcttggcaaaaactcatgagtgatcacaaaggagacttttcttctggagcacaccaaatctgcttgtttcctgtgatgttaacagtgtctcttgatctcagtactcattcctttctgcttttccatcagtgtgcagctgacccctaaggctgcttaatgcactctccacctttccaagtccacaagaatcggaatgtcagttaatgctattcgcaagcagagtacagatgaggaagttacatctttggcaaagtctctcatcaaatcctggaaaaaattattagatgggccatcaactgagaaagaccttgacgaaaagaagaaagaacctgcaattacatcgcagaacagccctgaggcaagagaagaaagtacttccagcggcaatgtaagcaacagaaaggatgagacaaatgctcgagatacttatgtttcatcctttcctcgggcaccaagcacttctgattctgtgcggttgaagtgtagggagatgcttgctgcagctcttcgaacaggggatgactacattgcaattggagctgatgaggaagaattaggatctcaaattgaagaagctatatatcaagaaataaggaatacagacatgaaatacaaaaatagagtacgaagtaggatatcaaatcttaaagatgcaaaaaatccaaatttaaggaaaaatgtcctctgtgggaatattcctcctgacttatttgctagaatgacagcagaggaaatggctagtgatgagctgaaagagatgcggaaaaacttgaccaaagaagccatcagagagcatcagatggccaagactggtgggacccagactgacttgttcacatgtggcaaatgtaaaaagaagaattgcacttacacacagtgtcttgcactgtactcacccctgttcatttgatgagatgaggcgaagtgaatgatgtaggcattgtgactaagtgttaggctgctgttgaccttctgatgatccatcagaaggaggctcatctgcttcaggtggtcctgcctcatcgagccctgatgatgtggatgactaatgggtacaaacccgtagtgctgatgaaccaatgacaacatttgttgtctgtaatgaatgtggaaatcgatggaagttctgttgagttggaagaattggcaaaatatctggaccattaagaaaacggattttgtaactagctttaaactaggccaagcaactagttttcctgcaaatcaaatttttaaagcaacttgggttagactttgtttttgacctaacatcccttccttaaatgccttctgtagtttcagatcagtagggagaccatataataattttatggtacctgtttcaaaacatattttttctgtttttataagtaagttgatattaattaaactcttggcaatatttcttctttcttaaaggaaaatataccttaactttttttcttttacactgtgaaacatacacagtagaaattctgttactctctgttattaatacataaatgaaaatacatttttttccatattggcatgtagctacaaatattaaaggaggagaaaaggtaatataattttaggtttaccaaatatggtgtgtattcaaataatacttgaccagcttatctaaaatgtacataattttgaggtagcttatgaatttgattttaattattatgttcacaagcttggaatattagatattattttgcatctgtaactaaccgtgatcatcatttcttgtaatttcttgtacatgtatattacttgttcttaatagatttttggaaacaagactttattgagatcagtttggttttcctgttaatttacctgtttgactttataatgtgttttagttttgcagaagaacactgttgtagtttagaaggcttttcataaatcccctcataggcaaagatgaaaacttcccactatttttttcccctcttaggaagacatactggaaagaaaatgtttagcatcttagtgtagtatagctattgtaaacagttcatgactagattttgattcggaaatctatactgaccaaggattaatcttaaggattgtataattcattaaagctgtggtctttccatgtggagactgatagaaaataattttgtcccaagtcttatttgctgactttttctgtcatgagtgagattgttgaacaaactgaatatatgggctatagcaagtagctttacagtacagatcttacaattaagttttgcttttgttaaagtgtgtaccattttttctgtttggagtaagacaaaaattgttttgacataggttccctagggtacacttgctctagcatactttaaaggccactgttgcaaagtctacattttatgctgaatctgcattctgtcaggcacccgtagaaagacctcagtacatgctttgcactctcctttgctccctttttccaatttcttattgcatatcattttgttgtaatacagaaagcagcatttttaaatgtccgtgttaagaattggcccactggtaccaactcacctctattttgtcagttcatagttgaagattttgttttatttcaaaaacaaagtacatttttgaaataatgtttcagaataaaataatctcacttttaagtgatccattttaaaatttgtaattcaataaagttttttttgttgttaaacatata

SEQ ID NO: 3282 - protein, 238 aa, Homosapiens
MSVNAIRKQSTDEEVTSLAKSLIKSWKKLLDGPSTEKDLDEKKKEPAITSQNSPEAREESTSSGNVSNRKDETNARDTYVSSFPRAPSTSDSVRLKCREMLAAALRTGDDYIAIGADEEELGSQIEEAIYQEIRNTDMKYKNRVRSRISNLKDAKNPNLRKNVLCGNIPPDLFARMTAEEMASDELKEMRKNLTKEAIREHQMAKTGGTQTDLFTCGKCKKKNCTYTQCLALYSPLFI

SEQ ID NO: 3283 - DNA, 2860 bp, Homosapiens
agggggccgaaaacccgccccgtgagggggcgggaccggaggtgaacgcgcagcaaaaccgggcgccttccacgaccctctagccggaagccacgcctgcccactagcccgacgcccgcctggcgggaacatgggctcgcccctcaccagcgatctgcagtcagttggtagcgcctgcacgtcgcgcgcggtgttcgattgtcgctgcctggggaggaggagccggagccgccgccgccgccgccgccgccgcgggcttcgttcgtaaggaagggggcctaggcccgggcctgcggtggtgggggttgctgcgcgccgggggtcgctcctgctgtgtcttccgctccagcttcgcccacttccccttgccagcggggtgggcgcggagaagacctgccggagccatggaggacgaagtggtccgctttgccaagaagatggacaagatggtgcagaagaagaacgcggctggagcattggatttgctaaaggagcttaagaatattcctatgaccctggaattactgcagtccacaagaatcggaatgtcagttaatgctattcgcaagcagagtacagatgaggaagttacatctttggcaaagtctctcatcaaatcctggaaaaaattattagatgggccatcaactgagaaagaccttgacgaaaagaagaaagaacctgcaattacatcgcagaacagccctgaggcaagagaagaaagtacttccagcggcaatgtaagcaacagaaaggatgagacaaatgctcgagatacttatgtttcatcctttcctcgggcaccaagcacttctgattctgtgcggttgaagtgtagggagatgcttgctgcagctcttcgaacaggggatgactacattgcaattggagctgatgaggaagaattaggatctcaaattgaagaagctatatatcaagaaataaggaatacagacatgaaatacaaaaatagagtacgaagtaggatatcaaatcttaaagatgcaaaaaatccaaatttaaggaaaaatgtcctctgtgggaatattcctcctgacttatttgctagaatgacagcagaggaaatggctagtgatgagctgaaagagatgcggaaaaacttgaccaaagaagccatcagagagcatcagatggccaagactggtgggacccagactgacttgttcacatgtggcaaatgtaaaaagaagaattgcacttacacacaggtacaaacccgtagtgctgatgaaccaatgacaacatttgttgtctgtaatgaatgtggaaatcgatggaagttctgttgagttggaagaattggcaaaatatctggaccattaagaaaacggattttgtaactagctttaaactaggccaagcaactagttttcctgcaaatcaaatttttaaagcaacttgggttagactttgtttttgacctaacatcccttccttaaatgccttctgtagtttcagatcagtagggagaccatataataattttatggtacctgtttcaaaacatattttttctgtttttataagtaagttgatattaattaaactcttggcaatatttcttctttcttaaaggaaaatataccttaactttttttcttttacactgtgaaacatacacagtagaaattctgttactctctgttattaatacataaatgaaaatacatttttttccatattggcatgtagctacaaatattaaaggaggagaaaaggtaatataattttaggtttaccaaatatggtgtgtattcaaataatacttgaccagcttatctaaaatgtacataattttgaggtagcttatgaatttgattttaattattatgttcacaagcttggaatattagatattattttgcatctgtaactaaccgtgatcatcatttcttgtaatttcttgtacatgtatattacttgttcttaatagatttttggaaacaagactttattgagatcagtttggttttcctgttaatttacctgtttgactttataatgtgttttagttttgcagaagaacactgttgtagtttagaaggcttttcataaatcccctcataggcaaagatgaaaacttcccactatttttttcccctcttaggaagacatactggaaagaaaatgtttagcatcttagtgtagtatagctattgtaaacagttcatgactagattttgattcggaaatctatactgaccaaggattaatcttaaggattgtataattcattaaagctgtggtctttccatgtggagactgatagaaaataattttgtcccaagtcttatttgctgactttttctgtcatgagtgagattgttgaacaaactgaatatatgggctatagcaagtagctttacagtacagatcttacaattaagttttgcttttgttaaagtgtgtaccattttttctgtttggagtaagacaaaaattgttttgacataggttccctagggtacacttgctctagcatactttaaaggccactgttgcaaagtctacattttatgctgaatctgcattctgtcaggcacccgtagaaagacctcagtacatgctttgcactctcctttgctccctttttccaatttcttattgcatatcattttgttgtaatacagaaagcagcatttttaaatgtccgtgttaagaattggcccactggtaccaactcacctctattttgtcagttcatagttgaagattttgttttatttcaaaaacaaagtacatttttgaaataatgtttcagaataaaataatctcacttttaagtgatccattttaaaatttgtaattcaataaagttttttttgttgttaaacatata

SEQ ID NO: 3284 - protein, 301 aa, Homosapiens; identical to SEQ ID NO: 463

SEQ ID NO: 3285 - DNA, 395 bp, Homosapiens
tttttttttttttttaagataaggtctcactccattgctcaggtgcatgagttatactactacaaaagttatactacttgactgcatgcgggtagggaggggggatagtgtgagcaccacaacccttgcattgttcaagagtcaactacactttaagaatgaatttaattctatttctcgataaagctgttattaaaaattgtatagtcattctaaattttgaattatgctaattaatctaactctgatatagatatcaaagttttgttgcagttgttattttaactgaggtacttggaaatgtaaatcaatatttcaggtatcccagctcctacgaaattctaacatctaatttcaatttctctccctgcaatttaattccactcaaccttgag

SEQ ID NO: 3286 - protein, 45 aa, Homosapiens
MSYTTTKVILLDCMRVGRGDSVSTTTLALFKSQLHFKNEFNSISR

SEQ ID NO: 3287 - DNA, 364 bp, Homosapiens
ggacacatggaaatgctgagtagaactatgatacaaatcagctcaccataaagtacaatctccagtggccagagagaactaaaaggaaactaaaaacccgcatgacacagttaactttggggcttaagatgagataaggagtgatggcgcttgccagtaatcccagctattccagaggtcgagctggaaggatcccttgagccgagtgcgaggctgcattgaactattaccacaccactgcactccagcctgggcaacagagtgagacctcatctctggacaagtgttatttgtgacagcacaatgtttgatacaacccaaatgttgaatgaaagtggaccagctaaataaaccatgaacattt

SEQ ID NO: 3288 - protein, 34 aa, Homosapiens
SQLFQRSSWKDPLSRVRGCIELLPHHCTPAWATE

SEQ ID NO: 3289 - DNA, 2091 bp, Homosapiens
ttgggctttcaccagattcacaggaggatgaatctgggattaaacaggcagcagaaaataggaggagctttatctttatatactgcccttaccacacagcagaaactggcaggtgtcactgcactcagttgctggcttccacttcgggcttcctttccacagggtcctatcggtggtgctaatagagatatttctattctccagtgccacggggattgtgaccctttggttcccctgatgtttggttctcttacggtggaaaaactaaaaacattggtgaatccagccaatgtgacctttaaaacctatgaaggtatgatgcacagttcgtgtcaacaggaaatgatggatgtcaagcaattcattgataaactcctacctccaattgattgacgtcactaagaggccttgtgtagaagtacaccagcatcattgtagtagagtgtaaaccttttcccatgcccagtcttcaaatttctaatgttttgcagtgttaaaatgttttgcaaatacatgccaataacacagatcaaataatatctcctcatgagaaatttatgatcttttaagtttctatacatgtattcttataagacgacccaggatctactatattagaatagatgaagcaggtagcttcttttttctcaaatgtaattcagcaaaataatacagtactgccaccagattttttattacatcatttgaaaattagcagtatgcttaatgaaaatttgttcaggtataaatgagcagttaagatataaacaatttatgcatgctgtgacttagtctatggatttattccaaaattgcttagtcaccatgcagtgtctgtatttttatatatgtgttcatatatacataatgattataatacataataagaatgaggtggtattacattattcctaataatagggataatgctgtttattgtcaagaaaaagtaaaatcgttctcttcaattaatggcccttttattttgggaccaggcttttattttccctgatattatttctatttaatactcttttctctcaagaaaaaaaaaaaagtttgttttttctttattgtccttcatagcaggccaagtattgcctctctgcaatagacagctactgtcaatacatgctgtaatttgacattctgggtcacagatataaggtatttaaaatctatttatgctttatagagaaaccagacattaaaacttcatgcactacttatttcgaattactgtaccttatccaaatttacacctagctattaggatcttcaacccaggtaacaggaataattctgtggtttcatttttctgtaaacaactgaaagaataattagatcatattctagtatgttctgaaatatctttaagactgatcttaaaaactaacttctaagatgatttcatcttctcatagtatagagtttactttgtacacgtttgaaaccaactactgtagaagatgaggaatctattgtaattttttgctttattttcatctgccagtggacttatttgaaattttcactttagtcaaattattttttgtattagtttttgatgcagacataaaaatagcaatcattttaaattgtcaaaatttccagattactggtaaaaattatttgaaaacaaacttatgggtaataaaggctagtcagaaccctataccataaagtgtagttaccatacagattaatatgtagcaaaaatgtatgcttgatatttctcaactgtgttaatttttctgctgtattccagctgaccaaaacaatattaagaatgcatctttataaatgggtgctaattgataatggaaataatttagtaatggactatacaggatgttaataatgaagccatatgtttatgtctggatttaaaaattttaaacaatcatttactatgtcatttttctttaccttgaagaacataaactgttatttcacttctacaaatcagcaagatattatttatggcaagaaatattccattgaaatattgtgctgtaacatgggaaagtgtaaatgtttttcatggtttctatcaatgtgaaataaaatttaattctgacttttctgtga

SEQ ID NO: 3290 - protein, 121 aa, Homosapiens [sequence omitted]

SEQ ID NO: 3291 - DNA, 2181 bp, Homosapiens
ggtgattttcctgcatggattgggagatactgggcacggatgggcagaagcctttgcaggcctgttaggcctgttacattaaatatgaacgtggctatgccttcatggtttgatattattgggctttcaccagattcacaggaggatgaatctgggattaaacaggcagcagaaaatataaaagctttgattgatcaagaagtgaagaatggcattccttctaacagaattattttgggagggttttctcagggtcctatcggtggtgctaatagagatatttctattctccagtgccacggggattgtgaccctttggttcccctgatgtttggttctcttacggtggaaaaactaaaaacattggtgaatccagccaatgtgacctttaaaacctatgaaggtatgatgcacagttcgtgtcaacaggaaatgatggatgtcaagcaattcattgataaactcctacctccaattgattgacgtcactaagaggccttgtgtagaagtacaccagcatcattgtagtagagtgtaaaccttttcccatgcccagtcttcaaatttctaatgttttgcagtgttaaaatgttttgcaaatacatgccaataacacagatcaaataatatctcctcatgagaaatttatgatcttttaagtttctatacatgtattcttataagacgacccaggatctactatattagaatagatgaagcaggtagcttcttttttctcaaatgtaattcagcaaaataatacagtactgccaccagattttttattacatcatttgaaaattagcagtatgcttaatgaaaatttgttcaggtataaatgagcagttaagatataaacaatttatgcatgctgtgacttagtctatggatttattccaaaattgcttagtcaccatgcagtgtctgtatttttatatatgtgttcatatatacataatgattataatacataataagaatgaggtggtattacattattcctaataatagggataatgctgtttattgtcaagaaaaagtaaaatcgttctcttcaattaatggcccttttattttgggaccaggcttttattttccctgatattatttctatttaatactcttttctctcaagaaaaaaaaaaaagtttgttttttctttattgtccttcatagcaggccaagtattgcctctctgcaatagacagctactgtcaatacatgctgtaatttgacattctgggtcacagatataaggtatttaaaatctatttatgctttatagagaaaccagacattaaaacttcatgcactacttatttcgaattactgtaccttatccaaatttacacctagctattaggatcttcaacccaggtaacaggaataattctgtggtttcatttttctgtaaacaactgaaagaataattagatcatattctagtatgttctgaaatatctttaagactgatcttaaaaactaacttctaagatgatttcatcttctcatagtatagagtttactttgtacacgtttgaaaccaactactgtagaagatgaggaatctattgtaattttttgctttattttcatctgccagtggacttatttgaaattttcactttagtcaaattattttttgtattagtttttgatgcagacataaaaatagcaatcattttaaattgtcaaaatttccagattactggtaaaaattatttgaaaacaaacttatgggtaataaaggctagtcagaaccctataccataaagtgtagttaccatacagattaatatgtagcaaaaatgtatgcttgatatttctcaactgtgttaatttttctgctgtattccagctgaccaaaacaatattaagaatgcatctttataaatgggtgctaattgataatggaaataatttagtaatggactatacaggatgttaataatgaagccatatgtttatgtctggatttaaaaattttaaacaatcatttactatgtcatttttctttaccttgaagaacataaactgttatttcacttctacaaatcagcaagatattatttatggcaagaaatattccattgaaatattgtgctgtaacatgggaaagtgtaaatgtttttcatggtttctatcaatgtgaaataaaatttaattctgacttttctgtga

SEQ ID NO: 3292 - protein, 147 aa, Homosapiens
MGRSLCRPVRPVTLNMNVAMPSWFDIIGLSPDSQEDESGIKQAAENIKALIDQEVKNGIPSNRIILGGFSQGPIGGANRDISILQCHGDCDPLVPLMFGSLTVEKLKTLVNPANVTFKTYEGMMHSSCQQEMMDVKQFIDKLLPPID

SEQ ID NO: 3293 - DNA, 2411 bp, Homosapiens
cgcacgcccttgggccgcggccgggcgcccgctcttccttccgcttgcgctgtgagctgaggcggtgtatgtgcggcaataacatgtcaaccccgctgcccgccatcgtgcccgccgcccggaaggccaccgctgcggtgattttcctgcatggattgggagatactgggcacggatgggcagaagcctttgcaggtatcagaagttcacatatcaaatatatctgcccgcatgcgtttgatattattgggctttcaccagattcacaggaggatgaatctgggattaaacaggcagcagaaaatataaaagctttgattgatcaagaagtgaagaatggcattccttctaacagaattattttgggagggttttctcagggaggagctttatctttatatactgcccttaccacacagcagaaactggcaggtgtcactgcactcagttgctggcttccacttcgggcttcctttccacagggtcctatcggtggtgctaatagagatatttctattctccagtgccacggggattgtgaccctttggttcccctgatgtttggttctcttacggtggaaaaactaaaaacattggtgaatccagccaatgtgacctttaaaacctatgaaggtatgatgcacagttcgtgtcaacaggaaatgatggatgtcaagcaattcattgataaactcctacctccaattgattgacgtcactaagaggccttgtgtagaagtacaccagcatcattgtagtagagtgtaaaccttttcccatgcccagtcttcaaatttctaatgttttgcagtgttaaaatgttttgcaaatacatgccaataacacagatcaaataatatctcctcatgagaaatttatgatcttttaagtttctatacatgtattcttataagacgacccaggatctactatattagaatagatgaagcaggtagcttcttttttctcaaatgtaattcagcaaaataatacagtactgccaccagattttttattacatcatttgaaaattagcagtatgcttaatgaaaatttgttcaggtataaatgagcagttaagatataaacaatttatgcatgctgtgacttagtctatggatttattccaaaattgcttagtcaccatgcagtgtctgtatttttatatatgtgttcatatatacataatgattataatacataataagaatgaggtggtattacattattcctaataatagggataatgctgtttattgtcaagaaaaagtaaaatcgttctcttcaattaatggcccttttattttgggaccaggcttttattttccctgatattatttctatttaatactcttttctctcaagaaaaaaaaaaaagtttgttttttctttattgtccttcatagcaggccaagtattgcctctctgcaatagacagctactgtcaatacatgctgtaatttgacattctgggtcacagatataaggtatttaaaatctatttatgctttatagagaaaccagacattaaaacttcatgcactacttatttcgaattactgtaccttatccaaatttacacctagctattaggatcttcaacccaggtaacaggaataattctgtggtttcatttttctgtaaacaactgaaagaataattagatcatattctagtatgttctgaaatatctttaagactgatcttaaaaactaacttctaagatgatttcatcttctcatagtatagagtttactttgtacacgtttgaaaccaactactgtagaagatgaggaatctattgtaattttttgctttattttcatctgccagtggacttatttgaaattttcactttagtcaaattattttttgtattagtttttgatgcagacataaaaatagcaatcattttaaattgtcaaaatttccagattactggtaaaaattatttgaaaacaaacttatgggtaataaaggctagtcagaaccctataccataaagtgtagttaccatacagattaatatgtagcaaaaatgtatgcttgatatttctcaactgtgttaatttttctgctgtattccagctgaccaaaacaatattaagaatgcatctttataaatgggtgctaattgataatggaaataatttagtaatggactatacaggatgttaataatgaagccatatgtttatgtctggatttaaaaattttaaacaatcatttactatgtcatttttctttaccttgaagaacataaactgttatttcacttctacaaatcagcaagatattatttatggcaagaaatattccattgaaatattgtgctgtaacatgggaaagtgtaaatgtttttcatggtttctatcaatgtgaaataaaatttaattctgacttttctgtga

SEQ ID NO: 3294 - protein, 214 aa, Homosapiens
MCGNNMSTPLPAIVPAARKATAAVIFLHGLGDTGHGWAEAFAGIRSSHIKYICPHAFDIIGLSPDSQEDESGIKQAAENIKALIDQEVKNGIPSNRIILGGFSQGGALSLYTALTTQQKLAGVTALSCWLPLRASFPQGPIGGANRDISILQCHGDCDPLVPLMFGSLTVEKLKTLVNPANVTFKTYEGMMHSSCQQEMMDVKQFIDKLLPPID

SEQ ID NO: 3295 - DNA, 2838 bp, Homosapiens
cgcgcctgagcgtgcgcccggtggggccggccgggactcgccgctcgcacgcccttgggccgcggccgggcgcccgctcttccttccgcttgcgctgtgagctgaggcggtgtatgtgcggcaataacatgtcaaccccgctgcccgccatcgtgcccgccgcccggaaggccaccgctgcggtgagtggcgtaggcgtgggctcggaggggtccactgggccggccaccggtggttgcccctcgcgcggggtgggcgttgcgggcgcgtggcggcctgcggacgaggacgctcctcccggcccgggtggggtgcgaatggtccgcgcggccgggtccgcggggggcgggggcagccggggggtcacagccggcgcgagggccagtccccagctcctccctgcattgcggaggaagtgtggccccgggacccccgcgggccggcctagggcacggcgtcagcctctgcagcgtgtttctgcctggtgtgtgggtgagggaaacctaagtccgccaggaaatcgccttattgtcacctcgcactcttatcctcaatgaaagaagtttgaagattgagtgtcctacaaggtgattttcctgcatggattgggagatactgggcacggatgggcagaagcctttgcaggtatcagaagttcacatatcaaatatatctgcccgcatgcgcctgttaggcctgttacattaaatatgaacgtggctatgccttcatgtaaaagctttgattgatcaagaagtgaagaatggcattccttctaacagaattattttgggagggttttctcagggaggagctttatctttatatactgcccttaccacacagcagaaactggcaggtgtcactgcactcagttgctggcttccacttcgggcttcctttccacagggtcctatcggtggtgctaatagagatatttctattctccagtgccacggggattgtgaccctttggttcccctgatgtttggttctcttacggtggaaaaactaaaaacattggtgaatccagccaatgtgacctttaaaacctatgaaggtatgatgcacagttcgtgtcaacaggaaatgatggatgtcaagcaattcattgataaactcctacctccaattgattgacgtcactaagaggccttgtgtagaagtacaccagcatcattgtagtagagtgtaaaccttttcccatgcccagtcttcaaatttctaatgttttgcagtgttaaaatgttttgcaaatacatgccaataacacagatcaaataatatctcctcatgagaaatttatgatcttttaagtttctatacatgtattcttataagacgacccaggatctactatattagaatagatgaagcaggtagcttcttttttctcaaatgtaattcagcaaaataatacagtactgccaccagattttttattacatcatttgaaaattagcagtatgcttaatgaaaatttgttcaggtataaatgagcagttaagatataaacaatttatgcatgctgtgacttagtctatggatttattccaaaattgcttagtcaccatgcagtgtctgtatttttatatatgtgttcatatatacataatgattataatacataataagaatgaggtggtattacattattcctaataatagggataatgctgtttattgtcaagaaaaagtaaaatcgttctcttcaattaatggcccttttattttgggaccaggcttttattttccctgatattatttctatttaatactcttttctctcaagaaaaaaaaaaaagtttgttttttctttattgtccttcatagcaggccaagtattgcctctctgcaatagacagctactgtcaatacatgctgtaatttgacattctgggtcacagatataaggtatttaaaatctatttatgctttatagagaaaccagacattaaaacttcatgcactacttatttcgaattactgtaccttatccaaatttacacctagctattaggatcttcaacccaggtaacaggaataattctgtggtttcatttttctgtaaacaactgaaagaataattagatcatattctagtatgttctgaaatatctttaagactgatcttaaaaactaacttctaagatgatttcatcttctcatagtatagagtttactttgtacacgtttgaaaccaactactgtagaagatgaggaatctattgtaattttttgctttattttcatctgccagtggacttatttgaaattttcactttagtcaaattattttttgtattagtttttgatgcagacataaaaatagcaatcattttaaattgtcaaaatttccagattactggtaaaaattatttgaaaacaaacttatgggtaataaaggctagtcagaaccctataccataaagtgtagttaccatacagattaatatgtagcaaaaatgtatgcttgatatttctcaactgtgttaatttttctgctgtattccagctgaccaaaacaatattaagaatgcatctttataaatgggtgctaattgataatggaaataatttagtaatggactatacaggatgttaataatgaagccatatgtttatgtctggatttaaaaattttaaacaatcatttactatgtcatttttctttaccttgaagaacataaactgttatttcacttctacaaatcagcaagatattatttatggcaagaaatattccattgaaatattgtgctgtaacatgggaaagtgtaaatgtttttcatggtttctatcaatgtgaaataaaatttaattctgacttttctgtga

SEQ ID NO: 3296 - protein, 73 aa, Homosapiens
MAFLLTELFWEGFLREELYLYILPLPHSRNWQVSLHSVAGFHFGLPFHRVLSVVLIEIFLFSSATGIVTLWFP

SEQ ID NO: 3297 - DNA, 2682 bp, Homosapiens
cgcgcctgagcgtgcgcccggtggggccggccgggactcgccgctcgcacgcccttgggccgcggccgggcgcccgctcttccttccgcttgcgctgtgagctgaggcggtgtatgtgcggcaataacatgtcaaccccgctgcccgccatcgtgcccgccgcccggaaggccaccgctgcggtgagtggcgtaggcgtgggctcggaggggtccactgggccggccaccggtggttgcccctcgcgcggggtgggcgttgcgggcgcgtggcggcctgcggacgaggacgctcctcccggcccgggtggggtgcgaatggtccgcgcggccgggtccgcggggggcgggggcagccggggggtcacagccggcgcgagggccagtccccagctcctccctgcattgcggaggaagtgtggccccgggacccccgcgggccggcctagggcacggcgtcagcctctgcagcgtgtttctgcctggtgtgtgggtgagggaaacctaagtccgccaggaaatcgccttattgtcacctcgcactcttatcctcaatgaaagaagtttgaagattgagtgtcctacaaggtgattttcctgcatggattgggagatactggtaaaagctttgattgatcaagaagtgaagaatggcattccttctaacagaattattttgggagggttttctcagggaggagctttatctttatatactgcccttaccacacagcagaaactggcaggtgtcactgcactcagttgctggcttccacttcgggcttcctttccacagtgccacggggattgtgaccctttggttcccctgatgtttggttctcttacggtggaaaaactaaaaacattggtgaatccagccaatgtgacctttaaaacctatgaaggtatgatgcacagttcgtgtcaacaggaaatgatggatgtcaagcaattcattgataaactcctacctccaattgattgacgtcactaagaggccttgtgtagaagtacaccagcatcattgtagtagagtgtaaaccttttcccatgcccagtcttcaaatttctaatgttttgcagtgttaaaatgttttgcaaatacatgccaataacacagatcaaataatatctcctcatgagaaatttatgatcttttaagtttctatacatgtattcttataagacgacccaggatctactatattagaatagatgaagcaggtagcttcttttttctcaaatgtaattcagcaaaataatacagtactgccaccagattttttattacatcatttgaaaattagcagtatgcttaatgaaaatttgttcaggtataaatgagcagttaagatataaacaatttatgcatgctgtgacttagtctatggatttattccaaaattgcttagtcaccatgcagtgtctgtatttttatatatgtgttcatatatacataatgattataatacataataagaatgaggtggtattacattattcctaataatagggataatgctgtttattgtcaagaaaaagtaaaatcgttctcttcaattaatggcccttttattttgggaccaggcttttattttccctgatattatttctatttaatactcttttctctcaagaaaaaaaaaaaagtttgttttttctttattgtccttcatagcaggccaagtattgcctctctgcaatagacagctactgtcaatacatgctgtaatttgacattctgggtcacagatataaggtatttaaaatctatttatgctttatagagaaaccagacattaaaacttcatgcactacttatttcgaattactgtaccttatccaaatttacacctagctattaggatcttcaacccaggtaacaggaataattctgtggtttcatttttctgtaaacaactgaaagaataattagatcatattctagtatgttctgaaatatctttaagactgatcttaaaaactaacttctaagatgatttcatcttctcatagtatagagtttactttgtacacgtttgaaaccaactactgtagaagatgaggaatctattgtaattttttgctttattttcatctgccagtggacttatttgaaattttcactttagtcaaattattttttgtattagtttttgatgcagacataaaaatagcaatcattttaaattgtcaaaatttccagattactggtaaaaattatttgaaaacaaacttatgggtaataaaggctagtcagaaccctataccataaagtgtagttaccatacagattaatatgtagcaaaaatgtatgcttgatatttctcaactgtgttaatttttctgctgtattccagctgaccaaaacaatattaagaatgcatctttataaatgggtgctaattgataatggaaataatttagtaatggactatacaggatgttaataatgaagccatatgtttatgtctggatttaaaaattttaaacaatcatttactatgtcatttttctttaccttgaagaacataaactgttatttcacttctacaaatcagcaagatattatttatggcaagaaatattccattgaaatattgtgctgtaacatgggaaagtgtaaatgtttttcatggtttctatcaatgtgaaataaaatttaattctgacttttctgtga

SEQ ID NO: 3298 - protein, 127 aa, Homosapiens
MDWEILVKALIDQEVKNGIPSNRIILGGFSQGGALSLYTALTTQQKLAGVTALSCWLPLRASFPQCHGDCDPLVPLMFGSLTVEKLKTLVNPANVTFKTYEGMMHSSCQQEMMDVKQFIDKLLPPID

SEQ ID NO: 3299 - DNA, 2585 bp, Homosapiens
cggcgggcgaggggcagggcagggcggaccctggacgcgcgggcgcgcgcggaaggtagcgcggggccgcgttggcgcgcacgcgcctgagcgtgcgcccggtggggccggccgggactcgccgctcgcacgcccttgggccgcggccgggcgcccgctcttccttccgcttgcgctgtgagctgaggcggtgtatgtgcggcaataacatgtcaaccccgctgcccgccatcgtgcccgccgcccggaaggccaccgctgcggtgattttcctgcatggattgggagatactgggcacggatgggcagaagcctttgcaggtatcagaagttcacatatcaaatatatctgcccgcatgcgcctgttaggcctgttacattaaatatgaacgtggctatgccttcatggtttgatattattgggctttcaccagattcacaggaggatgaatctgggattaaacaggcagcagaaaatataaaagctttgattgatcaagaagtgaagaatggcattccttctaacagaattattttgggagggttttctcagggaggagctttatctttatatactgcccttaccacacagcagaaactggcaggtgtcactgcactcagttgctggcttccacttcgggcttcctttccacagggtcctatcggtggtgctaatagagatatttctattctccagtgccacggggattgtgaccctttggttcccctgatgtttggttctcttacggtggaaaaactaaaaacattggtgaatccagccaatgtgacctttaaaacctatgaaggtatgatgcacagttcgtgtcaacaggaaatgatggatgtcaagcaattcattgataaactcctacctccaattgattgacgtcactaagaggccttgtgtagaagtacaccagcatcattgtagtagagtgtaaaccttttcccatgcccagtcttcaaatttctaatgttttgcagtgttaaaatgttttgcaaatacatgccaataacacagatcaaataatatctcctcatgagaaatttatgatcttttaagtttctatacatgtattcttataagacgacccaggatctactatattagaatagatgaagcaggtagcttcttttttctcaaatgtaattcagcaaaataatacagtactgccaccagattttttattacatcatttgaaaattagcagtatgcttaatgaaaatttgttcaggtataaatgagcagttaagatataaacaatttatgcatgctgtgacttagtctatggatttattccaaaattgcttagtcaccatgcagtgtctgtatttttatatatgtgttcatatatacataatgattataatacataataagaatgaggtggtattacattattcctaataatagggataatgctgtttattgtcaagaaaaagtaaaatcgttctcttcaattaatggcccttttattttgggaccaggcttttattttccctgatattatttctatttaatactcttttctctcaagaaaaaaaaaaaagtttgttttttctttattgtccttcatagcaggccaagtattgcctctctgcaatagacagctactgtcaatacatgctgtaatttgacattctgggtcacagatataaggtatttaaaatctatttatgctttatagagaaaccagacattaaaacttcatgcactacttatttcgaattactgtaccttatccaaatttacacctagctattaggatcttcaacccaggtaacaggaataattctgtggtttcatttttctgtaaacaactgaaagaataattagatcatattctagtatgttctgaaatatctttaagactgatcttaaaaactaacttctaagatgatttcatcttctcatagtatagagtttactttgtacacgtttgaaaccaactactgtagaagatgaggaatctattgtaattttttgctttattttcatctgccagtggacttatttgaaattttcactttagtcaaattattttttgtattagtttttgatgcagacataaaaatagcaatcattttaaattgtcaaaatttccagattactggtaaaaattatttgaaaacaaacttatgggtaataaaggctagtcagaaccctataccataaagtgtagttaccatacagattaatatgtagcaaaaatgtatgcttgatatttctcaactgtgttaatttttctgctgtattccagctgaccaaaacaatattaagaatgcatctttataaatgggtgctaattgataatggaaataatttagtaatggactatacaggatgttaataatgaagccatatgtttatgtctggatttaaaaattttaaacaatcatttactatgtcatttttctttaccttgaagaacataaactgttatttcacttctacaaatcagcaagatattatttatggcaagaaatattccattgaaatattgtgctgtaacatgggaaagtgtaaatgtttttcatggtttctatcaatgtgaaataaaatttaattctgacttttctgtga

SEQ ID NO: 3300 - protein, 230 aa, Homosapiens; identical to SEQ ID NO: 467

SEQ ID NO: 3301 - DNA, 1539 bp, Homosapiens
cggcgggcgaggggcagggcagggcggaccctggacgcgcgggcgcgcgcggaaggtagcgcggggccgcgttggcgcgcacgcgcctgagcgtgcgcccggtggggccggccgggactcgccgctcgcacgcccttgggccgcggccgggcgcccgctcttccttccgcttgcgctgtgagctgaggcggtgtatgtgcggcaataacatgtcaaccccgctgcccgccatcgtgcccgccgcccggaaggccaccgctgcggtgattttcctgcatggattgggagatactgggcacggatgggcagaagcctttgcaggtatcagaagttcacatatcaaatatatctgcccgcatgcgcctgttaggcctgttacattaaatatgaacgtggctatgccttcatggtttgatattattgggctttcaccagattcacaggaggatgaatctgggattaaacaggcagcagaaaatataaaagctttgattgatcaagaagtgaagaatggcattccttctaacagaattattttgggagggttttctcagggaggagctttatctttatatactgcccttaccacacagcagaaactggcaggtgtcactgcactcagttgctggcttccacttcgggcttcctttccacagggtcctatcggtggtgctaatagagatatttctattctccagtgccacggggattgtgaccctttggttcccctgatgtttggttctcttacggtggaaaaactaaaaacattggtgaatccagccaatgtgacctttaaaacctatgaaggtatgatgcacagttcgtgtcaacaggaaatgatggatgtcaagcaattcattgataaactcctacctccaattgattgacgtcactaagaggccttgtgtagaagtacaccagcatcattgtagtagagtgtaaaccttttcccatgcccagtcttcaaatttctaatgttttgcagtgttaaaatgttttgcaaatacatgccaataacacagatcaaataatatctcctcatgagaaatttatgatcttttaagtttctatacatgtattcttataagacgacccaggatctactatattagaatagatgaagcaggtagcttcttttttctcaaatgtaattcagcaaaataatacagtactgccaccagattttttattacatcatttgaaaattagcagtatgcttaatgaaaatttgttcaggtataaatgagcagttaagatataaacaatttatgcatgctgtgacttagtctatggatttattccaaaattgcttagtcaccatgcagtgtctgtatttttatatatgtgttcatatatacataatgattataatacataataagaatgaggtggtattacattattcctaataatagggataatgctgtttattgtcaagaaaaagtaaaatcgttctcttcaattaatggcccttttattttgggaccaggcttttattttccctgatattatttctatttaatactcttttctctcaag

SEQ ID NO: 3302 - protein, 230 aa, Homosapiens; identical to SEQ ID NO: 467

SEQ ID NO: 3303 - DNA, 738 bp, Homosapiens
ggggccggccgggactcgccgctcgcacgcccttgggccgcggccgggcgcccgctcttccttccgcttgcgctgtgagctgaggcggtgtatgtgcggcaataacatgtcaaccccgctgcccgccatcgtgcccgccgcccggaaggccaccgctgcggtgattttcctgcatggattgggagatactgggtaggtaccattattattaatagtaacagtaatgaaactgggtcatgcaacttttgtttacgcgttcaaaggtttaatgtttaagggcgctaaaatggtattttaagattgccagttaatgtatcttacagtgcggtgattttatgttttgaaaaccctcagaattttccccttatcatcgtgagtttattgattttttaactctggtttctggaacatattaaaatttcaaattcctcattagttgctttgggtattggataccagagatccgtggaatgttagtagggacggtgtgcaattgagagctttccagagcagttaaaatttcagagcagattgaagagaagaactagttgattttgataagagaactagtggcaacataaggcatgcagcattctgaatagagggattagatgttcactctaatgagttgaaaggcaggggaggcaactcaaagatttatttggaggcttatcaaacaatttgttgtactaactacttatttttattttattttttgtttgtttgcttttttctttt

SEQ ID NO: 3304 - protein, 34 aa, Homosapiens
MCGNNMSTPLPAIVPAARKATAAVIFLHGLGDTG

SEQ ID NO: 3305 - DNA, 1139 bp, Homosapiens
cccgagaccacgtggcctccgagcagctcagggcgcccttgaaagttcttggatctgcgggttatggccggtcccttgcagggcggtggggcccgggccctggacctactccggggcctgccgcgtgtgagcctggccaacttaaagccgaatcccggctccaagaaaccggagagaagaccaagaggtcggagaagaggtagaaaatgtggcagaggccataaaggagaaaggcaaagaggaacccggccccgcttgggctttgagggaggccagactccattttacatccgaatcccaaaatacgggtttaacgaaggacatagtttcagacgccagtataagcctttgagtctcaatagactgcagtatcttattgatttgggtcgtgttgatcctagtcaacctattgacttaacccagcttgtcaatgggagaggtgtgaccatccagccacttaaaagggattatggtgtccagctggttgaggagggtgctgacacctttacggcaaaagttaatattgaagtacagttggcttcagaactagctattgctgccattgaaaaaaatggtggtgttgttactacagccttctatgatccaagaagtctggacattgtatgcaaacctgttccattctttcttcgtggacaacccattccaaaaagaatgcttccaccagaagaactggtaccatattacactgatgcaaagaaccgtgggtacctggcggatcctgccaaatttcctgaagcacgacttgaactcgccaggaagtatggttatatcttacctgatatcactaaagatgaactcttcaaaatgctctgtactaggaaggatccaaggcagattttctttggtcttgctccaggatgggtggtgaatatggccgataagaaaatcctaaaacctacagatgaaaatctccttaagtattatacctcatgaattcccgtccaaggaagcagagttgttaaagagtactggaataggggctgaaggatctatattcccttattgcattttccttatgtataattttccagatggtgatgttacttttcagtgtactcatatgtctcattttcatctaaaattaaatggcaggaaacaaggactgcatagagaaactg

SEQ ID NO: 3306 - protein, 296 aa, Homosapiens [sequence omitted]

SEQ ID NO: 3307 - DNA, 501 bp, Homosapiens; identical to SEQ ID NO: 470

SEQ ID NO: 3308 - protein, 166 aa, Homosapiens; identical to SEQ ID NO: 471

SEQ ID NO: 3309 - DNA, 406 bp, Homosapiens
gcctatctgtttgcaagtctgcactgtttgagaacctcttgaaagccccacagagcttgttggtgtcaccctggttctgggcacactccaaaaactgtttgatctcatggaaacaaggctgctgctgctgtgctggccaggttccctgatgctgctgatggagtctcactttgtcaccaagctggagtgtggtggcatgatcttggctcactgcaacctcccaggttcaagctattctcctgcctcagcctcccgagtagctgggactacaggcgcacgccaccacacccagctaatttttgtatttttagtagagacagggtttcaccatgttcgccagggtggtctctatttcttgacctcgtgatttgcccaccttggccttccaaagtgctgggattacagg

SEQ ID NO: 3310 - protein, 86 aa, Homosapiens
METRLLLLCWPGSLMLLMESHFVTKLECGGMILAHCNLPGSSYSPASASRVAGTTGARHHTQLIFVFLVETGFHHVRQGGLYFLTS

SEQ ID NO: 3311 - DNA, 6128 bp, Homosapiens
ggagagggctgcgcgcttctcgccaagcaagcgggaggcgcactggggccgccgccgttcccgcgctcctccctctcctctgcacccactgtcacgctacccgcccgcgggggagcctcgagagcctccaggtgaattgaaagtcgtttccgggggaggacggagagggtgctgcagtcctggcatgccctgaaactgcaagtcgggcagaaacgacccggcggaggagcagggcgcgcagcgccctgcgcagcatccccgggctgccagaagaggccaccactcggctggcagccgcgagcggcggccgaacctcggccccagactcgggcccccggcacgctcgcccgggagataccccttccccctcttgcgcatttcgcagctgcgctggtgtggggcatgagagcgaggtggctccaggtctccgcggagcagctgccagtgggagagcgaggagaggcgagggggcggcagcctcggcccgaaacggagatcctggggtcctaaatttgtggccgattgcactgtgtcctggagacggagtggaaccacagcccagagcccctgggaatcatccctgaaagactgcattacttctccatggagtcttcctcctcctgcttattttctttttggaacaaggcaaaggcaatctgcatgtaacatcaccagaagatgcagaatgccgcagaaccaaggaacgcctttctaatggaaacagtcgtggttcagtttccaagtcttcccgcaatatcccaaggagacacaccctaggggggccccgaagttccaaggaaatactgggaatgcaaacatctgagatggatcggaagagagaagcgttcctagaacatctgaagcagaagtacccccaccacgcctctgcaatcatgggtcaccaagagaggctgagagaccagacaaggagccccaaactgtctcacagtcctcaaccacccagtctgggtgacccggtcgagcatttatcagagacgtccgctgattctttggaagccatgtctgagggggatgctccaacccctttttccagaggcagccggactcgtgcgagccttcctgtggtgaggtcaaccaaccagacgaaagaaagatctctgggggttctctatctccagtatggagatgaaaccaagcagctcaggatgccgaatgaaatcacaagtgcagacacaatccgtgctctcttcgtaagtgcctttccacagcagctcaccatgaaaatgctggaatcgcccagtgtcgccatttacatcaaagatgaaagcagaaatgtctattatgaattaaatgatgtaaggaacattcaagacagatcactcctcaaagtgtacaacaaggatcctgcacatgcgtttaatcacacaccaaaaactatgaatggagacatgaggatgcagagagaacttgtttatgcaagaggagatggccctggggcccctcgccccggatctactgctcatccaccccatgcgattccaaattccccaccgtctactccagtgccccattccatgcccccctccccgtccagaattccttatgggggcacccgctccatggttgttcctggcaatgccaccatccccagggacagaatctccagcctgccagtctccagacccatctctccaagcccaagcgccattttagaaagaagagatgtcaagcctgatgaagacatgagtggcaaaaacattgcaatgtacagaaatgagggtttctatgctgatccttacctttatcacgagggacggatgagcatagcctcatcccatggtggacacccactggatgtccccgaccacatcattgcatatcaccgcaccgccatccggtcagcgagtgcttattgtaacccctcaatgcaagcggaaatgcatatggaacaatcactgtacagacagaaatcaaggaaatatccggatagccatttgcctacactgggctccaaaacaccccctgcctctcctcacagagtcagtgacctgaggatgatagacatgcacgctcactataatgcccacggcccccctcacaccatgcagccagaccgggcctctccgagccgccaggcctttaaaaaggagccaggcaccttggtgtatatagaaaagccacggagcgctgcaggattatccagccttgtagacctcggccctcctctaatggagaagcaagtttttgcctacagcacggcgacaatacccaaagacagagagaccagagagaggatgcaagccatggagaaacagattgccagtttaactggccttgttcagtctgcgctttttaaagggcccattacaagttatagcaaagatgcgtctagcgagaaaatgatgaaaaccacagccaacaggaaccacacagatagtgcaggaacgccccatgtgtctggtgggaagatgctcagtgctctggagtccacggtgcctcccagccagcctccacctgtgggcacctcagccatccacatgagcctgcttgagatgaggcggagcgtggcggaactcaggctccagctccagcagatgcggcagctccagctgcagaaccaggagttgctgagggcaatgatgaagaaggccgagctggaaatcagtggcaaagtgatggaaacaatgaagagactggaggatcccgtgcagcgacagcgcgtcctagtggagcaagagagacaaaaatatcttcatgaggaagagaagatcgtcaagaagttgtgcgagttggaagactttgttgaagacttgaagaaggactccacggcagccagccgattggttactctgaaagacgtggaagacggggctttcctcctgcgtcaagtgggagaggctgtagctaccctgaaaggagaatttccaaccttacaaaacaagatgcgagccatcctgcgcatagaagtggaggccgtgcggtttctgaaggaggagccacacaagctggacagtctcctgaagcgtgtgcgcagcatgacagacgtcctgaccatgctgcggagacatgtcactgatgggctcctgaaaggcacggacgcagcccaagccgcacagtacatggctatggaaaaggccacagccgcagaagtcctgaagagtcaggaggaggcagcccacacctccggccagcccttccacagcacaggtgcccctggcgatgcgaagtcggaagtggtgcctttgtccggcatgatggttcgccacgcgcagagctcccctgtggtcatccagccctcccagcactccgtggccctgctgaaccctgctcagaacttgcctcacgtggccagctccccagccgtcccccaggaagcaacctccactctgcagatgtcgcaggctccgcagtccccacagatacccatgaatgggtctgccatgcagagcttgttcattgaagaaatccacagtgtgagtgccaagaacagggcagtgtctatcgagaaagcagaaaagaaatgggaggaaaaaaggcaaaatctggatcactataatgggaaagagtttgagaagctcctagaagaagctcaggccaatatcatgaagtcaataccaaatctggagatgccgccagccacaggcccactgccaaggggagatgccccagtggacaaggtggaactttcagaagattctccaaattcggaacaggacttggaaaagctggggggaaagtcgccccctcctcctccgccacctcctcgtcgaagctacctgccaggatcgggactcaccaccacgaggtcaggcgatgtggtctacaccggcagaaaggagaacatcaccgctaaggcaagcagtgaagatgctggaccaagcccacagaccagagctacaaaatatccagcagaggagcctgcttcagcctggaccccatccccaccgcctgtcaccacctcctcctcaaaggatgaggaggaagaagaagaagaaggagacaaaataatggcagaactccagggctccagcggggccccacagacgagcaggatgcctgtccccatgagtgccaagaacagacccggaaccctggacaaacccggcaagcagtccaaactgcaggatccccgccaatatcgtcaggctaatggaagtgctaagaaatctggtggggactttaagcctacttccccctccttacctgcttctaagattccagccctttctcccagctctgggaaaagcagttctctgccctcttctagtggtgacagctctaacctccctaatccacctgctactaaaccatcgattgcttctaaccctctcagcccccaaacaggaccacctgctcactctgcctccctcatcccttctgtctctaatggctctttgaagtttcagagcctcactcatacaggtaaaggtcaccatctttcattctcaccgcagagtcaaaatggccgagcaccccctcctttgtcattttcctcctcccctccttctcctgcctcctccgtctcactgaatcaaggtgccaagggcaccaggaccatccatactcccagcctcaccagctacaaggcacagaatggaagttcaagcaaagccaccccatccacagcaaaagaaacctcttaaaggtcaaatcctattaggcacaagtcggagttacatttaaaaaaaattaacagtctacaacaactgttttcacaagagaatgtaacatattgctgtatcgtttgaggcttaatgctaaatatgtgctaaatactggattaatagatttcagtaaagctcgttcgttttgtttggttttctttttacctagttgctatagtgtctacagtctatactcaatacctataaaatgcagtaagcatgtgttacagaaagaggttctggtgggagagaaaggtgcgtgtgagacaggagaattgtcttaagcatataaaacatgtatgattccagaattttagtatgttttgtataaaactatttttcattacggagactagaagtgaacagagaattacacaagtgtgactatacaaattgtaaaacagatactataatatttccttttattttagtgttatttagctttattacagatttctatttttgtcaaaacttcatggttcctttcaagatcttttttgccaaaacattttgatactatagcattgtacatttgaaagtagtgttctagactataaaaccaatgaacttctacatgagccctacagacaggcatgtgtagaaggcaatttatcaaacctattgcactgccatgaaaagtgtgtataataatttgctagcccaagcaagctagttttctttgcttgcttcttttctttcttttttccttccttttttttttttttttcttttttaacatgttgagattctctagttgttttctttggcgtatctaaccccttcttttgttttctgagacctggtaacccacgctcttgcattgtggattttaaaatgtatactctgtacggttctgtaaaccgaaaaacttttgtaaatatataaatatacatagacataaaaatactgtatgtgacagcacatagagtagttttcccacaccaaagttaatttttatgcatgctttaaaagtatatatcgggaccggcagaaatggaagtatccatacatttttaaaaagcaacaagtttgcacagctagagtgtttttgtaaataaatgtatttgtataacacagtcatgtaatatacagaactataagcagagactttgcaaaactaaataaagggctgcatgcttattattttttgtaccttgtcactataactacttcctagtcaaagaacgaaatgtaactgttaccgagttaaatgtttttccgctttgagggatgtaaccacatccactcagaggacactacttttctgaaagctctggggtgactaatgatgagttcctaataaattaattgcaagtgtggtgccttggatgtggcctgttggctcgctttcttctctgtggcttatcaaggtgtagatgacagaaagcaaacctggatacagagtttccaccctcagttcctggaggggctcttattattttctctctttttaaaaaacttccagtagaagtaaagtggaaataaaatgtctttatcacttgg

SEQ ID NO: 3312 - protein, 1264 aa, Homosapiens
MQTSEMDRKREAFLEHLKQKYPHHASAIMGHQERLRDQTRSPKLSHSPQPPSLGDPVEHLSETSADSLEAMSEGDAPTPFSRGSRTRASLPVVRSTNQTKERSLGVLYLQYGDETKQLRMPNEITSADTIRALFVSAFPQQLTMKMLESPSVAIYIKDESRNVYYELNDVRNIQDRSLLKVYNKDPAHAFNHTPKTMNGDMRMQRELVYARGDGPGAPRPGSTAHPPHAIPNSPPSTPVPHSMPPSPSRIPYGGTRSMVVPGNATIPRDRISSLPVSRPISPSPSAILERRDVKPDEDMSGKNIAMYRNEGFYADPYLYHEGRMSIASSHGGHPLDVPDHIIAYHRTAIRSASAYCNPSMQAEMHMEQSLYRQKSRKYPDSHLPTLGSKTPPASPHRVSDLRMIDMHAHYNAHGPPHTMQPDRASPSRQAFKKEPGTLVYIEKPRSAAGLSSLVDLGPPLMEKQVFAYSTATIPKDRETRERMQAMEKQIASLTGLVQSALFKGPITSYSKDASSEKMMKTTANRNHTDSAGTPHVSGGKMLSALESTVPPSQPPPVGTSAIHMSLLEMRRSVAELRLQLQQMRQLQLQNQELLRAMMKKAELEISGKVMETMKRLEDPVQRQRVLVEQERQKYLHEEEKIVKKLCELEDFVEDLKKDSTAASRLVTLKDVEDGAFLLRQVGEAVATLKGEFPTLQNKMRAILRIEVEAVRFLKEEPHKLDSLLKRVRSMTDVLTMLRRHVTDGLLKGTDAAQAAQYMAMEKATAAEVLKSQEEAAHTSGQPFHSTGAPGDAKSEVVPLSGMMVRHAQSSPVVIQPSQHSVALLNPAQNLPHVASSPAVPQEATSTLQMSQAPQSPQIPMNGSAMQSLFIEEIHSVSAKNRAVSIEKAEKKWEEKRQNLDHYNGKEFEKLLEEAQANIMKSIPNLEMPPATGPLPRGDAPVDKVELSEDSPNSEQDLEKLGGKSPPPPPPPPRRSYLPGSGLTTTRSGDVVYTGRKENITAKASSEDAGPSPQTRATKYPAEEPASAWTPSPPPVTTSSSKDEEEEEEEGDKIMAELQGSSGAPQTSRMPVPMSAKNRPGTLDKPGKQSKLQDPRQYRQANGSAKKSGGDFKPTSPSLPASKIPALSPSSGKSSSLPSSSGDSSNLPNPPATKPSIASNPLSPQTGPPAHSASLIPSVSNGSLKFQSLTHTGKGHHLSFSPQSQNGRAPPPLSFSSSPPSPASSVSLNQGAKGTRTIHTPSLTSYKAQNGSSSKATPSTAKETS

SEQ ID NO: 3313 - DNA, 543 bp, Homosapiens
ggcgcactggggccgccgccgttcccgcgctcctccctctcctctgcacccactgtcacgctacccgcccgcgggggagcctcgagagcctccaggtgaattgaaagtcgtttccgggggaggacggagagggtgctgcagtcctggcatgccctgaaactgcaagtcgggcagaaacgacccggcggaggagcagggcgcgcagcgccctgcgcagcatccccgggctgccagaagaggccaccactcggctggcagccgcgagcggcggccgaacctcggccccagactcgggcccccggcacgctcgcccgggagataccccttccccctcttgcgcatttcgcagctgcgctggtgtggggcatgagagcgaggtggctccaggtctccgcggagcagctgccagtgggagagcgaggagaggcgagggggcggcagcctcggcccgaagactgtttccttgggccctcggtttaatgctgtccaccacccatgagcaaaactctttctatggcaagaaacatcgaacacctgtagtgg

SEQ ID NO: 3314 - protein, 37 aa, Homosapiens
MRARWLQVSAEQLPVGERGEARGRQPRPEDCFLGPSV

SEQ ID NO: 3315 - DNA, 622 bp, Homosapiens
ggtttcactttgttgcccagcctggagtgcagtcacgtgatctgggctcactgcagcctcgacttcccaggttcaagcaatcctcccacctcagcctcccgagtactacccaggtcaagctttggagaaatgggacagaaagtcaaggagagttttaactttaaactcagcagccttttttgaaggtgtcgctgtggaagccaagatcatgtctgggattgaccctaaggttgatggaaggtttctgagcatagttcagcatcatcccaccagggggcagtaggaagctgtgtgcacaaaccatttcatcttgaccaaagtcaaatccgaaccatacaacttttctgtccttgaaccggagcttcattaaaacccttgggcaacatttcaaactttaaaactgtagaaacttttagtgaatatggaagcattgttaagcgtaggttggattttctcttcataaccaatacaggattcaattttgctgggagcatgtcatcatttattttcttgtctgaaatggctgtttttcactggtttcaagatctgaaatatgaatgcattatttacaattatgtaatacccttaccctgagctgtaaaataaaaattaaaaaaacttg

SEQ ID NO: 3316 - protein, 33 aa, Homosapiens
MSSFIFLSEMAVFHWFQDLKYECIIYNYVIPLP

SEQ ID NO: 3317 - DNA, 1278 bp, Homosapiens
gatggcggctgctgtaggacggttgctccgagcgtcgcacctttgtgtgtcctacagaaattgttgcttttagtgacaaagctaacgaatttcacgacgtgaactgtgaagttgtcgcagtctcagtggattcccactttagccatcttgcctggataaatacaccaagaaagaatggtggtttgggccacatgaacatcgcactcttgtcagacttaactaagcagatttcccgagactacggtgtgctgttagaaggttctggtcttgcactaagaggtctcttcataattgaccccaatggagtcatcaagcatttgagcgtcaacgatctcccagtgggccgaagcgtggaagaaaccctccgcttggtgaaggcgttccagtatgtagaaacacatggagaagtctgcccagcgaactggacaccggattctcctacgatcaagccaagtccagctgcttccaaagagtactttcagaaggtaaatcagtagatcacccatgtgtatctgcaccttctcaactgagagaagaaccacagttgaaacctgcttttatcattttcaagatggttatttgtagaaggcaaggaaccaattatgcttgtattcataagtattactctaaatgttttgtttttgtaattctggctaagaccttttaaacatggttagttgctagtacaaggaatcctttattggtaacatcttggtggctggctagctagtttctacagaacataatttgcctctatagaaggctattcttagatcatgtctcaatggaaacactcttctttcttagccttacttgaatcttgcctataataaagtagagcaacacacattgaaagcttctgatcaacggtcctgaaattttcatcttgaatgtctttgtattaaactgaattttcttttaagctaacaaagatcataattttcaatgattagccgtgtaactcctgcaatgaatgtttatgtgattgaagcaaatgtgaatcgtattattttaaaaagtggcagagtgacttaactgatcatgcatgatccctcatccctgaaattgagtttatgtagtcattttacttattttattcattagctaactttgtctatgtatatttctagatattgattagtgtaatcgattataaaggatatttatcaaatccagggattgcattttgaaattataattattttctttgctgaagtattcattgtaaaacatacaaaataaacatattttaaaacatttgcattttaccaccagtaa

SEQ ID NO: 3318 - protein, 101 aa, Homosapiens
MNIALLSDLTKQISRDYGVLLEGSGLALRGLFIIDPNGVIKHLSVNDLPVGRSVEETLRLVKAFQYVETHGEVCPANWTPDSPTIKPSPAASKEYFQKVNQ

SEQ ID NO: 3319 - DNA, 1042 bp, Homosapiens
gtggcgcccgagtgcactgaagatggcggctgctgtaggacggttgctccgagcgtcggttgcccgacattcatcaagcatttgagcgtcaacgatctcccagtgggccgaagcgtggaagaaaccctccgcttggtgaaggcgttccagtatgtagaaacacatggagaagtctgcccagcgaactggacaccggattctcctacgatcaagccaagtccagctgcttccaaagagtactttcagaaggtaaatcagtagatcacccatgtgtatctgcaccttctcaactgagagaagaaccacagttgaaacctgcttttatcattttcaagatggttatttgtagaaggcaaggaaccaattatgcttgtattcataagtattactctaaatgttttgtttttgtaattctggctaagaccttttaaacatggttagttgctagtacaaggaatcctttattggtaacatcttggtggctggctagctagtttctacagaacataatttgcctctatagaaggctattcttagatcatgtctcaatggaaacactcttctttcttagccttacttgaatcttgcctataataaagtagagcaacacacattgaaagcttctgatcaacggtcctgaaattttcatcttgaatgtctttgtattaaactgaattttcttttaagctaacaaagatcataattttcaatgattagccgtgtaactcctgcaatgaatgtttatgtgattgaagcaaatgtgaatcgtattattttaaaaagtggcagagtgacttaactgatcatgcatgatccctcatccctgaaattgagtttatgtagtcattttacttattttattcattagctaactttgtctatgtatatttctagatattgattagtgtaatcgattataaaggatatttatcaaatccagggattgcattttgaaattataattattttctttgctgaagtattcattgtaaaacatacaaaataaacatattttaaaacatttgcattttaccaccagtaa

SEQ ID NO: 3320 - protein, 31 aa, Homosapiens
MVICRRQGTNYACIHKYYSKCFVFVILAKTF

SEQ ID NO: 3321 - DNA, 1056 bp, Homosapiens
cccgccccgtggcgcccgagtgcactgaagatggcggctgctgtaggacggttgctccgagcgtcggttgcccgacatgtgagtgccattccttggggcatttctgccactgcagccctcaggcctgctgcatgtggaagaacgagcttgacaaatttattgtgttctggttccagtcaagcaaaattattcagcaccagttcctcatgccatgcacctgctgtcacccagcatgcaccctattttaagggtacagccgttgtcaatggagagttcaaagacctaagccttgatgactttaaggggaaatatttggtgcttttcttctatcctttggatttcacctttgtgtgtcctacagaaattgttgcttttagtgacaaagctaacgaatttcacgacgtgaactgtgaagttgtcgcagtctcagtggattaccttttaaacatggttagttgctagtacaaggaatcctttattggtaacatcttggtggctggctagctagtttctacagaacataatttgcctctatagaaggctattcttagatcatgtctcaatggaaacactcttctttcttagccttacttgaatcttgcctataataaagtagagcaacacacattgaaagcttctgatcaacggtcctgaaattttcatcttgaatgtctttgtattaaactgaattttcttttaagctaacaaagatcataattttcaatgattagccgtgtaactcctgcaatgaatgtttatgtgattgaagcaaatgtgaatcgtattattttaaaaagtggcagagtgacttaactgatcatgcatgatccctcatccctgaaattgagtttatgtagtcattttacttattttattcattagctaactttgtctatgtatatttctagatattgattagtgtaatcgattataaaggatatttatcaaatccagggattgcattttgaaattataattattttctttgctgaagtattcattgtaaaacatacaaaataaacatattttaaaacatttgcattttaccaccagtaa

SEQ ID NO: 3322 - protein, 143 aa, Homosapiens
MAAAVGRLLRASVARHVSAIPWGISATAALRPAACGRTSLTNLLCSGSSQAKLFSTSSSCHAPAVTQHAPYFKGTAVVNGEFKDLSLDDFKGKYLVLFFYPLDFTFVCPTEIVAFSDKANEFHDVNCEVVAVSVDYLLNMVSC

SEQ ID NO: 3323 - DNA, 1231 bp, Homosapiens
cccgccccgtggcgcccgagtgcactgaagatggcggctgctgtaggacggttgctccgagcgtcggttgcccgacatgtgagtgccattccttggggcatttctgccactgcagccctcaggcctgctgcatgtggaagaacgagcttgacaaatttattgtgttctggttccagtcaagcaaaattattcagcaccagttcctcatgccatgcacctgctgtcacccagcatgcaccctattttaagggtacagccgttgtcaatggagagttcaaagacctaagccttgatgactttaaggggaaatatttggtgcttttcttctatcctttggatttcacctttgtgtgtcctacagaaattgttgcttttagtgacaaagctaacgaatttcacgacgtgaactgtgaagttgtcgcagtctcagtggattcccactttagccatcttgcctggataaatacaccaagaaagaatggtggtttgggccacatgaacatcgcactcttatcattttcaagatggttatttgtagaaggcaaggaaccaattatgcttgtattcataagtattactctaaatgttttgtttttgtaattctggctaagaccttttaaacatggttagttgctagtacaaggaatcctttattggtaacatcttggtggctggctagctagtttctacagaacataatttgcctctatagaaggctattcttagatcatgtctcaatggaaacactcttctttcttagccttacttgaatcttgcctataataaagtagagcaacacacattgaaagcttctgatcaacggtcctgaaattttcatcttgaatgtctttgtattaaactgaattttcttttaagctaacaaagatcataattttcaatgattagccgtgtaactcctgcaatgaatgtttatgtgattgaagcaaatgtgaatcgtattattttaaaaagtggcagagtgacttaactgatcatgcatgatccctcatccctgaaattgagtttatgtagtcattttacttattttattcattagctaactttgtctatgtatatttctagatattgattagtgtaatcgattataaaggatatttatcaaatccagggattgcattttgaaattataattattttctttgctgaagtattcattgtaaaacatacaaaataaacatattttaaaacatttgcattttaccaccagtaa

SEQ ID NO: 3324 - protein, 189 aa, Homosapiens
MAAAVGRLLRASVARHVSAIPWGISATAALRPAACGRTSLTNLLCSGSSQAKLFSTSSSCHAPAVTQHAPYFKGTAVVNGEFKDLSLDDFKGKYLVLFFYPLDFTFVCPTEIVAFSDKANEFHDVNCEVVAVSVDSHFSHLAWINTPRKNGGLGHMNIALLSFSRWLFVEGKEPIMLVFISITLNVLFL

SEQ ID NO: 3325 - DNA, 1473 bp, Homosapiens
cccgccccgtggcgcccgagtgcactgaagatggcggctgctgtaggacggttgctccgagcgtcggttgcccgacatgtgagtgccattccttggggcatttctgccactgcagccctcaggcctgctgcatgtggaagaacgagcttgacaaatttattgtgttctggttccagtcaagcaaaattattcagcaccagttcctcatgccatgcacctgctgtcacccagcatgcaccctattttaagggtacagccgttgtcaatggagagttcaaagacctaagccttgatgactttaaggggaaatatttggtgcttttcttctatcctttggatttcacctttgtgtgtcctacagaaattgttgcttttagtgacaaagctaacgaatttcacgacgtgaactgtgaagttgtcgcagtctcagtggattcccactttagccatcttgttctggtcttgcactaagaggtctcttcataattgaccccaatggagtcatcaagcatttgagcgtcaacgatctcccagtgggccgaagcgtggaagaaaccctccgcttggtgaaggcgttccagtatgtagaaacacatggagaagtctgcccagcgaactggacaccggattctcctacgatcaagccaagtccagctgcttccaaagagtactttcagaaggtaaatcagtagatcacccatgtgtatctgcaccttctcaactgagagaagaaccacagttgaaacctgcttttatcattttcaagatggttatttgtagaaggcaaggaaccaattatgcttgtattcataagtattactctaaatgttttgtttttgtaattctggctaagaccttttaaacatggttagttgctagtacaaggaatcctttattggtaacatcttggtggctggctagctagtttctacagaacataatttgcctctatagaaggctattcttagatcatgtctcaatggaaacactcttctttcttagccttacttgaatcttgcctataataaagtagagcaacacacattgaaagcttctgatcaacggtcctgaaattttcatcttgaatgtctttgtattaaactgaattttcttttaagctaacaaagatcataattttcaatgattagccgtgtaactcctgcaatgaatgtttatgtgattgaagcaaatgtgaatcgtattattttaaaaagtggcagagtgacttaactgatcatgcatgatccctcatccctgaaattgagtttatgtagtcattttacttattttattcattagctaactttgtctatgtatatttctagatattgattagtgtaatcgattataaaggatatttatcaaatccagggattgcattttgaaattataattattttctttgctgaagtattcattgtaaaacatacaaaataaacatattttaaaacatttgcattttaccaccagtaa

SEQ ID NO: 3326 - protein, 146 aa, Homosapiens
MAAAVGRLLRASVARHVSAIPWGISATAALRPAACGRTSLTNLLCSGSSQAKLFSTSSSCHAPAVTQHAPYFKGTAVVNGEFKDLSLDDFKGKYLVLFFYPLDFTFVCPTEIVAFSDKANEFHDVNCEVVAVSVDSHFSHLVLVLH

SEQ ID NO: 3327 - DNA, 1423 bp, Homosapiens
gtctctgcccgccccgtggcgcccgagtgcactgaagatggcggctgctgtaggacggttgctccgagcgtcggttgcccgacatgtgagtgccattccttggggcatttctgccactgcagccctcaggcctgctgcatgtggaagaacgagcttgacaaatttattgtgttctggttccagtcaagcaaaattattcagcaccagttcctcatgccatgcacctgctgtcacccagcatgcaccctattttaagggtacagccgttgtcaatggagagttcaaagacctaagccttgatgactttaaggggaaatatttggtgcttttcttctatcctttggatttcacctttgtgtgtcctacagaaattgttgcttttagtgacaaagctaacgaatttcacgacgtgaactgtgaagttgtcgcagtctcagtggattcccactttagccatcttgcctggataaatacaccaagaaagaatggtggtttgggccacatgaacatcgcactcttgtcagacttaactaagcagatttcccgagactacggtgtgctgttagaaggttctggtcttgcactaagatcaagccaagtccagctgcttccaaagagtactttcagaaggtaaatcagtagatcacccatgtgtatctgcaccttctcaactgagagaagaaccacagttgaaacctgcttttatcattttcaagatggttatttgtagaaggcaaggaaccaattatgcttgtattcataagtattactctaaatgttttgtttttgtaattctggctaagaccttttaaacatggttagttgctagtacaaggaatcctttattggtaacatcttggtggctggctagctagtttctacagaacataatttgcctctatagaaggctattcttagatcatgtctcaatggaaacactcttctttcttagccttacttgaatcttgcctataataaagtagagcaacacacattgaaagcttctgatcaacggtcctgaaattttcatcttgaatgtctttgtattaaactgaattttcttttaagctaacaaagatcataattttcaatgattagccgtgtaactcctgcaatgaatgtttatgtgattgaagcaaatgtgaatcgtattattttaaaaagtggcagagtgacttaactgatcatgcatgatccctcatccctgaaattgagtttatgtagtcattttacttattttattcattagctaactttgtctatgtatatttctagatattgattagtgtaatcgattataaaggatatttatcaaatccagggattgcattttgaaattataattattttctttgctgaagtattcattgtaaaacatacaaaataaacatattttaaaacatttgcattttaccaccagtaa

SEQ ID NO: 3328 - protein, 198 aa, Homosapiens
MAAAVGRLLRASVARHVSAIPWGISATAALRPAACGRTSLTNLLCSGSSQAKLFSTSSSCHAPAVTQHAPYFKGTAVVNGEFKDLSLDDFKGKYLVLFFYPLDFTFVCPTEIVAFSDKANEFHDVNCEVVAVSVDSHFSHLAWINTPRKNGGLGHMNIALLSDLTKQISRDYGVLLEGSGLALRSSQVQLLPKSTFRR

SEQ ID NO: 3329 - DNA, 1595 bp, Homosapiens
ccctgcgtctctgcccgccccgtggcgcccgagtgcactgaagatggcggctgctgtaggacggttgctccgagcgtcggttgcccgacatgtgagtgccattccttggggcatttctgccactgcagccctcaggcctgctgcatgtggaagaacgagcttgacaaatttattgtgttctggttccagtcaagcaaaattattcagcaccagttcctcatgccatgcacctgctgtcacccagcatgcaccctattttaagggtacagccgttgtcaatggagagttcaaagacctaagccttgatgactttaaggggaaatatttggtgcttttcttctatcctttggatttcacctttgtgtgtcctacagaaattgttgcttttagtgacaaagctaacgaatttcacgacgtgaactgtgaagttgtcgcagtctcagtggattcccactttagccatcttgcctggataaatacaccaagaaagaatggtggtttgggccacatgaacatcgcactcttgtcagacttaactaagcagatttcccgagactacggtgtgctgttagaaggttctggtcttgcactaagaggtctcttcataattgaccccaatggagtcatcaagcatttgagcgtcaacgatctcccagtgggccgaagcgtggaagaaaccctccgcttggtgaaggcgttccagtatgtagaaacacatggagaagtctgcccagcgaactggacaccggattctcctacgatcaagccaagtccagctgcttccaaagagtactttcagaaggtaaatcagtagatcacccatgtgtatctgcaccttctcaactgagagaagaaccacagttgaaacctgcttttatcattttcaagatggttatttgtagaaggcaaggaaccaattatgcttgtattcataagtattactctaaatgttttgtttttgtaattctggctaagaccttttaaacatggttagttgctagtacaaggaatcctttattggtaacatcttggtggctggctagctagtttctacagaacataatttgcctctatagaaggctattcttagatcatgtctcaatggaaacactcttctttcttagccttacttgaatcttgcctataataaagtagagcaacacacattgaaagcttctgatcaacggtcctgaaattttcatcttgaatgtctttgtattaaactgaattttcttttaagctaacaaagatcataattttcaatgattagccgtgtaactcctgcaatgaatgtttatgtgattgaagcaaatgtgaatcgtattattttaaaaagtggcagagtgacttaactgatcatgcatgatccctcatccctgaaattgagtttatgtagtcattttacttattttattcattagctaactttgtctatgtatatttctagatattgattagtgtaatcgattataaaggatatttatcaaatccagggattgcattttgaaattataattattttctttgctgaagtattcattgtaaaacatacaaaataaacatattttaaaacatttgcattttaccaccagtaa

SEQ ID NO: 3330 - protein, 256 aa, Homosapiens; identical to SEQ ID NO: 473

SEQ ID NO: 3331 - DNA, 852 bp, Homosapiens
gatggcggctgctgtaggacggttgctccgagcgtcgcacctttgtgtgtcctacagaaattgttgcttttagtgacaaagctaacgaatttcacgacgtgaactgtgaagttgtcgcagtctcagtggattcccactttagccatcttgcctggataaatacaccaagaaagaatggtggtttgggccacatgaacatcgcactcttgtcagacttaactaagcagatttcccgagactacggtgtgctgttagaaggttctggtcttgcactaagaggtctcttcataattgaccccaatggagtcatcaagcatttgagcgtcaacgatctcccagtgggccgaagcgtggaagaaaccctccgcttggtgaaggcgttccagtatgtagaaacacatggagaagtctgcccagcgaactggacaccggattctcctacgatcaagccaagtccagctgcttccaaagagtactttcagaaggtaaatcagtagatcacccatgtgtatctgcaccttctcaactgagagaagaaccacagttgaaacctgcttttatcattttcaagatggttatttgtagaaggcaaggaaccaattatgcttgtattcataagtattactctaaatgttttgtttttgtaattctggctaagaccttttaaacatggttagttgctagtacaaggaatcctttattggtaacatcttggtggctggctagctagtttctacagaacataatttgcctctatagaaggctattcttagatcatgtctcaatggaaacactcttctttcttagccttacttgaatcttgcctataataaagtagagcaacacacattg

SEQ ID NO: 3332 - protein, 101 aa, Homosapiens; identical to SEQ ID NO: 3318

SEQ ID NO: 3333 - DNA, 1047 bp, Homosapiens
cccgccccgtggcgcccgagtgcactgaagatggcggctgctgtaggacggttgctccgagcgtcggttgcccgacatgtgagtgccattccttggggcatttctgccactgcagccctcaggcctgctgcatgtggaagaacgagcttgacaaatttattgtgttctggttccagtcaagcaaaattattcagcaccagttcctcatgccatgcacctgctgtcacccagcatgcaccctattttaagggtacagccgttgtcaatggagagttcaaagacctaagccttgatgactttaaggggaaatatttggtgcttttcttctatcctttggatttcacctttgtgtgtcctacagaaattgttgcttttagtgacaaagctaacgaatttcacgacgtgaactgtgaagttgtcgcagtctcagtggattcccactttagccatcttgttctggtcttgcactaagaggtctcttcataattgaccccaatggagtcatcaagcatttgagcgtcaacgatctcccagtgggccgaagcgtggaagaaaccctccgcttggtgaaggcgttccagtatgtagaaacacatggagaagtctgcccagcgaactggacaccggattctcctacgatcaagccaagtccagctgcttccaaagagtactttcagaaggtaaatcagtagatcacccatgtgtatctgcaccttctcaactgagagaagaaccacagttgaaacctgcttttatcattttcaagatggttatttgtagaaggcaaggaaccaattatgcttgtattcataagtattactctaaatgttttgtttttgtaattctggctaagaccttttaaacatggttagttgctagtacaaggaatcctttattggtaacatcttggtggctggctagctagtttctacagaacataatttgcctctatagaaggctattcttagatcatgtctcaatggaaacactcttctttcttagccttacttgaatcttgcctataataaagtagagcaacacacattg

SEQ ID NO: 3334 - protein, 146 aa, Homosapiens; identical to SEQ ID NO: 3326

SEQ ID NO: 3335 - DNA, 1166 bp, Homosapiens
tgcgtctctgcccgccccgtggcgcccgagtgcactgaagatggcggctgctgtaggacggttgctccgagcgtcggttgcccgacatgtgagtgccattccttggggcatttctgccactgcagccctcaggcctgctgcatgtggaagaacgagcttgacaaatttattgtgttctggttccagtcaagcaaaattattcagcaccagttcctcatgccatgcacctgctgtcacccagcatgcaccctattttaagggtacagccgttgtcaatggagagttcaaagacctaagccttgatgactttaaggggaaatatttggtgcttttcttctatcctttggatttcacctttgtgtgtcctacagaaattgttgcttttagtgacaaagctaacgaatttcacgacgtgaactgtgaagttgtcgcagtctcagtggattcccactttagccatcttgcctggataaatacaccaagaaagaatggtggtttgggccacatgaacatcgcactcttgtcagacttaactaagcagatttcccgagactacggtgtgctgttagaaggttctggtcttgcactaagaggtctcttcataattgaccccaatggagtcatcaagcatttgagcgtcaacgatctcccagtgggccgaagcgtggaagaaaccctccgcttggtgaaggcgttccagtatgtagaaacacatggagaagtctgcccagcgaactggacaccggattctcctacgatcaagccaagtccagctgcttccaaagagtactttcagaaggtaaatcagtagatcacccatgtgtatctgcaccttctcaactgagagaagaaccacagttgaaacctgcttttatcattttcaagatggttatttgtagaaggcaaggaaccaattatgcttgtattcataagtattactctaaatgttttgtttttgtaattctggctaagaccttttaaacatggttagttgctagtacaaggaatcctttattggtaacatcttggtggctggctagctagtttctacagaacataatttgcctctatagaaggctattcttagatcatgtctcaatggaaacactcttctttcttagccttacttgaatcttgcctataataaagtagagcaacacacattg

SEQ ID NO: 3336 - protein, 256 aa, Homosapiens; identical to SEQ ID NO: 473

SEQ ID NO: 3337 - DNA, 799 bp, Homosapiens
gtctctgcccgccccgtggcgcccgagtgcactgaagatggcggctgctgtaggacggttgctccgagcgtcggttgcccgacatgtgagtgccattccttggggcatttctgccactgcagccctcaggcctgctgcatgtggaagaacgagcttgacaaatttattgtgttctggttccagtcaagcaaaattattcagcaccagttcctcatgccatgcacctgctgtcacccagcatgcaccctattttaagggtacagccgttgtcaatggagagttcaaagacctaagccttgatgactttaaggggaaatatttggtgcttttcttctatcctttggatttcacctttgtgtgtcctacagaaattgttgcttttagtgacaaagctaacgaatttcacgacgtgaactgtgaagttgtcgcagtctcagtggattcccactttagccatcttgcctggataaatacaccaagaaagaatggtggtttgggccacatgaacatcgcactcttgtcagacttaactaagcagatttcccgagactacggtgtgctgttagaaggttctggtcttgcactaagaggtctcttcataattgaccccaatggagtcatcaagcatttgagcgtcaacgatctcccagtgggccgaagcgtggaagaaaccctccgcttggtgaaggcgttccagtatgtagaaacacatggagaagtctgcccagcgaactggacaccggattctcctacggtaggtttttttccccaaaagcagtgaggtccatgttctctcagc

SEQ ID NO: 3338 - protein, 247 aa, Homosapiens
MAAAVGRLLRASVARHVSAIPWGISATAALRPAACGRTSLTNLLCSGSSQAKLFSTSSSCHAPAVTQHAPYFKGTAVVNGEFKDLSLDDFKGKYLVLFFYPLDFTFVCPTEIVAFSDKANEFHDVNCEVVAVSVDSHFSHLAWINTPRKNGGLGHMNIALLSDLTKQISRDYGVLLEGSGLALRGLFIIDPNGVIKHLSVNDLPVGRSVEETLRLVKAFQYVETHGEVCPANWTPDSPTVGFFPQKQ

SEQ ID NO: 3339 - DNA, 438 bp, Homosapiens
gcgcccgagtgcactgaagatggcggctgctgtaggacggttgctccgagcgtcggttcctcatgccatgcacctgctgtcacccagcatgcaccctattttaagggtacagccgttgtcaatggagagttcaaagacctaagccttgatgactttaaggggaaatatttggtgcttttcttctatcctttggatttcacctttgtgtgtcctacagaaattgttgcttttagtgacaaagctaacgaatttcacgacgtgaactgtgaagttgtcgcagtctcagtggattcccactttagccatcttgcctggataaatacaccaagaaagtagagacggggtgtctccatgttggtcacgctggtctcgaactcctgacctcaggtgatccgcccaccttggcctcccaaagtgccggaattacaggcatgagcc

SEQ ID NO: 3340 - protein, 40 aa, Homosapiens
MAAAVGRLLRASVPHAMHLLSPSMHPILRVQPLSMESSKT

SEQ ID NO: 3341 - DNA, 1315 bp, Homosapiens
aaagcatccgagggagccggaggggaggagaatggagtgacagagacacgcggagggtggggggtgggggggagcgtgttgagggaggggggaggggggacacagagggaggaagaagcggcggcggcggcggcggcggcggcggctcctctttgcagagggggaaactcttgggctgagagcaggaataatgcggtaggcaaggcgggctgctggctcccccggctccggcagcagcggcggcagcccgagcagcggcagcagcagcggcagcaccccaggcgctgacagccccgccggccggctccgttgctgaccgccgactgtcaatggagctggaaaacatcgtggccaacacggtcttgctgaaagccagggaagggggcggaggaaagcgcaaagggaaaagcaagaagtggaaagaaatcctgaagttccctcacattagccagtgtgaagacctccgaaggaccataggggagctgagcggatcgctgatctcctggagctcatccaccaaggagcatgggagaccaactgaaattaagatgagatgacaaatcaagaaagttccacagggtatggagcaggttgctgagctgcagaaccaaggcaaagatctatccccacttccctggaggaagtggcgtccctcctggcttaaaggatctctctgcgagctccctgagggcctggaccacaggctctccatctgggcgtctccattgctgtagcagcatgagtgggtggatggatgttgccttctcttcaacctggaagccaggactgtgagtggcagccatgagcactgagacagattcctaggccaggtgcagcggtgcaggcctgagcattgagacagattcctaggccagctgcagcggcgcaagcctggaaccccagtgctttgaggggcggaggcaggaggattgctcaaacccaggagtccgaggatacagtgagctatgaatgtgctgctgcaccgctccagcctaggtgacagagcgagaccctctaaaaaaaagaaaaagagagagagagattccttgccacccatctctctgcttccagtgtgagccccacgtatgaactaacggattttcaacagaactggcacagggcagacagaccatgagaggaagaaggggttctctaacgtctgctcagtgaaacatcaaatagtgactttattagttaatgggataattgttcatgggagatcattagagagcccaaatcaaagaatttcttaggatgtccgaaacttggaaggctggaatgtcatcacgaagataaaagattgttgaggtctgca

SEQ ID NO: 3342 - protein, 75 aa, Homosapiens
MELENIVANTVLLKAREGGGGKRKGKSKKWKEILKFPHISQCEDLRRTIGELSGSLISWSSSTKEHGRPTEIKMR

SEQ ID NO: 3343 - DNA, 2425 bp, Homosapiens
gggaggagaatggagtgacagagacacgcggagggtggggggtgggggggagcgtgttgagggaggggggaggggggacacagagggaggaagaagcggcggcggcggcggcggcggcggcggctcctctttgcagagggggaaactcttgggctgagagcaggaataatgcggtaggcaaggcgggctgctggctcccccggctccggcagcagcggcggcagcccgagcagcggcagcagcagcggcagcaccccaggcgctgacagccccgccggccggctccgttgctgaccgccgactgtcaatggagctggaaaacatcgtggccaacacggtcttgctgaaagccagggaagggggcggaggaaagcgcaaagggaaaagcaagaagtggaaagaaatcctgaagttccctcacattagccagtgtgaagacctccgaaggaccatagacagagattactgcagtttatgtgacaagcagccaatcgggaggctgcttttccggcagttttgtgaaaccaggcctgggctggagtgttacattcagttcctggactccgtggcagaatatgaagttactccagatgaaaaactgggagagaaagggaaggaaattatgaccaagtacctcaccccaaagtcccctgttttcatagcccaagttggccaagacctggtctcccagacggaggagaagctcctacagaagccgtgcaaagaactcttttctgcctgtgcacagtctgtccacgagtacctgaggggagaaccattccacgaatatctggacagcatgttttttgaccgctttctccagtggaagtggttggaaaggcaaccggtgaccaaaaacactttcaggcagtatcgagtgctaggaaaagggggcttcggggaggtctgtgcctgccaggttcgggccacgggtaaaatgtatgcctgcaagcgcttggagaagaagaggatcaaaaagaggaaaggggagtccatggccctcaatgagaagcagatcctcgagaaggtcaacagtcagtttgtggtcaacctggcctatgcctacgagaccaaggatgcactgtgcttggtcctgaccatcatgaatgggggtgacctgaagttccacatctacaacatgggcaaccctggcttcgaggaggagcgggccttgttttatgcggcagagatcctctgcggcttagaagacctccaccgtgagaacaccgtctaccgagatctgaaacctgaaaacatcctgttagatgattatggccacattaggatctcagacctgggcttggctgtgaagatccccgagggagacctgatccgcggccgggtgggcactgttggctacatggctccagaggtcctgaacaaccagaggtacggcctgagccccgactactggggccttggctgcctcatctatgagatgatcgagggccagtcgccgttccgcggccgcaaggagaaggtgaagcgggaggaggtggaccgccgggtcctggagacggaggaggtgtactcccacaagttctccgaggaggccaagtccatctgcaagatgctgctcacgaaagatgcgaagcagaggctgggctgccaggaggagggggctgcagaggtcaagagacaccccttcttcaggaacatgaacttcaagcgcttagaagccgggatgttggaccctcccttcgttccagacccccgcgctgtgtactgtaaggacgtgctggacatcgagcagttctccactgtgaagggcgtcaatctggaccacacagacgacgacttctactccaagttctccacgggctctgtgtccatcccatggcaaaacgagatgatagaaacagaatgctttaaggagctgaacgtgtttggacctaatggtaccctcccgccagatctgaacagaaaccaccctccggaaccgcccaagaaagggctgctccagagactcttcaagcggcagcatcagaacaattccaagagttcgcccagctccaagaccagttttaaccaccacataaactcaaaccatgtcagctcgaactccaccggaagcagctagtttcggctctggcctccaagtccacagtggaaccagcccagacccttctccttagaagtggaagtagtggagcccctgctctggtggggctgccaggggagaccccgggagccggggaaggaggccgtccatcccgtcgacgtagaacctcgaggtttctcaaagaaatttccactcaggtctgttttccgaggcggccccggccggggtggattggatttgtctttggtgaacattgcaatagaaatccaattggatacgacaacttgcacgtattttaatagcgtcataactagaactgaattttgtctttatgatttttaaagaaaagttttgtaaatttct

SEQ ID NO: 3344 - protein, 590 aa, Homosapiens; identical to SEQ ID NO: 477

SEQ ID NO: 3345 - DNA, 2636 bp, Homosapiens
gggaggagaatggagtgacagagacacgcggagggtggggggtgggggggagcgtgttgagggaggggggaggggggacacagagggaggaagaagcggcggcggcggcggcggcggcggcggctcctctttgcagagggggaaactcttgggctgagagcaggaataatgcggtaggcaaggcgggctgctggctcccccggctccggcagcagcggcggcagcccgagcagcggcagcagcagcggcagcaccccaggcgctgacagccccgccggccggctccgttgctgaccgccgactgtcaatggagctggaaaacatcgtggccaacacggtcttgctgaaagccagggaagggggcggaggaaagcgcaaagggaaaagcaagaagtggaaagaaatcctgaagttccctcacattagccagtgtgaagacctccgaaggaccatagacagagattactgcagtttatgtgacaagcagccaatcgggaggctgcttttccggcagttttgtgaaaccaggcctgggctggagtgttacattcagttcctggactccgtggcagaatatgaagttactccagatgaaaaactgggagagaaagggaaggaaattatgaccaagtacctcaccccaaagtcccctgttttcatagcccaagttggccaagacctggtctcccagacggaggagaagctcctacagaagccgtgcaaagaactcttttctgcctgtgcacagtctgtccacgagtacctgaggggagaaccattccacgaatatctggacagcatgttttttgaccgctttctccagtggaagtggttggaaaggcaaccggtgaccaaaaacactttcaggcagtatcgagtgctaggaaaagggggcttcggggaggtctgtgcctgccaggttcgggccacgggtaaaatgtatgcctgcaagcgcttggagaagaagaggatcaaaaagaggaaaggggagtccatggccctcaatgagaagcagatcctcgagaaggtcaacagtcagtttgtggtcaacctggcctatgcctacgagaccaaggatgcactgtgcttggtcctgaccatcatgaatgggggtgacctgaagttccacatctacaacatgggcaaccctggcttcgaggaggagcgggccttgttttatgcggcagagatcctctgcggcttagaagacctccaccgtgagaacaccgtctaccgagatctgaaacctgaaaacatcctgttagatgattatggccacattaggatctcagacctgggcttggctgtgaagatccccgagggagacctgatccgcggccgggtgggcactgttggctacatggctccagaggtcctgaacaaccagaggtacggcctgagccccgactactggggccttggctgcctcatctatgagatgatcgagggccagtcgccgttccgcggccgcaaggagaaggtgaagcgggaggaggtggaccgccgggtcctggagacggaggaggtgtactcccacaagttctccgaggaggccaagtccatctgcaagatgctgctcacgaaagatgcgaagcagaggctgggctgccaggaggagggggctgcagaggtcaagagacaccccttcttcaggaacatgaacttcaagcgcttagaagccgggatgttggaccctcccttcgttccagacccccgcgctgtgtactgtaaggacgtgctggacatcgagcagttctccactgtgaagggcgtcaatctggaccacacagacgacgacttctactccaagttctccacgggctctgtgtccatcccatggcaaaacgagatgatagaaacagaatgctttaaggagctgaacgtgtttggacctaatggtaccctcccgccagatctgaacagaaaccaccctccggaaccgcccaagaaagggctgctccagagactcttcaagcggcagcatcagaacaattccaagagttcgcccagctccaagaccagttttaaccaccacataaactcaaaccatgtcagctcgaactccaccggaagcagctagtttcggctctggcctccaagtccacagtggaaccagcccagacccttctccttagaagtggaagtagtggagcccctgctctggtggggctgccaggggagaccccgggagccggggaaggaggccgtccatcccgtcgacgtagaacctcgaggtttctcaaagaaatttccactcaggtctgttttccgaggcggccccggccggggtggattggatttgtctttggtgaacattgcaatagaaatccaattggatacgacaacttgcacgtattttaatagcgtcataactagaactgaattttgtctttatgatttttaaagaaaagttttgtaaatttctctactgtctcagtttacattttgtatatttgtatttaaatgaaagtgagactttgagggtgtatattttctgtgcagccactgttaagccatgtgttccaaggcattttagcggggagggggttatcaaaaaaaaaaaaatgtgactcaagacttccagagcctcaaatgagaaaatgtctttattaaatgtagaaagtgatccatacttc

SEQ ID NO: 3346 - protein, 590 aa, Homosapiens; identical to SEQ ID NO: 477

SEQ ID NO: 3347 - DNA, 1340 bp, Homosapiens
agaattatcaaaggatggctgtacagaccacctagaaaataattcagtatttcaggtttttcttttctgggagtgtgataactgaaattgttagattttggctcagttaagaaaagaaagatctgttgcctttcttctgagtgaacagtggtgagaaaaaattttgcaaggccccgcttttcctttcttcacaggccagcagtagccatatctgatcaaaaaagatacctgaaggaatattgatcacattttcctgaggccctagcaagcacaggaattgagaagttaggactggaacaactttgtcatttgtcacaattgccaaacattagaatacacaggaaccgttttttcaggtaactctgtgacttggctggatcttcctgatcatcaagattagcacctcggggcctggaagaggttagggagggcaggaagaaggagtgagccagcatccagctctgcgtggggcaggctatggcgtggacagacttaacattccacagcacggctgaaagccctggacctctttcccttgcacccctaattcatggtgataaaaccaaaacatggtgaattaggttattagaacgttggaacatctctgaagctcaaagccctcttatggctatgtgaaggcatacgtggaggcatacgtactccaccctgaagcttctccttcaattttaatgttaatcttaccaagcgacagctttcatcctggttaaggcagctcggtgtgtgtaaaagcagcctggcctgttaaacacaatgccgttaaatcaaactgcctttctttttttttttttaaagtttccttttcagtactgacaacttggaggtagagaaaccaaaagcaatgttttcagaaggccttttgctttcttaaagatttcaaacgatgattgtagttaatctggctgcctgtttgaaaaaccatcagataaatgcccacaaggctctcatctttcagtagcttagctgctgcttgtcagattctaaactccaaagtgcttgactcttccagtgcccaaactaatccttgtttaaattatgtcttcagaagctataactcttatagtggcttgctaaatgataccctttggatctgggctgaagacttccagaatgcccaagtgaatttcaggagcgggctcaatgtttaaccaaattcacctttaccaagggctattcaatccatatctgggatgttttaaataaaactatccaggactgtgggcaatattcaaagttaatatttgttgccaatatgtttggagtgcaagataaagcattataatgtctagacatttttgaaataaaaaagtcttctggttacc

SEQ ID NO: 3348 - protein, 72 aa, Homosapiens [sequence omitted]

SEQ ID NO: 3349 - DNA, 556 bp, Homosapiens
caaaaacagctggcctcatccatcatgtgtagccgattcagcttctctgggaaactccaaaaccctctcaaagggtcctcaacctctgccctcaaaccactatcgccgtgaggatgacgatgacaatgacgatgctgatgacaatgatggcctgtgtgcaacactctgctggccttcccagaggctctaccaggaatcccccacagcctgggacttctgctcctggaaacagttaaggctttggcaagaggctctcccacaaggcaattcgatctcccctgtctgtctgtgagggttcggggcactgctgtggcacgccagacgcagcagctactttctgtgaacagcctcctcataaatgtcagtcctgttggggggtggggagggggccttgatttattatatagcttttggacagttcctacagaaatattgccaaacagtggaataatcaactctttcactcaagccccctcagactttttttaatgaaagaataaagtacgcaatgagcctgagctaaataaataaaaatgccacacttttgcccaacaga

SEQ ID NO: 3350 - protein, 40 aa, Homosapiens
MTMTMTMLMTMMACVQHSAGLPRGSTRNPPQPGTSAPGNS

SEQ ID NO: 3351 - DNA, 694 bp, Homosapiens
gccgggtcctggagacggaggaggtgtactcccacaagttctccacccaccagatgcagcaacacgccatcccccagtcgtgagagcccataaaggagccagacattgctgaatgtcctcaggggcacagtcacccctgattgagagccactgccctctctggcccttacgaagcctcagtcatataaagactgaacatcataagcccagggagaactgggggtagaagctgaccccacagaaccttccggctcctgggatggcccccatccaatgctgtgccctctagctggcagccagaggagacagggcccttgggaaatgacacttagagcctggccctgggtaagggttggtgtgggccaatggaggaaatgcgggggaagggcccccacctcaccccacaccatgaaggtggccaccatacaccccgtcttggcctggcccctgaggaagctgtggcccagtgtgcccgccctggagcctgggaggctccctcacctagttctgctccttcctcctctccacaaagagccagctccaggatggacacactcagccagtgataatataaaaatacaacgcttcaatgcttccatcaagtaaaacggaagttccagaaagaatgacctctccctcccctgatggccaggcatgctaagaacaccctgggtcctagaaaaagaaattacca

SEQ ID NO: 3352 - protein, 110 aa, Homosapiens
MLCPLAGSQRRQGPWEMTLRAWPWVRVGVGQWRKCGGRAPTSPHTMKVATIHPVLAWPLRKLWPSVPALEPGRLPHLVLLLPPLHKEPAPGWTHSASDNIKIQRFNASIK

SEQ ID NO: 3353 - DNA, 999 bp, Homosapiens
gtgctcgggagccctccagtctctgcctttctcacacaaggcgtctctgggaaggcagtggattgttggtctgcgtggaacttctcaggtggacaccagagcatggaacacatccacgacagcgatggcagttccagcagcagccaccagagcctcaagagcacagccaaatgggcggcatccctggagaatctgctggaagacccagaaggcgtgaaaagatttagggaatttttaaaaaaggaattcagtgaagaaaatgttttgttttggctagcatgtgaagattttaagaaaatgcaagataagacgcagatgcaggaaaaggcaaaggagatctacatgacctttctgtccagcaaggcctcatcacaggtcaacgtggaggggcagtctcggctcaacgagaagatcctggaagaaccgcaccctctgatgttccagaaactccaggaccagatctttaatctcatgaagtacgacagctacagccgcttcttaaagtctgacttgtttttaaaacacaagcgaaccgaggaagaggaagaagatttgcctgatgctcaaactgcagctaaaagagcttccagaatttataacacatgagcccccaaaaagccgggactggcagctttaagaagcaaaggaatttcctctcaggaccgtgccgggtttatcattgctttgttatttgtaaggactgaaatgtacaaaacccttcaatgggatgtgtgttttattaactgcttcaccagtaaattttgcatgatggctaagctaacataaaaaaagaataataataacttggaagttttagtttacaaaacagagattccttcaacactggacacgtcgagcattttgtagcttaattaaacctcatgtaaggccacaaggtgaaacgtatcacactaccttttaccttgtaagtgtttgctctgcctctctggtgagtggacgcatgtccacaggtcacttggtaaattaactcaaacatga

SEQ ID NO: 3354 - protein, 167 aa, Homosapiens; identical to SEQ ID NO: 481

SEQ ID NO: 3355 - DNA, 1020 bp, Homosapiens
ctcctcctcctcctcgccttcctccggctcagccgccgcgccgccgggctgctccttcttcctcctcgggcgcccgcggcgatgttcaaccgcgccgtgagccggctgagcaggaagcggccgccgtcagacatccacgacagcgatggcagttccagcagcagccaccagagcctcaagagcacagccaaatgggcggcatccctggagaatctgctggaagacccagaaggcgtgaaaagatttagggaatttttaaaaaaggaattcagtgaagaaaatgttttgttttggctagcatgtgaagattttaagaaaatgcaagataagacgcagatgcaggaaaaggcaaaggagatctacatgacctttctgtccagcaaggcctcatcacaggtcaacgtggaggggcagtctcggctcaacgagaagatcctggaagaaccgcaccctctgatgttccagaaactccaggaccagatctttaatctcatgaagtacgacagctacagccgcttcttaaagtctgacttgtttttaaaacacaagcgaaccgaggaagaggaagaagatttgcctgatgctcaaactgcagctaaaagagcttccagaatttataacacatgagcccccaaaaagccgggactggcagctttaagaagcaaaggaatttcctctcaggaccgtgccgggtttatcattgctttgttatttgtaaggactgaaatgtacaaaacccttcaatgggatgtgtgttttattaactgcttcaccagtaaattttgcatgatggctaagctaacataaaaaaagaataataataacttggaagttttagtttacaaaacagagattccttcaacactggacacgtcgagcattttgtagcttaattaaacctcatgtaaggccacaaggtgaaacgtatcacactaccttttaccttgtaagtgtttgctctgcctctctggtgagtggacgcatgtccacaggtcacttggtaaattaactcaaacatga

SEQ ID NO: 3356 - protein, 181 aa, Homosapiens; identical to SEQ ID NO: 479

SEQ ID NO: 3357 - DNA, 784 bp, Homosapiens
gtgctcgggagccctccagtctctgcctttctcacacaaggcgtctctgggaaggcagtggattgttggtctgcgtggaacttctcaggtggacaccagagcatggaacacatccacgacagcgatggcagttccagcagcagccaccagagcctcaagagcacagccaaatgggcggcatccctggagaatctgctggaagacccagaaggcgtgaaaagatttagggaatttttaaaaaaggaattcagtgaagaaaatgttttgttttggctagcatgtgaagattttaagaaaatgcaagataagacgcagatgcaggaaaaggcaaaggagatctacatgacctttctgtccagcaaggcctcatcacaggtcaacgtggaggggcagtctcggctcaacgagaagatcctggaagaaccgcaccctctgatgttccagaaactccaggaccagatctttaatctcatgaagtacgacagctacagccgcttcttaaagtctgacttgtttttaaaacacaagcgaaccgaggaagaggaagaagatttgcctgatgctcaaactgcagctaaaagagcttccagaatttataacacatgagcccccaaaaagccgggactggcagctttaagaagcaaaggaatttcctctcaggaccgtgccgggtttatcattgctttgttatttgtaaggactgaaatgtacaaaacccttcaatgggatgtgtgttttattaactgcttcaccagtaaattttgcatgatggctaagctaacat

SEQ ID NO: 3358 - protein, 167 aa, Homosapiens; identical to SEQ ID NO: 481

SEQ ID NO: 3359 - DNA, 805 bp, Homosapiens
ctcctcctcctcctcgccttcctccggctcagccgccgcgccgccgggctgctccttcttcctcctcgggcgcccgcggcgatgttcaaccgcgccgtgagccggctgagcaggaagcggccgccgtcagacatccacgacagcgatggcagttccagcagcagccaccagagcctcaagagcacagccaaatgggcggcatccctggagaatctgctggaagacccagaaggcgtgaaaagatttagggaatttttaaaaaaggaattcagtgaagaaaatgttttgttttggctagcatgtgaagattttaagaaaatgcaagataagacgcagatgcaggaaaaggcaaaggagatctacatgacctttctgtccagcaaggcctcatcacaggtcaacgtggaggggcagtctcggctcaacgagaagatcctggaagaaccgcaccctctgatgttccagaaactccaggaccagatctttaatctcatgaagtacgacagctacagccgcttcttaaagtctgacttgtttttaaaacacaagcgaaccgaggaagaggaagaagatttgcctgatgctcaaactgcagctaaaagagcttccagaatttataacacatgagcccccaaaaagccgggactggcagctttaagaagcaaaggaatttcctctcaggaccgtgccgggtttatcattgctttgttatttgtaaggactgaaatgtacaaaacccttcaatgggatgtgtgttttattaactgcttcaccagtaaattttgcatgatggctaagctaacat

SEQ ID NO: 3360 - protein, 181 aa, Homosapiens; identical to SEQ ID NO: 479

SEQ ID NO: 3361 - DNA, 422 bp, Homosapiens
tcccgggagcagggacagtgtgtgggcaggcagggctggcgacaagagctgagggaagaccagaagggctgaatggcatgtttgagggggaggccactgtgctgtgcttcaggctggcagggcagccacacctgggaatctgggtgccaaggtgagcagggctgggaaagcccctgtaggactttaatggagtggttggaaggagggggtcaaactttcaatgtgcctcttccagcctttcaggtcaggcaggtctggtgttgggttgccctgccctgtccacatcctacagagagagcttccgaatgggcagcccctttccatgcctgtacccctgacatccagcataggacttcttttccttttttgagacaaggttgcactccagcctggatgacaaagtgacaccctgtctcaacaaa

SEQ ID NO: 3362 - protein, 110 aa, Homosapiens
MACLRGRPLCCASGWQGSHTWESGCQGEQGWESPCRTLMEWLEGGGQTFNVPLPAFQVRQVWCWVALPCPHPTERASEWAAPFHACTPDIQHRTSFPFLRQGCTPAWMTK

SEQ ID NO: 3363 - DNA, 1267 bp, Homosapiens
gtggcttttattttcaattaatttttttccttgtgggcagtgtgcatggtataataagcctgagcagaggcttaagttgtatgtgtgcagagtttgtaaaggaatcaattggaagatgcagaagaccgaggtttgctttcaaggtatttttcaggctgtgtgggtaaaatttgcctcaaatttctatcaaacaggaatgtaaaatagataaaatcctatgtatttgaattgtcagagctagggagtgcaaatgttttggcaatgtattcaaaatgctggcctgggcaccaaagagaaaatagccttttacagttacatagtaagatgcgattagtacccacaaattactgttttctaaacatttgaagttttacgattagctttaaaataatgattttataaattggtggtcacaataattttggtattactttcctccttttcccacttagcaatatagccaaatgtattcaacataaaaattcatagggtctgaaattcatagctgggccaaattttttatggcaccttagttttaccataatggtcatctattacactcttctgttataaaatatacccttatttcttttgtttatagtatctttgaggaatgtttttggaaaagttaatttatattttatagggagaacactcaataaattatgttaactgtgcccccgagttaaaaattttatgagtatatgtgaaacttgaacaactgaagactttttttaattgataaaaatgcttagtatgcctgttttggtctgccagtaaattaagtagcttattgagataactaacagctaaatatagctgtagtgtttcctgactgtatattctatgatttaataaaattatccagatccatctcaaaaaataaatgaattaattaaaagtatggctgttgagctaacagatgattttataacatgacccaatgctatcttgatccaacttaagcctaagaatcgttgctccccaccccgttcatcaaaaacatcagcagagactttttgggcatgcaaggaaatgttttttatttcataattattttgagatttattttggtgatgtgtttctgactgactgccatattctttgttctcataatttctctactagtattttcactcccaacccccgtgccattcccacttgatttttatgtctgctggcagtgagaggctaaaatggccaacttaagccaaagctgtaaacaacagttgaagtaagtctttcaataaagactagactatatgat

SEQ ID NO: 3364 - protein, 34 aa, Homosapiens
MYSKCWPGHQRENSLLQLHSKMRLVPTNYCFLNI

SEQ ID NO: 3365 - DNA, 905 bp, Homosapiens
caaacaggaatgtaaaatagataaaatcctatgtatttgaattgtcagagctagggagtgcaaatgttttggcaatgtattcaaaatgctggcctgggcaccaaagagaaaatagccttttacagttacatagtaagatgcgattagtacccacaaattactgttttctaaacatttgaagttttacgattagctttaaaataatgattttataaattggtggtcacaataattttggtattactttcctccttttcccacttagcaatatagccaaatgtattcaacataaaaattcatagggtctgaaattcatagctgggccaaattttttatggcaccttagttttaccataatggtcatctattacactcttctgttataaaatatacccttatttcttttgtttatagtatctttgaggaatgtttttggaaaagttaatttatattttatagggagaacactcaataaattatgttaactgtgcccccgagttaaaaattttatgagtatatgtgaaacttgaacaactgaagactttttttaattgataaaaatgcttagtatgcctgttttggtctgccagtaaattaagtagcttattgagataactaacagctaaatatagctgtagtgtttcctgactgtatattctatgatttaataaaattatccagactagttatattgccacagtaaacatgtgactgaagtgtccttcatcttaatctgaaagagggcaaaatttcatgatcagttaatggaagttatttcatattaagtggtttttttttttttttttttttagatggagtcttgctctgtcgccaggctggagttgccctgagccaagattgtgctattgcactccaccctgggaaatagagcaagactccgtctc

SEQ ID NO: 3366 - protein, 34 aa, Homosapiens; identical to SEQ ID NO: 3364

SEQ ID NO: 3367 - DNA, 3132 bp, Homosapiens
ctcttcacgtcccagcgcgggtgggcgccggcggctcctcttaaccacaggttccagaagtcctctgcagaagtgcttccctctctcatttccaggaccacaattcccagagacttcggcttcacgacgtttctctttttgcccgatctctcccggagctggctgggcttcggccggccagaggcccacagcgacgacgtgatccgtcgtgagcgggtcccagggtttcctcggcggcccttttttctctcccctcggtcgtcccccttgcaggctgtcgcggctggcctgagcggtgacctggcgggtcgcgcctgcgctctgccctgtttcctgcctggctggtggcggcggccattttgttcatcctcctcctcctcctgctcctcctggttggagcgcagtgtccggagcgggctggggggagagagcccgagagcagggttcggtgccttttcctctgtccccagccggtgcccagagcccccctccccttcctccccaccccctcccctccccaaccctgccctcccccttgtcccgggatcgctccgtcgcacccaccatgatggaagacgacgggcagccccggactctacacacacaagctaagacatatggttctatcttcagaaaacaatatggtgtttagagcctagatacgtaggtaacctttccagagatgtgacagaagtccttatacttcagttgttcagtcagattggaccctgtaaaagctgtaaaatgataacagagcatacaagcaatgacccatattgctttgtggaattttatgaacacagagatgcagctgctgcattagctgctatgaatgggagaaaaattttgggaaaggaggtcaaagtaaactgggcaaccacaccaagtagccagaaaaaagatacttccaatcacttccatgtgtttgttggggatttgagtccagaaattacaacagaagatatcaaatcagcatttgccccctttggtaaaatatcggatgcccgggtagttaaagacatggcaactggaaaatccaaaggctatggttttgtatctttttataacaaactggatgcagaaaatgcgattgtgcatatgggcggtcagtggttgggtggtcgtcaaatccgaaccaattgggccactcgtaaaccacctgcacctaaaagtacacaagaaaacaacactaagcagttgagatttgaagatgtagtaaaccagtcaagtccaaaaaattgtactgtgtactgtggaggaattgcgtctgggttaacagatcagcttatgagacagacattctcaccatttggacaaattatggaaataagagttttcccagaaaagggctattcatttgtcagattttcaacccatgaaagtgcagcccatgccattgtttcggtgaacggtactacgattgaaggacatgtggttaaatgctattggggtaaagaatctcctgatatgactaaaaacttccaacaggtaattcgatttttcatagcattctttaaggtttccatcttacatgtcacataaaagctttggaaactctgtaaaatgaacaataaaataaagcatatagctactttcagttgattgtatttcaaaattgattatttgcggtattaactgaatcttaatactttcttttcacaggtgtcaccaccccaataaacttagacaatgataaataacagagtcctattcacataagggtgcttacttagtttttctcttccttgtctcccactctttcttcatatacggtgtttcttatgtgttccctaaaacaatactttgctttttcctaggttgactatagtcaatggggccaatggagccaagtgtatggaaacccacaacagtatggacagtatatggcaaatgggtggcaagtaccgccttatggagtatacgggcaaccatggaatcaacaaggatttggagtagatcaatcaccttctgctgcttggatgggtggatttggtgctcagcctccccaaggacaagctcctccccctgtaatacctcctcctaaccaagccggatatggtatggcaagttaccaaacacagtgagccgggactctaaaaaaaaattgtaattcatgataggcttcgatttcctgtgacactctgaagacatgaaagtagacatcggaaaatgaaaatatttattttaaaaattgaaatgtttggaacctttagcacagatttgctttggtgaaggacacgtgtcttctagttctgcctttttaagtttttgttcatgatggatatgaacatgatttttctttatgtacaaaaactaaaataaagtcaataaagacaattctgactacaaattttgatataataggaaaaatggctaatacattttgattcttagatactattccatttttatcttgctgttcagtattttaactcactgtgtttttaaaagagcaaaaaagggaggatcgtgaaaacctgggaatcacatataagttcatcctgaatcctgatactcccctccccttccctgaggtggaccacatttgaagtcagcagagaaaaagtgtgatattcagaagaaatgcgtgattttggagtcgctttggaggaaatattttctttctctatgcctaaagaaactgaagccagactgaagttttgcaccctaaaaaaggaacagcattgtttgagttacttgagcaaatgttggtggtccacgttaagacatatttttaaaacttccaaaagtgtcgattattaaaattgtagtattttacatttcattttggggggaaatccaagtatggtgtttgtattgaagtcagacagtcatacttgtgcttttacatgaagtttaaatgatacatattgtaaatattcaataactacagtgtttaaaaagcatgcttcaacatagaagtagcagcaatgtaattatttgaagtaacacttaacacactccgctgcattgaatgcagtggattgatcagaatgttaagactgacatttccaaggttggctactatgtaaaattaaaattacacaaattgtgcagaaaaagccttaattttaatttcatacaatctttgatgcattagtatgttctaaaatgtcattgggaattagtttt

SEQ ID NO: 3368 - protein, 265 aa, Homosapiens
MITEHTSNDPYCFVEFYEHRDAAAALAAMNGRKILGKEVKVNWATTPSSQKKDTSNHFHVFVGDLSPEITTEDIKSAFAPFGKISDARVVKDMATGKSKGYGFVSFYNKLDAENAIVHMGGQWLGGRQIRTNWATRKPPAPKSTQENNTKQLRFEDVVNQSSPKNCTVYCGGIASGLTDQLMRQTFSPFGQIMEIRVFPEKGYSFVRFSTHESAAHAIVSVNGTTIEGHVVKCYWGKESPDMTKNFQQVIRFFIAFFKVSILHVT

SEQ ID NO: 3369 - DNA, 2741 bp, Homosapiens
ctcttcacgtcccagcgcgggtgggcgccggcggctcctcttaaccacaggttccagaagtcctctgcagaagtgcttccctctctcatttccaggaccacaattcccagagacttcggcttcacgacgtttctctttttgcccgatctctcccggagctggctgggcttcggccggccagaggcccacagcgacgacgtgatccgtcgtgagcgggtcccagggtttcctcggcggcccttttttctctcccctcggtcgtcccccttgcaggctgtcgcggctggcctgagcggtgacctggcgggtcgcgcctgcgctctgccctgtttcctgcctggctggtggcggcggccattttgttcatcctcctcctcctcctgctcctcctggttggagcgcagtgtccggagcgggctggggggagagagcccgagagcagggttcggtgccttttcctctgtccccagccggtgcccagagcccccctccccttcctccccaccccctcccctccccaaccctgccctcccccttgtcccgggatcgctccgtcgcacccaccatgatggaagacgacgggcagccccggactctatacgtaggtaacctttccagagatgtgacagaagtccttatacttcagttgttcagtcagattggaccctgtaaaagctgtaaaatgataacagagcatacaagcaatgacccatattgctttgtggaattttatgaacacagagatgcagctgctgcattagctgctatgaatgggagaaaaattttgggaaaggaggtcaaagtaaactgggcaaccacaccaagtagccagaaaaaagatacttccaatcacttccatgtgtttgttggggatttgagtccagaaattacaacagaagatatcaaatcagcatttgccccctttggtaaaatatcggatgcccgggtagttaaagacatggcaactggaaaatccaaaggctatggttttgtatctttttataacaaactggatgcagaaaatgcgattgtgcatatgggcggtcagtggttgggtggtcgtcaaatccgaaccaattgggccactcgtaaaccacctgcacctaaaagtacacaagaaaacaacactaagcagttgagatttgaagatgtagtaaaccagtcaagtccaaaaaattgtactgtgtactgtggaggaattgcgtctgggttaacagatcagcttatgagacagacattctcaccatttggacaaattatggaaataagagttttcccagaaaagggctattcatttgtcagattttcaacccatgaaagtgcagcccatgccattgtttcggtgaacggtactacgattgaaggacatgtggttaaatgctattggggtaaagaatctcctgatatgactaaaaacttccaacaggttgactatagtcaatggggccaatggagccaagtgtatggaaacccacaacagtatggacagtatatggcaaatgggtggcaagtaccgccttatggagtatacgggcaaccatggaatcaacaaggatttggagtagatcaatcaccttctgctgcttggatgggtggatttggtgctcagcctccccaaggacaagctcctccccctgtaatacctcctcctaaccaagccggatatggtatggcaagttaccaaacacagtgagccgggactctaaaaaaaaattgtaattcatgataggcttcgatttcctgtgacactctgaagacatgaaagtagacatcggaaaatgaaaatatttattttaaaaattgaaatgtttggaacctttagcacagatttgctttggtgaaggacacgtgtcttctagttctgcctttttaagtttttgttcatgatggatatgaacatgatttttctttatgtacaaaaactaaaataaagtcaataaagacaattctgactacaaattttgatataataggaaaaatggctaatacattttgattcttagatactattccatttttatcttgctgttcagtattttaactcactgtgtttttaaaagagcaaaaaagggaggatcgtgaaaacctgggaatcacatataagttcatcctgaatcctgatactcccctccccttccctgaggtggaccacatttgaagtcagcagagaaaaagtgtgatattcagaagaaatgcgtgattttggagtcgctttggaggaaatattttctttctctatgcctaaagaaactgaagccagactgaagttttgcaccctaaaaaaggaacagcattgtttgagttacttgagcaaatgttggtggtccacgttaagacatatttttaaaacttccaaaagtgtcgattattaaaattgtagtattttacatttcattttggggggaaatccaagtatggtgtttgtattgaagtcagacagtcatacttgtgcttttacatgaagtttaaatgatacatattgtaaatattcaataactacagtgtttaaaaagcatgcttcaacatagaagtagcagcaatgtaattatttgaagtaacacttaacacactccgctgcattgaatgcagtggattgatcagaatgttaagactgacatttccaaggttggctactatgtaaaattaaaattacacaaattgtgcagaaaaagccttaattttaatttcatacaatctttgatgcattagtatgttctaaaatgtcattgggaattagtttt

SEQ ID NO: 3370 - protein, 375 aa, Homosapiens; identical to SEQ ID NO: 485

SEQ ID NO: 3371 - DNA, 3057 bp, Homosapiens
ctcttcacgtcccagcgcgggtgggcgccggcggctcctcttaaccacaggttccagaagtcctctgcagaagtgcttccctctctcatttccaggaccacaattcccagagacttcggcttcacgacgtttctctttttgcccgatctctcccggagctggctgggcttcggccggccagaggcccacagcgacgacgtgatccgtcgtgagcgggtcccagggtttcctcggcggcccttttttctctcccctcggtcgtcccccttgcaggctgtcgcggctggcctgagcggtgacctggcgggtcgcgcctgcgctctgccctgtttcctgcctggctggtggcggcggccattttgttcatcctcctcctcctcctgctcctcctggttggagcgcagtgtccggagcgggctggggggagagagcccgagagcagggttcggtgccttttcctctgtccccagccggtgcccagagcccccctccccttcctccccaccccctcccctccccaaccctgccctcccccttgtcccgggatcgctccgtcgcacccaccatgatggaagacgacgggcagccccggactctacacacacaagctaagacatatggttctatcttcagaaaacaatatggtgtttagagcctagatacgtaggtaacctttccagagatgtgacagaagtccttatacttcagttgttcagtcagattggaccctgtaaaagctgtaaaatgataacagagcatacaagcaatgacccatattgctttgtggaattttatgaacacagagatgcagctgctgcattagctgctatgaatgggagaaaaattttgggaaaggaggtcaaagtaaactgggcaaccacaccaagtagccagaaaaaagatacttccaatcacttccatgtgtttgttggggatttgagtccagaaattacaacagaagatatcaaatcagcatttgccccctttggtaaaatatcggatgcccgggtagttaaagacatggcaactggaaaatccaaaggctatggttttgtatctttttataacaaactggatgcagaaaatgcgattgtgcatatgggcggtcagtggttgggtggtcgtcaaatccgaaccaattgggccactcgtaaaccacctgcacctaaaagtacacaagaaaacaacactaagcagttgagatttgaagatgtagtaaaccagtcaagtccaaaaaattgtactgtgtactgtggaggaattgcgtctgggttaacagatcagcttatgagacagacattctcaccatttggacaaattatggaaataagagttttcccagaaaagggctattcatttgtcagattttcaacccatgaaagtgcagcccatgccattgtttcggtgaacggtactacgattgaaggacatgtggttaaatgctattggggtaaagaatctcctgatatgactaaaaacttccaacaggtaattcgatttttcatagcattctttaaggtttccatcttacatgtcacataaaagctttggaaactctgtaaaatgaacaataaaataaagcatatagctactttcagttgattgtatttcaaaattgattatttgcggtattaactgaatcttaatactttcttttcacaggtgtcaccaccccaataaacttagacaatgataaataacagagtcctattcacataagggtgcttacttagtttttctcttccttgtctcccactctttcttcatatacggtgtttcttatgtgttccctaaaacaatactttgctttttcctaggttgactatagtcaatggggccaatggagccaagtgtatggaaacccacaacagtatggacagtatatggcaaatgggtggcaagtaccgccttatggagtatacgggcaaccatggaatcaacaaggatttggagtagatcaatcaccttctgctgcttggatgggtggatttggtgctcagcctccccaaggacaagctcctccccctgtaatacctcctcctaaccaagccggatatggtatggcaagttaccaaacacagtgagccgggactctaaaaaaaaattgtaattcatgataggcttcgatttcctgtgacactctgaagacatgaaagtagacatcggaaaatgaaaatatttattttaaaaattgaaatgtttggaacctttagcacagatttgctttggtgaaggacacgtgtcttctagttctgcctttttaagtttttgttcatgatggatatgaacatgatttttctttatgtacaaaaactaaaataaagtcaataaagacaattctgactacaaattttgatataataggaaaaatggctaatacattttgattcttagatactattccatttttatcttgctgttcagtattttaactcactgtgtttttaaaagagcaaaaaagggaggatcgtgaaaacctgggaatcacatataagttcatcctgaatcctgatactcccctccccttccctgaggtggaccacatttgaagtcagcagagaaaaagtgtgatattcagaagaaatgcgtgattttggagtcgctttggaggaaatattttctttctctatgcctaaagaaactgaagccagactgaagttttgcaccctaaaaaaggaacagcattgtttgagttacttgagcaaatgttggtggtccacgttaagacatatttttaaaacttccaaaagtgtcgattattaaaattgtagtattttacatttcattttggggggaaatccaagtatggtgtttgtattgaagtcagacagtcatacttgtgcttttacatgaagtttaaatgatacatattgtaaatattcaataactacagtgtttaaaaagcatgcttcaacatagaagtagcagcaatgtaattatttgaagtaacacttaacacactccgctgcattgaatgcagtggattgatcagaatgttaagactgacatttccaaggttggctactatgtaaaattaaaattacacaaattgtgcag

SEQ ID NO: 3372 - protein, 265 aa, Homosapiens; identical to SEQ ID NO: 3368

SEQ ID NO: 3373 - DNA, 2666 bp, Homosapiens
ctcttcacgtcccagcgcgggtgggcgccggcggctcctcttaaccacaggttccagaagtcctctgcagaagtgcttccctctctcatttccaggaccacaattcccagagacttcggcttcacgacgtttctctttttgcccgatctctcccggagctggctgggcttcggccggccagaggcccacagcgacgacgtgatccgtcgtgagcgggtcccagggtttcctcggcggcccttttttctctcccctcggtcgtcccccttgcaggctgtcgcggctggcctgagcggtgacctggcgggtcgcgcctgcgctctgccctgtttcctgcctggctggtggcggcggccattttgttcatcctcctcctcctcctgctcctcctggttggagcgcagtgtccggagcgggctggggggagagagcccgagagcagggttcggtgccttttcctctgtccccagccggtgcccagagcccccctccccttcctccccaccccctcccctccccaaccctgccctcccccttgtcccgggatcgctccgtcgcacccaccatgatggaagacgacgggcagccccggactctatacgtaggtaacctttccagagatgtgacagaagtccttatacttcagttgttcagtcagattggaccctgtaaaagctgtaaaatgataacagagcatacaagcaatgacccatattgctttgtggaattttatgaacacagagatgcagctgctgcattagctgctatgaatgggagaaaaattttgggaaaggaggtcaaagtaaactgggcaaccacaccaagtagccagaaaaaagatacttccaatcacttccatgtgtttgttggggatttgagtccagaaattacaacagaagatatcaaatcagcatttgccccctttggtaaaatatcggatgcccgggtagttaaagacatggcaactggaaaatccaaaggctatggttttgtatctttttataacaaactggatgcagaaaatgcgattgtgcatatgggcggtcagtggttgggtggtcgtcaaatccgaaccaattgggccactcgtaaaccacctgcacctaaaagtacacaagaaaacaacactaagcagttgagatttgaagatgtagtaaaccagtcaagtccaaaaaattgtactgtgtactgtggaggaattgcgtctgggttaacagatcagcttatgagacagacattctcaccatttggacaaattatggaaataagagttttcccagaaaagggctattcatttgtcagattttcaacccatgaaagtgcagcccatgccattgtttcggtgaacggtactacgattgaaggacatgtggttaaatgctattggggtaaagaatctcctgatatgactaaaaacttccaacaggttgactatagtcaatggggccaatggagccaagtgtatggaaacccacaacagtatggacagtatatggcaaatgggtggcaagtaccgccttatggagtatacgggcaaccatggaatcaacaaggatttggagtagatcaatcaccttctgctgcttggatgggtggatttggtgctcagcctccccaaggacaagctcctccccctgtaatacctcctcctaaccaagccggatatggtatggcaagttaccaaacacagtgagccgggactctaaaaaaaaattgtaattcatgataggcttcgatttcctgtgacactctgaagacatgaaagtagacatcggaaaatgaaaatatttattttaaaaattgaaatgtttggaacctttagcacagatttgctttggtgaaggacacgtgtcttctagttctgcctttttaagtttttgttcatgatggatatgaacatgatttttctttatgtacaaaaactaaaataaagtcaataaagacaattctgactacaaattttgatataataggaaaaatggctaatacattttgattcttagatactattccatttttatcttgctgttcagtattttaactcactgtgtttttaaaagagcaaaaaagggaggatcgtgaaaacctgggaatcacatataagttcatcctgaatcctgatactcccctccccttccctgaggtggaccacatttgaagtcagcagagaaaaagtgtgatattcagaagaaatgcgtgattttggagtcgctttggaggaaatattttctttctctatgcctaaagaaactgaagccagactgaagttttgcaccctaaaaaaggaacagcattgtttgagttacttgagcaaatgttggtggtccacgttaagacatatttttaaaacttccaaaagtgtcgattattaaaattgtagtattttacatttcattttggggggaaatccaagtatggtgtttgtattgaagtcagacagtcatacttgtgcttttacatgaagtttaaatgatacatattgtaaatattcaataactacagtgtttaaaaagcatgcttcaacatagaagtagcagcaatgtaattatttgaagtaacacttaacacactccgctgcattgaatgcagtggattgatcagaatgttaagactgacatttccaaggttggctactatgtaaaattaaaattacacaaattgtgcag

SEQ ID NO: 3374 - protein, 375 aa, Homosapiens; identical to SEQ ID NO: 485

SEQ ID NO: 3375 - DNA, 2303 bp, Homosapiens
ctcttcacgtcccagcgcgggtgggcgccggcggctcctcttaaccacaggttccagaagtcctctgcagaagtgcttccctctctcatttccaggaccacaattcccagagacttcggcttcacgacgtttctctttttgcccgatctctcccggagctggctgggcttcggccggccagaggcccacagcgacgacgtgatccgtcgtgagcgggtcccagggtttcctcggcggcccttttttctctcccctcggtcgtcccccttgcaggctgtcgcggctggcctgagcggtgacctggcgggtcgcgcctgcgctctgccctgtttcctgcctggctggtggcggcggccattttgttcatcctcctcctcctcctgctcctcctggttggagcgcagtgtccggagcgggctggggggagagagcccgagagcagggttcggtgccttttcctctgtccccagccggtgcccagagcccccctccccttcctccccaccccctcccctccccaaccctgccctcccccttgtcccgggatcgctccgtcgcacccaccatgatggaagacgacgggcagccccggactctatacgtaggtaacctttccagagatgtgacagaagtccttatacttcagttgttcagtcagattggaccctgtaaaagctgtaaaatgataacagagcatacaagcaatgacccatattgctttgtggaattttatgaacacagagatgcagctgctgcattagctgctatgaatgggagaaaaattttgggaaaggaggtcaaagtaaactgggcaaccacaccaagtagccagaaaaaagatacttccaatcacttccatgtgtttgttggggatttgagtccagaaattacaacagaagatatcaaatcagcatttgccccctttggtaaaatatcggatgcccgggtagttaaagacatggcaactggaaaatccaaaggctatggttttgtatctttttataacaaactggatgcagaaaatgcgattgtgcatatgggcggtcagtggttgggtggtcgtcaaatccgaaccaattgggccactcgtaaaccacctgcacctaaaagtacacaagaaaacaacactaagcagttgagatttgaagatgtagtaaaccagtcaagtccaaaaaattgtactgtgtactgtggaggaattgcgtctgggttaacagatcagcttatgagacagacattctcaccatttggacaaattatggaaataagagttttcccagaaaagggctattcatttgtcagattttcaacccatgaaagtgcagcccatgccattgtttcggtgaacggtactacgattgaaggacatgtggttaaatgctattggggtaaagaatctcctgatatgactaaaaacttccaacaggtaattcgatttttcatagcattctttaaggtttccatcttacatgtcacataaaagctttggaaactctgtaaaatgaacaataaaataaagcatatagctactttcagttgattgtatttcaaaattgattatttgcggtattaactgaatcttaatactttcttttcacaggtgtcaccaccccaataaacttagacaatgataaataacagagtcctattcacataagggtgcttacttagtttttctcttccttgtctcccactctttcttcatatacggtgtttcttatgtgttccctaaaacaatactttgctttttcctaggttgactatagtcaatggggccaatggagccaagtgtatggaaacccacaacagtatggacagtatatggcaaatgggtggcaagtaccgccttatggagtatacgggcaaccatggaatcaacaaggatttggagtagatcaatcaccttctgctgcttggatgggtggatttggtgctcagcctccccaaggacaagctcctccccctgtaatacctcctcctaaccaagccggatatggtatggcaagttaccaaacacagtgagccgggactctaaaaaaaaattgtaattcatgataggcttcgatttcctgtgacactctgaagacatgaaagtagacatcggaaaatgaaaatatttattttaaaaattgaaatgtttggaacctttagcacagatttgctttggtgaaggacacgtgtcttctagttctgcctttttaagtttttgttcatgatggatatgaacatgatttttctttatgtacaaaaactaaaataaagtcaataaagacaattctgactacaaattttgatataatagg

SEQ ID NO: 3376 - protein, 304 aa, Homosapiens
MMEDDGQPRTLYVGNLSRDVTEVLILQLFSQIGPCKSCKMITEHTSNDPYCFVEFYEHRDAAAALAAMNGRKILGKEVKVNWATTPSSQKKDTSNHFHVFVGDLSPEITTEDIKSAFAPFGKISDARVVKDMATGKSKGYGFVSFYNKLDAENAIVHMGGQWLGGRQIRTNWATRKPPAPKSTQENNTKQLRFEDVVNQSSPKNCTVYCGGIASGLTDQLMRQTFSPFGQIMEIRVFPEKGYSFVRFSTHESAAHAIVSVNGTTIEGHVVKCYWGKESPDMTKNFQQVIRFFIAFFKVSILHVT

SEQ ID NO: 3377 - DNA, 2365 bp, Homosapiens
ctcttcacgtcccagcgcgggtgggcgccggcggctcctcttaaccacaggttccagaagtcctctgcagaagtgcttccctctctcatttccaggaccacaattcccagagacttcggcttcacgacgtttctctttttgcccgatctctcccggagctggctgggcttcggccggccagaggcccacagcgacgacgtgatccgtcgtgagcgggtcccagggtttcctcggcggcccttttttctctcccctcggtcgtcccccttgcaggctgtcgcggctggcctgagcggtgacctggcgggtcgcgcctgcgctctgccctgtttcctgcctggctggtggcggcggccattttgttcatcctcctcctcctcctgctcctcctggttggagcgcagtgtccggagcgggctggggggagagagcccgagagcagggttcggtgccttttcctctgtccccagccggtgcccagagcccccctccccttcctccccaccccctcccctccccaaccctgccctcccccttgtcccgggatcgctccgtcgcacccaccatgatggaagacgacgggcagccccggactctacacacacaagctaagacatatggttctatcttcagaaaacaatatggtgtttagagcctagatacgtaggtaacctttccagagatgtgacagaagtccttatacttcagttgttcagtcagattggaccctgtaaaagctgtaaaatgataacagagcatacaagcaatgacccatattgctttgtggaattttatgaacacagagatgcagctgctgcattagctgctatgaatgggagaaaaattttgggaaaggaggtcaaagtaaactgggcaaccacaccaagtagccagaaaaaagatacttccaatcacttccatgtgtttgttggggatttgagtccagaaattacaacagaagatatcaaatcagcatttgccccctttggtaaaatatcggatgcccgggtagttaaagacatggcaactggaaaatccaaaggctatggttttgtatctttttataacaaactggatgcagaaaatgcgattgtgcatatgggcggtcagtggttgggtggtcgtcaaatccgaaccaattgggccactcgtaaaccacctgcacctaaaagtacacaagaaaacaacactaagcagttgagatttgaagatgtagtaaaccagtcaagtccaaaaaattgtactgtgtactgtggaggaattgcgtctgggttaacagatcagcttatgagacagacattctcaccatttggacaaattatggaaataagagttttcccagaaaagggctattcatttgtcagattttcaacccatgaaagtgcagcccatgccattgtttcggtgaacggtactacgattgaaggacatgtggttaaatgctattggggtaaagaatctcctgatatgactaaaaacttccaacaggtaattcgatttttcatagcattctttaaggtttccatcttacatgtcacataaaagctttggaaactctgtaaaatgaacaataaaataaagcatatagctactttcagttgattgtatttcaaaattgattatttgcggtattaactgaatcttaatactttcttttcacaggtgtcaccaccccaataaacttagacaatgataaataacagagtcctattcacataagggtgcttacttagtttttctcttccttgtctcccactctttcttcatatacggtgtttcttatgtgttccctaaaacaatactttgctttttcctaggttgactatagtcaatggggccaatggagccaagtgtatggaaacccacaacagtatggacagtatatggcaaatgggtggcaagtaccgccttatggagtatacgggcaaccatggaatcaacaaggatttggagtagatcaatcaccttctgctgcttggatgggtggatttggtgctcagcctccccaaggacaagctcctccccctgtaatacctcctcctaaccaagccggatatggtatggcaagttaccaaacacagtgagccgggactctaaaaaaaaattgtaattcatgataggcttcgatttcctgtgacactctgaagacatgaaagtagacatcggaaaatgaaaatatttattttaaaaattgaaatgtttggaacctttagcacagatttgctttggtgaaggacacgtgtcttctagttctgcctttttaagtttttgttcatgatggatatgaacatgatttttctttatgtacaaaaactaaaataaagtcaataaagacaattctgactacaaattttgatataatagg

SEQ ID NO: 3378 - protein, 265 aa, Homosapiens; identical to SEQ ID NO: 3368

SEQ ID NO: 3379 - DNA, 2350 bp, Homosapiens
ctcttcacgtcccagcgcgggtgggcgccggcggctcctcttaaccacaggttccagaagtcctctgcagaagtgcttccctctctcatttccaggaccacaattcccagagacttcggcttcacgacgtttctctttttgcccgatctctcccggagctggctgggcttcggccggccagaggcccacagcgacgacgtgatccgtcgtgagcgggtcccagggtttcctcggcggcccttttttctctcccctcggtcgtcccccttgcaggctgtcgcggctggcctgagcggtgacctggcgggtcgcgcctgcgctctgccctgtttcctgcctggctggtggcggcggccattttgttcatcctcctcctcctcctgctcctcctggttggagcgcagtgtccggagcgggctggggggagagagcccgagagcagggttcggtgccttttcctctgtccccagccggtgcccagagcccccctccccttcctccccaccccctcccctccccaaccctgccctcccccttgtcccgggatcgctccgtcgcacccaccatgatggaagacgacgggcagccccggactctatacgtaggtaacctttccagagatgtgacagaagtccttatacttcagttgttcagtcagattggaccctgtaaaagctgtaaaatgataacagagcatacaagcaatgacccatattgctttgtggaattttatgaacacagagatgcagctgctgcattagctgctatgaatgggagaaaaattttgggaaaggaggtcaaagtaaactgggcaaccacaccaagtagccagaaaaaagatacttccaatcacttccatgtgtttgttggggatttgagtccagaaattacaacagaagatatcaaatcagcatttgccccctttggtaaaatatcaattgctcataagaatggacaggatcttgaaggctaactgcaaggaactgtgcacactggaactcagttgtagattttttttctcatttctatttattcttattatacattatttatatatacatattttagtatttacattttaacattctatattcagtggagttctatatttccaatcatttaacttactcactaaaatttctgtgtaaatttgttgttttcgtactggtgtgcttagcattgttgttagttttttattctcctttcttaaatttctgaaaatgtcaatttttcaaaatttacagctgcccaaactccaaaatgatggtagagaattgaccaagaaaaataaagaaatctgttaacaggccatggatgcccgggtagttaaagacatggcaactggaaaatccaaaggctatggttttgtatctttttataacaaactggatgcagaaaatgcgattgtgcatatgggcggtcagtggttgggtggtcgtcaaatccgaaccaattgggccactcgtaaaccacctgcacctaaaagtacacaagaaaacaacactaagcagttgagatttgaagatgtagtaaaccagtcaagtccaaaaaattgtactgtgtactgtggaggaattgcgtctgggttaacagatcagcttatgagacagacattctcaccatttggacaaattatggaaataagagttttcccagaaaagggctattcatttgtcagattttcaacccatgaaagtgcagcccatgccattgtttcggtgaacggtactacgattgaaggacatgtggttaaatgctattggggtaaagaatctcctgatatgactaaaaacttccaacaggttgactatagtcaatggggccaatggagccaagtgtatggaaacccacaacagtatggacagtatatggcaaatgggtggcaagtaccgccttatggagtatacgggcaaccatggaatcaacaaggatttggagtagatcaatcaccttctgctgcttggatgggtggatttggtgctcagcctccccaaggacaagctcctccccctgtaatacctcctcctaaccaagccggatatggtatggcaagttaccaaacacagtgagccgggactctaaaaaaaaattgtaattcatgataggcttcgatttcctgtgacactctgaagacatgaaagtagacatcggaaaatgaaaatatttattttaaaaattgaaatgtttggaacctttagcacagatttgctttggtgaaggacacgtgtcttctagttctgcctttttaagtttttgttcatgatggatatgaacatgatttttctttatgtacaaaaactaaaataaagtcaataaagacaattctgactacaaattttgatataatagg

SEQ ID NO: 3380 - protein, 252 aa, Homosapiens
MDARVVKDMATGKSKGYGFVSFYNKLDAENAIVHMGGQWLGGRQIRTNWATRKPPAPKSTQENNTKQLRFEDVVNQSSPKNCTVYCGGIASGLTDQLMRQTFSPFGQIMEIRVFPEKGYSFVRFSTHESAAHAIVSVNGTTIEGHVVKCYWGKESPDMTKNFQQVDYSQWGQWSQVYGNPQQYGQYMANGWQVPPYGVYGQPWNQQGFGVDQSPSAAWMGGFGAQPPQGQAPPPVIPPPNQAGYGMASYQTQ

SEQ ID NO: 3381 - DNA, 1974 bp, Homosapiens
ctcttcacgtcccagcgcgggtgggcgccggcggctcctcttaaccacaggttccagaagtcctctgcagaagtgcttccctctctcatttccaggaccacaattcccagagacttcggcttcacgacgtttctctttttgcccgatctctcccggagctggctgggcttcggccggccagaggcccacagcgacgacgtgatccgtcgtgagcgggtcccagggtttcctcggcggcccttttttctctcccctcggtcgtcccccttgcaggctgtcgcggctggcctgagcggtgacctggcgggtcgcgcctgcgctctgccctgtttcctgcctggctggtggcggcggccattttgttcatcctcctcctcctcctgctcctcctggttggagcgcagtgtccggagcgggctggggggagagagcccgagagcagggttcggtgccttttcctctgtccccagccggtgcccagagcccccctccccttcctccccaccccctcccctccccaaccctgccctcccccttgtcccgggatcgctccgtcgcacccaccatgatggaagacgacgggcagccccggactctatacgtaggtaacctttccagagatgtgacagaagtccttatacttcagttgttcagtcagattggaccctgtaaaagctgtaaaatgataacagagcatacaagcaatgacccatattgctttgtggaattttatgaacacagagatgcagctgctgcattagctgctatgaatgggagaaaaattttgggaaaggaggtcaaagtaaactgggcaaccacaccaagtagccagaaaaaagatacttccaatcacttccatgtgtttgttggggatttgagtccagaaattacaacagaagatatcaaatcagcatttgccccctttggtaaaatatcggatgcccgggtagttaaagacatggcaactggaaaatccaaaggctatggttttgtatctttttataacaaactggatgcagaaaatgcgattgtgcatatgggcggtcagtggttgggtggtcgtcaaatccgaaccaattgggccactcgtaaaccacctgcacctaaaagtacacaagaaaacaacactaagcagttgagatttgaagatgtagtaaaccagtcaagtccaaaaaattgtactgtgtactgtggaggaattgcgtctgggttaacagatcagcttatgagacagacattctcaccatttggacaaattatggaaataagagttttcccagaaaagggctattcatttgtcagattttcaacccatgaaagtgcagcccatgccattgtttcggtgaacggtactacgattgaaggacatgtggttaaatgctattggggtaaagaatctcctgatatgactaaaaacttccaacaggttgactatagtcaatggggccaatggagccaagtgtatggaaacccacaacagtatggacagtatatggcaaatgggtggcaagtaccgccttatggagtatacgggcaaccatggaatcaacaaggatttggagtagatcaatcaccttctgctgcttggatgggtggatttggtgctcagcctccccaaggacaagctcctccccctgtaatacctcctcctaaccaagccggatatggtatggcaagttaccaaacacagtgagccgggactctaaaaaaaaattgtaattcatgataggcttcgatttcctgtgacactctgaagacatgaaagtagacatcggaaaatgaaaatatttattttaaaaattgaaatgtttggaacctttagcacagatttgctttggtgaaggacacgtgtcttctagttctgcctttttaagtttttgttcatgatggatatgaacatgatttttctttatgtacaaaaactaaaataaagtcaataaagacaattctgactacaaattttgatataatagg

SEQ ID NO: 3382 - protein, 375 aa, Homosapiens; identical to SEQ ID NO: 485

SEQ ID NO: 3383 - DNA, 663 bp, Homosapiens
atgaaaataaggccttttgataagaacacagacattagaattggcgacatacacctgagagataactgtcctgtaacaagactgttgtcatttaactacgcgttttcttatcctgtcacttcttgtgggatcaagaaaattatgttccaaacaaatgatgacgccatattatcagagatcagttacaaaccaaggttgcatactacctatgaatttccagtggtttgctttgtgaagaggcttaaattcccctctgtgatgcattttggaatgagtgggtttgatgcccacaccttgaaagaaatccctcaaaaaacaaaaggacaagagtcaccaactcccacacaaagtaaaacatggacacttaattttaacagtgttaataaggagcaactatccaagaagtcactgtatcaataatgcctgtgttataacaccctctcctccctaaagcaagggaacaagtgatacatcttgtctgaaaaccagtttcatcaatactgttgatgtgtctgtacaaagatgagtagcaacatctgttaccagtttcactacattttggagttttgaataacatatctataccatgatatttatactttttaatgagttaattttaagtgaaattgccattctaactctgaaatcaagctcatacataat

SEQ ID NO: 3384 - protein, 139 aa, Homosapiens
MKIRPFDKNTDIRIGDIHLRDNCPVTRLLSFNYAFSYPVTSCGIKKIMFQTNDDAILSEISYKPRLHTTYEFPVVCFVKRLKFPSVMHFGMSGFDAHTLKEIPQKTKGQESPTPTQSKTWTLNFNSVNKEQLSKKSLYQ

SEQ ID NO: 3385 - DNA, 760 bp, Homosapiens
aatcaagagagtctcagcctttaggtagctgacactgtgataagagcatcctgtgaactacccaaataaggaggaaaacgaacgcagctgagcatgggatgccatataaaaatcacttaaaccagtcgccactccttgtttcctgagttgtcctgtgctggaggtctgctcagacgaaggtctccatggcgttagaagtcttgatgctcctcgctgtcttgatttggaccggtgctgagaacctccatgtgaaaataagttgctctctggactggttgatggtctcagttatcccagttgcagaaagcagaaatctgtatatatttgcggatgaattacatctgggaatgggctgccctgcaaatcggatacatacatatgtatatgagtttatatatcttgttcgtgattgtggcatcaggacaagggtagtttctgaggaaactctcctttttcaaaccgagctgtactttaccccaaggaatatagatcatgaccctcaggaaatccatttggagtgttccacctctaggaaatcagtgtggcttacaccagtttctactgagaatgaaataaaattggatcctagtccttttattgctgactttcagacaacagcagaagagttaggattattatcttctagtccaaacttgctctgagctaaaggagaaatggaaacttgaagctggtgttatgtattttgcaggaaaacagtttcattttttcatagcaaaaatatagttggtgtatatctctc

SEQ ID NO: 3386 - protein, 158 aa, Homosapiens; identical to SEQ ID NO: 489

SEQ ID NO: 3387 - DNA, 1630 bp, Homosapiens
aatcaagagagtctcagcctttaggtagctgacactgtgataagagcatcctgtgaactacccaaataaggaggaaaacgaacgcagctgagcatgggatgccatataaaaatcacttaaaccagtcgccactccttgtttcctgagttgtcctgtgctggaggtctgctcagacgaaggtctccatggcgttagaagtcttgatgctcctcgctgtcttgatttggaccggtgctgagaacctccatgtgaaaataagttgctctctggactggttgatggtctcagttatcccagttgcagaaagcagaaatctgtatatatttgcggatgaattacatctgggaatgggctgccctgcaaatcggatacatacatatgtatatgagtttatatatcttgttcgtgattgtggcatcaggacaagggtagtttctgaggaaactctcctttttcaaaccgagctgtactttaccccaaggaatatagatcatgaccctcaggaaatccatttggagtgttccacctctaggaaatcagtgtggcttacaccagtttctactgagaatgaaataaaattggatcctagtccttttattgctgactttcagacaacagcagaagagttaggattattatcttctagtccaaacttgctctgagctaaaggagaaatggaaacttgaagctggtgttatgtattttgcaggaaaacagtttcattttttcatagcaaaaatatagttggtgtatatctctccttaagtctctggtttctaaaaaccctacttcagtaaaggtcctgattagttgattagtgaatgtgtatttctaaatatttgtattcagtaggggtatggctgattaatttaacattaactattaggtaattcatattatacatttaagttctttctgttctgtgtagaagattcagaaatatgtcttcaaagacaatgacttgatctaattgataagaacctccaataaatatgttctaatatttttcaggaagaataaagaatagagagagacatataaatgtgcaagaggcaaaactttgagcatagtgtaaaatttaacatattaactctcacgaaaggcaaaatccttttatgtgcagatactttaattcatgtagattttcctattaatcagtaaagttgaatcctaacaataatgccatgtgacaacctatttagattattccagaattaaattcaatttattttctagagctcaagtaaccactaccttaactgaaatttgatgttaggtttcccttgttcctccgaatggttcttccacactcaaaataattgaatggttgagttggttaagcaaagagttatcctgccacctaagagcattcattaaatgattatttattaccacctactttatactatcttcctttctttaaacatggagtctaaatatgtaatatatcaaaaaatacttctgatttggtagatttcttatatcaagggtgagaattgaactgtgccattggctattcaatagcttattgaatgtatgttttggatgccacatcctcctggaagcaaattttgccaagatactgtttattattatttttaattaaagtgatactattccattttcaatt

SEQ ID NO: 3388 - protein, 158 aa, Homosapiens; identical to SEQ ID NO: 489

SEQ ID NO: 3389 - DNA, 319 bp, Homosapiens
atggcgttagaagtcttgatgctcctcgctgtcttgatttggaccggtgctgagaacctccatgtgaaaataagttgctctctggactggttgatggtctcagttatcccagttgcagaaagcagaaatctgtatatatttgcggatgaattacatctgggaatgggctgccctgcaaatcggatacatacatatgtatatgagtttatatatcttgttcgtgattgtggcatcaggacaagggtaagaacagtgattgtttgtaaaaaatactgcatgttttgtcagacttttatgcctagtattaaaattgtctttt

SEQ ID NO: 3390 - protein, 105 aa, Homosapiens
MALEVLMLLAVLIWTGAENLHVKISCSLDWLMVSVIPVAESRNLYIFADELHLGMGCPANRIHTYVYEFIYLVRDCGIRTRVRTVIVCKKYCMFCQTFMPSIKIV

SEQ ID NO: 3391 - DNA, 495 bp, Homosapiens
tgtcttgatttggaccggtgctgagaacctccatgtgaaaataagttgctctctggactggttgatggtctcagttatcccagttgcagaaagcagaaatctgtatatatttgcggatgaattacatctgggaatgggctgccctgcaaatcggatacatacatatgtatatgagtttatatatcttgttcgtgattgtggcatcaggacaagggtagtttctgaggaaactctcctttttcaaaccgagctgtactttaccccaaggaatatagatcatgaccctcaggaaatccatttggagtgttccacctctagtgtttgatgcagaaatcatggggagactatctggaattagttcttctgtaagcctatctgctcaaatcctgtaccaagagtccacgaggatctagaaggcatagtatgctggctctatgccatactcctgaatgactattctgtatatgatcatgatattaaacagtggtaaaactg

SEQ ID NO: 3392 - protein, 86 aa, Homosapiens
MVSVIPVAESRNLYIFADELHLGMGCPANRIHTYVYEFIYLVRDCGIRTRVVSEETLLFQTELYFTPRNIDHDPQEIHLECSTSSV

SEQ ID NO: 3393 - DNA, 1386 bp, Homosapiens
ctctaaagtgttgcataaggcaaagataacgttaagtctgtggaggcttccgttatcgggaaaagatgctgtagtgatcttttctgagtgtctcctacttgcgacaaggtggacttgggaggaaagccgtctgccaaagcctgaagcctccaagttctgtagttcaggaaccttgtctgttgtagcagggataaaacccacaagaacatggatacagaacagttttggaatgaacattgccagtgctacaattgcactagtggggactgcttttctctcactaaatatagcagttaatatccagtcattaaggagttgtcactcttcatcagagtcaccggacctatgcaattacatgggctccatatcaaatggcatggtgtctctactgctgattctcaccttgctggaattatgcgtaaccatctctaccatagccatgtggtgcaatgcaaactgctgtaattcaagagaggaaatttcctcacctcccaattctgtgtaatcaagaatacctccttaattctgagagcatgaatatttgaccttaaatctccagtgactcagagcttcacccacaaactcaggagaacataagcctgctcgtaaagctcaatccttctatcatggcaccaatcacaagaaccttggacgtttgactgactctatcctttctctcctaactataaatcctatttgtgtgtcgtgggtatggaaggacagatatatttctttaggcattcttggatatctgtaacttctatgatcattactccaaagttgtttccagaaattggttctatttcttcttatccacctactccattgctttatgaggtttaaggaaggaaggcggtataatccctattcaatatattttttctaaaatccaacttctgaccgcccagtaggaagaaaaatgagacattttttccattacagagaaatgcttcttgactttaacatcagcattataaaaagtgtcaaataaaaaattaccatcattatcattaaaataaattttcactgtatttgagatgggagggttaaggctcagggattttatttcagtgaactgctggaactcacacatgccctgatatgtaaatgatgatttatgttggcgagtctgagagcaagcccaaatgtgttcttcaaaggacaatgggaaactgtaaagtagagaactaaagaataaggcctttagaatctgacacatctgggttcaaattctgaaactgtcacttattacctgtatgaacatgggcaaattatctaatctctctgatctatttttcctcatctgtaaaataggtgtaataataacaactactttgtcggttgctctgagggttaaatgaaaataaaaagaaaatgtgaaacagc

SEQ ID NO: 3394 - protein, 91 aa, Homosapiens; identical to SEQ ID NO: 491

SEQ ID NO: 3395 - DNA, 486 bp, Homosapiens
ggaggcttccgttatcgggaaaagatgctgtagtgatcttttctgagtgtctcctacttgcgacaaggtggacttgggaggaaagccgtctgccaaagcctgaagcctccaagccataaacaaccccaatggcctcccacgaagttgataatgcagagctggggtcagcctctgcccatggtaccccaggcagtgaggcgggaccagaagagctgaatacttctgtctaccagcccatagatggatcaccagattatcagaaagcaaaattacaagttcttggggccatccagatcctgaatgcagcaatgattctggctttgggtgtctttctgggttccttgcaatacccataccacttccaaaagcacttctttttcttcaccttctacacaggctacccgatttggggtgctgtgtttgtgagtattcgtactcccctggctatatgttatttcttagataccactgctggagatgtgtttg

SEQ ID NO: 3396 - protein, 118 aa, Homosapiens
MASHEVDNAELGSASAHGTPGSEAGPEELNTSVYQPIDGSPDYQKAKLQVLGAIQILNAAMILALGVFLGSLQYPYHFQKHFFFFTFYTGYPIWGAVFVSIRTPLAICYFLDTTAGDV

SEQ ID NO: 3397 - DNA, 1638 bp, Homosapiens
tagtgatcttttctgagtgtctcctacttgcgacaaggtggacttgggaggaaagccgtctgccaaagcctgaagcctccaagccataaacaaccccaatggcctcccacgaagttgataatgcagagctggggtcagcctctgcccatggtaccccaggcagtgaggcgggaccagaagagctgaatacttctgtctaccagcccatagatggatcaccagattatcagaaagcaaaattacaagttcttggggccatccagatcctgaatgcagcaatgattctggctttgggtgtctttctgggttccttgcaatacccataccacttccaaaagcacttctttttcttcaccttctacacaggctacccgatttggggtgctgtgtttttctgtagttcaggaaccttgtctgttgtagcagggataaaacccacaagaacatggatacagaacagttttggaatgaacattgccagtgctacaattgcactagtggggactgcttttctctcactaaatatagcagttaatatccagtcattaaggagttgtcactcttcatcagagtcaccggacctatgcaattacatgggctccatatcaaatggcatggtgtctctactgctgattctcaccttgctggaattatgcgtaaccatctctaccatagccatgtggtgcaatgcaaactgctgtaattcaagagaggaaatttcctcacctcccaattctgtgtaatcaagaatacctccttaattctgagagcatgaatatttgaccttaaatctccagtgactcagagcttcacccacaaactcaggagaacataagcctgctcgtaaagctcaatccttctatcatggcaccaatcacaagaaccttggacgtttgactgactctatcctttctctcctaactataaatcctatttgtgtgtcgtgggtatggaaggacagatatatttctttaggcattcttggatatctgtaacttctatgatcattactccaaagttgtttccagaaattggttctatttcttcttatccacctactccattgctttatgaggtttaaggaaggaaggcggtataatccctattcaatatattttttctaaaatccaacttctgaccgcccagtaggaagaaaaatgagacattttttccattacagagaaatgcttcttgactttaacatcagcattataaaaagtgtcaaataaaaaattaccatcattatcattaaaataaattttcactgtatttgagatgggagggttaaggctcagggattttatttcagtgaactgctggaactcacacatgccctgatatgtaaatgatgatttatgttggcgagtctgagagcaagcccaaatgtgttcttcaaaggacaatgggaaactgtaaagtagagaactaaagaataaggcctttagaatctgacacatctgggttcaaattctgaaactgtcacttattacctgtatgaacatgggcaaattatctaatctctctgatctatttttcctcatctgtaaaataggtgtaataataacaactactttgtcggttgctctgagggttaaatgaaaataaaaagaaaatgtgaaacagcaccacaggtacttg

SEQ ID NO: 3398 - protein, 214 aa, Homosapiens; identical to SEQ ID NO: 495

SEQ ID NO: 3399 - DNA, 1206 bp, Homosapiens
cttttctgagtgtctcctacttgcgacaaggtggacttgggaggaaagccgtctgccaaagcctgaagcctccaagttctgtagttcaggaaccttgtctgttgtagcagggataaaacccacaagaacatggatacagaacagttttggaatgaacattgccagtgctacaattgcactagtggggactgcttttctctcactaaatatagcagttaatatccagtcattaaggagttgtcactcttcatcagagtcaccggacctatgcaattacatgggctccatatcaaatgaaatttcctcacctcccaattctgtgtaatcaagaatacctccttaattctgagagcatgaatatttgaccttaaatctccagtgactcagagcttcacccacaaactcaggagaacataagcctgctcgtaaagctcaatccttctatcatggcaccaatcacaagaaccttggacgtttgactgactctatcctttctctcctaactataaatcctatttgtgtgtcgtgggtatggaaggacagatatatttctttaggcattcttggatatctgtaacttctatgatcattactccaaagttgtttccagaaattggttctatttcttcttatccacctactccattgctttatgaggtttaaggaaggaaggcggtataatccctattcaatatattttttctaaaatccaacttctgaccgcccagtaggaagaaaaatgagacattttttccattacagagaaatgcttcttgactttaacatcagcattataaaaagtgtcaaataaaaaattaccatcattatcattaaaataaattttcactgtatttgagatgggagggttaaggctcagggattttatttcagtgaactgctggaactcacacatgccctgatatgtaaatgatgatttatgttggcgagtctgagagcaagcccaaatgtgttcttcaaaggacaatgggaaactgtaaagtagagaactaaagaataaggcctttagaatctgacacatctgggttcaaattctgaaactgtcacttattacctgtatgaacatgggcaaattatctaatctctctgatctatttttcctcatctgtaaaataggtgtaataataacaactactttgtcggttgctctgagggttaaatgaaaataaaaagaaaatgtgaaacagc

SEQ ID NO: 3400 - protein, 57 aa, Homosapiens
MNIASATIALVGTAFLSLNIAVNIQSLRSCHSSSESPDLCNYMGSISNEISSPPNSV

SEQ ID NO: 3401 - DNA, 1413 bp, Homosapiens
gtgtctcctacttgcgacaaggtggacttgggaggaaagccgtctgccaaagcctgaagcctccaagccataaacaaccccaatggcctcccacgaagttgataatgcagagctggggtcagcctctgcccatggtaccccaggcagtgaggcgggaccagaagagctgaatacttctgtctaccagcccatagatggatcaccagattatcagaaagcaaaattacaagttcttgggatacagaacagttttggaatgaacattgccagtgctacaattgcactagtggggactgcttttctctcactaaatatagcagttaatatccagtcattaaggagttgtcactcttcatcagagtcaccggacctatgcaattacatgggctccatatcaaatggcatggtgtctctactgctgattctcaccttgctggaattatgcgtaaccatctctaccatagccatgtggtgcaatgcaaactgctgtaattcaagagaggaaatttcctcacctcccaattctgtgtaatcaagaatacctccttaattctgagagcatgaatatttgaccttaaatctccagtgactcagagcttcacccacaaactcaggagaacataagcctgctcgtaaagctcaatccttctatcatggcaccaatcacaagaaccttggacgtttgactgactctatcctttctctcctaactataaatcctatttgtgtgtcgtgggtatggaaggacagatatatttctttaggcattcttggatatctgtaacttctatgatcattactccaaagttgtttccagaaattggttctatttcttcttatccacctactccattgctttatgaggtttaaggaaggaaggcggtataatccctattcaatatattttttctaaaatccaacttctgaccgcccagtaggaagaaaaatgagacattttttccattacagagaaatgcttcttgactttaacatcagcattataaaaagtgtcaaataaaaaattaccatcattatcattaaaataaattttcactgtatttgagatgggagggttaaggctcagggattttatttcagtgaactgctggaactcacacatgccctgatatgtaaatgatgatttatgttggcgagtctgagagcaagcccaaatgtgttcttcaaaggacaatgggaaactgtaaagtagagaactaaagaataaggcctttagaatctgacacatctgggttcaaattctgaaactgtcacttattacctgtatgaacatgggcaaattatctaatctctctgatctatttttcctcatctgtaaaataggtgtaataataacaactactttgtcggttgctctgagggttaaatgaaaataaaaagaaaatgtgaaacagc

SEQ ID NO: 3402 - protein, 149 aa, Homosapiens
MASHEVDNAELGSASAHGTPGSEAGPEELNTSVYQPIDGSPDYQKAKLQVLGIQNSFGMNIASATIALVGTAFLSLNIAVNIQSLRSCHSSSESPDLCNYMGSISNGMVSLLLILTLLELCVTISTIAMWCNANCCNSREEISSPPNSV

SEQ ID NO: 3403 - DNA, 1423 bp, Homosapiens
cgacaaggtggacttgggaggaaagccgtctgccaaagcctgaagcctccaaggccatccagatcctgaatgcagcaatgattctggctttgggtgtctttctgggttccttgcaatacccataccacttccaaaagcacttctttttcttcaccttctacacaggctacccgatttggggtgctgtgtttttctgtagttcaggaaccttgtctgttgtagcagggataaaacccacaagaacatggatacagaacagttttggaatgaacattgccagtgctacaattgcactagtggggactgcttttctctcactaaatatagcagttaatatccagtcattaaggagttgtcactcttcatcagagtcaccggacctatgcaattacatgggctccatatcaaatggcatggtgtctctactgctgattctcaccttgctggaattatgcgtaaccatctctaccatagccatgtggtgcaatgcaaactgctgtaattcaagagaggaaatttcctcacctcccaattctgtgtaatcaagaatacctccttaattctgagagcatgaatatttgaccttaaatctccagtgactcagagcttcacccacaaactcaggagaacataagcctgctcgtaaagctcaatccttctatcatggcaccaatcacaagaaccttggacgtttgactgactctatcctttctctcctaactataaatcctatttgtgtgtcgtgggtatggaaggacagatatatttctttaggcattcttggatatctgtaacttctatgatcattactccaaagttgtttccagaaattggttctatttcttcttatccacctactccattgctttatgaggtttaaggaaggaaggcggtataatccctattcaatatattttttctaaaatccaacttctgaccgcccagtaggaagaaaaatgagacattttttccattacagagaaatgcttcttgactttaacatcagcattataaaaagtgtcaaataaaaaattaccatcattatcattaaaataaattttcactgtatttgagatgggagggttaaggctcagggattttatttcagtgaactgctggaactcacacatgccctgatatgtaaatgatgatttatgttggcgagtctgagagcaagcccaaatgtgttcttcaaaggacaatgggaaactgtaaagtagagaactaaagaataaggcctttagaatctgacacatctgggttcaaattctgaaactgtcacttattacctgtatgaacatgggcaaattatctaatctctctgatctatttttcctcatctgtaaaataggtgtaataataacaactactttgtcggttgctctgagggttaaatgaaaataaaaagaaaatgtgaaacagc

SEQ ID NO: 3404 - protein, 154 aa, Homosapiens
MILALGVFLGSLQYPYHFQKHFFFFTFYTGYPIWGAVFFCSSGTLSVVAGIKPTRTWIQNSFGMNIASATIALVGTAFLSLNIAVNIQSLRSCHSSSESPDLCNYMGSISNGMVSLLLILTLLELCVTISTIAMWCNANCCNSREEISSPPNSV

SEQ ID NO: 3405 - DNA, 1506 bp, Homosapiens
gggaggaaagccgtctgccaaagcctgaagcctccaagccataaacaaccccaatggcctcccacgaagttgataatgcagagctggggtcagcctctgcccatggtaccccaggcagtgaggcgggaccagaagagctgaatacttctgtctaccagcccatagatggatcaccagattatcagaaagcaaaattacaagttcttgggtctattcaacgtgaagaggatgaggatgaagacctttatgataatctacttccacttaatgaatattctgtagttcaggaaccttgtctgttgtagcagggataaaacccacaagaacatggatacagaacagttttggaatgaacattgccagtgctacaattgcactagtggggactgcttttctctcactaaatatagcagttaatatccagtcattaaggagttgtcactcttcatcagagtcaccggacctatgcaattacatgggctccatatcaaatggcatggtgtctctactgctgattctcaccttgctggaattatgcgtaaccatctctaccatagccatgtggtgcaatgcaaactgctgtaattcaagagaggaaatttcctcacctcccaattctgtgtaatcaagaatacctccttaattctgagagcatgaatatttgaccttaaatctccagtgactcagagcttcacccacaaactcaggagaacataagcctgctcgtaaagctcaatccttctatcatggcaccaatcacaagaaccttggacgtttgactgactctatcctttctctcctaactataaatcctatttgtgtgtcgtgggtatggaaggacagatatatttctttaggcattcttggatatctgtaacttctatgatcattactccaaagttgtttccagaaattggttctatttcttcttatccacctactccattgctttatgaggtttaaggaaggaaggcggtataatccctattcaatatattttttctaaaatccaacttctgaccgcccagtaggaagaaaaatgagacattttttccattacagagaaatgcttcttgactttaacatcagcattataaaaagtgtcaaataaaaaattaccatcattatcattaaaataaattttcactgtatttgagatgggagggttaaggctcagggattttatttcagtgaactgctggaactcacacatgccctgatatgtaaatgatgatttatgttggcgagtctgagagcaagcccaaatgtgttcttcaaaggacaatgggaaactgtaaagtagagaactaaagaataaggcctttagaatctgacacatctgggttcaaattctgaaactgtcacttattacctgtatgaacatgggcaaattatctaatctctctgatctatttttcctcatctgtaaaataggtgtaataataacaactactttgtcggttgctctgagggttaaatgaaaataaaaagaaaatgtgaaacagc

SEQ ID NO: 3406 - protein, 91 aa, Homosapiens; identical to SEQ ID NO: 491

SEQ ID NO: 3407 - DNA, 391 bp, Homosapiens
aggcctactacaatgacccgatgatgtctactactccaaggcaagacagaattgaatattgtacaaactctgttactctgccctggtgtcccatttgtggagagtcattgtaatgtatggacagaattgaacccttctgtaacactcaaaattttagtagctagtggaaaaagggaaagcatgaaggctttggatttcttttctatcacagccataaacaaccccaatggcctcccacgaagttgataatgcagagctggggtcagcctctgcccatggtaccccaggcagtgaggcgggaccagaagagctgaatacttctgtctaccagcccatagatggatcaccagattatcagaaagcaaaattacaagttcttgggtctattcaa

SEQ ID NO: 3408 - protein, 54 aa, Homosapiens
MASHEVDNAELGSASAHGTPGSEAGPEELNTSVYQPIDGSPDYQKAKLQVLGSI

SEQ ID NO: 3409 - DNA, 1386 bp, Homosapiens
ataatgcagagctggggtcagcctctgcccatggtaccccaggcagtgaggcgggaccagaagagctgaatacttctgtctaccagcccatagatggatcaccagattatcagaaagcaaaattacaagttcttggggccatccagatcctgaatgcagcaatgattctggctttgggtgtctttctgggttccttgcaatacccataccacttccaaaagcacttctttttcttcaccttctacacaggctacccgatttggggtgctgtgtttttctgtagttcaggaaccttgtctgttgtagcagggataaaacccacaagaacatggatacagaacagttttggaatgaacattgccagtgctacaattgcactagtggggacttgctgattctcaccttgctggaattatgcgtaaccatctctaccatagccatgtggtgcaatgcaaactgctgtaattcaagagaggaaatttcctcacctcccaattctgtgtaatcaagaatacctccttaattctgagagcatgaatatttgaccttaaatctccagtgactcagagcttcacccacaaactcaggagaacataagcctgctcgtaaagctcaatccttctatcatggcaccaatcacaagaaccttggacgtttgactgactctatcctttctctcctaactataaatcctatttgtgtgtcgtgggtatggaaggacagatatatttctttaggcattcttggatatctgtaacttctatgatcattactccaaagttgtttccagaaattggttctatttcttcttatccacctactccattgctttatgaggtttaaggaaggaaggcggtataatccctattcaatatattttttctaaaatccaacttctgaccgcccagtaggaagaaaaatgagacattttttccattacagagaaatgcttcttgactttaacatcagcattataaaaagtgtcaaataaaaaattaccatcattatcattaaaataaattttcactgtatttgagatgggagggttaaggctcagggattttatttcagtgaactgctggaactcacacatgccctgatatgtaaatgatgatttatgttggcgagtctgagagcaagcccaaatgtgttcttcaaaggacaatgggaaactgtaaagtagagaactaaagaataaggcctttagaatctgacacatctgggttcaaattctgaaactgtcacttattacctgtatgaacatgggcaaattatctaatctctctgatctatttttcctcatctgtaaaataggtgtaataataacaactactttgtcggttgctctgagggttaaatgaaaataaaaagaaaatgtgaaacagc

SEQ ID NO: 3410 - protein, 77 aa, Homosapiens
MILALGVFLGSLQYPYHFQKHFFFFTFYTGYPIWGAVFFCSSGTLSVVAGIKPTRTWIQNSFGMNIASATIALVGTC

SEQ ID NO: 3411 - DNA, 1328 bp, Homosapiens
aaacatcatatgttctcacttataagcgggagctaagctatgaggatgcaaaggcataagaatgacacaatggactttggggactcagggggaaagttctgtagttcaggaaccttgtctgttgtagcagggataaaacccacaagaacatggatacagaacagttttggaatgaacattgccagtgctacaattgcactagtggggactgcttttctctcactaaatatagcagttaatatccagtcattaaggagttgtcactcttcatcagagtcaccggacctatgcaattacatgggctccatatcaaatggcatggtgtctctactgctgattctcaccttgctggaattatgcgtaaccatctctaccatagccatgtggtgcaatgcaaactgctgtaattcaagagaggaaatttcctcacctcccaattctgtgtaatcaagaatacctccttaattctgagagcatgaatatttgaccttaaatctccagtgactcagagcttcacccacaaactcaggagaacataagcctgctcgtaaagctcaatccttctatcatggcaccaatcacaagaaccttggacgtttgactgactctatcctttctctcctaactataaatcctatttgtgtgtcgtgggtatggaaggacagatatatttctttaggcattcttggatatctgtaacttctatgatcattactccaaagttgtttccagaaattggttctatttcttcttatccacctactccattgctttatgaggtttaaggaaggaaggcggtataatccctattcaatatattttttctaaaatccaacttctgaccgcccagtaggaagaaaaatgagacattttttccattacagagaaatgcttcttgactttaacatcagcattataaaaagtgtcaaataaaaaattaccatcattatcattaaaataaattttcactgtatttgagatgggagggttaaggctcagggattttatttcagtgaactgctggaactcacacatgccctgatatgtaaatgatgatttatgttggcgagtctgagagcaagcccaaatgtgttcttcaaaggacaatgggaaactgtaaagtagagaactaaagaataaggcctttagaatctgacacatctgggttcaaattctgaaactgtcacttattacctgtatgaacatgggcaaattatctaatctctctgatctatttttcctcatctgtaaaataggtgtaataataacaactactttgtcggttgctctgagggttaaatgaaaataaaaagaaaatgtgaaacagc

SEQ ID NO: 3412 - protein, 135 aa, Homosapiens
MRMQRHKNDTMDFGDSGGKFCSSGTLSVVAGIKPTRTWIQNSFGMNIASATIALVGTAFLSLNIAVNIQSLRSCHSSSESPDLCNYMGSISNGMVSLLLILTLLELCVTISTIAMWCNANCCNSREEISSPPNSV

SEQ ID NO: 3413 - DNA, 1056 bp, Homosapiens
ggatgttgccactgggtttgatataaggcatcatatcccctagggcatggtgtctctactgctgattctcaccttgctggaattatgcgtaaccatctctaccatagccatgtggtgcaatgcaaactgctgtaattcaagagaggaaatttcctcacctcccaattctgtgtaatcaagaatacctccttaattctgagagcatgaatatttgaccttaaatctccagtgactcagagcttcacccacaaactcaggagaacataagcctgctcgtaaagctcaatccttctatcatggcaccaatcacaagaaccttggacgtttgactgactctatcctttctctcctaactataaatcctatttgtgtgtcgtgggtatggaaggacagatatatttctttaggcattcttggatatctgtaacttctatgatcattactccaaagttgtttccagaaattggttctatttcttcttatccacctactccattgctttatgaggtttaaggaaggaaggcggtataatccctattcaatatattttttctaaaatccaacttctgaccgcccagtaggaagaaaaatgagacattttttccattacagagaaatgcttcttgactttaacatcagcattataaaaagtgtcaaataaaaaattaccatcattatcattaaaataaattttcactgtatttgagatgggagggttaaggctcagggattttatttcagtgaactgctggaactcacacatgccctgatatgtaaatgatgatttatgttggcgagtctgagagcaagcccaaatgtgttcttcaaaggacaatgggaaactgtaaagtagagaactaaagaataaggcctttagaatctgacacatctgggttcaaattctgaaactgtcacttattacctgtatgaacatgggcaaattatctaatctctctgatctatttttcctcatctgtaaaataggtgtaataataacaactactttgtcggttgctctgagggttaaatgaaaataaaaagaaaatgtgaaacagc

SEQ ID NO: 3414 - protein, 42 aa, Homosapiens
MVSLLLILTLLELCVTISTIAMWCNANCCNSREEISSPPNSV

SEQ ID NO: 3415 - DNA, 3725 bp, Homosapiens
aacccatttcaactgcctattcagagcatgcagtaagaggaaatccaccaagtctcaatataataatattctttattcctggacagctcggttaatgaaaaaatggacacagaaagtaataggagagcaaatcttgctctcccacaggagccttccagtgtgcctgcatttgaagtcttggaaatatctccccaggaagtatcttcaggcagactattgaagtcggcctcatccccaccactgcatacatggctgacagttttgaaaaaagagcaggagttcctgggggtaacacaaattctgactgctatgatatgcctttgttttggaacagttgtctgctctgtacttgatatttcacacattgagggagacattttttcatcatttaaagcaggttatccattctggggagccatatttttttctatttctggaatgttgtcaattatatctgaaaggagaaatgcaacatatctggtgagaggaagcctgggagcaaacactgccagcagcatagctgggggaacgggaattaccatcctgatcatcaacctgaagaagagcttggcctatatccacatccacagttgccagaaattttttgagaccaagtgctttatggcttccttttccactgaaattgtagtgatgatgctgtttctcaccattctgggacttggtagtgctgtgtcactcacaatctgtggagctggggaagaactcaaaggaaacaaggttccagaggatcgtgtttatgaagaattaaacatatattcagctacttacagtgagttggaagacccaggggaaatgtctcctcccattgatttataagaatcacgtgtccagaacactctgattcacagccaaggatccagaaggccaaggtcttgttaaggggctactggaaaaatttctattctctccacagcctgctggttttacattagatttattcgcctgataagaatattttgtttctgctgcttctgtccaccttaatattctccttctatttgtagatatgatagactcctatttttcttgttttatattatgaccacacacatctctgctggaaagtcaacatgtagtaagcaagatttaactgtttgattataactgtgcaaatacagaaaaaaagaaggctggctgaaagttgagttaaactttgacagtttgataatatttggttcttagggtttttttttttttttagcattcttaatagttacagttgggcatgatttgtaccatccacccatacccacacagtcacagtcacacacacatatgtattacttacactatatataacttcctatgcaaatattttaccaccagtcaataatacatttttgccaagacatgaagttttataaagatctgtataattgcctgaatcaccagcacattcactgacatgatattatttgcagattgacaagtaggaagtggggaattttattaagttactcgttgtctggggaggtaaataggttaaaaacagggaaattataagtgcagagattaacatttcacaaatgtttagtgaaacatttgtgaaaaaagaagactaaattaagacctgagctgaaataaagtgagtggaaatggaaataatggttatatctaaaacatgtagaaaaagagtaactggtagattttgttaacaaattaaagaataaagttagacaagcaactggttgactaatacattaagcgtttgagtctaagatgaaaggagaacactggttatgttgatagaatgataaaaagggtcgggcgcggaggctcacgcctgtaatcccagccctttgggaggccgaggtgggcagatcacgaagtcagtagtttgagaccagcctggccaacatagtgaaaccccgtctctactaaaaatacaaaaaaaaaattagctgggtgtggtggcagtcacctgtagtcccagctacttgggaggctgaggcaggagaatcgcttcaacctgggaggcggaggttgcagtgagccgagatcgcaccagtgcactccagccttggtgacaatgggagactccatctcaaaaaaaaaaaaaaaaaaaaaaaagataaaaagtcagaaatctgaaaagtggaggaagagtacaaatagacctaaattaagctcatttttaggctttgattttggggagacaaagggaaatgcagccatagagggcctgatgacatccaatacagagttctggtaaagataaaatttgatacaggtttggtgtcattataagagaaatcattattaaatgaagcaagttaacactctaagagaattattttgagatagaagtgaagctaagctaaacttcacatgcctataattggagggaaaaactaaggataaaatctagcctagaagatacaataattagtcataaacatgcattgtgaaactgtagagagcaggtagcccaaaatagagaaagattagataaagagaaaataagtatccatcagagacagtatctctaggcttgggcaagagaaaagtccacagtgataagcaactccacctaaggcatgaatatgcggcagagaaaacagcaatagtgaatgaatgcaaaaggtgctgagaaattccacacatgagtattgtgatgagtaaatgaataaaacatttgcaaagacctttagagaaagagaatgggagcatatgtgagaaataagatagttgattatgaatagaaggtagtgaagaaaagcaagctaagaaaaaattctgtttataaaagaaggaaaagatagtttatgtttttagcctaagtataagagtcctacagatggactgaaaaaaatcagtctgagagtattagtcacaattaatgaaataattacattttatgtattgaggatgccaagattaaaaggtgacaggtagatgttaatttccctagattgtgaaagtgatcacgacaatcacacaacaaataattaagtgacttggtatgctttatttaattgtagggcctgaggttttccattctcatttttctaaaatacaattttgtttctccaaatttgacagcagaataaaaaccctaccctttcactgtgtatcatgctaagctgcatctctactcttgatcatctgtaggtattaatcacatcacttccatggcatggatgttcacatacagactcttaaccctggtttaccaggacctctaggagtggatccaatctatatctttacagttgtatagtatatgatatctcttttatttcactcaatttatattttcatcattgactacatatttcttatacacaacacacaatttatgaattttttctcaagatcattctgagagttgccccaccctacctgccttttatagtatgcccacctcaggcagacacagagcacaatgctggggttctcttcacactatcactgccccaaattgtctttctaaatttcaacttcaatgtcatcttctccatgaagaccactgaatgaacaccttttcatccagccttaatttcttgctccataactactctatcccacgatgcagtattgtatcattaattattagtgtgcttgtgacctccttatgtattctcaattacctgtatttgtgcaataaattggaataatgtaacttgatttcttatctgtgtttgtgttggcatgcaagatttaggtacttatcaaagataatggggaattaaggcatcaataaa

SEQ ID NO: 3416 - protein, 244 aa, Homosapiens; identical to SEQ ID NO: 497

SEQ ID NO: 3417 - DNA, 384 bp, Homosapiens
gcctgcgtctcacaatggcgctttttgtttcaactgtttatgcagttggagttctccatataattaatatgaactatcatttatggggatccttctcagaagaactgctgaatgctggatatgaaagctaatgtctttgagagtcagtggacaagtctgtaacaggggctttgctgctggaaggaaagcgaccaagggtctgatccaaggcagcctggggatgaatacagtcagtgccaccacagcaggaacaggcacagttctgatggctgtggaagtaatatatatctttttaagaagaatttgtatctctacttatagcacatttttttctgtagtaagtactgttgcactaatacaataatataaataggttttatattc

SEQ ID NO: 3418 - protein, 77 aa, Homosapiens [sequence omitted]

SEQ ID NO: 3419 - DNA, 1856 bp, Homosapiens
ccaagtgacttctacactgttgaactctgcttacccattcataggaccctttttttttatcatctctggctctctatcaatcgccacagagaaaaggttaaccaagcttttggtgcatagcagcctggttggaagcattctgagtgctctgtctgccctggtgggtttcattatcctgtctgtcaaacaggccaccttaaatcctgcctcactgcagtgtgagttggacaaaaataatataccaacaagaagttatgtttcttacttttatcatgattcactttataccacggactgctatacagccaaagccagtctggctggaactctctctctgatgctgatttgcactctgctggaattctgcctagctgtgctcactgctgtgctgcggtggaaacaggcttactctgacttccctggggtgagtgtgctggccggcttcacttaaccttgcctagtgtatcttatccctgcactgtgttgagtatgtcaccaagagtggtagaaggaacaatcagtcagtcatgagatacacatgggagggcatttgcattgtgatggaagacagagaagaaaagcagatggcaattgagtagctgataagctgaaaattcactggatatgaaaatagttaatcatgagaaatcaactgattcaatcttcctattttgtcagcgaagggaatgagactctgggaagttaaatgactggcctggcattatgctatgagtttgtgcctttgctgaggacactagaacctggcttgcctcccttataagcagaaacaatttctgccacaaccactagtctctttaatagtattgacttggtaaagggcatttacacacgtaactggatccagtgaatgtcttatgctctgcatttgcccctggtgatcttaaaattcgtttgcctttttaaagctatattaaaaatgtattgttgaatcaaacccctatggacttatggctttatttaactgaattaaaaagccttgatttatccaaaattgtattatagagtgtagaatgaatactagggtgataaattgcaattatttgaagaacctggtgatatgctctacttatcttggattagctaagaattctatgtatacagttggaaaaatggcatatatacatctatcttgaacctgattgaagtctgaagacctaacatattttgtttcttctagagtgtacttttcctgcctcacagttacattggtaattctggcatgtcctcaaaaatgactcatgactgtggatatgaagaactattgacttcttaagaaaaaagggagaaatattaatcagaaagttgattcttatgataatatggaaaagttaaccattatagaaaagcaaagcttgagtttcctaaatgtaagcttttaaagtaatgaacattaaaaaaaaccattatttcactgtcatttaagatatgtgttcattggggatctcttgatttgcctgacattgacttcagcaaaagcacggggctgtaaattaccatttactagattagccaaatagtctgaatttccagaaaacaaggcagaatgatcattcccagaaacatttcccagaaaatgtttcccagaaaactagacagaatgatcattcaatggatcacagtgaagcaaaggacacaactttttattgtaccccttaattgtcaacaggagttaactgatttgttgtggtgctcagacttttttatacaggtgctagtgttttatcctatgtattttaactcattagtgcataaaggcaagccccatataatgaagtctcagggtatatgaaagtagctggcttcaaaataaaatttttgagtgcatattttgtttt

SEQ ID NO: 3420 - protein, 81 aa, Homosapiens [sequence omitted]

SEQ ID NO: 3421 - DNA, 1083 bp, Homosapiens
cccaagtgacttctacactgttgaactctgcttacccattcataggaccctttttttttatcatctctggctctctatcaatcgccacagagaaaaggttaaccaagcttttggtgcatagcagcctggttggaagcattctgagtgctctgtctgccctggtgggtttcattatcctgtctgtcaaacaggccaccttaaatcctgcctcactgcagtgtgagttggacaaaaataatataccaacaagaagttatgtttcttacttttatcatgattcactttataccacggactgctatacagccaaagccagtctggctggaactctctctctgatgctgatttgcactctgctggaattctgcctagctgtgctcactgctgtgctgcggtggaaacaggcttactctgacttccctgggagtgtacttttcctgcctcacagttacattggtaattctggcatgtcctcaaaaatgactcatgactgtggatatgaagaactattgacttcttaagaaaaaagggagaaatattaatcagaaagttgattcttatgataatatggaaaagttaaccattatagaaaagcaaagcttgagtttcctaaatgtaagcttttaaagtaatgaacattaaaaaaaaccattatttcactgtcatttaagatatgtgttcattggggatctcttgatttgcctgacattgacttcagcaaaagcacggggctgtaaattaccatttactagattagccaaatagtctgaatttccagaaaacaaggcagaatgatcattcccagaaacatttcccagaaaatgtttcccagaaaactagacagaatgatcattcaatggatcacagtgaagcaaaggacacaactttttattgtaccccttaattgtcaacaggagttaactgatttgttgtggtgctcagacttttttatacaggtgctagtgttttatcctatgtattttaactcattagtgcataaaggcaagccccatataatgaagtctcagggtatatgaaagtagctggcttcaaaataaaatttttgagtgcatattttgtttt

SEQ ID NO: 3422 - protein, 60 aa, Homosapiens
MLICTLLEFCLAVLTAVLRWKQAYSDFPGSVLFLPHSYIGNSGMSSKMTHDCGYEELLTS

SEQ ID NO: 3423 - DNA, 2187 bp, Homosapiens
aaggaagtgcaggaacatttcacaaatctacaatctgtgagtatcacatcctgtatagctgtaaacactggaataaggaagggctgatgactttcagaagatgaaggtaagtagaaaccgttgatgggactgagaaaccagagttaaaacctctttggagcttctgaggactcagctggaaccaacgggcacagttggcaacaccatcatgacatcacaacctgttcccaatgagaccatcatagtgctcccatcaaatgtcatcaacttctcccaagcagagaaacccgaacccaccaaccaggggcaggatagcctgaagaaacatctacacgcagaaatcaaagttattgggactatccagatcttgtgtggcatgatggtattgagcttggggatcattttggcatctgcttccttctctccaaattttacccaagtgacttctacactgttgaactctgcttacccattcataggaccctttttttttatcatctctggctctctatcaatcgccacagagaaaaggttaaccaagcttttggtgcatagcagcctggttggaagcattctgagtgctctgtctgccctggtgggtttcattatcctgtctgtcaaacaggccaccttaaatcctgcctcactgcagtggaactctctctctgatgctgatttgcactctgctggaattctgcctagctgtgctcactgctgtgctgcggtggaaacaggcttactctgacttccctggggtgagtgtgctggccggcttcacttaaccttgcctagtgtatcttatccctgcactgtgttgagtatgtcaccaagagtggtagaaggaacaatcagtcagtcatgagatacacatgggagggcatttgcattgtgatggaagacagagaagaaaagcagatggcaattgagtagctgataagctgaaaattcactggatatgaaaatagttaatcatgagaaatcaactgattcaatcttcctattttgtcagcgaagggaatgagactctgggaagttaaatgactggcctggcattatgctatgagtttgtgcctttgctgaggacactagaacctggcttgcctcccttataagcagaaacaatttctgccacaaccactagtctctttaatagtattgacttggtaaagggcatttacacacgtaactggatccagtgaatgtcttatgctctgcatttgcccctggtgatcttaaaattcgtttgcctttttaaagctatattaaaaatgtattgttgaatcaaacccctatggacttatggctttatttaactgaattaaaaagccttgatttatccaaaattgtattatagagtgtagaatgaatactagggtgataaattgcaattatttgaagaacctggtgatatgctctacttatcttggattagctaagaattctatgtatacagttggaaaaatggcatatatacatctatcttgaacctgattgaagtctgaagacctaacatattttgtttcttctagagtgtacttttcctgcctcacagttacattggtaattctggcatgtcctcaaaaatgactcatgactgtggatatgaagaactattgacttcttaagaaaaaagggagaaatattaatcagaaagttgattcttatgataatatggaaaagttaaccattatagaaaagcaaagcttgagtttcctaaatgtaagcttttaaagtaatgaacattaaaaaaaaccattatttcactgtcatttaagatatgtgttcattggggatctcttgatttgcctgacattgacttcagcaaaagcacggggctgtaaattaccatttactagattagccaaatagtctgaatttccagaaaacaaggcagaatgatcattcccagaaacatttcccagaaaatgtttcccagaaaactagacagaatgatcattcaatggatcacagtgaagcaaaggacacaactttttattgtaccccttaattgtcaacaggagttaactgatttgttgtggtgctcagacttttttatacaggtgctagtgttttatcctatgtattttaactcattagtgcataaaggcaagccccatataatgaagtctcagggtatatgaaagtagctggcttcaaaataaaatttttgagtgcatattttgtttt

SEQ ID NO: 3424 - protein, 178 aa, Homosapiens; identical to SEQ ID NO: 501

SEQ ID NO: 3425 - DNA, 2237 bp, Homosapiens
aaggaagtgcaggaacatttcacaaatctacaatctgtgagtatcacatcctgtatagctgtaaacactggaataaggaagggctgatgactttcagaagatgaaggtaagtagaaaccgttgatgggactgagaaaccagagttaaaacctctttggagcttctgaggactcagctggaaccaacgggcacagttggcaacaccatcatgacatcacaacctgttcccaatgagaccatcatagtgctcccatcaaatgtcatcaacttctcccaagcagagaaacccgaacccaccaaccaggggcaggatagcctgaagaaacatctacacgcagaaatcaaagttattgggactatccagatcttgtgtggcatgatggtattgagcttggggatcattttggcatctgcttccttctctccaaattttacccaagtgacttctacactgttgaactctgcttacccattcataggaccctttttttttatcatctctggctctctatcaatcgccacagagaaaaggttaaccaagcttttggtgcatagcagcctggttggaagcattctgagtgctctgtctgccctggtgggtttcattatcctgtctgtcaaacaggccaccttaaatcctgcctcactgcagtgtgagttggacaaaaataatataccaacaagaagttatgtttcttacttttatcatgattcactttataccacggactgctatacagaattctgcctagctgtgctcactgctgtgctgcggtggaaacaggcttactctgacttccctggggtgagtgtgctggccggcttcacttaaccttgcctagtgtatcttatccctgcactgtgttgagtatgtcaccaagagtggtagaaggaacaatcagtcagtcatgagatacacatgggagggcatttgcattgtgatggaagacagagaagaaaagcagatggcaattgagtagctgataagctgaaaattcactggatatgaaaatagttaatcatgagaaatcaactgattcaatcttcctattttgtcagcgaagggaatgagactctgggaagttaaatgactggcctggcattatgctatgagtttgtgcctttgctgaggacactagaacctggcttgcctcccttataagcagaaacaatttctgccacaaccactagtctctttaatagtattgacttggtaaagggcatttacacacgtaactggatccagtgaatgtcttatgctctgcatttgcccctggtgatcttaaaattcgtttgcctttttaaagctatattaaaaatgtattgttgaatcaaacccctatggacttatggctttatttaactgaattaaaaagccttgatttatccaaaattgtattatagagtgtagaatgaatactagggtgataaattgcaattatttgaagaacctggtgatatgctctacttatcttggattagctaagaattctatgtatacagttggaaaaatggcatatatacatctatcttgaacctgattgaagtctgaagacctaacatattttgtttcttctagagtgtacttttcctgcctcacagttacattggtaattctggcatgtcctcaaaaatgactcatgactgtggatatgaagaactattgacttcttaagaaaaaagggagaaatattaatcagaaagttgattcttatgataatatggaaaagttaaccattatagaaaagcaaagcttgagtttcctaaatgtaagcttttaaagtaatgaacattaaaaaaaaccattatttcactgtcatttaagatatgtgttcattggggatctcttgatttgcctgacattgacttcagcaaaagcacggggctgtaaattaccatttactagattagccaaatagtctgaatttccagaaaacaaggcagaatgatcattcccagaaacatttcccagaaaatgtttcccagaaaactagacagaatgatcattcaatggatcacagtgaagcaaaggacacaactttttattgtaccccttaattgtcaacaggagttaactgatttgttgtggtgctcagacttttttatacaggtgctagtgttttatcctatgtattttaactcattagtgcataaaggcaagccccatataatgaagtctcagggtatatgaaagtagctggcttcaaaataaaatttttgagtgcatattttgtttt

SEQ ID NO: 3426 - protein, 207 aa, Homosapiens
MTSQPVPNETIIVLPSNVINFSQAEKPEPTNQGQDSLKKHLHAEIKVIGTIQILCGMMVLSLGIILASASFSPNFTQVTSTLLNSAYPFIGPFFFIISGSLSIATEKRLTKLLVHSSLVGSILSALSALVGFIILSVKQATLNPASLQCELDKNNIPTRSYVSYFYHDSLYTTDCYTEFCLAVLTAVLRWKQAYSDFPGVSVLAGFT

SEQ ID NO: 3427 - DNA, 1995 bp, Homosapiens
aaggaagtgcaggaacatttcacaaatctacaatctgtgagtatcacatcctgtatagctgtaaacactggaataaggaagggctgatgactttcagaagatgaaggtaagtagaaaccgttgatgggactgagaaaccagagttaaaacctctttggagcttctgaggactcagctggaaccaacgggcacagttggcaacaccatcatgacatcacaacctgttcccaatgagaccatcatagtgctcccatcaaatgtcatcaacttctcccaagcagagaaacccgaacccaccaaccaggggcaggatagcctgaagaaacatctacacgcagaaatcaaagttattggggtgcatagcagcctggttggaagcattctgagtgctctgtctgccctggtgggtttcattatcctgtctgtcaaacaggccaccttaaatcctgcctcactgcagtggaactctctctctgatgctgatttgcactctgctggaattctgcctagctgtgctcactgctgtgctgcggtggaaacaggcttactctgacttccctggggtgagtgtgctggccggcttcacttaaccttgcctagtgtatcttatccctgcactgtgttgagtatgtcaccaagagtggtagaaggaacaatcagtcagtcatgagatacacatgggagggcatttgcattgtgatggaagacagagaagaaaagcagatggcaattgagtagctgataagctgaaaattcactggatatgaaaatagttaatcatgagaaatcaactgattcaatcttcctattttgtcagcgaagggaatgagactctgggaagttaaatgactggcctggcattatgctatgagtttgtgcctttgctgaggacactagaacctggcttgcctcccttataagcagaaacaatttctgccacaaccactagtctctttaatagtattgacttggtaaagggcatttacacacgtaactggatccagtgaatgtcttatgctctgcatttgcccctggtgatcttaaaattcgtttgcctttttaaagctatattaaaaatgtattgttgaatcaaacccctatggacttatggctttatttaactgaattaaaaagccttgatttatccaaaattgtattatagagtgtagaatgaatactagggtgataaattgcaattatttgaagaacctggtgatatgctctacttatcttggattagctaagaattctatgtatacagttggaaaaatggcatatatacatctatcttgaacctgattgaagtctgaagacctaacatattttgtttcttctagagtgtacttttcctgcctcacagttacattggtaattctggcatgtcctcaaaaatgactcatgactgtggatatgaagaactattgacttcttaagaaaaaagggagaaatattaatcagaaagttgattcttatgataatatggaaaagttaaccattatagaaaagcaaagcttgagtttcctaaatgtaagcttttaaagtaatgaacattaaaaaaaaccattatttcactgtcatttaagatatgtgttcattggggatctcttgatttgcctgacattgacttcagcaaaagcacggggctgtaaattaccatttactagattagccaaatagtctgaatttccagaaaacaaggcagaatgatcattcccagaaacatttcccagaaaatgtttcccagaaaactagacagaatgatcattcaatggatcacagtgaagcaaaggacacaactttttattgtaccccttaattgtcaacaggagttaactgatttgttgtggtgctcagacttttttatacaggtgctagtgttttatcctatgtattttaactcattagtgcataaaggcaagccccatataatgaagtctcagggtatatgaaagtagctggcttcaaaataaaatttttgagtgcatattttgtttt

SEQ ID NO: 3428 - protein, 114 aa, Homosapiens
MTSQPVPNETIIVLPSNVINFSQAEKPEPTNQGQDSLKKHLHAEIKVIGVHSSLVGSILSALSALVGFIILSVKQATLNPASLQWNSLSDADLHSAGILPSCAHCCAAVETGLL

SEQ ID NO: 3429 - DNA, 2310 bp, Homosapiens
ttgctagaagtttacagaaaaggaagtgcaggaacatttcacaaatctacaatctgtgagtatcacatcctgtatagctgtaaacactggaataaggaagggctgatgactttcagaagatgaaggtaagtagaaaccgttgatgggactgagaaaccagagttaaaacctctttggagcttctgaggactcagctggaaccaacgggcacagttggcaacaccatcatgacatcacaacctgttcccaatgagaccatcatagtgctcccatcaaatgtcatcaacttctcccaagcagagaaacccgaacccaccaaccaggggcaggatagcctgaagaaacatctacacgcagaaatcaaagttattgggactatccagatcttgtgtggcatgatggtattgagcttggggatcattttggcatctgcttccttctctccaaattttacccaagtgacttctacactgttgaactctgcttacccattcataggaccctttttttttatcatctctggctctctatcaatcgccacagagaaaaggttaaccaagcttttggtgcatagcagcctggttggaagcattctgagtgctctgtctgccctggtgggtttcattatcctgtctgtcaaacaggccaccttaaatcctgcctcactgcagtgtgagttggacaaaaataatataccaacaagaagttatgtttcttacttttatcatgattcactttataccacggactgctatacagccaaagccagtctggctggaactctctctctgatgctgatttgcactctgctggaattctgcctagctgtgctcactgctgtgctgcggtggaaacaggcttactctgacttccctggggtgagtgtgctggccggcttcacttaaccttgcctagtgtatcttatccctgcactgtgttgagtatgtcaccaagagtggtagaaggaacaatcagtcagtcatgagatacacatgggagggcatttgcattgtgatggaagacagagaagaaaagcagatggcaattgagtagctgataagctgaaaattcactggatatgaaaatagttaatcatgagaaatcaactgattcaatcttcctattttgtcagcgaagggaatgagactctgggaagttaaatgactggcctggcattatgctatgagtttgtgcctttgctgaggacactagaacctggcttgcctcccttataagcagaaacaatttctgccacaaccactagtctctttaatagtattgacttggtaaagggcatttacacacgtaactggatccagtgaatgtcttatgctctgcatttgcccctggtgatcttaaaattcgtttgcctttttaaagctatattaaaaatgtattgttgaatcaaacccctatggacttatggctttatttaactgaattaaaaagccttgatttatccaaaattgtattatagagtgtagaatgaatactagggtgataaattgcaattatttgaagaacctggtgatatgctctacttatcttggattagctaagaattctatgtatacagttggaaaaatggcatatatacatctatcttgaacctgattgaagtctgaagacctaacatattttgtttcttctagagtgtacttttcctgcctcacagttacattggtaattctggcatgtcctcaaaaatgactcatgactgtggatatgaagaactattgacttcttaagaaaaaagggagaaatattaatcagaaagttgattcttatgataatatggaaaagttaaccattatagaaaagcaaagcttgagtttcctaaatgtaagcttttaaagtaatgaacattaaaaaaaaccattatttcactgtcatttaagatatgtgttcattggggatctcttgatttgcctgacattgacttcagcaaaagcacggggctgtaaattaccatttactagattagccaaatagtctgaatttccagaaaacaaggcagaatgatcattcccagaaacatttcccagaaaatgtttcccagaaaactagacagaatgatcattcaatggatcacagtgaagcaaaggacacaactttttattgtaccccttaattgtcaacaggagttaactgatttgttgtggtgctcagacttttttatacaggtgctagtgttttatcctatgtattttaactcattagtgcataaaggcaagccccatataatgaagtctcagggtatatgaaagtagctggcttcaaaataaaatttttgagtgcatattttgtttt

SEQ ID NO: 3430 - protein, 225 aa, Homosapiens; identical to SEQ ID NO: 499

SEQ ID NO: 3431 - DNA, 1443 bp, Homosapiens
ttttactgaagttgctagaagtttacagaaaaggaagtgcaggaacatttcacaaatctacaatctgtgagtatcacatcctgtatagctgtaaacactggaataaggaagggctgatgactttcagaagatgaaggtaagtagaaaccgttgatgggactgagaaaccagagttaaaacctctttggagcttctgaggactcagctggaaccaacgggcacagttggcaacaccatcatgacatcacaacctgttcccaatgagaccatcatagtgctcccatcaaatgtcatcaacttctcccaagcagagaaacccgaacccaccaaccaggggcaggatagcctgaagaaacatctacacgcagaaatcaaagttattgggactatccagatcttgtgtggcatgatggtattgagcttggggatcattttggcatctgcttccttctctccaaattttacccaagtgacttctacactgttgaactctgcttacccattcataggaccctttttttttatcatctctggctctctatcaatcgccacagagaaaaggttaaccaagcttttggtgcatagcagcctggttggaagcattctgagtgctctgtctgccctggtgggtttcattatcctgtctgtcaaacaggccaccttaaatcctgcctcactgcagtggaactctctctctgatgctgatttgcactctgctggaattctgcctagctgtgctcactgctgtgctgcggtggaaacaggcttactctgacttccctgggagtgtacttttcctgcctcacagttacattggtaattctggcatgtcctcaaaaatgactcatgactgtggatatgaagaactattgacttcttaagaaaaaagggagaaatattaatcagaaagttgattcttatgataatatggaaaagttaaccattatagaaaagcaaagcttgagtttcctaaatgtaagcttttaaagtaatgaacattaaaaaaaaccattatttcactgtcatttaagatatgtgttcattggggatctcttgatttgcctgacattgacttcagcaaaagcacggggctgtaaattaccatttactagattagccaaatagtctgaatttccagaaaacaaggcagaatgatcattcccagaaacatttcccagaaaatgtttcccagaaaactagacagaatgatcattcaatggatcacagtgaagcaaaggacacaactttttattgtaccccttaattgtcaacaggagttaactgatttgttgtggtgctcagacttttttatacaggtgctagtgttttatcctatgtattttaactcattagtgcataaaggcaagccccatataatgaagtctcagggtatatgaaagtagctggcttcaaaataaaatttttgagtgcatattttgtttt

SEQ ID NO: 3432 - protein, 178 aa, Homosapiens; identical to SEQ ID NO: 501

SEQ ID NO: 3433 - DNA, 1547 bp, Homosapiens
ttttactgaagttgctagaagtttacagaaaaggaagtgcaggaacatttcacaaatctacaatctgtgagtatcacatcctgtatagctgtaaacactggaataaggaagggctgatgactttcagaagatgaaggtaagtagaaaccgttgatgggactgagaaaccagagttaaaacctctttggagcttctgaggactcagctggaaccaacgggcacagttggcaacaccatcatgacatcacaacctgttcccaatgagaccatcatagtgctcccatcaaatgtcatcaacttctcccaagcagagaaacccgaacccaccaaccaggggcaggatagcctgaagaaacatctacacgcagaaatcaaagttattgggactatccagatcttgtgtggcatgatggtattgagcttggggatcattttggcatctgcttccttctctccaaattttacccaagtgacttctacactgttgaactctgcttacccattcataggaccctttttttttatcatctctggctctctatcaatcgccacagagaaaaggttaaccaagcttttggtgcatagcagcctggttggaagcattctgagtgctctgtctgccctggtgggtttcattatcctgtctgtcaaacaggccaccttaaatcctgcctcactgcagtgtgagttggacaaaaataatataccaacaagaagttatgtttcttacttttatcatgattcactttataccacggactgctatacagccaaagccagtctggctggaactctctctctgatgctgatttgcactctgctggaattctgcctagctgtgctcactgctgtgctgcggtggaaacaggcttactctgacttccctgggagtgtacttttcctgcctcacagttacattggtaattctggcatgtcctcaaaaatgactcatgactgtggatatgaagaactattgacttcttaagaaaaaagggagaaatattaatcagaaagttgattcttatgataatatggaaaagttaaccattatagaaaagcaaagcttgagtttcctaaatgtaagcttttaaagtaatgaacattaaaaaaaaccattatttcactgtcatttaagatatgtgttcattggggatctcttgatttgcctgacattgacttcagcaaaagcacggggctgtaaattaccatttactagattagccaaatagtctgaatttccagaaaacaaggcagaatgatcattcccagaaacatttcccagaaaatgtttcccagaaaactagacagaatgatcattcaatggatcacagtgaagcaaaggacacaactttttattgtaccccttaattgtcaacaggagttaactgatttgttgtggtgctcagacttttttatacaggtgctagtgttttatcctatgtattttaactcattagtgcataaaggcaagccccatataatgaagtctcagggtatatgaaagtagctggcttcaaaataaaatttttgagtgcatattttgtttt

SEQ ID NO: 3434 - protein, 248 aa, Homosapiens; identical to SEQ ID NO: 503

SEQ ID NO: 3435 - DNA, 649 bp, Homosapiens
atggaatctgacctgaccattttctcttttatcttagtttatcatctctggctctctatcaatcgccacagagaaaaggttaaccaagcttttggtgcatagcagcctggttggaagcattctgagtgctctgtctgccctggtgggtttcattatcctgtctgtcaaacaggccaccttaaatcctgcctcactgcagtgtgagttggacaaaaataatataccaacaagaagttatgtttcttacttttatcatgattcactttataccacggactgctatacagccaaagccagtctggctggaactctctctctgatgctgatttgcactctgctggaattctgcctagctgtgctcactgctgtgctgcggtggaaacaggcttactctgacttccctgggagtgtacttttcctgcctcacagttacattggtaattctggcatgtcctcaaaaatgactcatgactgtggatatgaagaactattgacttcttaagaaaaaagggagaaatattaatcagaaagttgattcttatgataatatggaaaagttaaccattatagaaaagcaaagcttgagtttcctaaatgtaagcttttaaagtaatgaacattaaaaaaaaccattatttcactgtcattt

SEQ ID NO: 3436 - protein, 60 aa, Homosapiens; identical to SEQ ID NO: 3422

SEQ ID NO: 3437 - DNA, 1441 bp, Homosapiens
ccaagtgacttctacactgttgaactctgcttacccattcataggaccctttttttttatcatctctggctctctatcaatcgccacagagaaaaggttaaccaagcttttggtgcatagcagcctggttggaagcattctgagtgctctgtctgccctggtgggtttcattatcctgtctgtcaaacaggccaccttaaatcctgcctcactgcagtgtgagttggacaaaaataatataccaacaagaagttatgtttcttacttttatcatgattcactttataccacggactgctatacagccaaagccagtctggctggaactctctctctgatgctgatttgcactctgctggaattctgcctagctgtgctcactgctgtgctgcggtggaaacaggcttactctgacttccctggggtgagtgtgctggccggcttcacttaaccttgcctagtgtatcttatccctgcactgtgttgagtatgtcaccaagagtggtagaaggaacaatcagtcagtcatgagatacacatgggagggcatttgcattgtgatggaagacagagaagaaaagcagatggcaattgagtagctgataagctgaaaattcactggatatgaaaatagttaatcatgagaaatcaactgattcaatcttcctattttgtcagcgaagggaatgagactctgggaagttaaatgactggcctggcattatgctatgagtttgtgcctttgctgaggacactagaacctggcttgcctcccttataagcagaaacaatttctgccacaaccactagtctctttaatagtattgacttggtaaagggcatttacacacgtaactggatccagtgaatgtcttatgctctgcatttgcccctggtgatcttaaaattcgtttgcctttttaaagctatattaaaaatgtattgttgaatcaaacccctatggacttatggctttatttaactgaattaaaaagccttgatttatccaaaattgtattatagagtgtagaatgaatactagggtgataaattgcaattatttgaagaacctggtgatatgctctacttatcttggattagctaagaattctatgtatacagttggaaaaatggcatatatacatctatcttgaacctgattgaagtctgaagacctaacatattttgtttcttctagagtgtacttttcctgcctcacagttacattggtaattctggcatgtcctcaaaaatgactcatgactgtggatatgaagaactattgacttcttaagaaaaaagggagaaatattaatcagaaagttgattcttatgataatatggaaaagttaaccattatagaaaagcaaagcttgagtttcctaaatgtaagcttttaaagtaatgaacattaaaaaaaaccattatttcactgtcattt

SEQ ID NO: 3438 - protein, 40 aa, Homosapiens
MNTRVINCNYLKNLVICSTYLGLAKNSMYTVGKMAYIHLS

SEQ ID NO: 3439 - DNA, 668 bp, Homosapiens
cccaagtgacttctacactgttgaactctgcttacccattcataggaccctttttttttatcatctctggctctctatcaatcgccacagagaaaaggttaaccaagcttttggtgcatagcagcctggttggaagcattctgagtgctctgtctgccctggtgggtttcattatcctgtctgtcaaacaggccaccttaaatcctgcctcactgcagtgtgagttggacaaaaataatataccaacaagaagttatgtttcttacttttatcatgattcactttataccacggactgctatacagccaaagccagtctggctggaactctctctctgatgctgatttgcactctgctggaattctgcctagctgtgctcactgctgtgctgcggtggaaacaggcttactctgacttccctgggagtgtacttttcctgcctcacagttacattggtaattctggcatgtcctcaaaaatgactcatgactgtggatatgaagaactattgacttcttaagaaaaaagggagaaatattaatcagaaagttgattcttatgataatatggaaaagttaaccattatagaaaagcaaagcttgagtttcctaaatgtaagcttttaaagtaatgaacattaaaaaaaaccattatttcactgtcattt

SEQ ID NO: 3440 - protein, 60 aa, Homosapiens; identical to SEQ ID NO: 3422

SEQ ID NO: 3441 - DNA, 998 bp, Homosapiens
aaggaagtgcaggaacatttcacaaatctacaatctgtgagtatcacatcctgtatagctgtaaacactggaataaggaagggctgatgactttcagaagatgaaggtaagtagaaaccgttgatgggactgagaaaccagagttaaaacctctttggagcttctgaggactcagctggaaccaacgggcacagttggcaacaccatcatgacatcacaacctgttcccaatgagaccatcatagtgctcccatcaaatgtcatcaacttctcccaagcagagaaacccgaacccaccaaccaggggcaggatagcctgaagaaacatctacacgcagaaatcaaagttattgggactatccagatcttgtgtggcatgatggtattgagcttggggatcattttggcatctgcttccttctctccaaattttacccaagtgacttctacactgttgaactctgcttacccattcataggaccctttttttttatcatctctggctctctatcaatcgccacagagaaaaggttaaccaagcttttggtgcatagcagcctggttggaagcattctgagtgctctgtctgccctggtgggtttcattatcctgtctgtcaaacaggccaccttaaatcctgcctcactgcagtggaactctctctctgatgctgatttgcactctgctggaattctgcctagctgtgctcactgctgtgctgcggtggaaacaggcttactctgacttccctgggagtgtacttttcctgcctcacagttacattggtaattctggcatgtcctcaaaaatgactcatgactgtggatatgaagaactattgacttcttaagaaaaaagggagaaatattaatcagaaagttgattcttatgataatatggaaaagttaaccattatagaaaagcaaagcttgagtttcctaaatgtaagcttttaaagtaatgaacattaaaaaaaaccattatttcactgtcattt

SEQ ID NO: 3442 - protein, 178 aa, Homosapiens; identical to SEQ ID NO: 501

SEQ ID NO: 3443 - DNA, 1772 bp, Homosapiens
aaggaagtgcaggaacatttcacaaatctacaatctgtgagtatcacatcctgtatagctgtaaacactggaataaggaagggctgatgactttcagaagatgaaggtaagtagaaaccgttgatgggactgagaaaccagagttaaaacctctttggagcttctgaggactcagctggaaccaacgggcacagttggcaacaccatcatgacatcacaacctgttcccaatgagaccatcatagtgctcccatcaaatgtcatcaacttctcccaagcagagaaacccgaacccaccaaccaggggcaggatagcctgaagaaacatctacacgcagaaatcaaagttattgggactatccagatcttgtgtggcatgatggtattgagcttggggatcattttggcatctgcttccttctctccaaattttacccaagtgacttctacactgttgaactctgcttacccattcataggaccctttttttttatcatctctggctctctatcaatcgccacagagaaaaggttaaccaagcttttggtgcatagcagcctggttggaagcattctgagtgctctgtctgccctggtgggtttcattatcctgtctgtcaaacaggccaccttaaatcctgcctcactgcagtggaactctctctctgatgctgatttgcactctgctggaattctgcctagctgtgctcactgctgtgctgcggtggaaacaggcttactctgacttccctggggtgagtgtgctggccggcttcacttaaccttgcctagtgtatcttatccctgcactgtgttgagtatgtcaccaagagtggtagaaggaacaatcagtcagtcatgagatacacatgggagggcatttgcattgtgatggaagacagagaagaaaagcagatggcaattgagtagctgataagctgaaaattcactggatatgaaaatagttaatcatgagaaatcaactgattcaatcttcctattttgtcagcgaagggaatgagactctgggaagttaaatgactggcctggcattatgctatgagtttgtgcctttgctgaggacactagaacctggcttgcctcccttataagcagaaacaatttctgccacaaccactagtctctttaatagtattgacttggtaaagggcatttacacacgtaactggatccagtgaatgtcttatgctctgcatttgcccctggtgatcttaaaattcgtttgcctttttaaagctatattaaaaatgtattgttgaatcaaacccctatggacttatggctttatttaactgaattaaaaagccttgatttatccaaaattgtattatagagtgtagaatgaatactagggtgataaattgcaattatttgaagaacctggtgatatgctctacttatcttggattagctaagaattctatgtatacagttggaaaaatggcatatatacatctatcttgaacctgattgaagtctgaagacctaacatattttgtttcttctagagtgtacttttcctgcctcacagttacattggtaattctggcatgtcctcaaaaatgactcatgactgtggatatgaagaactattgacttcttaagaaaaaagggagaaatattaatcagaaagttgattcttatgataatatggaaaagttaaccattatagaaaagcaaagcttgagtttcctaaatgtaagcttttaaagtaatgaacattaaaaaaaaccattatttcactgtcattt

SEQ ID NO: 3444 - protein, 178 aa, Homosapiens; identical to SEQ ID NO: 501

SEQ ID NO: 3445 - DNA, 1822 bp, Homosapiens
aaggaagtgcaggaacatttcacaaatctacaatctgtgagtatcacatcctgtatagctgtaaacactggaataaggaagggctgatgactttcagaagatgaaggtaagtagaaaccgttgatgggactgagaaaccagagttaaaacctctttggagcttctgaggactcagctggaaccaacgggcacagttggcaacaccatcatgacatcacaacctgttcccaatgagaccatcatagtgctcccatcaaatgtcatcaacttctcccaagcagagaaacccgaacccaccaaccaggggcaggatagcctgaagaaacatctacacgcagaaatcaaagttattgggactatccagatcttgtgtggcatgatggtattgagcttggggatcattttggcatctgcttccttctctccaaattttacccaagtgacttctacactgttgaactctgcttacccattcataggaccctttttttttatcatctctggctctctatcaatcgccacagagaaaaggttaaccaagcttttggtgcatagcagcctggttggaagcattctgagtgctctgtctgccctggtgggtttcattatcctgtctgtcaaacaggccaccttaaatcctgcctcactgcagtgtgagttggacaaaaataatataccaacaagaagttatgtttcttacttttatcatgattcactttataccacggactgctatacagaattctgcctagctgtgctcactgctgtgctgcggtggaaacaggcttactctgacttccctggggtgagtgtgctggccggcttcacttaaccttgcctagtgtatcttatccctgcactgtgttgagtatgtcaccaagagtggtagaaggaacaatcagtcagtcatgagatacacatgggagggcatttgcattgtgatggaagacagagaagaaaagcagatggcaattgagtagctgataagctgaaaattcactggatatgaaaatagttaatcatgagaaatcaactgattcaatcttcctattttgtcagcgaagggaatgagactctgggaagttaaatgactggcctggcattatgctatgagtttgtgcctttgctgaggacactagaacctggcttgcctcccttataagcagaaacaatttctgccacaaccactagtctctttaatagtattgacttggtaaagggcatttacacacgtaactggatccagtgaatgtcttatgctctgcatttgcccctggtgatcttaaaattcgtttgcctttttaaagctatattaaaaatgtattgttgaatcaaacccctatggacttatggctttatttaactgaattaaaaagccttgatttatccaaaattgtattatagagtgtagaatgaatactagggtgataaattgcaattatttgaagaacctggtgatatgctctacttatcttggattagctaagaattctatgtatacagttggaaaaatggcatatatacatctatcttgaacctgattgaagtctgaagacctaacatattttgtttcttctagagtgtacttttcctgcctcacagttacattggtaattctggcatgtcctcaaaaatgactcatgactgtggatatgaagaactattgacttcttaagaaaaaagggagaaatattaatcagaaagttgattcttatgataatatggaaaagttaaccattatagaaaagcaaagcttgagtttcctaaatgtaagcttttaaagtaatgaacattaaaaaaaaccattatttcactgtcattt

SEQ ID NO: 3446 - protein, 207 aa, Homosapiens; identical to SEQ ID NO: 3426

SEQ ID NO: 3447 - DNA, 1580 bp, Homosapiens
aaggaagtgcaggaacatttcacaaatctacaatctgtgagtatcacatcctgtatagctgtaaacactggaataaggaagggctgatgactttcagaagatgaaggtaagtagaaaccgttgatgggactgagaaaccagagttaaaacctctttggagcttctgaggactcagctggaaccaacgggcacagttggcaacaccatcatgacatcacaacctgttcccaatgagaccatcatagtgctcccatcaaatgtcatcaacttctcccaagcagagaaacccgaacccaccaaccaggggcaggatagcctgaagaaacatctacacgcagaaatcaaagttattggggtgcatagcagcctggttggaagcattctgagtgctctgtctgccctggtgggtttcattatcctgtctgtcaaacaggccaccttaaatcctgcctcactgcagtggaactctctctctgatgctgatttgcactctgctggaattctgcctagctgtgctcactgctgtgctgcggtggaaacaggcttactctgacttccctggggtgagtgtgctggccggcttcacttaaccttgcctagtgtatcttatccctgcactgtgttgagtatgtcaccaagagtggtagaaggaacaatcagtcagtcatgagatacacatgggagggcatttgcattgtgatggaagacagagaagaaaagcagatggcaattgagtagctgataagctgaaaattcactggatatgaaaatagttaatcatgagaaatcaactgattcaatcttcctattttgtcagcgaagggaatgagactctgggaagttaaatgactggcctggcattatgctatgagtttgtgcctttgctgaggacactagaacctggcttgcctcccttataagcagaaacaatttctgccacaaccactagtctctttaatagtattgacttggtaaagggcatttacacacgtaactggatccagtgaatgtcttatgctctgcatttgcccctggtgatcttaaaattcgtttgcctttttaaagctatattaaaaatgtattgttgaatcaaacccctatggacttatggctttatttaactgaattaaaaagccttgatttatccaaaattgtattatagagtgtagaatgaatactagggtgataaattgcaattatttgaagaacctggtgatatgctctacttatcttggattagctaagaattctatgtatacagttggaaaaatggcatatatacatctatcttgaacctgattgaagtctgaagacctaacatattttgtttcttctagagtgtacttttcctgcctcacagttacattggtaattctggcatgtcctcaaaaatgactcatgactgtggatatgaagaactattgacttcttaagaaaaaagggagaaatattaatcagaaagttgattcttatgataatatggaaaagttaaccattatagaaaagcaaagcttgagtttcctaaatgtaagcttttaaagtaatgaacattaaaaaaaaccattatttcactgtcattt

SEQ ID NO: 3448 - protein, 114 aa, Homosapiens; identical to SEQ ID NO: 3428

SEQ ID NO: 3449 - DNA, 1895 bp, Homosapiens
ttgctagaagtttacagaaaaggaagtgcaggaacatttcacaaatctacaatctgtgagtatcacatcctgtatagctgtaaacactggaataaggaagggctgatgactttcagaagatgaaggtaagtagaaaccgttgatgggactgagaaaccagagttaaaacctctttggagcttctgaggactcagctggaaccaacgggcacagttggcaacaccatcatgacatcacaacctgttcccaatgagaccatcatagtgctcccatcaaatgtcatcaacttctcccaagcagagaaacccgaacccaccaaccaggggcaggatagcctgaagaaacatctacacgcagaaatcaaagttattgggactatccagatcttgtgtggcatgatggtattgagcttggggatcattttggcatctgcttccttctctccaaattttacccaagtgacttctacactgttgaactctgcttacccattcataggaccctttttttttatcatctctggctctctatcaatcgccacagagaaaaggttaaccaagcttttggtgcatagcagcctggttggaagcattctgagtgctctgtctgccctggtgggtttcattatcctgtctgtcaaacaggccaccttaaatcctgcctcactgcagtgtgagttggacaaaaataatataccaacaagaagttatgtttcttacttttatcatgattcactttataccacggactgctatacagccaaagccagtctggctggaactctctctctgatgctgatttgcactctgctggaattctgcctagctgtgctcactgctgtgctgcggtggaaacaggcttactctgacttccctggggtgagtgtgctggccggcttcacttaaccttgcctagtgtatcttatccctgcactgtgttgagtatgtcaccaagagtggtagaaggaacaatcagtcagtcatgagatacacatgggagggcatttgcattgtgatggaagacagagaagaaaagcagatggcaattgagtagctgataagctgaaaattcactggatatgaaaatagttaatcatgagaaatcaactgattcaatcttcctattttgtcagcgaagggaatgagactctgggaagttaaatgactggcctggcattatgctatgagtttgtgcctttgctgaggacactagaacctggcttgcctcccttataagcagaaacaatttctgccacaaccactagtctctttaatagtattgacttggtaaagggcatttacacacgtaactggatccagtgaatgtcttatgctctgcatttgcccctggtgatcttaaaattcgtttgcctttttaaagctatattaaaaatgtattgttgaatcaaacccctatggacttatggctttatttaactgaattaaaaagccttgatttatccaaaattgtattatagagtgtagaatgaatactagggtgataaattgcaattatttgaagaacctggtgatatgctctacttatcttggattagctaagaattctatgtatacagttggaaaaatggcatatatacatctatcttgaacctgattgaagtctgaagacctaacatattttgtttcttctagagtgtacttttcctgcctcacagttacattggtaattctggcatgtcctcaaaaatgactcatgactgtggatatgaagaactattgacttcttaagaaaaaagggagaaatattaatcagaaagttgattcttatgataatatggaaaagttaaccattatagaaaagcaaagcttgagtttcctaaatgtaagcttttaaagtaatgaacattaaaaaaaaccattatttcactgtcattt

SEQ ID NO: 3450 - protein, 225 aa, Homosapiens; identical to SEQ ID NO: 499

SEQ ID NO: 3451 - DNA, 1132 bp, Homosapiens
ttttactgaagttgctagaagtttacagaaaaggaagtgcaggaacatttcacaaatctacaatctgtgagtatcacatcctgtatagctgtaaacactggaataaggaagggctgatgactttcagaagatgaaggtaagtagaaaccgttgatgggactgagaaaccagagttaaaacctctttggagcttctgaggactcagctggaaccaacgggcacagttggcaacaccatcatgacatcacaacctgttcccaatgagaccatcatagtgctcccatcaaatgtcatcaacttctcccaagcagagaaacccgaacccaccaaccaggggcaggatagcctgaagaaacatctacacgcagaaatcaaagttattgggactatccagatcttgtgtggcatgatggtattgagcttggggatcattttggcatctgcttccttctctccaaattttacccaagtgacttctacactgttgaactctgcttacccattcataggaccctttttttttatcatctctggctctctatcaatcgccacagagaaaaggttaaccaagcttttggtgcatagcagcctggttggaagcattctgagtgctctgtctgccctggtgggtttcattatcctgtctgtcaaacaggccaccttaaatcctgcctcactgcagtgtgagttggacaaaaataatataccaacaagaagttatgtttcttacttttatcatgattcactttataccacggactgctatacagccaaagccagtctggctggaactctctctctgatgctgatttgcactctgctggaattctgcctagctgtgctcactgctgtgctgcggtggaaacaggcttactctgacttccctgggagtgtacttttcctgcctcacagttacattggtaattctggcatgtcctcaaaaatgactcatgactgtggatatgaagaactattgacttcttaagaaaaaagggagaaatattaatcagaaagttgattcttatgataatatggaaaagttaaccattatagaaaagcaaagcttgagtttcctaaatgtaagcttttaaagtaatgaacattaaaaaaaaccattatttcactgtcattt

SEQ ID NO: 3452 - protein, 248 aa, Homosapiens; identical to SEQ ID NO: 503

SEQ ID NO: 3453 - DNA, 956 bp, Homosapiens
ccaagtgacttctacactgttgaactctgcttacccattcataggaccctttttttttatcatctctggctctctatcaatcgccacagagaaaaggttaaccaagcttttggtgcatagcagcctggttggaagcattctgagtgctctgtctgccctggtgggtttcattatcctgtctgtcaaacaggccaccttaaatcctgcctcactgcagtgtgagttggacaaaaataatataccaacaagaagttatgtttcttacttttatcatgattcactttataccacggactgctatacagccaaagccagtctggctggaactctctctctgatgctgatttgcactctgctggaattctgcctagctgtgctcactgctgtgctgcggtggaaacaggcttactctgacttccctggggtgagtgtgctggccggcttcacttaaccttgcctagtgtatcttatccctgcactgtgttgagtatgtcaccaagagtggtagaaggaacaatcagtcagtcatgagatacacatgggagggcatttgcattgtgatggaagacagagaagaaaagcagatggcaattgagtagctgataagctgaaaattcactggatatgaaaatagttaatcatgagaaatcaactgattcaatcttcctattttgtcagcgaagggaatgagactctgggaagttaaatgactggcctggcattatgctatgagtttgtgcctttgctgaggacactagaacctggcttgcctcccttataagcagaaacaatttctgccacaaccactagtctctttaatagtattgacttggtaaagggcatttacacacgtaactggatccagtgaatgtcttatgctctgcatttgcccctggtgatcttaaaattcgtttgcctttttaaagctatattaaaaatgtattgttgaatcaaac

SEQ ID NO: 3454 - protein, 37 aa, Homosapiens
MLICTLLEFCLAVLTAVLRWKQAYSDFPGVSVLAGFT

SEQ ID NO: 3455 - DNA, 1287 bp, Homosapiens
aaggaagtgcaggaacatttcacaaatctacaatctgtgagtatcacatcctgtatagctgtaaacactggaataaggaagggctgatgactttcagaagatgaaggtaagtagaaaccgttgatgggactgagaaaccagagttaaaacctctttggagcttctgaggactcagctggaaccaacgggcacagttggcaacaccatcatgacatcacaacctgttcccaatgagaccatcatagtgctcccatcaaatgtcatcaacttctcccaagcagagaaacccgaacccaccaaccaggggcaggatagcctgaagaaacatctacacgcagaaatcaaagttattgggactatccagatcttgtgtggcatgatggtattgagcttggggatcattttggcatctgcttccttctctccaaattttacccaagtgacttctacactgttgaactctgcttacccattcataggaccctttttttttatcatctctggctctctatcaatcgccacagagaaaaggttaaccaagcttttggtgcatagcagcctggttggaagcattctgagtgctctgtctgccctggtgggtttcattatcctgtctgtcaaacaggccaccttaaatcctgcctcactgcagtggaactctctctctgatgctgatttgcactctgctggaattctgcctagctgtgctcactgctgtgctgcggtggaaacaggcttactctgacttccctggggtgagtgtgctggccggcttcacttaaccttgcctagtgtatcttatccctgcactgtgttgagtatgtcaccaagagtggtagaaggaacaatcagtcagtcatgagatacacatgggagggcatttgcattgtgatggaagacagagaagaaaagcagatggcaattgagtagctgataagctgaaaattcactggatatgaaaatagttaatcatgagaaatcaactgattcaatcttcctattttgtcagcgaagggaatgagactctgggaagttaaatgactggcctggcattatgctatgagtttgtgcctttgctgaggacactagaacctggcttgcctcccttataagcagaaacaatttctgccacaaccactagtctctttaatagtattgacttggtaaagggcatttacacacgtaactggatccagtgaatgtcttatgctctgcatttgcccctggtgatcttaaaattcgtttgcctttttaaagctatattaaaaatgtattgttgaatcaaac

SEQ ID NO: 3456 - protein, 178 aa, Homosapiens; identical to SEQ ID NO: 501

SEQ ID NO: 3457 - DNA, 1337 bp, Homosapiens
aaggaagtgcaggaacatttcacaaatctacaatctgtgagtatcacatcctgtatagctgtaaacactggaataaggaagggctgatgactttcagaagatgaaggtaagtagaaaccgttgatgggactgagaaaccagagttaaaacctctttggagcttctgaggactcagctggaaccaacgggcacagttggcaacaccatcatgacatcacaacctgttcccaatgagaccatcatagtgctcccatcaaatgtcatcaacttctcccaagcagagaaacccgaacccaccaaccaggggcaggatagcctgaagaaacatctacacgcagaaatcaaagttattgggactatccagatcttgtgtggcatgatggtattgagcttggggatcattttggcatctgcttccttctctccaaattttacccaagtgacttctacactgttgaactctgcttacccattcataggaccctttttttttatcatctctggctctctatcaatcgccacagagaaaaggttaaccaagcttttggtgcatagcagcctggttggaagcattctgagtgctctgtctgccctggtgggtttcattatcctgtctgtcaaacaggccaccttaaatcctgcctcactgcagtgtgagttggacaaaaataatataccaacaagaagttatgtttcttacttttatcatgattcactttataccacggactgctatacagaattctgcctagctgtgctcactgctgtgctgcggtggaaacaggcttactctgacttccctggggtgagtgtgctggccggcttcacttaaccttgcctagtgtatcttatccctgcactgtgttgagtatgtcaccaagagtggtagaaggaacaatcagtcagtcatgagatacacatgggagggcatttgcattgtgatggaagacagagaagaaaagcagatggcaattgagtagctgataagctgaaaattcactggatatgaaaatagttaatcatgagaaatcaactgattcaatcttcctattttgtcagcgaagggaatgagactctgggaagttaaatgactggcctggcattatgctatgagtttgtgcctttgctgaggacactagaacctggcttgcctcccttataagcagaaacaatttctgccacaaccactagtctctttaatagtattgacttggtaaagggcatttacacacgtaactggatccagtgaatgtcttatgctctgcatttgcccctggtgatcttaaaattcgtttgcctttttaaagctatattaaaaatgtattgttgaatcaaac

SEQ ID NO: 3458 - protein, 207 aa, Homosapiens; identical to SEQ ID NO: 3426

SEQ ID NO: 3459 - DNA, 1095 bp, Homosapiens
aaggaagtgcaggaacatttcacaaatctacaatctgtgagtatcacatcctgtatagctgtaaacactggaataaggaagggctgatgactttcagaagatgaaggtaagtagaaaccgttgatgggactgagaaaccagagttaaaacctctttggagcttctgaggactcagctggaaccaacgggcacagttggcaacaccatcatgacatcacaacctgttcccaatgagaccatcatagtgctcccatcaaatgtcatcaacttctcccaagcagagaaacccgaacccaccaaccaggggcaggatagcctgaagaaacatctacacgcagaaatcaaagttattggggtgcatagcagcctggttggaagcattctgagtgctctgtctgccctggtgggtttcattatcctgtctgtcaaacaggccaccttaaatcctgcctcactgcagtggaactctctctctgatgctgatttgcactctgctggaattctgcctagctgtgctcactgctgtgctgcggtggaaacaggcttactctgacttccctggggtgagtgtgctggccggcttcacttaaccttgcctagtgtatcttatccctgcactgtgttgagtatgtcaccaagagtggtagaaggaacaatcagtcagtcatgagatacacatgggagggcatttgcattgtgatggaagacagagaagaaaagcagatggcaattgagtagctgataagctgaaaattcactggatatgaaaatagttaatcatgagaaatcaactgattcaatcttcctattttgtcagcgaagggaatgagactctgggaagttaaatgactggcctggcattatgctatgagtttgtgcctttgctgaggacactagaacctggcttgcctcccttataagcagaaacaatttctgccacaaccactagtctctttaatagtattgacttggtaaagggcatttacacacgtaactggatccagtgaatgtcttatgctctgcatttgcccctggtgatcttaaaattcgtttgcctttttaaagctatattaaaaatgtattgttgaatcaaac

SEQ ID NO: 3460 - protein, 114 aa, Homosapiens; identical to SEQ ID NO: 3428

SEQ ID NO: 3461 - DNA, 1421 bp, Homosapiens
ttttactgaagttgctagaagtttacagaaaaggaagtgcaggaacatttcacaaatctacaatctgtgagtatcacatcctgtatagctgtaaacactggaataaggaagggctgatgactttcagaagatgaaggtaagtagaaaccgttgatgggactgagaaaccagagttaaaacctctttggagcttctgaggactcagctggaaccaacgggcacagttggcaacaccatcatgacatcacaacctgttcccaatgagaccatcatagtgctcccatcaaatgtcatcaacttctcccaagcagagaaacccgaacccaccaaccaggggcaggatagcctgaagaaacatctacacgcagaaatcaaagttattgggactatccagatcttgtgtggcatgatggtattgagcttggggatcattttggcatctgcttccttctctccaaattttacccaagtgacttctacactgttgaactctgcttacccattcataggaccctttttttttatcatctctggctctctatcaatcgccacagagaaaaggttaaccaagcttttggtgcatagcagcctggttggaagcattctgagtgctctgtctgccctggtgggtttcattatcctgtctgtcaaacaggccaccttaaatcctgcctcactgcagtgtgagttggacaaaaataatataccaacaagaagttatgtttcttacttttatcatgattcactttataccacggactgctatacagccaaagccagtctggctggaactctctctctgatgctgatttgcactctgctggaattctgcctagctgtgctcactgctgtgctgcggtggaaacaggcttactctgacttccctggggtgagtgtgctggccggcttcacttaaccttgcctagtgtatcttatccctgcactgtgttgagtatgtcaccaagagtggtagaaggaacaatcagtcagtcatgagatacacatgggagggcatttgcattgtgatggaagacagagaagaaaagcagatggcaattgagtagctgataagctgaaaattcactggatatgaaaatagttaatcatgagaaatcaactgattcaatcttcctattttgtcagcgaagggaatgagactctgggaagttaaatgactggcctggcattatgctatgagtttgtgcctttgctgaggacactagaacctggcttgcctcccttataagcagaaacaatttctgccacaaccactagtctctttaatagtattgacttggtaaagggcatttacacacgtaactggatccagtgaatgtcttatgctctgcatttgcccctggtgatcttaaaattcgtttgcctttttaaagctatattaaaaatgtattgttgaatcaaac

SEQ ID NO: 3462 - protein, 225 aa, Homosapiens; identical to SEQ ID NO: 499

SEQ ID NO: 3463 - DNA, 281 bp, Homosapiens
ccaaattttacccaagtgacttctacactgttgaactctgcttacccattcataggaccctttttttttatcatctctggctctctatcaatcgccacagagaaaaggttaaccaagcttttggtgcatagcagcctggttggaagcattctgagtgctctgtctgccctggtgggtttcattatcctgtctgtcaaacaggccaccttaaatcctgcctcactgcagtgtgagttggacaaaaataatataccaacaagaagttatgtttcttactttta

SEQ ID NO: 3464 - protein, 92 aa, Homosapiens
PNFTQVTSTLLNSAYPFIGPFFFIISGSLSIATEKRLTKLLVHSSLVGSILSALSALVGFIILSVKQATLNPASLQCELDKNNIPTRSYVSY

SEQ ID NO: 3465 - DNA, 1859 bp, Homosapiens
aaggaagtgcaggaacatttcacaaatctacaatctgtgagtatcacatcctgtatagctgtaaacactggaataaggaagggctgatgactttcagaagatgaaggtaagtagaaaccgttgatgggactgagaaaccagagttaaaacctctttggagcttctgaggactcagctggaaccaacgggcacagttggcaacaccatcatgacatcacaacctgttcccaatgagaccatcatagtgctcccatcaaatgtcatcaacttctcccaagcagagaaacccgaacccaccaaccaggggcaggatagcctgaagaaacatctacacgcagaaatcaaagttattgggactatccagatcttgtgtggcatgatggtattgagcttggggatcattttggcatctgcttccttctctccaaattttacccaagtgacttctacactgttgaactctgcttacccattcataggaccctttttttttatcatctctggctctctatcaatcgccacagagaaaaggttaaccaagcttttggggttgatgttggagattatgtgagagaatgtcataccatgcaattgcaccgagactcaatttggaagctctggctacaaaaatctcccaaagccagcaaggaagtgagaaacggcatccagaaaaatgccaattctttttctcatcggtatttagagattattatttggaaccctcagttagactcggaactactaactagatctgtgctgtttaatttaactttctttgaggatggaaatgaaatgtaactttctatgatgatagaaatgaaatgtaactttctatgatgatggaaatgcactacagctgtactgtacaatatggcagtcacatgtggctatcgatgatgtgaaatatagtgcaactgaataaaaatttctcttaattttactttaaatatagatagtctatgtggctattggcaaccatactgagtagcctggcacaagggtagtgctttcaaacttttaggaggaaatatatgggcctgttactccagagaacaatcccacagtgaacatgcaggaagctcaaggatgcaggatgtggtctcggggtgggctcagacttaccagagacatcgaggctttagcgagttctactcttgtcacacattgcaccagccctttttgagattgaagaagagtgccatctcaagacaaatctagcttattctaagaaatatagactctaggcatcaagaatactactggctactaggaggcccaggagtgtacacttcagtcattatgttgggaaattggggtcccagagtatcaactggtgagttcctaaaagaagaagtgcccatgtgggattaagtaacattctactgtatggctgtgaggtgtgccctggagcctacctacctgtaactatagctctcagagtactcttagctcaattctcttttctgtgtgagttggagtacaaaagaagtcacttctgaggttagtttatctattcccttcacttcataaatgtataaatgagaaccagagtgggaaataaaatcaaggaactgattacccaagggaataaaccaaggcaagtctagtactgtgacttcaatattctgacctccagttcagacctttttcttgtacttcccgctgcctcccacacattacaccatccttgggcctgcacctagacctctgcccacagccaccccatactgcactcagtgtggccaatcatatgcctgcccatgttccagggcctgcctgagactcagaaccaccccctcactcatctttgagaggtgtgcttttgagagaagcaatgggcaggcgagagtgagctatta

SEQ ID NO: 3466 - protein, 120 aa, Homosapiens
MTSQPVPNETIIVLPSNVINFSQAEKPEPTNQGQDSLKKHLHAEIKVIGTIQILCGMMVLSLGIILASASFSPNFTQVTSTLLNSAYPFIGPFFFIISGSLSIATEKRLTKLLGLMLEIM

SEQ ID NO: 3467 - DNA, 631 bp, Homosapiens
aaggaagtgcaggaacatttcacaaatctacaatctgtgagtatcacatcctgtatagctgtaaacactggaataaggaagggctgatgactttcagaagatgaaggtaagtagaaaccgttgatgggactgagaaaccagagttaaaacctctttggagcttctgaggactcagctggaaccaacgggcacagttggcaacaccatcatgacatcacaacctgttcccaatgagaccatcatagtgctcccatcaaatgtcatcaacttctcccaagcagagaaacccgaacccaccaaccaggggcaggatagcctgaagaaacatctacacgcagaaatcaaagttattgggactatccagatcttgtgtggcatgatggtattgagcttggggatcattttggcatctgcttccttctctccaaattttacccaagtgacttctacactgttgaactctgcttacccattcataggaccctttttttttatcatctctggctctctatcaatcgccacagagaaaaggttaaccaagcttttggtgagtaagagagctataacccacaacccaatggatcaaaataaaacttagacagaactctttaaggctagtctttctactttg

SEQ ID NO: 3468 - protein, 129 aa, Homosapiens
MTSQPVPNETIIVLPSNVINFSQAEKPEPTNQGQDSLKKHLHAEIKVIGTIQILCGMMVLSLGIILASASFSPNFTQVTSTLLNSAYPFIGPFFFIISGSLSIATEKRLTKLLVSKRAITHNPMDQNKT

SEQ ID NO: 3469 - DNA, 3361 bp, Homosapiens
acaatctgtgagtatcacatcctgtatagctgtaaacactggaataaggaagggctgatgactttcagaagatgaaggtaagtagaaaccgttgatgggactgagaaaccagagttaaaacctctttggagcttctgaggactcagctggaaccaacgggcacagttggcaacaccatcatgacatcacaacctgttcccaatgagaccatcatagtgctcccatcaaatgtcatcaacttctcccaagcagagaaacccgaacccaccaaccaggggcaggatagcctgaagaaacatctacacgcagaaatcaaagttattggggtaaatctaattcagaacgtgttggagaggggttgggggaagtgccaagagatgatatatgtcttgggactggacatctgtcgtgagtgtggagaccctaaaattttgctagagggactttagggtagaagccacttggagaaaactgtcccagaacttttccacaagaggttgtcttaaaaatatattttcccttattctgaatatgaggaattgattttctattgttgtctttgtatttttacaatacagtgcttttctatattttcttttacaaaagtaatggtggtaaataatgacatattgtgtgtatgtgtatatattccacaactgcatgcttaataatccaaactgactttttgcaaataatttttccctcactgcaaattagaggaaatatacaactccttttcctcttttctcctaacgtttttgagaatggaaatgatattcaccttttgtttgtctgtttctcctctcacccagaatttattaaagaagctgtattgcatgaagggaggagagaaagaagggatctatcttggattgggagggaaacacagagttttggtttctagaattgcctctgcacttatgtgatctgaggtgaggcactctgtttgactggatttcaggacctggtgggactggtttccttgcctcatgtacaatcacatgggtttctatgaggctcatgtgacataaggtctagaaaactttttggtaaatgataatagagctgtgaatctctgaggtggatgtcaggaaggaaaactacctcctaagacagagcttcagttatacatgagaacatgcagtatttggtttctgtccctgtgttagtctgctaagggggatggcctctaaatgatgagaacacatggacacgtagaacagaacaatgcacactgaggcctttcagagggtggagggtgggaggagagagaggatcaggaaaaataactaatggatactaggcttaatacctgggtgatgaaataatctgtacagcaaacccccatgacacaagtttatctatgtaacagacatgcagttgtacccttgaacttaaaataaaagctaaaaataaaagagcttccagagcttcagctatagggttgtgaactgcagtttccgaggaagtgaccaaaggggcaaactccatgtccagtggagtctgggagatgaggggagggccttctgcactgccaatactgcagagaatgtgggggctttcagatgtcccctgttttcagagagatagaaagagagttaactagtcatggacttagaggtcctgagagctgggaaagtaaatctcagcacttgctgtgagctggaagcaagtctcatgagcagaccagggcctgagaggcagaaatgcagaagccttcctgagcacctgccagacacctgagactgtggcttctgtggcagagctgcacaccctccaggatgtcttttcatatttctcactccagagtttccacagggtttgtatcctcattaggatcttgcagaaggcgataatgcattagtgccatgggagcggcaaaaaggccctgtctttacaaatgctggttttcatcctcaatctcactttctcttcccacagactatccagatcttgtgtggcatgatggtattgagcttggggatcattttggcatctgcttccttctctccaaattttacccaagtgacttctacactgttgaactctgcttacccattcataggacccttttttgtgagtagagtttctgaggagggcaggatggggcaaagaggggaggaagatgccaatagcttagacttcccacctgccagcttgctatgtttgatctgccaggagcaaggagtcaacggtgaatcttgttctcctgtcgggtaggatgacaggggttgcttgattttagatcaatttcttatcagactcaaataaacatttcttttgaagatcatcttattcttcacattatcatcttgagctatgatgaagctagtgacttctctccaggtttaggcgaaaaaaaaatccatgaattaggataaagttgggaaggaacattttatacaaaaaaaaaaaagagcataaatggaagacatcacacactcacagagaaaccacactgttatcccccccatgcttgtggggatcatggaggaaggagaacttacacctctgagcattttgaaaatacttttactgcattgactgattcccaggtaaggctgagcagatatctatgcccagtgattgacaggaaattcctctgaaatagctgcaagtctggagtttcaaaaggacttagtagtcctttcctcagagaactgctttctctaagatgggggctttctcataggtaagtttccctttcatagatgttttttccttcaacttcctgcaattcagtagctatttgtttttcttacatttgtgtatttgatgcaccaagaagtccacctttttgtgtatcttgtccatttttcttgtcttattaactaaagttacacttggatttggatttcattggttttccccaaatgacctttttctgttccaagatccatgccaagctactacattacactacattacattttgtcatgatgtctcctcagggtcctctaggctgtctaagattttccttttccttgagaactttgatagttttgggtagcgctggctgagatttttatagaatgttcctaaatttgggtttgtctgatttttttttttgatgtttagagtatggtgatgaatttttgggtggtgatgatgaggtaaagcaccattttcatcaagtcgtatcaagggtcatgctaccaacataatgtcactgacacaattaaccttgattatgtggttggggtagtattttccagatttctcctctgtaaaattactacttttttttttaaccattgcttttatgtccttccctagagaacatcttacaccaaaactgtctcattttattaaaaaaacaaaaattatttcctggcttttaaggtctttttttgtttagtgg

SEQ ID NO: 3470 - protein, 89 aa, Homosapiens [sequence omitted]

SEQ ID NO: 3471 - DNA, 2034 bp, Homosapiens
cactgtttcacagatgctgtgagggtgacaaagatgcagggcacccactggaaacacagacggcactctgcgaaagaggaaggggcgccaggagcttggattagaaaactgaagcttcaagaacagacttgcctaacaacaggaaacttgtatgtctcgaagtggcaattcacacataaggctccatgactcctgaactctcacaaatattagttggctcttttcatggttttactgaagttgctagaagtttacagaaaaggaagtgcaggaacatttcacaaatctacaatctgtgagtatcacatcctgtatagctgtaaacactggaataaggaagggctgatgactttcagaagatgaaggtaagtagaaaccgttgatgggactgagaaaccagagttaaaacctctttggagcttctgaggactcagctggaaccaacgggcacagttggcaacaccatcatgacatcacaacctgttcccaatgagaccatcatagtgctcccatcaaatgtcatcaacttctcccaagcagagaaacccgaacccaccaaccaggggcaggatagcctgaagaaacatctacacgcagaaatcaaagttattgggactatccagatcttgtgtggcatgatggtattgagcttggggatcattttggcatctgcttccttctctccaaattttacccaagtgacttctacactgttgaactctgcttacccattcataggacccttttttgtgagtagagtttctgaggagggcaggatggggcaaagaggggaggaagatgccaatagcttagacttcccacctgccagcttgctatgtttgatctgccaggagcaaggagtcaacggtgaatcttgttctcctgtcgggtaggatgacaggggttgcttgattttagatcaatttcttatcagactcaaataaacatttcttttgaagatcatcttattcttcacattatcatcttgagctatgatgaagctagtgacttctctccaggtttaggcgaaaaaaaaatccatgaattaggataaagttgggaaggaacattttatacaaaaaaaaaaaagagcataaatggaagacatcacacactcacagagaaaccacactgttatcccccccatgcttgtggggatcatggaggaaggagaacttacacctctgagcattttgaaaatacttttactgcattgactgattcccaggtaaggctgagcagatatctatgcccagtgattgacaggaaattcctctgaaatagctgcaagtctggagtttcaaaaggacttagtagtcctttcctcagagaactgctttctctaagatgggggctttctcataggtaagtttccctttcatagatgttttttccttcaacttcctgcaattcagtagctatttgtttttcttacatttgtgtatttgatgcaccaagaagtccacctttttgtgtatcttgtccatttttcttgtcttattaactaaagttacacttggatttggatttcattggttttccccaaatgacctttttctgttccaagatccatgccaagctactacattacactacattacattttgtcatgatgtctcctcagggtcctctaggctgtctaagattttccttttccttgagaactttgatagttttgggtagcgctggctgagatttttatagaatgttcctaaatttgggtttgtctgatttttttttttgatgtttagagtatggtgatgaatttttgggtggtgatgatgaggtaaagcaccattttcatcaagtcgtatcaagggtcatgctaccaacataatgtcactgacacaattaaccttgattatgtggttggggtagtattttccagatttctcctctgtaaaattactacttttttttttaaccattgcttttatgtccttccctagagaacatcttacaccaaaactgtctcattttattaaaaaaacaaaaattatttcctggcttttaaggtctttttttgtttagtgg

SEQ ID NO: 3472 - protein, 141 aa, Homosapiens
MTSQPVPNETIIVLPSNVINFSQAEKPEPTNQGQDSLKKHLHAEIKVIGTIQILCGMMVLSLGIILASASFSPNFTQVTSTLLNSAYPFIGPFFVSRVSEEGRMGQRGEEDANSLDFPPASLLCLICQEQGVNGESCSPVG

SEQ ID NO: 3473 - DNA, 571 bp, Homosapiens
ccgaagggttctgtgctaggaaccttacacgtgttgtctcacataatccttaaaactcagaaatgattttaaattaaatagcacagagaggaaaactgactggagagggagcctttgcttagattagaaaactgaagcttcaagaacagacttgcctaacaacaggaaacttgtatgtctcgaagtggcaattcacacataaggctccatgactcctgaactctcacaaatattagttggctcttttcatggttttactgaagttgctagaagtttacagaaaaggaagtgcaggaacatttcacaaatctacaatctgtgagtatcacatcctgtatagctgtaaacactggaataaggaagggctgatgactttcagaagatgaaggtaagtagaaaccgttgatgggactgagaaaccagagttaaaaccatcatgacatcacaacctgttcccaatgagaccatcatagtgctcccatcaaatgtcatcaacttctcccaagcagagaaacccgaacccaccaaccaggggcaggatagcctgaagaaacatctacacgcagaaatc

SEQ ID NO: 3474 - protein, 45 aa, Homosapiens
MVLLKLLEVYRKGSAGTFHKSTICEYHILYSCKHWNKEGLMTFRR

SEQ ID NO: 3475 - DNA, 666 bp, Homosapiens
agcaccttttctgctgccatgacaaccatgcaaggaatggaacagaccactccaggggctggccctgatgtgccccagctgggaaacatagatgtcatacattcatatctgtgtaaaggattgcaagagaagttcttcaagaggaaacccaaagtccttggggttgtgcggattctgattgccttgatgagccttagcatgggaataataatgatgtgtgttgcatttagttcttatgaagaacatcccatttttgtgtatgttgcgtacacaatttgggggtcagtgatggttggaggtagtctaggaaagaatatcaccagttcagtcttggctatatcagggatcttaatcaatgcaataagcttgacgttttattcattccgttaccattactgtaaccacgatcagttgtcaagtaattgttacatgactatgtccattttaatgggtacggatggcatggtgctcctcttaagtgtgctggaattctgcattgctgtggccctctctgcctttggatgtaaagtgctttgttgtagccccagtgagacgagcagaactgagaagcgccaagtgaaggatcagaccctagcaaaatcctttgcatctccaagtcaaagtttacctcaagttgggccaatccctgacgttttaaatatataa

SEQ ID NO: 3476 - protein, 215 aa, Homosapiens
MTTMQGMEQTTPGAGPDVPQLGNIDVIHSYLCKGLQEKFFKRKPKVLGVVRILIALMSLSMGIIMMCVAFSSYEEHPIFVYVAYTIWGSVMVGGSLGKNITSSVLAISGILINAISLTFYSFRYHYCNHDQLSSNCYMTMSILMGTDGMVLLLSVLEFCIAVALSAFGCKVLCCSPSETSRTEKRQVKDQTLAKSFASPSQSLPQVGPIPDVLNI

SEQ ID NO: 3477 - DNA, 1041 bp, Homosapiens
aattctcagcacagcctttaaggttccaaacatctgctagaagaggaatgcagatttaaactgagtgaggtgtggagtgggggaagttgattgggtctagaccaaagaactttgaggaacttgcccagagccctgcatgcatcagacctacagcagacattgcaggcctgaagaaagcaccttttctgctgccatgacaaccatgcaaggaatggaacaggccatgccaggggctggccctggtgtgccccagctgggaaacatggctgtcatacattcacatctgtggaaaggattgcaagagaagttcttgaagggagaacccaaagtccttggggttgtgcagattctgactgccctgatgagccttagcatgggaataacaatgatgtgtatggcatctaatacttatggaagtaaccctatttccgtgtatatcgggtacacaatttgggggtcagtaatgtttattatttcaggatccttgtcaattgcagcaggaattagaactacaaaaggcctggtccgaggtagtctaggaatgaatatcaccagctctgtactggctgcatcagggatcttaatcaacacatttagcttggcgttttattcattccatcacccttactgtaactactatggcaactcaaataattgtcatgggactatgtccatcttaatgggtctggatggcatggtgctcctcctaagtgtgctggaattctgcattgctgtgtccctctctgcctttggatgtaaagtgctctgttgtacccctggtggggttgtgttaattctgccatcacattctcacatggcagaaacagcatctcccacaccacttaatgaggtttgaggccaccaaaagatcaacagacaaatgctccagaaatctatgctgactgtgacacaagagcctcacatgagaaattaccagtatccaacttcgatactgatagacttgttgatattattattatatgtaatccaattatgaactgtgtgtgtatagagagataataaattcaaaattatgttctc

SEQ ID NO: 3478 - protein, 239 aa, Homosapiens [sequence omitted]

SEQ ID NO: 3479 - DNA, 1138 bp, Homosapiens
aattctcagcacagcctttaaggttccaaacatctgctagaagaggaatgcagatttaaactgagtgaggtgtggagtgggggaagttgattgggtctagaccaaagaactttgaggaacttgcccagagccctgcatgcatcagacctacagcagacattgcaggcctgaagaaagcaccttttctgctgccatgacaaccatgcaaggaatggaacaggccatgccaggggctggccctggtgtgccccagctgggaaacatggctgtcatacattcacatctgtggaaaggattgcaagagaagttcttgaagggagaacccaaagtccttggggttgtgcagattctgactgccctgatgagccttagcatgggaataacaatgatgtgtatggcatctaatacttatggaagtaaccctatttccgtgtatatcgggtacacaatttgggggtcagtaatgtttattatttcaggatccttgtcaattgcagcaggaattagaactacaaaaggcctggtccgaggtagtctaggaatgaatatcaccagctctgtactggctgcatcagggatcttaatcaacacatttagcttggcgttttattcattccatcacccttactgtaactactatggcaactcaaataattgtcatgggactatgtccatcttaatgggtctggatggcatggtgctcctcctaagtgtgctggaattctgcattgctgtgtccctctctgcctttggatgtaaagtgctctgttgtacccctggtggggttgtgttaattctgccatcacattctcacatggcagaaacagcatctcccacaccacttaatgaggtttgaggccaccaaaagatcaacagacaaatgctccagaaatctatgctgactgtgacacaagagcctcacatgagaaattaccagtatccaacttcgatactgatagacttgttgatattattattatatgtaatccaattatgaactgtgtgtgtatagagagataataaattcaaaattatgttctcatttttttccctggaactcaataactcatttcactggctctttatcgagagtactagaagttaaattaataaataatgcatttaatgaggcaacagc

SEQ ID NO: 3480 - protein, 239 aa, Homosapiens [sequence omitted]

SEQ ID NO: 3481 - DNA, 1650 bp, Homosapiens
aattctcagcacagcctttaaggttccaaacatctgctagaagaggaatgcagatttaaactgagtgaggtgtggagtgggggaagttgattgggtctagaccaaagaactttgaggaacttgcccagagccctgcatgcatcagacctacagcagacattgcaggcctgaagaaagcaccttttctgctgccatgacaaccatgcaaggaatggaacaggccatgccaggggctggccctggtgtgccccagctgggaaacatggctgtcatacattcacatctgtggaaaggattgcaagagaagttcttgaagggagaacccaaagtccttggggttgtgcagattctgactgccctgatgagccttagcatgggaataacaatgatgtgtatggcatctaatacttatggaagtaaccctatttccgtgtatatcgggtacacaatttgggggtcagtaatgtttattatttcaggatccttgtcaattgcagcaggaattagaactacaaaaggcctggtccgaggtagtctaggaatgaatatcaccagctctgtactggctgcatcagggatcttaatcaacacatttagcttggcgttttattcattccatcacccttactgtaactactatggcaactcaaataattgtcatgggactatgtccatcttaatgggtctggatggcatggtgctcctcctaagtgtgctggaattctgcattgctgtgtccctctctgcctttggatgtaaagtgctctgttgtacccctggtggggttgtgttaattctgccatcacattctcacatggcagaaacagcatctcccacaccacttaatgaggtttgaggccaccaaaagatcaacagacaaatgctccagaaatctatgctgactgtgacacaagagcctcacatgagaaattaccagtatccaacttcgatactgatagacttgttgatattattattatatgtaatccaattatgaactgtgtgtgtatagagagataataaattcaaaattatgttctcatttttttccctggaactcaataactcatttcactggctctttatcgagagtactagaagttaaattaataaataatgcatttaatgaggcaacagcacttgaaagtttttcattcatcataagaactttatataaaggcattacattggcaaataaggtttggaagcagaagagcaaaaaaaagatattgttaaaatgaggcctccatgcaaaacacatacttccctcccatttatttaactttttttttctcctacctatggggaccaaagtgctttttccttcaggaagtggagatgcatggccatctccccctccctttttccttctcctgcttttctttccccatagaaagtaccttgaagtagcacagcccgtccttgcatgtgcacgagctatcatttgagtaaaagtatacatggagtaaaaatcatattaagcatcagattcaacttatattttctatttcatcttcttcctttcccttctcccaccttctactgggcataattatatcttaatcatatatggaaatgtgcaacatatggtatttgttaaatacgtttgtttttattgcagagcaaaaataaatcaaattagaagcaata

SEQ ID NO: 3482 - protein, 239 aa, Homosapiens [sequence omitted]

SEQ ID NO: 3483 - DNA, 1680 bp, Homosapiens
gaacttgcccagagccctgcatgcatcagacctacagcagacattgcaggcctgaagaaaggtggtcacaagaggggtggaacattcctgcaaatggtttcaatatatgcagatgtctcaatataggaatgaaattacgtctttggaacaacttaaataagtcaaatatacttggagctttaaaaattaaaaggagagagattcgagcaccttttctgctgccatgacaaccatgcaaggaatggaacaggccatgccaggggctggccctggtgtgccccagctgggaaacatggctgtcatacattcacatctgtggaaaggattgcaagagaagttcttgaagggagaacccaaagtccttggggttgtgcagattctgactgccctgatgagccttagcatgggaataacaatgatgtgtatggcatctaatacttatggaagtaaccctatttccgtgtatatcgggtacacaatttgggggtcagtaatgtttattatttcaggatccttgtcaattgcagcaggaattagaactacaaaaggcctggtccgaggtagtctaggaatgaatatcaccagctctgtactggctgcatcagggatcttaatcaacacatttagcttggcgttttattcattccatcacccttactgtaactactatggcaactcaaataattgtcatgggactatgtccatcttaatgggtctggatggcatggtgctcctcctaagtgtgctggaattctgcattgctgtgtccctctctgcctttggatgtaaagtgctctgttgtacccctggtggggttgtgttaattctgccatcacattctcacatggcagaaacagcatctcccacaccacttaatgaggtttgaggccaccaaaagatcaacagacaaatgctccagaaatctatgctgactgtgacacaagagcctcacatgagaaattaccagtatccaacttcgatactgatagacttgttgatattattattatatgtaatccaattatgaactgtgtgtgtatagagagataataaattcaaaattatgttctcatttttttccctggaactcaataactcatttcactggctctttatcgagagtactagaagttaaattaataaataatgcatttaatgaggcaacagcacttgaaagtttttcattcatcataagaactttatataaaggcattacattggcaaataaggtttggaagcagaagagcaaaaaaaagatattgttaaaatgaggcctccatgcaaaacacatacttccctcccatttatttaactttttttttctcctacctatggggaccaaagtgctttttccttcaggaagtggagatgcatggccatctccccctccctttttccttctcctgcttttctttccccatagaaagtaccttgaagtagcacagcccgtccttgcatgtgcacgagctatcatttgagtaaaagtatacatggagtaaaaatcatattaagcatcagattcaacttatattttctatttcatcttcttcctttcccttctcccaccttctactgggcataattatatcttaatcatatatggaaatgtgcaacatatggtatttgttaaatacgtttgtttttattgcagagcaaaaataaatcaaattagaagcaata

SEQ ID NO: 3484 - protein, 220 aa, Homosapiens; identical to SEQ ID NO: 505

SEQ ID NO: 3485 - DNA, 1128 bp, Homosapiens
gttagaagttccaagtgggtctcactaggctaaaatcagagtgttggcaaggccatactcctttctgaaggcttaggcaacaaaaagttttattgccttttctggcttctttaggctgcctatgttgcttggtttgtcatcccatcttctaccttcaaatcaagcgatgtagcatcttcaaatctctcttgaactctattctggctcttgcttccacttatatggattttatggttattttgaacccacctgaataatccaggaaaattctcttatatcagctaataagcaatcttaatttcatctgcaaatttaatccttttcgctgttcaaaaagaacaatggtcccccagggaggtctgcattctaatctccagaagctgaggattagattctctgcttacaattactaagatatggaatcatagtattttctcaatgatatgagtttctagtactcaataggatatgatgacaattatctttatactaccttcctaactttttaaagcactttcatcttccatgcccacaatagcactgggaggtgctgaactagggaataaatgtctgtgattattttatcagtgaaaaaagtgagaagctacttcagcagatcaagaattggtcaagggtatggctgccattgggaggcaggtttcctgactcccagccagtgctttttctcttatgacattgtggttactgggaaatgttttcacttgtcatctccatttctcacattcctttgttatgagttttctcctagggtctggatggcatggtgctcctcctaagtgtgctggaattctgcattgctgtgtccctctctgcctttggatgtaaagtgctctgttgtacccctggtggggttgtgttaattctgccatcacattctcacatggcagaaacagcatctcccacaccacttaatgaggtttgaggccaccaaaagatcaacagacaaatgctccagaaatctatgctgactgtgacacaagagcctcacatgagaaattaccagtatccaacttcgatactgatagacttgttgatattattattatatgtaatccaattatgaactgtgtgtgtatagagagataataaattcaaaattatgttctc

SEQ ID NO: 3486 - protein, 53 aa, Homosapiens
MVLLLSVLEFCIAVSLSAFGCKVLCCTPGGVVLILPSHSHMAETASPTPLNEV

SEQ ID NO: 3487 - DNA, 1084 bp, Homosapiens
aacttgggagctctgtacttttaagagctaaatctattttttcttccgtagttggcaacaccattatgacatcacaacctatttccaatgagaccatcataatgctcccatcaaatgtcatcaacttctcccaagcagagaaacccgaacccaccaaccaggggcaggatagcctgaagaaacgtctacaggcaaaagtcaaagttattggggtgcatagcagcctggctggaagcattctgagtgctctgtctgccctggtgggtttcattctcctgtctgtcaacccggctgcattaaatcctgcctcattgcagtgtaagttggacgaaaaggatataccaaccagacttcttctttcttatgattatcattcaccttacaccatggactgccatagagccaaagccagtctggctggaactctgtctctgatgctggtttctactgtgttggagttctgcctagctgtgctcactgctgtgctgcagtggaaacagactgtctgacttccctggttactcatgtcctcaaagacgactcatgatgctggatatgaagaactattgacttcttgggaaaaaacggagaaatattaattggaaagttgatttttatgataatatggaaaacctaaccattataaaaaagcaaacttgagtttcctaaatgtaagcatttaaagtaatgcatatttgttttaaaaaattatttcgctgtcatttatgatatgtgttcattggggatctcttggtttgcctgatactgacttcagcaaaagcacagggctgtaaattaccatttactagactagccaaatagtcttagacatttcccagaaaactaggcagaatgatgattcaatggatcacagtgaggcaaaggatacagctttttcttatactcctcaattgtgaacaggagttaactgatttgctgtggtgcgcagactcttttatcacaggtgctactgatttatcccatgtattttactcattagtgcataaaggcaaaccccataatgaagtctccgagtgtatgaaagtagccggcttcaaaataaaatctttgagtgcatacttta

SEQ ID NO: 3488 - protein, 147 aa, Homosapiens; identical to SEQ ID NO: 509

SEQ ID NO: 3489 - DNA, 661 bp, Homosapiens
agttggcaacaccattatgacatcacaacctatttccaatgagaccatcataatgctcccatcaaatgtcatcaacttctcccaagcagagaaacccgaacccaccaaccaggggcaggatagcctgaagaaacgtctacaggcaaaagtcaaagttattggggtgcatagcagcctggctggaagcattctgagtgctctgtctgccctggtgggtttcattctcctgtctgtcaacccggctgcattaaatcctgcctcattgcagtgtaagttggacgaaaaggatataccaaccagacttcttctttcttatgattatcattcaccttacaccatggactgccatagagccaaagccagtctggctggaactctgtctctgatgctggtttctactgtgttggagttctgcctagctgtgctcactgctgtgctgcagtggaaacagactgtctgacttccctggttactcatgtcctcaaagacgactcatgatgctggatatgaagaactattgacttcttgggaaaaaacggagaaatattaattggaaagttgatttttatgataatatggaaaacctaaccattataaaaaagcaaacttgagtttcctaaatgtaagcatttaaagtaatgcatatttgttttaaaaaatt

SEQ ID NO: 3490 - protein, 147 aa, Homosapiens; identical to SEQ ID NO: 509

SEQ ID NO: 3491 - DNA, 1170 bp, Homosapiens
caacccggctgcattaaatcctgcctcattgcagtgtaagttggacgaaaaggatataccattctcagctacagacatcaagacaagtactgccagatgccatcctttgaagaaatatgtgttttcagtagaactcttttcattgttctgtttttcttgccttcggatgttactcaaaatagtgaacaacctgccccagaagaaaatgatcaattacaatttgtgcttcaagaagagttttccagtgatgattcaacaacaaatgcacaatctgttatctttggaggctatgctttcttcaagttaacactctctaggagtcctttagtctcccaaccaggtaataaaggtagagaatttgtgccagatgaacaaaagcaaagtatccttccatctcccaaattttcagaggaagaaattgaacctttgcctcccacactagagaaaaagccctcagaaaatatgtccattcagctagactctacatttaaacaaatgaaagatgaagatctacaatctgctattgtacaaccttctcaaatgcaaaccaagcttctgcaggaccaagctgcgtcactccaagtttttccatcccattctgcactaaaactcgaagatatatcacctgaagacttgccatcccaagctctaccagtagaaggcctgtcagaacaaaccatgccatctaagtctacatcatcccatgtcaaacagtcttctaatctgacagctaatgacctgccccctcaaggcatactatcccaagacacatcatctcaagatatgctgtttcatgacatgacatcccaagatatgcaatccctagatatgctatctcaagacacaccatcccacgccatgccacctcaagacataccttcccaagatatgctatcccaagctctatcagcgcatgccatattacctgaagcctcaacatcccatattgtgcagttccctgaaatacaacacctacttcagcagcccccagatcttcaaccagaaaacactgaacctcaaaaccagcaaattttacaaatgtcatatcaagatattagatcagaagttatggaagagaccaaagaatggaaatctgaggaggaactccatagaagaaaatcctcaagacggcattccttaaaccagcaaaccaaagccttgcaatactta

SEQ ID NO: 3492 - protein, 357 aa, Homosapiens
MPSFEEICVFSRTLFIVLFFLPSDVTQNSEQPAPEENDQLQFVLQEEFSSDDSTTNAQSVIFGGYAFFKLTLSRSPLVSQPGNKGREFVPDEQKQSILPSPKFSEEEIEPLPPTLEKKPSENMSIQLDSTFKQMKDEDLQSAIVQPSQMQTKLLQDQAASLQVFPSHSALKLEDISPEDLPSQALPVEGLSEQTMPSKSTSSHVKQSSNLTANDLPPQGILSQDTSSQDMLFHDMTSQDMQSLDMLSQDTPSHAMPPQDIPSQDMLSQALSAHAILPEASTSHIVQFPEIQHLLQQPPDLQPENTEPQNQQILQMSYQDIRSEVMEETKEWKSEEELHRRKSSRRHSLNQQTKALQY

SEQ ID NO: 3493 - DNA, 748 bp, Homosapiens
aaaattcacatcctgtgtaatcataaatactgctctaagaaagggacaggaagtctcagaggctggagagcagagcaccaagatcgttctggcaggaacagccagtgggaggttccagctgagcgctccccagaggtgagctgatccccagccacagcacacaggaccaggctgcgagaacagcatcatcagcatcatgctattacaatcccaaaccatgggggtttctcacagctttacaccaaagggcatcactatccctcaaagagagaaacctggacacatgtaccaaaacgaagattacctgcagaacgggctgccaacagaaaccaccgttcttggggtaagtccacctcattataaggggaatactgagaaaatactttgtaaatgtatctagactacagatctacagtgggtctgggaaactctttcactcttttctggctgactccaggctaatgaggacatgaaatggagctttaagggaagactcttaaagctctgcagcagtttctagaaactaaaaccactagatctttttcactagcatgcttcacaattaacaggttagtctttcttattttatttatttatatatttatttattttgagacagaatctccctctgtcacccagcatggagtgcagtggcacgatctcagctcactgcaacctccgcctcctgggttcaagtgattcttctgcctcagcctcccgagtagctgggactatgggtgcacgccac

SEQ ID NO: 3494 - protein, 67 aa, Homosapiens
MLLQSQTMGVSHSFTPKGITIPQREKPGHMYQNEDYLQNGLPTETTVLGVSPPHYKGNTEKILCKCI

SEQ ID NO: 3495 - DNA, 3009 bp, Homosapiens
aaaattcacatcctgtgtaatcataaatactgctctaagaaagggacaggaagtctcagaggctggagagcagagcaccaagatcgttctggcaggaacagccagtgggaggttccagctgagcgctccccagaggtgagctgatccccagccacagcacacaggaccaggctgcgagaacagcatcatcagcatcatgctattacaatcccaaaccatgggggtttctcacagctttacaccaaagggcatcactatccctcaaagagagaaacctggacacatgtaccaaaacgaagattacctgcagaacgggctgccaacagaaaccaccgttcttgggactgtccagatcctgtgttgcctgttgatttcaagtctgggggccatcttggtttttgctccctacccctcccacttcaatccagcaatttccaccactttgatgtctgggtacccatttttaggagctctgtgttttggcattactggatccctctcaattatctctggaaaacaatcaactaagccctttgacctgagcagcttgacctcaaatgcagtgagttctgttactgcaggagcaggcctcttcctccttgctgacagcatggtagccctgaggactgcctctcaacattgtggctcagaaatggattatctatcctcattgccttattcggagtactattatccaatatatgaaatcaaagattgtctcctgaccagtgtcagtttaacaggtgtcctagtggtgatgctcatcttcactgtgctggagctcttattagctgcatacagttctgtcttttggtggaaacagctctactccaacaaccctgggagttcattttcctcgacccagtcacaagatcatatccaacaggtcaaaaagagttcttcacggtcttggatataagtaactcttggcctcagaggaaggaaaagcaactcaacactcatggtcaagtgtgattagactttcctgaaatctctgccattttagatactgtgaaacaaactaaaaaaaaaaaagcttttgttttgtatttgtttactatgagtcgttatttaatttctcttgaaaataatttcctcaaagcccaagtcaataaatgttatcagccagtcttccaaaatggtcataaactttataaactgctttgggtaaactgagcagaaggtgatacacagaagggaaaatgtgcactcatgctagtgtgaatttggtaagttgcgtgactctgcaggctgtttctgtattattttcacactcatattgcttaaatattacatattagggattgtaagaaaactttaattaaaaattaaagactatatataattaaactactctgccctggacactctctgagaaacagatctactgggccctttttcatgagccattaggtggaagacagcaaagagatcttctcaagtgcttaggattacctctcaacacacagcaagcatgtccctgcctcccatgaatcttaccatgtaaatccaaatctctgcaatcctgtggcaccaaccagtggtgctcattctattgtttaaaaatggccttcttggctgggcgcggtggctcactcctgtaatcccagcactttggtaggccgaggtggacggatcacccgaggtcaggagtttgagaccagcctggccaacaaggtgaaaccctgtctctactaaaaatacaaaaaattagccaggcatggtggtgcgcacctgtagttccagctacttgggaggctgaggcagaagaatcacttgaacccgggaaggggaggttgcagtgagcggagactgcaccactgcattccagcccggcctacaagaacaaaactccatctcaaaataaataaaaaaataaataaaaataaaaatagactatatatagtctttgaattcatttattttaaataaatgaataaaataaaataaaaaagaatattcagtcgttggcacataaactatgttctcttctgtcatttcagggtaggagtcaatgaagacatcttagtcttaacaagttacagataatctctgactggcatgttttctgcttctagcttggagctaaatgctgctcatgctgaaaagaataatgtctatttctttgtttgggtattagctctattttgatctatagcacagttttgtaattcagatcatcacccctgcactttgtaccacatgggcgtattctttcttcccagtcattgctgcaattatcttgtctgttctttgtgtaatatgttctgtgtgagcctctgcattaaactcgatttcttgggcaattatggaaattccagtgtggctgcagtttaactttgcactctctatgcatatgaggtttcctaaataaatgaggagtagcatagtttaaaatatatatatcttataactttctacaacaaagaattattgagtccaaatgtcatcagtgctcattttgagataccctgctatcgatggtcgctacaaaccaggaaatactcaagttattatgtgtatacattggttttagttttatgaaacaatttaccttcatgatctcatagttaaaattgtaataaatttaggaatataaaggatcaatatgggaagcaaaatttctaaaggcagtttctgttgttttaattagtatttgtgtagttcaaaccaggaaggatttgactatcattagattttgcttaactttatgaaagctaaaatattctctgttataaaggggcaactccatctggtcctatagcatctttactactgatttttttttgtttaatttgaaaatgcaaagaattgttaaatgttcttaaatgttctcactacaaaaaaagaaaaaagataactacgtgaggtgatggatatgttaattagctggattgtggtaatcattttggaatgtatatgtatatcaaaacatgtagtacaccctaaatatatataatttttatttgtcaaatatacctcaataaagatggaaaaaaatcgaaattc

SEQ ID NO: 3496 - protein, 240 aa, Homosapiens; identical to SEQ ID NO: 511

SEQ ID NO: 3497 - DNA, 1003 bp, Homosapiens
attcacatcctgtgtaatcataaatactgctctaagaaagggacaggaagtctcagaggctggagagcagagcaccaagatcgttctggcaggaacagccagtgggaggttccagctgagcgctccccagagcatcatcagcatcatgctattacaatcccaaaccatgggggtttctcacagctttacaccaaagggcatcactatccctcaaagagagaaacctggacacatgtaccaaaacgaagattacctgcagaacgggctgccaacagaaaccaccgttcttgggactgtccagatcctgtgttgcctgttgatttcaagtctgggggccatcttggtttttgctccctacccctcccacttcaatccagcaatttccaccactttgatgtctgggtacccatttttaggagctctgtgttttggcattactggatccctctcaattatctctggaaaacaatcaactaagccctttgacctgagcagcttgacctcaaatgcagtgagttctgttactgcaggagcaggcctcttcctccttgctgacagcatggtagccctgaggactgcctctcaacattgtggctcagaaatggattatctatcctcattgccttattcggagtactattatccaatatatgaaatcaaagattgtctcctgaccagtgtcagtttaacaggtgtcctagtggtgatgctcatcttcactgtgctggagctcttattagctgcatacagttctgtcttttggtggaaacagctctactccaacaaccctgggagttcattttcctcgacccagtcacaagatcatatccaacaggtcaaaaagagttcttcacggtcttggatataagtaactcttggcctcagaggaaggaaaagcaactcaacactcatggtcaagtgtgattagactttcctgaaatctctgccattttagatactgtgaaacaaactaaaaaaaaaaaagcttttgttttgtatttgt

SEQ ID NO: 3498 - protein, 240 aa, Homosapiens; identical to SEQ ID NO: 511

SEQ ID NO: 3499 - DNA, 2958 bp, Homosapiens
attcacatcctgtgtaatcataaatactgctctaagaaagggacaggaagtctcagaggctggagagcagagcaccaagatcgttctggcaggaacagccagtgggaggttccagctgagcgctccccagagcatcatcagcatcatgctattacaatcccaaaccatgggggtttctcacagctttacaccaaagggcatcactatccctcaaagagagaaacctggacacatgtaccaaaacgaagattacctgcagaacgggctgccaacagaaaccaccgttcttgggactgtccagatcctgtgttgcctgttgatttcaagtctgggggccatcttggtttttgctccctacccctcccacttcaatccagcaatttccaccactttgatgtctgggtacccatttttaggagctctgtgttttggcattactggatccctctcaattatctctggaaaacaatcaactaagccctttgacctgagcagcttgacctcaaatgcagtgagttctgttactgcaggagcaggcctcttcctccttgctgacagcatggtagccctgaggactgcctctcaacattgtggctcagaaatggattatctatcctcattgccttattcggagtactattatccaatatatgaaatcaaagattgtctcctgaccagtgtcagtttaacaggtgtcctagtggtgatgctcatcttcactgtgctggagctcttattagctgcatacagttctgtcttttggtggaaacagctctactccaacaaccctgggagttcattttcctcgacccagtcacaagatcatatccaacaggtcaaaaagagttcttcacggtcttggatataagtaactcttggcctcagaggaaggaaaagcaactcaacactcatggtcaagtgtgattagactttcctgaaatctctgccattttagatactgtgaaacaaactaaaaaaaaaaaagcttttgttttgtatttgtttactatgagtcgttatttaatttctcttgaaaataatttcctcaaagcccaagtcaataaatgttatcagccagtcttccaaaatggtcataaactttataaactgctttgggtaaactgagcagaaggtgatacacagaagggaaaatgtgcactcatgctagtgtgaatttggtaagttgcgtgactctgcaggctgtttctgtattattttcacactcatattgcttaaatattacatattagggattgtaagaaaactttaattaaaaattaaagactatatataattaaactactctgccctggacactctctgagaaacagatctactgggccctttttcatgagccattaggtggaagacagcaaagagatcttctcaagtgcttaggattacctctcaacacacagcaagcatgtccctgcctcccatgaatcttaccatgtaaatccaaatctctgcaatcctgtggcaccaaccagtggtgctcattctattgtttaaaaatggccttcttggctgggcgcggtggctcactcctgtaatcccagcactttggtaggccgaggtggacggatcacccgaggtcaggagtttgagaccagcctggccaacaaggtgaaaccctgtctctactaaaaatacaaaaaattagccaggcatggtggtgcgcacctgtagttccagctacttgggaggctgaggcagaagaatcacttgaacccgggaaggggaggttgcagtgagcggagactgcaccactgcattccagcccggcctacaagaacaaaactccatctcaaaataaataaaaaaataaataaaaataaaaatagactatatatagtctttgaattcatttattttaaataaatgaataaaataaaataaaaaagaatattcagtcgttggcacataaactatgttctcttctgtcatttcagggtaggagtcaatgaagacatcttagtcttaacaagttacagataatctctgactggcatgttttctgcttctagcttggagctaaatgctgctcatgctgaaaagaataatgtctatttctttgtttgggtattagctctattttgatctatagcacagttttgtaattcagatcatcacccctgcactttgtaccacatgggcgtattctttcttcccagtcattgctgcaattatcttgtctgttctttgtgtaatatgttctgtgtgagcctctgcattaaactcgatttcttgggcaattatggaaattccagtgtggctgcagtttaactttgcactctctatgcatatgaggtttcctaaataaatgaggagtagcatagtttaaaatatatatatcttataactttctacaacaaagaattattgagtccaaatgtcatcagtgctcattttgagataccctgctatcgatggtcgctacaaaccaggaaatactcaagttattatgtgtatacattggttttagttttatgaaacaatttaccttcatgatctcatagttaaaattgtaataaatttaggaatataaaggatcaatatgggaagcaaaatttctaaaggcagtttctgttgttttaattagtatttgtgtagttcaaaccaggaaggatttgactatcattagattttgcttaactttatgaaagctaaaatattctctgttataaaggggcaactccatctggtcctatagcatctttactactgatttttttttgtttaatttgaaaatgcaaagaattgttaaatgttcttaaatgttctcactacaaaaaaagaaaaaagataactacgtgaggtgatggatatgttaattagctggattgtggtaatcattttggaatgtatatgtatatcaaaacatgtagtacaccctaaatatatataatttttatttgtcaaatatacctcaataaagatggaaaaaaatcgaaattc

SEQ ID NO: 3500 - protein, 240 aa, Homosapiens; identical to SEQ ID NO: 511

SEQ ID NO: 3501 - DNA, 2823 bp, Homosapiens
attcacatcctgtgtaatcataaatactgctctaagaaagggacaggaagtctcagaggctggagagcagagcaccaagatcgttctggcaggaacagccagtgggaggttccagctgagcgctccccagagcatcatcagcatcatgctattacaatcccaaaccatgggggtttctcacagctttacaccaaagggcatcactatccctcaaagagagaaacctggacacatgtaccaaaacgaagattacctgcagaacgggctgccaacagaaaccaccgttcttgggtttggcattactggatccctctcaattatctctggaaaacaatcaactaagccctttgacctgagcagcttgacctcaaatgcagtgagttctgttactgcaggagcaggcctcttcctccttgctgacagcatggtagccctgaggactgcctctcaacattgtggctcagaaatggattatctatcctcattgccttattcggagtactattatccaatatatgaaatcaaagattgtctcctgaccagtgtcagtttaacaggtgtcctagtggtgatgctcatcttcactgtgctggagctcttattagctgcatacagttctgtcttttggtggaaacagctctactccaacaaccctgggagttcattttcctcgacccagtcacaagatcatatccaacaggtcaaaaagagttcttcacggtcttggatataagtaactcttggcctcagaggaaggaaaagcaactcaacactcatggtcaagtgtgattagactttcctgaaatctctgccattttagatactgtgaaacaaactaaaaaaaaaaaagcttttgttttgtatttgtttactatgagtcgttatttaatttctcttgaaaataatttcctcaaagcccaagtcaataaatgttatcagccagtcttccaaaatggtcataaactttataaactgctttgggtaaactgagcagaaggtgatacacagaagggaaaatgtgcactcatgctagtgtgaatttggtaagttgcgtgactctgcaggctgtttctgtattattttcacactcatattgcttaaatattacatattagggattgtaagaaaactttaattaaaaattaaagactatatataattaaactactctgccctggacactctctgagaaacagatctactgggccctttttcatgagccattaggtggaagacagcaaagagatcttctcaagtgcttaggattacctctcaacacacagcaagcatgtccctgcctcccatgaatcttaccatgtaaatccaaatctctgcaatcctgtggcaccaaccagtggtgctcattctattgtttaaaaatggccttcttggctgggcgcggtggctcactcctgtaatcccagcactttggtaggccgaggtggacggatcacccgaggtcaggagtttgagaccagcctggccaacaaggtgaaaccctgtctctactaaaaatacaaaaaattagccaggcatggtggtgcgcacctgtagttccagctacttgggaggctgaggcagaagaatcacttgaacccgggaaggggaggttgcagtgagcggagactgcaccactgcattccagcccggcctacaagaacaaaactccatctcaaaataaataaaaaaataaataaaaataaaaatagactatatatagtctttgaattcatttattttaaataaatgaataaaataaaataaaaaagaatattcagtcgttggcacataaactatgttctcttctgtcatttcagggtaggagtcaatgaagacatcttagtcttaacaagttacagataatctctgactggcatgttttctgcttctagcttggagctaaatgctgctcatgctgaaaagaataatgtctatttctttgtttgggtattagctctattttgatctatagcacagttttgtaattcagatcatcacccctgcactttgtaccacatgggcgtattctttcttcccagtcattgctgcaattatcttgtctgttctttgtgtaatatgttctgtgtgagcctctgcattaaactcgatttcttgggcaattatggaaattccagtgtggctgcagtttaactttgcactctctatgcatatgaggtttcctaaataaatgaggagtagcatagtttaaaatatatatatcttataactttctacaacaaagaattattgagtccaaatgtcatcagtgctcattttgagataccctgctatcgatggtcgctacaaaccaggaaatactcaagttattatgtgtatacattggttttagttttatgaaacaatttaccttcatgatctcatagttaaaattgtaataaatttaggaatataaaggatcaatatgggaagcaaaatttctaaaggcagtttctgttgttttaattagtatttgtgtagttcaaaccaggaaggatttgactatcattagattttgcttaactttatgaaagctaaaatattctctgttataaaggggcaactccatctggtcctatagcatctttactactgatttttttttgtttaatttgaaaatgcaaagaattgttaaatgttcttaaatgttctcactacaaaaaaagaaaaaagataactacgtgaggtgatggatatgttaattagctggattgtggtaatcattttggaatgtatatgtatatcaaaacatgtagtacaccctaaatatatataatttttatttgtcaaatatacctcaataaagatggaaaaaaatcgaaattc

SEQ ID NO: 3502 - protein, 195 aa, Homosapiens; identical to SEQ ID NO: 513

SEQ ID NO: 3503 - DNA, 2871 bp, Homosapiens
attcacatcctgtgtaatcataaatactgctctaagaaagggacaggaagtctcagaggctggagagcagagcaccaagatcgttctggcaggaacagccagtgggaggttccagctgagcgctccccagaggtgagctgatccccagccacagcacacaggaccaggctgcgagaacagcatcatcagcatcatgctattacaatcccaaaccatgggggtttctcacagctttacaccaaagggcatcactatccctcaaagagagaaacctggacacatgtaccaaaacgaagattacctgcagaacgggctgccaacagaaaccaccgttcttgggtttggcattactggatccctctcaattatctctggaaaacaatcaactaagccctttgacctgagcagcttgacctcaaatgcagtgagttctgttactgcaggagcaggcctcttcctccttgctgacagcatggtagccctgaggactgcctctcaacattgtggctcagaaatggattatctatcctcattgccttattcggagtactattatccaatatatgaaatcaaagattgtctcctgaccagtgtcagtttaacaggtgtcctagtggtgatgctcatcttcactgtgctggagctcttattagctgcatacagttctgtcttttggtggaaacagctctactccaacaaccctgggagttcattttcctcgacccagtcacaagatcatatccaacaggtcaaaaagagttcttcacggtcttggatataagtaactcttggcctcagaggaaggaaaagcaactcaacactcatggtcaagtgtgattagactttcctgaaatctctgccattttagatactgtgaaacaaactaaaaaaaaaaaagcttttgttttgtatttgtttactatgagtcgttatttaatttctcttgaaaataatttcctcaaagcccaagtcaataaatgttatcagccagtcttccaaaatggtcataaactttataaactgctttgggtaaactgagcagaaggtgatacacagaagggaaaatgtgcactcatgctagtgtgaatttggtaagttgcgtgactctgcaggctgtttctgtattattttcacactcatattgcttaaatattacatattagggattgtaagaaaactttaattaaaaattaaagactatatataattaaactactctgccctggacactctctgagaaacagatctactgggccctttttcatgagccattaggtggaagacagcaaagagatcttctcaagtgcttaggattacctctcaacacacagcaagcatgtccctgcctcccatgaatcttaccatgtaaatccaaatctctgcaatcctgtggcaccaaccagtggtgctcattctattgtttaaaaatggccttcttggctgggcgcggtggctcactcctgtaatcccagcactttggtaggccgaggtggacggatcacccgaggtcaggagtttgagaccagcctggccaacaaggtgaaaccctgtctctactaaaaatacaaaaaattagccaggcatggtggtgcgcacctgtagttccagctacttgggaggctgaggcagaagaatcacttgaacccgggaaggggaggttgcagtgagcggagactgcaccactgcattccagcccggcctacaagaacaaaactccatctcaaaataaataaaaaaataaataaaaataaaaatagactatatatagtctttgaattcatttattttaaataaatgaataaaataaaataaaaaagaatattcagtcgttggcacataaactatgttctcttctgtcatttcagggtaggagtcaatgaagacatcttagtcttaacaagttacagataatctctgactggcatgttttctgcttctagcttggagctaaatgctgctcatgctgaaaagaataatgtctatttctttgtttgggtattagctctattttgatctatagcacagttttgtaattcagatcatcacccctgcactttgtaccacatgggcgtattctttcttcccagtcattgctgcaattatcttgtctgttctttgtgtaatatgttctgtgtgagcctctgcattaaactcgatttcttgggcaattatggaaattccagtgtggctgcagtttaactttgcactctctatgcatatgaggtttcctaaataaatgaggagtagcatagtttaaaatatatatatcttataactttctacaacaaagaattattgagtccaaatgtcatcagtgctcattttgagataccctgctatcgatggtcgctacaaaccaggaaatactcaagttattatgtgtatacattggttttagttttatgaaacaatttaccttcatgatctcatagttaaaattgtaataaatttaggaatataaaggatcaatatgggaagcaaaatttctaaaggcagtttctgttgttttaattagtatttgtgtagttcaaaccaggaaggatttgactatcattagattttgcttaactttatgaaagctaaaatattctctgttataaaggggcaactccatctggtcctatagcatctttactactgatttttttttgtttaatttgaaaatgcaaagaattgttaaatgttcttaaatgttctcactacaaaaaaagaaaaaagataactacgtgaggtgatggatatgttaattagctggattgtggtaatcattttggaatgtatatgtatatcaaaacatgtagtacaccctaaatatatataatttttatttgtcaaatatacctcaataaagatggaaaaaaatcgaaattc

SEQ ID NO: 3504 - protein, 195 aa, Homosapiens; identical to SEQ ID NO: 513

SEQ ID NO: 3505 - DNA, 805 bp, Homosapiens
cacatcctgtgtaatcataaatactgctctaagaaagggacaggaagtctcagaggctggagagcagagcaccaagatcgttctggcaggaacagccagtgggaggttccagctgagcgctccccagaggtgagctgatccccagccacagcacacaggaccaggctgcgagaacagcatcatcagcatcatgctattacaatcccaaaccatgggggtttctcacagctttacaccaaagggcatcactatccctcaaagagagaaacctggacacatgtaccaaaacgaagattacctgcagaacgggctgccaacagaaaccaccgttcttgggtttggcattactggatccctctcaattatctctggaaaacaatcaactaagccctttgacctgagcagcttgacctcaaatgcagtgagttctgttactgcaggagcaggcctcttcctccttgctgacagcatggtagccctgaggactgcctctcaacattgtggctcagaaatggattatctatcctcattgccttattcggagtactattatccaatatatgaaatcaaagattgtctcctgaccagtgtcagtttaacaagttcattttcctcgacccagtcacaagatcatatccaacaggtcaaaaagagttcttcacggtcttggatataagtaactcttggcctcagaggaaggaaaagcaactcaacactcatggtcaagtgtgattagactttcctgaaatctctgccattttagatactgtgaaacaaactaaaaaaaaaaaagcttttgttttgt

SEQ ID NO: 3506 - protein, 161 aa, Homosapiens
MLLQSQTMGVSHSFTPKGITIPQREKPGHMYQNEDYLQNGLPTETTVLGFGITGSLSIISGKQSTKPFDLSSLTSNAVSSVTAGAGLFLLADSMVALRTASQHCGSEMDYLSSLPYSEYYYPIYEIKDCLLTSVSLTSSFSSTQSQDHIQQVKKSSSRSWI

SEQ ID NO: 3507 - DNA, 913 bp, Homosapiens
cacatcctgtgtaatcataaatactgctctaagaaagggacaggaagtctcagaggctggagagcagagcaccaagatcgttctggcaggaacagccagtgggaggttccagctgagcgctccccagaggtgagctgatccccagccacagcacacaggaccaggctgcgagaacagcatcatcagcatcatgctattacaatcccaaaccatgggggtttctcacagctttacaccaaagggcatcactatccctcaaagagagaaacctggacacatgtaccaaaacgaagattacctgcagaacgggctgccaacagaaaccaccgttcttgggtttggcattactggatccctctcaattatctctggaaaacaatcaactaagccctttgacctgagcagcttgacctcaaatgcagtgagttctgttactgcaggagcaggcctcttcctccttgctgacagcatggtagccctgaggactgcctctcaacattgtggctcagaaatggattatctatcctcattgccttattcggagtactattatccaatatatgaaatcaaagattgtctcctgaccagtgtcagtttaacaggtgtcctagtggtgatgctcatcttcactgtgctggagctcttattagctgcatacagttctgtcttttggtggaaacagctctactccaacaaccctgggagttcattttcctcgacccagtcacaagatcatatccaacaggtcaaaaagagttcttcacggtcttggatataagtaactcttggcctcagaggaaggaaaagcaactcaacactcatggtcaagtgtgattagactttcctgaaatctctgccattttagatactgtgaaacaaactaaaaaaaaaaaagcttttgttttgtatttgt

SEQ ID NO: 3508 - protein, 195 aa, Homosapiens; identical to SEQ ID NO: 513

SEQ ID NO: 3509 - DNA, 2766 bp, Homosapiens
cacatcctgtgtaatcataaatactgctctaagaaagggacaggaagtctcagaggctggagagcagagcaccaagatcgttctggcaggaacagccagtgggaggttccagctgagcgctccccagaggtgagctgatccccagccacagcacacaggaccaggctgcgagaacagcatcatcagcatcatgctattacaatcccaaaccatgggggtttctcacagctttacaccaaagggcatcactatccctcaaagagagaaacctggacacatgtaccaaaacgaagattacctgcagaacgggctgccaacagaaaccaccgttcttgggtttggcattactggatccctctcaattatctctggaaaacaatcaactaagccctttgacctgagcagcttgacctcaaatgcagtgagttctgttactgcaggagcaggcctcttcctccttgctgacagcatggtagccctgaggactgcctctcaacattgtggctcagaaatggattatctatcctcattgccttattcggagtactattatccaatatatgaaatcaaagattgtctcctgaccagtgtcagtttaacaagttcattttcctcgacccagtcacaagatcatatccaacaggtcaaaaagagttcttcacggtcttggatataagtaactcttggcctcagaggaaggaaaagcaactcaacactcatggtcaagtgtgattagactttcctgaaatctctgccattttagatactgtgaaacaaactaaaaaaaaaaaagcttttgttttgtatttgtttactatgagtcgttatttaatttctcttgaaaataatttcctcaaagcccaagtcaataaatgttatcagccagtcttccaaaatggtcataaactttataaactgctttgggtaaactgagcagaaggtgatacacagaagggaaaatgtgcactcatgctagtgtgaatttggtaagttgcgtgactctgcaggctgtttctgtattattttcacactcatattgcttaaatattacatattagggattgtaagaaaactttaattaaaaattaaagactatatataattaaactactctgccctggacactctctgagaaacagatctactgggccctttttcatgagccattaggtggaagacagcaaagagatcttctcaagtgcttaggattacctctcaacacacagcaagcatgtccctgcctcccatgaatcttaccatgtaaatccaaatctctgcaatcctgtggcaccaaccagtggtgctcattctattgtttaaaaatggccttcttggctgggcgcggtggctcactcctgtaatcccagcactttggtaggccgaggtggacggatcacccgaggtcaggagtttgagaccagcctggccaacaaggtgaaaccctgtctctactaaaaatacaaaaaattagccaggcatggtggtgcgcacctgtagttccagctacttgggaggctgaggcagaagaatcacttgaacccgggaaggggaggttgcagtgagcggagactgcaccactgcattccagcccggcctacaagaacaaaactccatctcaaaataaataaaaaaataaataaaaataaaaatagactatatatagtctttgaattcatttattttaaataaatgaataaaataaaataaaaaagaatattcagtcgttggcacataaactatgttctcttctgtcatttcagggtaggagtcaatgaagacatcttagtcttaacaagttacagataatctctgactggcatgttttctgcttctagcttggagctaaatgctgctcatgctgaaaagaataatgtctatttctttgtttgggtattagctctattttgatctatagcacagttttgtaattcagatcatcacccctgcactttgtaccacatgggcgtattctttcttcccagtcattgctgcaattatcttgtctgttctttgtgtaatatgttctgtgtgagcctctgcattaaactcgatttcttgggcaattatggaaattccagtgtggctgcagtttaactttgcactctctatgcatatgaggtttcctaaataaatgaggagtagcatagtttaaaatatatatatcttataactttctacaacaaagaattattgagtccaaatgtcatcagtgctcattttgagataccctgctatcgatggtcgctacaaaccaggaaatactcaagttattatgtgtatacattggttttagttttatgaaacaatttaccttcatgatctcatagttaaaattgtaataaatttaggaatataaaggatcaatatgggaagcaaaatttctaaaggcagtttctgttgttttaattagtatttgtgtagttcaaaccaggaaggatttgactatcattagattttgcttaactttatgaaagctaaaatattctctgttataaaggggcaactccatctggtcctatagcatctttactactgatttttttttgtttaatttgaaaatgcaaagaattgttaaatgttcttaaatgttctcactacaaaaaaagaaaaaagataactacgtgaggtgatggatatgttaattagctggattgtggtaatcattttggaatgtatatgtatatcaaaacatgtagtacaccctaaatatatataatttttatttgtcaaatatacctcaataaagatggaaaaaaatcgaaattc

SEQ ID NO: 3510 - protein, 161 aa, Homosapiens; identical to SEQ ID NO: 3506

SEQ ID NO: 3511 - DNA, 814 bp, Homosapiens
ggaagtctcagaggctggagagcagagcaccaagatcgttctggcaggaacagccagtgggaggttccagctgagcgctccccagaggtgagctgatccccagccacagcacacaggaccaggctgcgagaacagcatcatcagcatcatgctattacaatcccaaaccatgggggtttctcacagctttacaccaaagggcatcactatccctcaaagagagaaacctggacacatgtaccaaaacgaagattacctgcagaacgggctgccaacagaaaccaccgttcttggggacctgagcagcttgacctcaaatgcagtgagttctgttactgcaggagcaggcctcttcctccttgctgacagcatggtagccctgaggactgcctctcaacattgtggctcagaaatggattatctatcctcattgccttattcggagtactattatccaatatatgaaatcaaagattgtctcctgaccagtgtcagtttaacaggtgtcctagtggtgatgctcatcttcactgtgctggagctcttattagctgcatacagttctgtcttttggtggaaacagctctactccaacaaccctgggagttcattttcctcgacccagtcacaagatcatatccaacaggtcaaaaagagttcttcacggtcttggatataagtaactcttggcctcagaggaaggaaaagcaactcaacactcatggtcaagtgtgattagactttcctgaaatctctgccattttagatactgtgaaacaaactaaaaaaaaaaaagcttttgttttgtatttgt

SEQ ID NO: 3512 - protein, 176 aa, Homosapiens
MLLQSQTMGVSHSFTPKGITIPQREKPGHMYQNEDYLQNGLPTETTVLGDLSSLTSNAVSSVTAGAGLFLLADSMVALRTASQHCGSEMDYLSSLPYSEYYYPIYEIKDCLLTSVSLTGVLVVMLIFTVLELLLAAYSSVFWWKQLYSNNPGSSFSSTQSQDHIQQVKKSSSRSWI

SEQ ID NO: 3513 - DNA, 2769 bp, Homosapiens
ggaagtctcagaggctggagagcagagcaccaagatcgttctggcaggaacagccagtgggaggttccagctgagcgctccccagaggtgagctgatccccagccacagcacacaggaccaggctgcgagaacagcatcatcagcatcatgctattacaatcccaaaccatgggggtttctcacagctttacaccaaagggcatcactatccctcaaagagagaaacctggacacatgtaccaaaacgaagattacctgcagaacgggctgccaacagaaaccaccgttcttggggacctgagcagcttgacctcaaatgcagtgagttctgttactgcaggagcaggcctcttcctccttgctgacagcatggtagccctgaggactgcctctcaacattgtggctcagaaatggattatctatcctcattgccttattcggagtactattatccaatatatgaaatcaaagattgtctcctgaccagtgtcagtttaacaggtgtcctagtggtgatgctcatcttcactgtgctggagctcttattagctgcatacagttctgtcttttggtggaaacagctctactccaacaaccctgggagttcattttcctcgacccagtcacaagatcatatccaacaggtcaaaaagagttcttcacggtcttggatataagtaactcttggcctcagaggaaggaaaagcaactcaacactcatggtcaagtgtgattagactttcctgaaatctctgccattttagatactgtgaaacaaactaaaaaaaaaaaagcttttgttttgtatttgtttactatgagtcgttatttaatttctcttgaaaataatttcctcaaagcccaagtcaataaatgttatcagccagtcttccaaaatggtcataaactttataaactgctttgggtaaactgagcagaaggtgatacacagaagggaaaatgtgcactcatgctagtgtgaatttggtaagttgcgtgactctgcaggctgtttctgtattattttcacactcatattgcttaaatattacatattagggattgtaagaaaactttaattaaaaattaaagactatatataattaaactactctgccctggacactctctgagaaacagatctactgggccctttttcatgagccattaggtggaagacagcaaagagatcttctcaagtgcttaggattacctctcaacacacagcaagcatgtccctgcctcccatgaatcttaccatgtaaatccaaatctctgcaatcctgtggcaccaaccagtggtgctcattctattgtttaaaaatggccttcttggctgggcgcggtggctcactcctgtaatcccagcactttggtaggccgaggtggacggatcacccgaggtcaggagtttgagaccagcctggccaacaaggtgaaaccctgtctctactaaaaatacaaaaaattagccaggcatggtggtgcgcacctgtagttccagctacttgggaggctgaggcagaagaatcacttgaacccgggaaggggaggttgcagtgagcggagactgcaccactgcattccagcccggcctacaagaacaaaactccatctcaaaataaataaaaaaataaataaaaataaaaatagactatatatagtctttgaattcatttattttaaataaatgaataaaataaaataaaaaagaatattcagtcgttggcacataaactatgttctcttctgtcatttcagggtaggagtcaatgaagacatcttagtcttaacaagttacagataatctctgactggcatgttttctgcttctagcttggagctaaatgctgctcatgctgaaaagaataatgtctatttctttgtttgggtattagctctattttgatctatagcacagttttgtaattcagatcatcacccctgcactttgtaccacatgggcgtattctttcttcccagtcattgctgcaattatcttgtctgttctttgtgtaatatgttctgtgtgagcctctgcattaaactcgatttcttgggcaattatggaaattccagtgtggctgcagtttaactttgcactctctatgcatatgaggtttcctaaataaatgaggagtagcatagtttaaaatatatatatcttataactttctacaacaaagaattattgagtccaaatgtcatcagtgctcattttgagataccctgctatcgatggtcgctacaaaccaggaaatactcaagttattatgtgtatacattggttttagttttatgaaacaatttaccttcatgatctcatagttaaaattgtaataaatttaggaatataaaggatcaatatgggaagcaaaatttctaaaggcagtttctgttgttttaattagtatttgtgtagttcaaaccaggaaggatttgactatcattagattttgcttaactttatgaaagctaaaatattctctgttataaaggggcaactccatctggtcctatagcatctttactactgatttttttttgtttaatttgaaaatgcaaagaattgttaaatgttcttaaatgttctcactacaaaaaaagaaaaaagataactacgtgaggtgatggatatgttaattagctggattgtggtaatcattttggaatgtatatgtatatcaaaacatgtagtacaccctaaatatatataatttttatttgtcaaatatacctcaataaagatggaaaaaaatcgaaattc

SEQ ID NO: 3514 - protein, 176 aa, Homosapiens; identical to SEQ ID NO: 3512

SEQ ID NO: 3515 - DNA, 2534 bp, Homosapiens
ggaagtctcagaggctggagagcagagcaccaagatcgttctggcaggaacagccagtgggaggttccagctgagcgctccccagaggtgagctgatccccagccacagcacacaggaccaggctgcgagaacagggtcaaggtgtcacgggcatgaatgttatcagctccttggttgcgataactgggattactttcaccattctcagctacagacatcaagacaagtactgccagatgccatcctttgaagaaatatgtgttttcagtagaactcttttcattgttctgtttttcttgccttcggatgttactcaaaatagtgaacaacctgccccagaagaaaatgatcaattacaatttgtgcttcaagaagagttttccagtgatgattcaacaacaaatgcacaatctgttatctttggaggctatgctttcttcaagttaacactctctaggagtcctttagtctcccaaccaggtaataaaggtagagaatttgtgccagatgaacaaaagcaaagtatccttccatctcccaaattttcagaggaagaaattgaacctttgcctcccacactagagaaaaagccctcagaaaatatgtccattcagctagactctacatttaaacaaatgaaagatgaagatctacaatctgctattgtacaaccttctcaaatgcaaaccaagcttctgcaggaccaagctgcgtcactccaagtttttccatcccattctgcactaaaactcgaagatatatcacctgaagacttgccatcccaagctctaccagtagaaggcctgtcagaacaaaccatgccatctaagtctacatcatcccatgtcaaacagtcttctaatctgacagctaatgacctgccccctcaaggcatactatcccaagacacatcatctcaagatatgctgtttcatgacatgacatcccaagatatgcaatccctagatatgctatctcaagacacaccatcccacgccatgccacctcaagacataccttcccaagatatgctatcccaagctctatcagcgcatgccatattacctgaagcctcaacatcccatattgtgcagttccctgaaatacaacacctacttcagcagcccccagatcttcaaccagaaaacactgaacctcaaaaccagcaaattttacaaatgtcatatcaagatattagatcagaagttatggaagagaccaaagaatggaaatctgaggaggaactccatagaagaaaatcctcaagacggcattccttaaaccagcaaaccaaagccttgcaatacttaaggagacattctttagacgtgcaagccaaaggccagaaatcctcaaagaggcattccttagatcagcaaagcaaaggctggcaatctccaaagcagaaatccttagaccagcaaatcaaagactggctatccccaaagaggcactccgtagataagcaagctcaacttaatcaaactaaagagcaactcccagatcagcaagctgaagatcagcaagccaaaggggaacaatacccagaaggacaatctaaagatggacaagttaaagaccagcagactgataaggagcaaaactcaaagaagcaaacccaggatcagcaaactgaagaccagccggcccaagagaagaaatccccgaaaggacaattccaaaatgttcaagccgaaggacagcaagctcaggtggagaaagtgccaaaactgttatgccaagattcagaatcccaaatacagcaataccaattctggcaattccacaaaggcaatctccaggctggacaacccaggactgtcaatcttttggccaagaatcccctgactggataactcagggctggagaaacaaagattataaagcacgagaatggcaatttgaaatgaagcactggcaaacacaggatctattagagaaagaagccctaaagcagaaagctctataccaagaagtccaaacccagcacgcaacagcccaacataacctagaatgtcaagacactcaagataaagaccaacaagaccttcaatccagagttacacaaaaaggagatatgtacactagagacatcaaaccaggggacatgaaatgtatagggcaaacctcaggggacctgcaatcagaagacgtgaaggcagattttcattcttcttctggccaaagctcagtacaagacacatgtttagcctatttgtccaatctagattcagaacaagatgtgcaaccagacacttcagcttcctcaaattcatataaagaagatgtgaatttaacttctacttcatgtgatccaaaagatcaacagcaatctgaagactctgactaacatgcagaatctacccaataccacactgcccccattaatggaattaaattgggaaaaacaatattgcctcctccaatctgtgttctcaactgtggttgccacctcattaacttacaaaaaaatgaagggcatgctgagcactcaaacaatttgttcttacttaaaataaaatgacaacaaacc

SEQ ID NO: 3516 - protein, 567 aa, Homosapiens
MNVISSLVAITGITFTILSYRHQDKYCQMPSFEEICVFSRTLFIVLFFLPSDVTQNSEQPAPEENDQLQFVLQEEFSSDDSTTNAQSVIFGGYAFFKLTLSRSPLVSQPGNKGREFVPDEQKQSILPSPKFSEEEIEPLPPTLEKKPSENMSIQLDSTFKQMKDEDLQSAIVQPSQMQTKLLQDQAASLQVFPSHSALKLEDISPEDLPSQALPVEGLSEQTMPSKSTSSHVKQSSNLTANDLPPQGILSQDTSSQDMLFHDMTSQDMQSLDMLSQDTPSHAMPPQDIPSQDMLSQALSAHAILPEASTSHIVQFPEIQHLLQQPPDLQPENTEPQNQQILQMSYQDIRSEVMEETKEWKSEEELHRRKSSRRHSLNQQTKALQYLRRHSLDVQAKGQKSSKRHSLDQQSKGWQSPKQKSLDQQIKDWLSPKRHSVDKQAQLNQTKEQLPDQQAEDQQAKGEQYPEGQSKDGQVKDQQTDKEQNSKKQTQDQQTEDQPAQEKKSPKGQFQNVQAEGQQAQVEKVPKLLCQDSESQIQQYQFWQFHKGNLQAGQPRTVNLLAKNPLTG

SEQ ID NO: 3517 - DNA, 822 bp, Homosapiens
gaagtctcagaggctggagagcagagcaccaagatcgttctggcaggaacagccagtgggaggttccagctgagcgctccccagagcatcatcagcatcatgctattacaatcccaaaccatgggggtttctcacagctttacaccaaagggcatcactatccctcaaagagagaaacctggacacatgtaccaaaacgaagattacctgcagaacgggctgccaacagaaaccaccgttcttgggtttggcattactggatccctctcaattatctctggaaaacaatcaactaagccctttgacctgagcagcttgacctcaaatgcagtgagttctgttactgcaggagcaggcctcttcctccttgctgacagcatggtagccctgaggactgcctctcaacattgtggctcagaaatggattatctatcctcattgccttattcggagtactattatccaatatatgaaatcaaagattgtctcctgaccagtgtcagtttaacaggtgtcctagtggtgatgctcatcttcactgtgctggagctcttattagctgcatacagttctgtcttttggtggaaacagctctactccaacaaccctgggagttcattttcctcgacccagtcacaagatcatatccaacaggtcaaaaagagttcttcacggtcttggatataagtaactcttggcctcagaggaaggaaaagcaactcaacactcatggtcaagtgtgattagactttcctgaaatctctgccattttagatactgtgaaacaaactaaaaaaaaaaaagcttttgttttgtatttgt

SEQ ID NO: 3518 - protein, 195 aa, Homosapiens; identical to SEQ ID NO: 513

SEQ ID NO: 3519 - DNA, 1004 bp, Homosapiens
aagtctcagaggctggagagcagagcaccaagatcgttctggcaggaacagccagtgggaggttccagctgagcgctccccagaggtgagctgatccccagccacagcacacaggaccaggctgcgagaacagcatcatcagcatcatgctattacaatcccaaaccatgggggtttctcacagctttacaccaaagggcatcactatccctcaaagagagaaacctggacacatgtaccaaaacgaagattacctgcagaacgggctgccaacagaaaccaccgttcttgggactgtccagatcctgtgttgcctgttgatttcaagtctgggggccatcttggtttttgctccctacccctcccacttcaatccagcaatttccaccactttgatgtctgggtacccatttttaggagctctgtgttttggcattactggatccctctcaattatctctggaaaacaatcaactaagccctttgacctgagcagcttgacctcaaatgcagtgagttctgttactgcaggagcaggcctcttcctccttgctgacagcatggtagccctgaggactgcctctcaacattgtggctcagaaatggattatctatcctcattgccttattcggagtactattatccaatatatgaaatcaaagattgtctcctgaccagtgtcagtttaacaggtgtcctagtggtgatgctcatcttcactgtgctggagctcttattagctgcatacagttctgtcttttggtggaaacagctctactccaacaaccctgggagttcattttcctcgacccagtcacaagatcatatccaacaggtcaaaaagagttcttcacggtcttggatataagtaactcttggcctcagaggaaggaaaagcaactcaacactcatggtcaagtgtgattagactttcctgaaatctctgccattttagatactgtgaaacaaactaaaaaaaaaaaagcttttgttttgtatttgt

SEQ ID NO: 3520 - protein, 240 aa, Homosapiens; identical to SEQ ID NO: 511

SEQ ID NO: 3521 - DNA, 1427 bp, Homosapiens
agaggctggagagcagagcaccaagatcgttctggcaggaacagccagtgggaggttccagctgagcgctccccagaggtgagctgatccccagccacagcacacaggaccaggctgcgagaacagcatcatcagcatcatgctattacaatcccaaaccatgggggtttctcacagctttacaccaaagggcatcactatccctcaaagagagaaacctggacacatgtaccaaaacgaagattacctgcagaacgggctgccaacagaaaccaccgttcttgggactgtccagatcctgtgttgcctgttgatttcaagtctgggggccatcttggtttttgctccctacccctcccacttcaatccagcaatttccaccactttgatgtctgggtacccatttttaggagctctgtgtggtaggagtcaatgaagacatcttagtcttaacaagttacagataatctctgactggcatgttttctgcttctagcttggagctaaatgctgctcatgctgaaaagaataatgtctatttctttgtttgggtattagctctattttgatctatagcacagttttgtaattcagatcatcacccctgcactttgtaccacatgggcgtattctttcttcccagtcattgctgcaattatcttgtctgttctttgtgtaatatgttctgtgtgagcctctgcattaaactcgatttcttgggcaattatggaaattccagtgtggctgcagtttaactttgcactctctatgcatatgaggtttcctaaataaatgaggagtagcatagtttaaaatatatatatcttataactttctacaacaaagaattattgagtccaaatgtcatcagtgctcattttgagataccctgctatcgatggtcgctacaaaccaggaaatactcaagttattatgtgtatacattggttttagttttatgaaacaatttaccttcatgatctcatagttaaaattgtaataaatttaggaatataaaggatcaatatgggaagcaaaatttctaaaggcagtttctgttgttttaattagtatttgtgtagttcaaaccaggaaggatttgactatcattagattttgcttaactttatgaaagctaaaatattctctgttataaaggggcaactccatctggtcctatagcatctttactactgatttttttttgtttaatttgaaaatgcaaagaattgttaaatgttcttaaatgttctcactacaaaaaaagaaaaaagataactacgtgaggtgatggatatgttaattagctggattgtggtaatcattttggaatgtatatgtatatcaaaacatgtagtacaccctaaatatatataatttttatttgtcaaatatacctcaataaagatggaaaaaaatcgaaattc

SEQ ID NO: 3522 - protein, 98 aa, Homosapiens
MLLQSQTMGVSHSFTPKGITIPQREKPGHMYQNEDYLQNGLPTETTVLGTVQILCCLLISSLGAILVFAPYPSHFNPAISTTLMSGYPFLGALCGRSQ

SEQ ID NO: 3523 - DNA, 1544 bp, Homosapiens
caccaagatcgttctggcaggaacagccagtgggaggttccagctgagcgctccccagaggtgagctgatccccagccacagcacacaggaccaggctgcgagaacagcatcatcagcatcatgctattacaatcccaaaccatgggggtttctcacagctttacaccaaagggcatcactatccctcaaagagagaaacctggacacatgtaccaaaacgaagattacctgcagaacgggctgccaacagaaaccaccgttcttggggtaagtccacctcattataaggggaatactgcagaagaatcacttgaacccgggaaggggaggttgcagtgagcggagactgcaccactgcattccagcccggcctacaagaacaaaactccatctcaaaataaataaaaaaataaataaaaataaaaatagactatatatagtctttgaattcatttattttaaataaatgaataaaataaaataaaaaagaatattcagtcgttggcacataaactatgttctcttctgtcatttcagggtaggagtcaatgaagacatcttagtcttaacaagttacagataatctctgactggcatgttttctgcttctagcttggagctaaatgctgctcatgctgaaaagaataatgtctatttctttgtttgggtattagctctattttgatctatagcacagttttgtaattcagatcatcacccctgcactttgtaccacatgggcgtattctttcttcccagtcattgctgcaattatcttgtctgttctttgtgtaatatgttctgtgtgagcctctgcattaaactcgatttcttgggcaattatggaaattccagtgtggctgcagtttaactttgcactctctatgcatatgaggtttcctaaataaatgaggagtagcatagtttaaaatatatatatcttataactttctacaacaaagaattattgagtccaaatgtcatcagtgctcattttgagataccctgctatcgatggtcgctacaaaccaggaaatactcaagttattatgtgtatacattggttttagttttatgaaacaatttaccttcatgatctcatagttaaaattgtaataaatttaggaatataaaggatcaatatgggaagcaaaatttctaaaggcagtttctgttgttttaattagtatttgtgtagttcaaaccaggaaggatttgactatcattagattttgcttaactttatgaaagctaaaatattctctgttataaaggggcaactccatctggtcctatagcatctttactactgatttttttttgtttaatttgaaaatgcaaagaattgttaaatgttcttaaatgttctcactacaaaaaaagaaaaaagataactacgtgaggtgatggatatgttaattagctggattgtggtaatcattttggaatgtatatgtatatcaaaacatgtagtacaccctaaatatatataatttttatttgtcaaatatacctcaataaagatggaaaaaaatcgaaattc

SEQ ID NO: 3524 - protein, 72 aa, Homosapiens
MLLQSQTMGVSHSFTPKGITIPQREKPGHMYQNEDYLQNGLPTETTVLGVSPPHYKGNTAEESLEPGKGRLQ

SEQ ID NO: 3525 - DNA, 1177 bp, Homosapiens
cagaacgggctgccaacagaaaccaccgttcttgggactgtccagatcctgtgttgcctgttgatttcaagtctgggggccatcttggtttttgctccctacccctcccacttcaatccagcaatttccaccactttgatgtctgggtacccatttttaggagctctgtgtggtaggagtcaatgaagacatcttagtcttaacaagttacagataatctctgactggcatgttttctgcttctagcttggagctaaatgctgctcatgctgaaaagaataatgtctatttctttgtttgggtattagctctattttgatctatagcacagttttgtaattcagatcatcacccctgcactttgtaccacatgggcgtattctttcttcccagtcattgctgcaattatcttgtctgttctttgtgtaatatgttctgtgtgagcctctgcattaaactcgatttcttgggcaattatggaaattccagtgtggctgcagtttaactttgcactctctatgcatatgaggtttcctaaataaatgaggagtagcatagtttaaaatatatatatcttataactttctacaacaaagaattattgagtccaaatgtcatcagtgctcattttgagataccctgctatcgatggtcgctacaaaccaggaaatactcaagttattatgtgtatacattggttttagttttatgaaacaatttaccttcatgatctcatagttaaaattgtaataaatttaggaatataaaggatcaatatgggaagcaaaatttctaaaggcagtttctgttgttttaattagtatttgtgtagttcaaaccaggaaggatttgactatcattagattttgcttaactttatgaaagctaaaatattctctgttataaaggggcaactccatctggtcctatagcatctttactactgatttttttttgtttaatttgaaaatgcaaagaattgttaaatgttcttaaatgttctcactacaaaaaaagaaaaaagataactacgtgaggtgatggatatgttaattagctggattgtggtaatcattttggaatgtatatgtatatcaaaacatgtagtacaccctaaatatatataatttttatttgtcaaatatacctcaataaagatggaaaaaaatcgaaattc

SEQ ID NO: 3526 - protein, 44 aa, Homosapiens
MGVFFLPSHCCNYLVCSLCNMFCVSLCIKLDFLGNYGNSSVAAV

SEQ ID NO: 3527 - DNA, 978 bp, Homosapiens
tttagagcaagctaacagctaaacttcagttcttccacttgcgaaataattattattaaaatccaatgatgaacaaaataagatgaattacagcagaagagatgacctgctcttcccactttcctcgactcccattctgactcaagcaacatacaccaataacttccagtccatgtgtttctgcaccttgtcccatcagagcctctttcctgagtgcttctgttggctgttccaatctctctgtccattcaagtcattggtccatctcaacctcctctctttcaaccctgtaatttagtaacactcttctccttcccaggtacaccttttctccaggcctcctcagttcctagtgatttccactaaaacaaatccaacccctctgtgcatctgcatgtcattcaaagtcaatatagacattcttatatcaggtgggaattaggcctatctagcaatatagatccacaagatttctgcagtgttctctccctaaaagttttccaacatcactttttgattgagtgattgacagtgacatggtgggcacatttccacaagacaactgaactgatcatttctctctcttctgggcagtttggcattactggatccctctcaattatctctggaaaacaatcaactaagccctttgtaagtataaggaccatcaaatctcagctggttggaattgaaggaacgtcagagttaattcttctagtttaaaaatccctattttacaatttagagagaaaaagcttagaacaggctaggaagcccaggttttcctggctgtcccattggtagaaccaagagtagagcccaaatttcttgccttctagaccagtgctctttcgtctacacaatgttgctcctggattatattccaagcttggaggaggtttacctcagttatttaaaaagtgtacatttttaaatgtaccatggactctttatagcttgtaaccttgaccttgaata

SEQ ID NO: 3528 - protein, 71 aa, Homosapiens
MNYSRRDDLLFPLSSTPILTQATYTNNFQSMCFCTLSHQSLFPECFCWLFQSLCPFKSLVHLNLLSFNPVI

SEQ ID NO: 3529 - DNA, 873 bp, Homosapiens
gtaacactcttctccttcccaggtacaccttttctccaggcctcctcagttcctagtgatttccactaaaacaaatccaacccctctgtgcatctgcatgtcattcaaagtcaatatagacattcttatatcaggtgggaattaggcctatctagcaatatagatccacaagatttctgcagtgttctctccctaaaagttttccaacatcactttttgattgagtgattgacagtgacatggtgggcacatttccacaagacaactgaactgatcatttctctctcttctgggcagtttggcattactggatccctctcaattatctctggaaaacaatcaactaagccctttgacctgagcagcttgacctcaaatgcagtgagttctgttactgcaggagcaggcctcttcctccttgctgacagcatggtagccctgaggactgcctctcaacattgtggctcagaaatggattatctatcctcattgccttattcggagtactattatccaatatatgaaatcaaagattgtctcctgaccagtgtcagtttaacaggtgtcctagtggtgatgctcatcttcactgtgctggagctcttattagctgcatacagttctgtcttttggtggaaacagctctactccaacaaccctgggagttcattttcctcgacccagtcacaagatcatatccaacaggtcaaaaagagttcttcacggtcttggatataagtaactcttggcctcagaggaaggaaaagcaactcaacactcatggtcaagtgtgattagactttcctgaaatctctgccattttagatactgtgaaacaaactaaaaaaaaaaaagcttttgttttgtatttgt

SEQ ID NO: 3530 - protein, 102 aa, Homosapiens
MVALRTASQHCGSEMDYLSSLPYSEYYYPIYEIKDCLLTSVSLTGVLVVMLIFTVLELLLAAYSSVFWWKQLYSNNPGSSFSSTQSQDHIQQVKKSSSRSWI

SEQ ID NO: 3531 - DNA, 2828 bp, Homosapiens
gtaacactcttctccttcccaggtacaccttttctccaggcctcctcagttcctagtgatttccactaaaacaaatccaacccctctgtgcatctgcatgtcattcaaagtcaatatagacattcttatatcaggtgggaattaggcctatctagcaatatagatccacaagatttctgcagtgttctctccctaaaagttttccaacatcactttttgattgagtgattgacagtgacatggtgggcacatttccacaagacaactgaactgatcatttctctctcttctgggcagtttggcattactggatccctctcaattatctctggaaaacaatcaactaagccctttgacctgagcagcttgacctcaaatgcagtgagttctgttactgcaggagcaggcctcttcctccttgctgacagcatggtagccctgaggactgcctctcaacattgtggctcagaaatggattatctatcctcattgccttattcggagtactattatccaatatatgaaatcaaagattgtctcctgaccagtgtcagtttaacaggtgtcctagtggtgatgctcatcttcactgtgctggagctcttattagctgcatacagttctgtcttttggtggaaacagctctactccaacaaccctgggagttcattttcctcgacccagtcacaagatcatatccaacaggtcaaaaagagttcttcacggtcttggatataagtaactcttggcctcagaggaaggaaaagcaactcaacactcatggtcaagtgtgattagactttcctgaaatctctgccattttagatactgtgaaacaaactaaaaaaaaaaaagcttttgttttgtatttgtttactatgagtcgttatttaatttctcttgaaaataatttcctcaaagcccaagtcaataaatgttatcagccagtcttccaaaatggtcataaactttataaactgctttgggtaaactgagcagaaggtgatacacagaagggaaaatgtgcactcatgctagtgtgaatttggtaagttgcgtgactctgcaggctgtttctgtattattttcacactcatattgcttaaatattacatattagggattgtaagaaaactttaattaaaaattaaagactatatataattaaactactctgccctggacactctctgagaaacagatctactgggccctttttcatgagccattaggtggaagacagcaaagagatcttctcaagtgcttaggattacctctcaacacacagcaagcatgtccctgcctcccatgaatcttaccatgtaaatccaaatctctgcaatcctgtggcaccaaccagtggtgctcattctattgtttaaaaatggccttcttggctgggcgcggtggctcactcctgtaatcccagcactttggtaggccgaggtggacggatcacccgaggtcaggagtttgagaccagcctggccaacaaggtgaaaccctgtctctactaaaaatacaaaaaattagccaggcatggtggtgcgcacctgtagttccagctacttgggaggctgaggcagaagaatcacttgaacccgggaaggggaggttgcagtgagcggagactgcaccactgcattccagcccggcctacaagaacaaaactccatctcaaaataaataaaaaaataaataaaaataaaaatagactatatatagtctttgaattcatttattttaaataaatgaataaaataaaataaaaaagaatattcagtcgttggcacataaactatgttctcttctgtcatttcagggtaggagtcaatgaagacatcttagtcttaacaagttacagataatctctgactggcatgttttctgcttctagcttggagctaaatgctgctcatgctgaaaagaataatgtctatttctttgtttgggtattagctctattttgatctatagcacagttttgtaattcagatcatcacccctgcactttgtaccacatgggcgtattctttcttcccagtcattgctgcaattatcttgtctgttctttgtgtaatatgttctgtgtgagcctctgcattaaactcgatttcttgggcaattatggaaattccagtgtggctgcagtttaactttgcactctctatgcatatgaggtttcctaaataaatgaggagtagcatagtttaaaatatatatatcttataactttctacaacaaagaattattgagtccaaatgtcatcagtgctcattttgagataccctgctatcgatggtcgctacaaaccaggaaatactcaagttattatgtgtatacattggttttagttttatgaaacaatttaccttcatgatctcatagttaaaattgtaataaatttaggaatataaaggatcaatatgggaagcaaaatttctaaaggcagtttctgttgttttaattagtatttgtgtagttcaaaccaggaaggatttgactatcattagattttgcttaactttatgaaagctaaaatattctctgttataaaggggcaactccatctggtcctatagcatctttactactgatttttttttgtttaatttgaaaatgcaaagaattgttaaatgttcttaaatgttctcactacaaaaaaagaaaaaagataactacgtgaggtgatggatatgttaattagctggattgtggtaatcattttggaatgtatatgtatatcaaaacatgtagtacaccctaaatatatataatttttatttgtcaaatatacctcaataaagatggaaaaaaatcgaaattc

SEQ ID NO: 3532 - protein, 102 aa, Homosapiens; identical to SEQ ID NO: 3530

SEQ ID NO: 3533 - DNA, 740 bp, Homosapiens
aggcaacagaatgattctaaggctattgaggaagtcatgggagatgttggcagtgacctgagcagcactgtctctatcttgagtgctatagagagtcaatgggccagaacccctctccctaaggaggaattatccatgcattttcttattcaataagcatttactaattatatcacatgattaactaaatagcgacaagagatacaaagatgaataaaacacagtttgtgcccacacaaggaaacaggaaggaaacagacccaaggaagcaccattgcagtacaatggacagaggactaatagtgtcacgtgctgattctgtgatgagaacccaatgcagagtttctcttccaggacctgagcagcttgacctcaaatgcagtgagttctgttactgcaggagcaggcctcttcctccttgctgacagcatggtagccctgaggactgcctctcaacattgtggctcagaaatggattatctatcctcattgccttattcggagtactattatccaatatatgaaatcaaagattgtctcctgaccagtgtcagtttaacaagttcattttcctcgacccagtcacaagatcatatccaacaggtcaaaaagagttcttcacggtcttggatataagtaactcttggcctcagaggaaggaaaagcaactcaacactcatggtcaagtgtgattagactttcctgaaatctctgccattttagatactgtgaaacaaact

SEQ ID NO: 3534 - protein, 68 aa, Homosapiens
MVALRTASQHCGSEMDYLSSLPYSEYYYPIYEIKDCLLTSVSLTSSFSSTQSQDHIQQVKKSSSRSWI

SEQ ID NO: 3535 - DNA, 720 bp, Homosapiens
tattcaataagcatttactaattatatcacatgattaactaaatagcgacaagagatacaaagatgaataaaacacagtttgtgcccacacaaggaaacaggaaggaaacagacccaaggaagcaccattgcagtacaatggacagaggactaatagtgtcacgtgctgattctgtgatgagaacccaatgcagagtttctcttccaggacctgagcagcttgacctcaaatgcagtgagttctgttactgcaggagcaggcctcttcctccttgctgacagcatggtagccctgaggactgcctctcaacattgtggctcagaaatggattatctatcctcattgccttattcggagtactattatccaatatatgaaatcaaagattgtctcctgaccagtgtcagtttaacaggtgtcctagtggtgatgctcatcttcactgtgctggagctcttattagctgcatacagttctgtcttttggtggaaacagctctactccaacaaccctgggagttcattttcctcgacccagtcacaagatcatatccaacaggtcaaaaagagttcttcacggtcttggatataagtaactcttggcctcagaggaaggaaaagcaactcaacactcatggtcaagtgtgattagactttcctgaaatctctgccattttagatactgtgaaacaaactaaaaaaaaaaaagcttttgttttg

SEQ ID NO: 3536 - protein, 102 aa, Homosapiens; identical to SEQ ID NO: 3530

SEQ ID NO: 3537 - DNA, 2928 bp, Homosapiens
gaagaatcaattattgttcatgaggtgcatgtggaaggccacttttataattaaaaaaatgagtttaacagtgaaaccccatctctactaaaatctcaaaaaaaaaaaagagtttgtataaatgggctccttctggaggacactctggtcatctgggatcagctggtgtctactgggaagcagaccagttagagaattgcttaatatgaagctagttggttttagaaatcacatagcccaacccctcatgaaagaaccacggcttggataaaattacatagaaaatgaatgacacagactattgggctgagaatgagaacgcgtatcccctcacttttatcgggaacacagctacctgcctcccgagagagtctccctagccaagtttccttgttaatgtgatgagactttactagaatgtctctgtcctgtttatgcttccctgtgctcttccttacatccccttagctcttgatgttataattttaaaatattttcatttcccctaaaggctacaacaacaaaagaaatgtttatagaatttggatgaattatgatttaactatgatcctatttaaaatagtaaaataattagcagactggagaattgcattatttttaattaatattgctgcaattacatattatggcaaagttggaagaactagtactacacaaaacttggggaaaaggtattatgagttatcttttttaatctccgaaatcaaagtttaaaaattctaaccaattatgtattttctagagttcattttcctcgacccagtcacaagatcatatccaacaggtcaaaaagagttcttcacggtcttggatataagtaactcttggcctcagaggaaggaaaagcaactcaacactcatggtcaagtgtgattagactttcctgaaatctctgccattttagatactgtgaaacaaactaaaaaaaaaaaagcttttgttttgtatttgtttactatgagtcgttatttaatttctcttgaaaataatttcctcaaagcccaagtcaataaatgttatcagccagtcttccaaaatggtcataaactttataaactgctttgggtaaactgagcagaaggtgatacacagaagggaaaatgtgcactcatgctagtgtgaatttggtaagttgcgtgactctgcaggctgtttctgtattattttcacactcatattgcttaaatattacatattagggattgtaagaaaactttaattaaaaattaaagactatatataattaaactactctgccctggacactctctgagaaacagatctactgggccctttttcatgagccattaggtggaagacagcaaagagatcttctcaagtgcttaggattacctctcaacacacagcaagcatgtccctgcctcccatgaatcttaccatgtaaatccaaatctctgcaatcctgtggcaccaaccagtggtgctcattctattgtttaaaaatggccttcttggctgggcgcggtggctcactcctgtaatcccagcactttggtaggccgaggtggacggatcacccgaggtcaggagtttgagaccagcctggccaacaaggtgaaaccctgtctctactaaaaatacaaaaaattagccaggcatggtggtgcgcacctgtagttccagctacttgggaggctgaggcagaagaatcacttgaacccgggaaggggaggttgcagtgagcggagactgcaccactgcattccagcccggcctacaagaacaaaactccatctcaaaataaataaaaaaataaataaaaataaaaatagactatatatagtctttgaattcatttattttaaataaatgaataaaataaaataaaaaagaatattcagtcgttggcacataaactatgttctcttctgtcatttcagggtaggagtcaatgaagacatcttagtcttaacaagttacagataatctctgactggcatgttttctgcttctagcttggagctaaatgctgctcatgctgaaaagaataatgtctatttctttgtttgggtattagctctattttgatctatagcacagttttgtaattcagatcatcacccctgcactttgtaccacatgggcgtattctttcttcccagtcattgctgcaattatcttgtctgttctttgtgtaatatgttctgtgtgagcctctgcattaaactcgatttcttgggcaattatggaaattccagtgtggctgcagtttaactttgcactctctatgcatatgaggtttcctaaataaatgaggagtagcatagtttaaaatatatatatcttataactttctacaacaaagaattattgagtccaaatgtcatcagtgctcattttgagataccctgctatcgatggtcgctacaaaccaggaaatactcaagttattatgtgtatacattggttttagttttatgaaacaatttaccttcatgatctcatagttaaaattgtaataaatttaggaatataaaggatcaatatgggaagcaaaatttctaaaggcagtttctgttgttttaattagtatttgtgtagttcaaaccaggaaggatttgactatcattagattttgcttaactttatgaaagctaaaatattctctgttataaaggggcaactccatctggtcctatagcatctttactactgatttttttttgtttaatttgaaaatgcaaagaattgttaaatgttcttaaatgttctcactacaaaaaaagaaaaaagataactacgtgaggtgatggatatgttaattagctggattgtggtaatcattttggaatgtatatgtatatcaaaacatgtagtacaccctaaatatatataatttttatttgtcaaatatacctcaataaagatggaaaaaaatcgaaattc

SEQ ID NO: 3538 - protein, 49 aa, Homosapiens
MGSFWRTLWSSGISWCLLGSRPVRELLNMKLVGFRNHIAQPLMKEPRLG

SEQ ID NO: 3539 - DNA, 2008 bp, Homosapiens
atcaagtaaaagaaactcctttcaaaggagggcagaagcgtggctgagtttaaaaaacatagattttggagacaggtcaagttgagtttgccccttccctgtcctgtatgtctttgggtgacataaccttgctgttcctcagtttcagtattgtagaactgttaaaagaataaatgttagtgcatgtcaacaccttctacacagttcccagaacataaggaatattccataagttttagttcctttataactcatgaacatatgtgtaaggacttgtttcgtatataccatctattctttgtttaccatatgtttgtaagcaaattgacaagagagtaagtcttctggatacagtacttttcaccaggaagatggggggctgagcatgctctagaattctaaaactctgtgactcaactatgattctgagattctactactgagtagagtcatcactaagggctcatctctgagggctccatgtgactctggtggagaggtagatcatgatttgggcggcaatgtttgctcactctttcccttactagagttctgccatagaatcatggagtcaacatcccaggacagaagggcaactcacgtcatcactataaaaccaaacgaaactgtattgactgcatttccctacagacctcatagctctctgctggattttctgaagggagagccaagagtcttgggggctacccagatcctgcttgctctaatcattgtgggctttggaactatatttgcacttaattacatcggtttctcccaaagacttccccttgttgtcctcacaggatatccattctggggagcacttattggtcaaggtgtcacgggcatgaatgttatcagctccttggttgcgataactgggattactttcaccattctcagctacagacatcaagacaagtactgccagatgccatcctttgaagaaatatgtgttttcagtagaactcttttcattgttctgtttttcttgccttcggatgttactcaaaatagtgaacaacctgccccagaagaaaatgatcaattacaatttgtgcttcaagaagagttttccagtgatgattcaacaacaaatgcacaatctgttatctttggaggctatgctttcttcaagttaacactctctaggagtcctttagtctcccaaccaggtaataaaggtagagaatttgtgccagatgaacaaaagcaaagtatccttccatctcccaaattttcagaggaagaaattgaacctttgcctcccacactagagaaaaagccctcagaaaatatgtccattcagctagactctacatttaaacaaatgaaagatgaagatctacaatctgctattgtacaaccttctcaaatgcaaaccaagcttctgcaggaccaagctgcgtcactccaagtttttccatcccattctgcactaaaactcgaagatatatcacctgaagacttgccatcccaagctctaccagtagaaggcctgtcagaacaaaccatgccatctaagtctacatcatcccatgtcaaacagtcttctaatctgacagctaatgacctgccccctcaaggcatactatcccaagacacatcatctcaagatatgctgtttcatgacatgacatcccaagatatgcaatccctagatatgctatctcaagacacaccatcccacgccatgccacctcaagacataccttcccaagatatgctatcccaagctctatcagcgcatgccatattacctgaagcctcaacatcccatattgtgcagttccctgaaatacaacacctacttcagcagcccccagatcttcaaccagaaaacactgaacctcaaaaccagcaaattttacaaatgtcatatcaagatattagatcagaagttatggaagagaccaaagaatggaaatctgaggaggaactccatagaagaaaatcctcaagacggcattccttaaaccagcaaaccaaagccttgcaatactta

SEQ ID NO: 3540 - protein, 480 aa, Homosapiens
MESTSQDRRATHVITIKPNETVLTAFPYRPHSSLLDFLKGEPRVLGATQILLALIIVGFGTIFALNYIGFSQRLPLVVLTGYPFWGALIGQGVTGMNVISSLVAITGITFTILSYRHQDKYCQMPSFEEICVFSRTLFIVLFFLPSDVTQNSEQPAPEENDQLQFVLQEEFSSDDSTTNAQSVIFGGYAFFKLTLSRSPLVSQPGNKGREFVPDEQKQSILPSPKFSEEEIEPLPPTLEKKPSENMSIQLDSTFKQMKDEDLQSAIVQPSQMQTKLLQDQAASLQVFPSHSALKLEDISPEDLPSQALPVEGLSEQTMPSKSTSSHVKQSSNLTANDLPPQGILSQDTSSQDMLFHDMTSQDMQSLDMLSQDTPSHAMPPQDIPSQDMLSQALSAHAILPEASTSHIVQFPEIQHLLQQPPDLQPENTEPQNQQILQMSYQDIRSEVMEETKEWKSEEELHRRKSSRRHSLNQQTKALQY

SEQ ID NO: 3541 - DNA, 3273 bp, Homosapiens
atcaagtaaaagaaactcctttcaaaggagggcagaagcgtggctgagtttaaaaaacatagattttggagacaggtcaagttgagtttgccccttccctgtcctgtatgtctttgggtgacataaccttgctgttcctcagtttcagtattgtagaactgttaaaagaataaatgttagtgcatgtcaacaccttctacacagttcccagaacataaggaatattccataagttttagttcctttataactcatgaacatatgtgtaaggacttgtttcgtatataccatctattctttgtttaccatatgtttgtaagcaaattgacaagagagtaagtcttctggatacagtacttttcaccaggaagatggggggctgagcatgctctagaattctaaaactctgtgactcaactatgattctgagattctactactgagtagagtcatcactaagggctcatctctgagggctccatgtgactctggtggagaggtagatcatgatttgggcggcaatgtttgctcactctttcccttactagagttctgccatagaatcatggagtcaacatcccaggacagaagggcaactcacgtcatcactataaaaccaaacgaaactgtattgactgcatttccctacagacctcatagctctctgctggattttctgaagggagagccaagagtcttgggggctacccagatcctgcttgctctaatcattgtgggctttggaactatatttgcacttaattacatcggtttctcccaaagacttccccttgttgtcctcacaggatatccattctggggagcacttatttttattcttacaggatacctcacagtaaccgataagaaatcaaaacttctgggtcaaggtgtcacgggcatgaatgttatcagctccttggttgcgataactgggattactttcaccattctcagctacagacatcaagacaagtactgccagatgccatcctttgaagaaatatgtgttttcagtagaactcttttcattgacttcatccttctcactcctccacactccagccacttcctataatcccttaatgtgtcaagtatccacggccccaagatgatcagaggatcagcttcttccggctttgaaccgtcaccaggttctgtttttcttgccttcggatgttactcaaaatagtgaacaacctgccccagaagaaaatgatcaattacaatttgtgcttcaagaagagttttccagtgatgattcaacaacaaatgcacaatctgttatctttggaggctatgctttcttcaagttaacactctctaggagtcctttagtctcccaaccaggtaataaaggtagagaatttgtgccagatgaacaaaagcaaagtatccttccatctcccaaattttcagaggaagaaattgaacctttgcctcccacactagagaaaaagccctcagaaaatatgtccattcagctagactctacatttaaacaaatgaaagatgaagatctacaatctgctattgtacaaccttctcaaatgcaaaccaagcttctgcaggaccaagctgcgtcactccaagtttttccatcccattctgcactaaaactcgaagatatatcacctgaagacttgccatcccaagctctaccagtagaaggcctgtcagaacaaaccatgccatctaagtctacatcatcccatgtcaaacagtcttctaatctgacagctaatgacctgccccctcaaggcatactatcccaagacacatcatctcaagatatgctgtttcatgacatgacatcccaagatatgcaatccctagatatgctatctcaagacacaccatcccacgccatgccacctcaagacataccttcccaagatatgctatcccaagctctatcagcgcatgccatattacctgaagcctcaacatcccatattgtgcagttccctgaaatacaacacctacttcagcagcccccagatcttcaaccagaaaacactgaacctcaaaaccagcaaattttacaaatgtcatatcaagatattagatcagaagttatggaagagaccaaagaatggaaatctgaggaggaactccatagaagaaaatcctcaagacggcattccttaaaccagcaaaccaaagccttgcaatacttaaggagacattctttagacgtgcaagccaaaggccagaaatcctcaaagaggcattccttagatcagcaaagcaaaggctggcaatctccaaagcagaaatccttagaccagcaaatcaaagactggctatccccaaagaggcactccgtagataagcaagctcaacttaatcaaactaaagagcaactcccagatcagcaagctgaagatcagcaagccaaaggggaacaatacccagaaggacaatctaaagatggacaagttaaagaccagcagactgataaggagcaaaactcaaagaagcaaacccaggatcagcaaactgaagaccagccggcccaagagaagaaatccccgaaaggacaattccaaaatgttcaagccgaaggacagcaagctcaggtggagaaagtgccaaaactgttatgccaagattcagaatcccaaatacagcaataccaattctggcaattccacaaaggcaatctccaggctggacaacccaggactgtcaatcttttggccaagaatcccctgactggataactcagggctggagaaacaaagattataaagcacgagaatggcaatttgaaatgaagcactggcaaacacaggatctattagagaaagaagccctaaagcagaaagctctataccaagaagtccaaacccagcacgcaacagcccaacataacctagaatgtcaagacactcaagataaagaccaacaagaccttcaatccagagttacacaaaaaggagatatgtacactagagacatcaaaccaggggacatgaaatgtatagggcaaacctcaggggacctgcaatcagaagacgtgaaggcagattttcattcttcttctggccaaagctcagtacaagacacatgtttagcctatttgtccaatctagattcagaacaagatgtgcaaccagacacttcagcttcctcaaattcatataaagaagatgtgaatttaacttctacttcatgtgatccaaaagatcaacagcaatctgaagactctgactaacatgcagaatctacccaataccacactgcccccattaatggaattaaattggg

SEQ ID NO: 3542 - protein, 170 aa, Homosapiens
MESTSQDRRATHVITIKPNETVLTAFPYRPHSSLLDFLKGEPRVLGATQILLALIIVGFGTIFALNYIGFSQRLPLVVLTGYPFWGALIFILTGYLTVTDKKSKLLGQGVTGMNVISSLVAITGITFTILSYRHQDKYCQMPSFEEICVFSRTLFIDFILLTPPHSSHFL

SEQ ID NO: 3543 - DNA, 3352 bp, Homosapiens
atcaagtaaaagaaactcctttcaaaggagggcagaagcgtggctgagtttaaaaaacatagattttggagacaggtcaagttgagtttgccccttccctgtcctgtatgtctttgggtgacataaccttgctgttcctcagtttcagtattgtagaactgttaaaagaataaatgttagtgcatgtcaacaccttctacacagttcccagaacataaggaatattccataagttttagttcctttataactcatgaacatatgtgtaaggacttgtttcgtatataccatctattctttgtttaccatatgtttgtaagcaaattgacaagagagtaagtcttctggatacagtacttttcaccaggaagatggggggctgagcatgctctagaattctaaaactctgtgactcaactatgattctgagattctactactgagtagagtcatcactaagggctcatctctgagggctccatgtgactctggtggagaggtagatcatgatttgggcggcaatgtttgctcactctttcccttactagagttctgccatagaatcatggagtcaacatcccaggacagaagggcaactcacgtcatcactataaaaccaaacgaaactgtattgactgcatttccctacagacctcatagctctctgctggattttctgaagggagagccaagagtcttgggggctacccagatcctgcttgctctaatcattgtgggctttggaactatatttgcacttaattacatcggtttctcccaaagacttccccttgttgtcctcacaggatatccattctggggagcacttattggtcaaggtgtcacgggcatgaatgttatcagctccttggttgcgataactgggattactttcaccattctcagctacagacatcaagacaagtactgccagatgccatcctttgaagaaatatgtgttttcagtagaactcttttcattgacttcatccttctcactcctccacactccagccacttcctataatcccttaatgtgtcaagtatccacggccccaagatgatcagaggatcagcttcttccggctttgaaccgtcaccaggttctgtttttcttgccttcggatgttactcaaaatagtgaacaacctgccccagaagaaaatgatcaattacaatttgtgcttcaagaagagttttccagtgatgattcaacaacaaatgcacaatctgttatctttggaggctatgctttcttcaagttaacactctctaggagtcctttagtctcccaaccaggtaataaaggtagagaatttgtgccagatgaacaaaagcaaagtatccttccatctcccaaattttcagaggaagaaattgaacctttgcctcccacactagagaaaaagccctcagaaaatatgtccattcagctagactctacatttaaacaaatgaaagatgaagatctacaatctgctattgtacaaccttctcaaatgcaaaccaagcttctgcaggaccaagctgcgtcactccaagtttttccatcccattctgcactaaaactcgaagatatatcacctgaagacttgccatcccaagctctaccagtagaaggcctgtcagaacaaaccatgccatctaagtctacatcatcccatgtcaaacagtcttctaatctgacagctaatgacctgccccctcaaggcatactatcccaagacacatcatctcaagatatgctgtttcatgacatgacatcccaagatatgcaatccctagatatgctatctcaagacacaccatcccacgccatgccacctcaagacataccttcccaagatatgctatcccaagctctatcagcgcatgccatattacctgaagcctcaacatcccatattgtgcagttccctgaaatacaacacctacttcagcagcccccagatcttcaaccagaaaacactgaacctcaaaaccagcaaattttacaaatgtcatatcaagatattagatcagaagttatggaagagaccaaagaatggaaatctgaggaggaactccatagaagaaaatcctcaagacggcattccttaaaccagcaaaccaaagccttgcaatacttaaggagacattctttagacgtgcaagccaaaggccagaaatcctcaaagaggcattccttagatcagcaaagcaaaggctggcaatctccaaagcagaaatccttagaccagcaaatcaaagactggctatccccaaagaggcactccgtagataagcaagctcaacttaatcaaactaaagagcaactcccagatcagcaagctgaagatcagcaagccaaaggggaacaatacccagaaggacaatctaaagatggacaagttaaagaccagcagactgataaggagcaaaactcaaagaagcaaacccaggatcagcaaactgaagaccagccggcccaagagaagaaatccccgaaaggacaattccaaaatgttcaagccgaaggacagcaagctcaggtggagaaagtgccaaaactgttatgccaagattcagaatcccaaatacagcaataccaattctggcaattccacaaaggcaatctccaggctggacaacccaggactgtcaatcttttggccaagaatcccctgactggataactcagggctggagaaacaaagattataaagcacgagaatggcaatttgaaatgaagcactggcaaacacaggatctattagagaaagaagccctaaagcagaaagctctataccaagaagtccaaacccagcacgcaacagcccaacataacctagaatgtcaagacactcaagataaagaccaacaagaccttcaatccagagttacacaaaaaggagatatgtacactagagacatcaaaccaggggacatgaaatgtatagggcaaacctcaggggacctgcaatcagaagacgtgaaggcagattttcattcttcttctggccaaagctcagtacaagacacatgtttagcctatttgtccaatctagattcagaacaagatgtgcaaccagacacttcagcttcctcaaattcatataaagaagatgtgaatttaacttctacttcatgtgatccaaaagatcaacagcaatctgaagactctgactaacatgcagaatctacccaataccacactgcccccattaatggaattaaattgggaaaaacaatattgcctcctccaatctgtgttctcaactgtggttgccacctcattaacttacaaaaaaatgaagggcatgctgagcactcaaacaatttgttcttacttaaaataaaatgacaacaaacc

SEQ ID NO: 3544 - protein, 153 aa, Homosapiens
MESTSQDRRATHVITIKPNETVLTAFPYRPHSSLLDFLKGEPRVLGATQILLALIIVGFGTIFALNYIGFSQRLPLVVLTGYPFWGALIGQGVTGMNVISSLVAITGITFTILSYRHQDKYCQMPSFEEICVFSRTLFIDFILLTPPHSSHFL

SEQ ID NO: 3545 - DNA, 3282 bp, Homosapiens
atcaagtaaaagaaactcctttcaaaggagggcagaagcgtggctgagtttaaaaaacatagattttggagacaggtcaagttgagtttgccccttccctgtcctgtatgtctttgggtgacataaccttgctgttcctcagtttcagtattgtagaactgttaaaagaataaatgttagtgcatgtcaacaccttctacacagttcccagaacataaggaatattccataagttttagttcctttataactcatgaacatatgtgtaaggacttgtttcgtatataccatctattctttgtttaccatatgtttgtaagcaaattgacaagagagtaagtcttctggatacagtacttttcaccaggaagatggggggctgagcatgctctagaattctaaaactctgtgactcaactatgattctgagattctactactgagtagagtcatcactaagggctcatctctgagggctccatgtgactctggtggagaggtagatcatgatttgggcggcaatgtttgctcactctttcccttactagagttctgccatagaatcatggagtcaacatcccaggacagaagggcaactcacgtcatcactataaaaccaaacgaaactgtattgactgcatttccctacagacctcatagctctctgctggattttctgaagggagagccaagagtcttgggggctacccagatcctgcttgctctaatcattgtgggctttggaactatatttgcacttaattacatcggtttctcccaaagacttccccttgttgtcctcacaggatatccattctggggagcacttatttttattcttacaggatacctcacagtaaccgataagaaatcaaaacttctgggtcaaggtgtcacgggcatgaatgttatcagctccttggttgcgataactgggattactttcaccattctcagctacagacatcaagacaagtactgccagatgccatcctttgaagaaatatgtgttttcagtagaactcttttcattgttctgtttttcttgccttcggatgttactcaaaatagtgaacaacctgccccagaagaaaatgatcaattacaatttgtgcttcaagaagagttttccagtgatgattcaacaacaaatgcacaatctgttatctttggaggctatgctttcttcaagttaacactctctaggagtcctttagtctcccaaccaggtaataaaggtagagaatttgtgccagatgaacaaaagcaaagtatccttccatctcccaaattttcagaggaagaaattgaacctttgcctcccacactagagaaaaagccctcagaaaatatgtccattcagctagactctacatttaaacaaatgaaagatgaagatctacaatctgctattgtacaaccttctcaaatgcaaaccaagcttctgcaggaccaagctgcgtcactccaagtttttccatcccattctgcactaaaactcgaagatatatcacctgaagacttgccatcccaagctctaccagtagaaggcctgtcagaacaaaccatgccatctaagtctacatcatcccatgtcaaacagtcttctaatctgacagctaatgacctgccccctcaaggcatactatcccaagacacatcatctcaagatatgctgtttcatgacatgacatcccaagatatgcaatccctagatatgctatctcaagacacaccatcccacgccatgccacctcaagacataccttcccaagatatgctatcccaagctctatcagcgcatgccatattacctgaagcctcaacatcccatattgtgcagttccctgaaatacaacacctacttcagcagcccccagatcttcaaccagaaaacactgaacctcaaaaccagcaaattttacaaatgtcatatcaagatattagatcagaagttatggaagagaccaaagaatggaaatctgaggaggaactccatagaagaaaatcctcaagacggcattccttaaaccagcaaaccaaagccttgcaatacttaaggagacattctttagacgtgcaagccaaaggccagaaatcctcaaagaggcattccttagatcagcaaagcaaaggctggcaatctccaaagcagaaatccttagaccagcaaatcaaagactggctatccccaaagaggcactccgtagataagcaagctcaacttaatcaaactaaagagcaactcccagatcagcaagctgaagatcagcaagccaaaggggaacaatacccagaaggacaatctaaagatggacaagttaaagaccagcagactgataaggagcaaaactcaaagaagcaaacccaggatcagcaaactgaagaccagccggcccaagagaagaaatccccgaaaggacaattccaaaatgttcaagccgaaggacagcaagctcaggtggagaaagtgccaaaactgttatgccaagattcagaatcccaaatacagcaataccaattctggcaattccacaaaggcaatctccaggctggacaacccaggactgtcaatcttttggccaagaatcccctgactggataactcagggctggagaaacaaagattataaagcacgagaatggcaatttgaaatgaagcactggcaaacacaggatctattagagaaagaagccctaaagcagaaagctctataccaagaagtccaaacccagcacgcaacagcccaacataacctagaatgtcaagacactcaagataaagaccaacaagaccttcaatccagagttacacaaaaaggagatatgtacactagagacatcaaaccaggggacatgaaatgtatagggcaaacctcaggggacctgcaatcagaagacgtgaaggcagattttcattcttcttctggccaaagctcagtacaagacacatgtttagcctatttgtccaatctagattcagaacaagatgtgcaaccagacacttcagcttcctcaaattcatataaagaagatgtgaatttaacttctacttcatgtgatccaaaagatcaacagcaatctgaagactctgactaacatgcagaatctacccaataccacactgcccccattaatggaattaaattgggaaaaacaatattgcctcctccaatctgtgttctcaactgtggttgccacctcattaacttacaaaaaaatgaagggcatgctgagcactcaaacaatttgttcttacttaaaataaaatgacaacaaacc

SEQ ID NO: 3546 - protein, 679 aa, Homosapiens
MESTSQDRRATHVITIKPNETVLTAFPYRPHSSLLDFLKGEPRVLGATQILLALIIVGFGTIFALNYIGFSQRLPLVVLTGYPFWGALIFILTGYLTVTDKKSKLLGQGVTGMNVISSLVAITGITFTILSYRHQDKYCQMPSFEEICVFSRTLFIVLFFLPSDVTQNSEQPAPEENDQLQFVLQEEFSSDDSTTNAQSVIFGGYAFFKLTLSRSPLVSQPGNKGREFVPDEQKQSILPSPKFSEEEIEPLPPTLEKKPSENMSIQLDSTFKQMKDEDLQSAIVQPSQMQTKLLQDQAASLQVFPSHSALKLEDISPEDLPSQALPVEGLSEQTMPSKSTSSHVKQSSNLTANDLPPQGILSQDTSSQDMLFHDMTSQDMQSLDMLSQDTPSHAMPPQDIPSQDMLSQALSAHAILPEASTSHIVQFPEIQHLLQQPPDLQPENTEPQNQQILQMSYQDIRSEVMEETKEWKSEEELHRRKSSRRHSLNQQTKALQYLRRHSLDVQAKGQKSSKRHSLDQQSKGWQSPKQKSLDQQIKDWLSPKRHSVDKQAQLNQTKEQLPDQQAEDQQAKGEQYPEGQSKDGQVKDQQTDKEQNSKKQTQDQQTEDQPAQEKKSPKGQFQNVQAEGQQAQVEKVPKLLCQDSESQIQQYQFWQFHKGNLQAGQPRTVNLLAKNPLTG

SEQ ID NO: 3547 - DNA, 3451 bp, Homosapiens
atcaagtaaaagaaactcctttcaaaggagggcagaagcgtggctgagtttaaaaaacatagattttggagacaggtcaagttgagtttgccccttccctgtcctgtatgtctttgggtgacataaccttgctgttcctcagtttcagtattgtagaactgttaaaagaataaatgttagtgcatgtcaacaccttctacacagttcccagaacataaggaatattccataagttttagttcctttataactcatgaacatatgtgtaaggacttgtttcgtatataccatctattctttgtttaccatatgtttgtaagcaaattgacaagagagtaagtcttctggatacagtacttttcaccaggaagatggggggctgagcatgctctagaattctaaaactctgtgactcaactatgattctgagattctactactgagtagagtcatcactaagggctcatctctgagggctccatgtgactctggtggagaggtagatcatgatttgggcggcaatgtttgctcactctttcccttactagagttctgccatagaatcatggagtcaacatcccaggacagaagggcaactcacgtcatcactataaaaccaaacgaaactgtattgactgcatttccctacagacctcatagctctctgctggattttctgaagggagagccaagagtcttgggggctacccagatcctgcttgctctaatcattgtgggctttggaactatatttgcacttaattacatcggtttctcccaaagacttccccttgttgtcctcacaggatatccattctggggagcacttattggtcaaggtgtcacgggcatgaatgttatcagctccttggttgcgataactgggattactttcaccattctcagctacagacatcaagacaagtactgccagatgccatcctttgaagaaatatgtgttttcagtagaactcttttcattgacttcatccttctcactcctccacactccagccacttcctataatcccttaatgtgtcaagtatccacggccccaagatgatcagaggatcagcttcttccggctttgaaccgtcaccagggaattttgttaatcttactgatcatcagcatagcagagctcagcatctctgtgactattgcatcctttagaagcaagtgctggacacagtcagatgaggttctgtttttcttgccttcggatgttactcaaaatagtgaacaacctgccccagaagaaaatgatcaattacaatttgtgcttcaagaagagttttccagtgatgattcaacaacaaatgcacaatctgttatctttggaggctatgctttcttcaagttaacactctctaggagtcctttagtctcccaaccaggtaataaaggtagagaatttgtgccagatgaacaaaagcaaagtatccttccatctcccaaattttcagaggaagaaattgaacctttgcctcccacactagagaaaaagccctcagaaaatatgtccattcagctagactctacatttaaacaaatgaaagatgaagatctacaatctgctattgtacaaccttctcaaatgcaaaccaagcttctgcaggaccaagctgcgtcactccaagtttttccatcccattctgcactaaaactcgaagatatatcacctgaagacttgccatcccaagctctaccagtagaaggcctgtcagaacaaaccatgccatctaagtctacatcatcccatgtcaaacagtcttctaatctgacagctaatgacctgccccctcaaggcatactatcccaagacacatcatctcaagatatgctgtttcatgacatgacatcccaagatatgcaatccctagatatgctatctcaagacacaccatcccacgccatgccacctcaagacataccttcccaagatatgctatcccaagctctatcagcgcatgccatattacctgaagcctcaacatcccatattgtgcagttccctgaaatacaacacctacttcagcagcccccagatcttcaaccagaaaacactgaacctcaaaaccagcaaattttacaaatgtcatatcaagatattagatcagaagttatggaagagaccaaagaatggaaatctgaggaggaactccatagaagaaaatcctcaagacggcattccttaaaccagcaaaccaaagccttgcaatacttaaggagacattctttagacgtgcaagccaaaggccagaaatcctcaaagaggcattccttagatcagcaaagcaaaggctggcaatctccaaagcagaaatccttagaccagcaaatcaaagactggctatccccaaagaggcactccgtagataagcaagctcaacttaatcaaactaaagagcaactcccagatcagcaagctgaagatcagcaagccaaaggggaacaatacccagaaggacaatctaaagatggacaagttaaagaccagcagactgataaggagcaaaactcaaagaagcaaacccaggatcagcaaactgaagaccagccggcccaagagaagaaatccccgaaaggacaattccaaaatgttcaagccgaaggacagcaagctcaggtggagaaagtgccaaaactgttatgccaagattcagaatcccaaatacagcaataccaattctggcaattccacaaaggcaatctccaggctggacaacccaggactgtcaatcttttggccaagaatcccctgactggataactcagggctggagaaacaaagattataaagcacgagaatggcaatttgaaatgaagcactggcaaacacaggatctattagagaaagaagccctaaagcagaaagctctataccaagaagtccaaacccagcacgcaacagcccaacataacctagaatgtcaagacactcaagataaagaccaacaagaccttcaatccagagttacacaaaaaggagatatgtacactagagacatcaaaccaggggacatgaaatgtatagggcaaacctcaggggacctgcaatcagaagacgtgaaggcagattttcattcttcttctggccaaagctcagtacaagacacatgtttagcctatttgtccaatctagattcagaacaagatgtgcaaccagacacttcagcttcctcaaattcatataaagaagatgtgaatttaacttctacttcatgtgatccaaaagatcaacagcaatctgaagactctgactaacatgcagaatctacccaataccacactgcccccattaatggaattaaattgggaaaaacaatattgcctcctccaatctgtgttctcaactgtggttgccacctcattaacttacaaaaaaatgaagggcatgctgagcactcaaacaatttgttcttacttaaaataaaatgacaacaaacc

SEQ ID NO: 3548 - protein, 153 aa, Homosapiens; identical to SEQ ID NO: 3544

SEQ ID NO: 3549 - DNA, 3519 bp, Homosapiens
atcaagtaaaagaaactcctttcaaaggagggcagaagcgtggctgagtttaaaaaacatagattttggagacaggtcaagttgagtttgccccttccctgtcctgtatgtctttgggtgacataaccttgctgttcctcagtttcagtattgtagaactgttaaaagaataaatgttagtgcatgtcaacaccttctacacagttcccagaacataaggaatattccataagttttagttcctttataactcatgaacatatgtgtaaggacttgtttcgtatataccatctattctttgtttaccatatgtttgtaagcaaattgacaagagagtaagtcttctggatacagtacttttcaccaggaagatggggggctgagcatgctctagaattctaaaactctgtgactcaactatgattctgagattctactactgagtagagtcatcactaagggctcatctctgagggctccatgtgactctggtggagaggtagatcatgatttgggcggcaatgtttgctcactctttcccttactagagttctgccatagaatcatggagtcaacatcccaggacagaagggcaactcacgtcatcactataaaaccaaacgaaactgtattgactgcatttccctacagacctcatagctctctgctggattttctgaagggagagccaagagtcttgggggctacccagatcctgcttgctctaatcattgtgggctttggaactatatttgcacttaattacatcggtttctcccaaagacttccccttgttgtcctcacaggatatccattctggggagcacttattggtcaaggtgtcacgggcatgaatgttatcagctccttggttgcgataactgggattactttcaccattctcagctacagacatcaagacaagtactgccagatgccatcctttgaagaaatatgtgttttcagtagaactcttttcattgacttcatccttctcactcctccacactccagccacttcctataatcccttaatgtgtcaagtatccacggccccaagatgatcagaggatcagcttcttccggctttgaaccgtcaccagggaattttgttaatcttactgatcatcagcatagcagagctcagcatctctgtgactattgcatcctttagaagcaagtgctggacacagtcagatgaggttctgtttttcttgccttcggatgttactcaaaatagtgaacaacctgccccagaagaaaatgatcaattacaatttgtgcttcaagaagagttttccagtgatgattcaacaacaaatgcacaatctgttatctttggaggctatgctttcttcaagttaacactctctaggagtcctttagtctcccaaccaggtaataaaggtagagaatttgtgccagatgaacaaaagcaaagtatccttccatctcccaaattttcagaggaagaaattgaacctttgcctcccacactagagaaaaagccctcagaaaatatgtccattcagctagactctacatttaaacaaatgaaagatgaagatctacaatctgctattgtacaaccttctcaaatgcaaaccaagcttctgcaggaccaagctgcgtcactccaagtttttccatcccattctgcactaaaactcgaagatatatcacctgaagacttgccatcccaagctctaccagtagaaggcctgtcagaacaaaccatgccatctaagtctacatcatcccatgtcaaacagtcttctaatctgacagctaatgacctgccccctcaaggcatactatcccaagacacatcatctcaagatatgctgtttcatgacatgacatcccaagatatgcaatccctagatatgctatctcaagacacaccatcccacgccatgccacctcaagacataccttcccaagatatgctatcccaagctctatcagcgcatgccatattacctgaagcctcaacatcccatattgtgcagttccctgaaatacaacacctacttcagcagcccccagatcttcaaccagaaaacactgaacctcaaaaccagcaaattttacaaatgtcatatcaagatattagatcagaagttatggaagagaccaaagaatggaaatctgaggaggaactccatagaagaaaatcctcaagacggcattccttaaaccagcaaaccaaagccttgcaatacttaaggagacattctttagacgtgcaagccaaaggccagaaatcctcaaagaggcattccttagatcagcaaagcaaaggctggcaatctccaaagcagaaatccttagaccagcaaatcaaagactggctatccccaaagaggcactccgtagataagcaagctcaacttaatcaaactaaagagcaactcccagatcagcaagctgaagatcagcaagccaaaggggaacaatacccagaaggacaatctaaagatggacaagttaaagaccagcagactgataaggagcaaaactcaaagaagcaaacccaggatcagcaaactgaagaccagccggcccaagagaagaaatccccgaaaggacaattccaaaatgttcaagccgaaggacagcaagctcaggtggagaaagtgccaaaactgttatgccaagattcagaatcccaaatacagcaataccaattctggcaattccacaaaggcaatctccaggctggacaacccaggactgtcaatcttttggccaagaatcccctgactggataactcagggctggagaaacaaagattataaagcacgagaatggcaatttgaaatgaagcactggcaaacacaggatctattagagaaagaagccctaaagcagaaagctctataccaagaagtccaaacccagcacgcaacagcccaacataacctagaatgtcaagacactcaagataaagaccaacaagaccttcaatccagagttacacaaaaaggagatatgtacactagagacatcaaaccaggggacatgaaatgtatagggcaaacctcaggggacctgcaatcagaagacgtgaaggcagattttcattcttcttctggccaaagctcagtacaagacacatgtttagcctatttgtccaatctagattcagaacaagatgtgcaaccagacacttcagcttcctcaaattcatataaagaagatgtgaatttaacttctacttcatgtgatccaaaagatcaacagcaatctgaagactctgactaacatgcagaatctacccaataccacactgcccccattaatggaattaaattgggaaaaacaatattgcctcctccaatctgtgttctcaactgtggttgccacctcattaacttacaaaaaaatgaagggcatgctgagcactcaaacaatttgttcttacttaaaataaaatgacaacaaaccaaatgttaacactgtatcatcactttatgtatgtgaagaaataattcacatgtatattccttgtcatc

SEQ ID NO: 3550 - protein, 153 aa, Homosapiens; identical to SEQ ID NO: 3544

SEQ ID NO: 3551 - DNA, 720 bp, Homosapiens
caggcagcctcagcacaagaaaagaacatggtctagactgaagtaccaactaaatcatctcctttcaaattatcaccgacaccatcatggattcaagcaccgcacacagtccggtgtttctggtatttcctccagaaatcactgcttcagaatatgagtccacagaactttcagccacgaccttttcaactcaaagccccttgcaaaaattatttgctagaaaaatgaaaatcttagggactatccagatcctgtttggaattatgaccttttcttttggagttatcttccttttcaccttgttaaaaccatatccaaggtttccctttatatttctttcaggatatccattctggggctctgttttgttcattaattctggagccttcctaattgcagtgaaaagaaaaaccacagaaactctgataatattgagccgaataatgaattttcttagtgccctgggagcaatagctggaatcattctcctcacatttggtttcatcctagatcaaaactacatttgtggttattctcaccaaaatagtcagtgtaaggctgttactgtcctgttcttgggaattttgattacattgatgactttcagcattattgaattattcatttctctgcctttctcaattttggggtgccactcagaggattgtgattgtgaacaatgttgttgactagcactgtgagaataaagatgtgttaaaa

SEQ ID NO: 3552 - protein, 200 aa, Homosapiens; identical to SEQ ID NO: 521

SEQ ID NO: 3553 - DNA, 568 bp, Homosapiens
agcacaagaaaagaacatggtctagactgaagtaccaactaaatcatctcctttcaaattatcaccgacaccatcatggattcaagcaccgcacacagtccggtgtttctggtatttcctccagaaatcactgcttcagaatatgagtccacagaactttcagccacgaccttttcaactcaaagccccttgcaaaaattatttgctagaaaaatgaaaatcttagggactatccagatcctgtttggaattatgaccttttcttttggagttatcttccttttcaccttgttaaaaccatatccaaggtttccctttatatttctttcaggatatccattctggggctctgttttgttcattaattctggagccttcctaattgcagtgaaaagaaaaaccacagaaactctgaaataaatgaggggggaggagccaagatggccaaataggaacagctccggtctacagctcccagcgtgagagacgcagaagacgggtgatttctgcatttccatctgaggtacccggttcatctcactagggagtgccagacagtgggcgcagg

SEQ ID NO: 3554 - protein, 114 aa, Homosapiens
MDSSTAHSPVFLVFPPEITASEYESTELSATTFSTQSPLQKLFARKMKILGTIQILFGIMTFSFGVIFLFTLLKPYPRFPFIFLSGYPFWGSVLFINSGAFLIAVKRKTTETLK

SEQ ID NO: 3555 - DNA, 770 bp, Homosapiens
tagactgaagtaccaactaaatcatctcctttcaaattatcaccgacaccatcatggattcaagcaccgcacacagtccggtgtttctggatatccattctggggctctgttttgttcattaattctggagccttcctaattgcagtgaaaagaaaaaccacagaaactctgtactgtgcttgatgaccctgcagctccagactagactaaaaagagaggggacacaagggaacttgacagacagaagaaaaaggtgggcctggactacaccactcaccctcccagtgtgcttgagaaacaaactgcacccactgaactccgcagctagcatccaaatcagcccttgagatttgaggccttggagactcagagagaccacaagaggagcaagcaagagagctgggactaactctgtctgctacatattgccagaaattgggagactgaagatcctgaacaagagagaacaaaatctctactttgatggaacttccattctgtggggaagagactgacaataagcaattaaataaataagaactcagcagtaggccttgcctcagatccaaggtcactcggaagaggccatgtctaccctcaatgacactcatggaggaaatgctgagagaagcattcagatgcatgacacaagagccaatgaaaggccctattgctatgcaatctggtccaaaaccactcttcaggaggatgtcttcactggtgggccccacgcaaagcttcttcatgagggaatctaagactttggggg

SEQ ID NO: 3556 - protein, 56 aa, Homosapiens
MSTLNDTHGGNAERSIQMHDTRANERPYCYAIWSKTTLQEDVFTGGPHAKLLHEGI

SEQ ID NO: 3557 - DNA, 474 bp, Homosapiens
tcatctcctttcaaattatcaccgacaccatcatggattcaagcaccgcacacagtccggtgtttctggtatttcctccagaaatcactgcttcagaatatgagtccacagaactttcagccacgaccttttcaactcaaagccccttgcaaaaattatttgctagaaaaatgaaaatcttaggggatatccattctggggctctgttttgttcattaattctggagccttcctaattgcagtgaaaagaaaaaccacagaaactctgatcaaaactacatttgtggttattctcaccaaaatagtcagtgtaaggctgttactgtcctgttcttgggaattttgattacattgatgactttcagcattattgaattattcatttctctgcctttctcaattttggggtgccactcagaggattgtgattgtgaacaatgttgttgactagcactgtgagaataaagatgtgtt

SEQ ID NO: 3558 - protein, 67 aa, Homosapiens
MDSSTAHSPVFLVFPPEITASEYESTELSATTFSTQSPLQKLFARKMKILGDIHSGALFCSLILEPS

SEQ ID NO: 3559 - DNA, 397 bp, Homosapiens
actttcagccacgaccttttcaactcaaagccccttgcaaaaattatttgctagaaaaatgaaaatcttagggactatccagatcctgtttggaattatgaccttttcttttggagttatcttccttttcaccttgttaaaaccatatccaaggtttccctttatatttctttcaggatatccattctggggctctgttttgttcattaattctggagccttcctaattgcagtgaaaagaaaaaccacagaaactctgggaattttgattacattgatgactttcagcattattgaattattcatttctctgcctttctcaattttggggtgccactcagaggattgtgattgtgaacaatgttgttgactagcactgtgagaataaagatgtgtt

SEQ ID NO: 3560 - protein, 103 aa, Homosapiens
MKILGTIQILFGIMTFSFGVIFLFTLLKPYPRFPFIFLSGYPFWGSVLFINSGAFLIAVKRKTTETLGILITLMTFSIIELFISLPFSILGCHSEDCDCEQCC

SEQ ID NO: 3561 - DNA, 273 bp, Homosapiens
aactcaaagccccttgcaaaaattatttgctagaaaaatgaaaatcttaggggatatccattctggggctctgttttgttcattaattctggagccttcctaattgcagtgaaaagaaaaaccacagaaactctgggaattttgattacattgatgactttcagcattattgaattattcatttctctgcctttctcaattttggggtgccactcagaggattgtgattgtgaacaatgttgttgactagcactgtgagaataaagatgtgtt

SEQ ID NO: 3562 - protein, 30 aa, Homosapiens
MTFSIIELFISLPFSILGCHSEDCDCEQCC

SEQ ID NO: 3563 - DNA, 353 bp, Homosapiens
gtgttaaaccaaagtaattggagcgaagcccaaggtagcagaagctactgatttcctgtcacctgatgtctatcagcgatttcatcttcaggcctggactacaccactcaccctcccagtgtgcttgagaaacaaactgcacccactgaactccgcagctagcatccaaatcagcccttgagatttgaggccttggagactcagatcctgaacaagagagaacaaaatctctactttgatggaacttccattctgtggggaagagactgacaataagcaattaaataaataagaactcagcagtaggccttgcctcagatccaaggtcactcggaagaggccatgtctaccct

SEQ ID NO: 3564 - protein, 35 aa, Homosapiens
HPNQPLRFEALETQILNKREQNLYFDGTSILWGRD

SEQ ID NO: 3565 - DNA, 611 bp, Homosapiens
gtgttaaaccaaagtaattggagcgaagcccaaggtagcagaagctactgatttcctgtcacctgatgtctatcagcgatttcatcttcaggcctggactacaccactcaccctcccagtgtgcttgagaaacaaactgcacccactgaactccgcagctagcatccaaatcagcccttgagatttgaggccttggagactcaggagttttgagagcaaaatgacaacacccagaaattcagtaaatgggactttcccggcagagccaatgaaaggccctattgctatgcaatctggtccaaaaccactcttcaggaggatgtcttcactggtgggccccacgcaaagcttcttcatgagggaatctaagactttgggggctgtccagattatgaatgggctcttccacattgccctggggggtcttctgatgatcccagcagggatctatgcacccatctgtgtgactgtgtggtaccctctctggggaggcattatgtatattatttccggatcactcctggcagcaacggagaaaaactccaggaagtgtttggcaagtaaccatatgtccttctttcccacatgtcagagaagtacctatttttttc

SEQ ID NO: 3566 - protein, 129 aa, Homosapiens
MTTPRNSVNGTFPAEPMKGPIAMQSGPKPLFRRMSSLVGPTQSFFMRESKTLGAVQIMNGLFHIALGGLLMIPAGIYAPICVTVWYPLWGGIMYIISGSLLAATEKNSRKCLASNHMSFFPTCQRSTYF

SEQ ID NO: 3567 - DNA, 2982 bp, Homosapiens
gtgttaaaccaaagtaattggagcgaagcccaaggtagcagaagctactgatttcctgtcacctgatgtctatcagcgatttcatcttcaggcctggactacaccactcaccctcccagtgtgcttgagaaacaaactgcacccactgaactccgcagctagcatccaaatcagcccttgagatttgaggccttggagactcagatcctgaacaagagagaacaaaatctctactttgatggaacttccattctgtggggaagagactgacaataagcaattaaataaataagaactcagcagtaggccttgcctcagatccaaggtcactcggaagaggccatgtctaccctcaatgacactcatggaggaaatgctgagagaagcattcagatgcatgacacaaggtaagactgccaaaaatcttgttcttgctctcctcattttgttatttgttttatttttaggagttttgagagcaaaatgacaacacccagaaattcagtaaatgggactttcccggcagagccaatgaaaggccctattgctatgcaatctggtccaaaaccactcttcaggaggatgtcttcactggtgggccccacgcaaagcttcttcatgagggaatctaagactttgggggctgtccagattatgaatgggctcttccacattgccctggggggtcttctgatgatcccagcagggatctatgcacccatctgtgtgactgtgtggtaccctctctggggaggcattatgtatattatttccggatcactcctggcagcaacggagaaaaactccaggaagtgtttggcaagtcaaaggaaaaatgataatgaattcattgagcctctttgctgccatttctggaatgattctttcaatcatggacatacttaatattaaaatttcccattttttaaaaatggagagtctgaattttattagagctcacacaccatatattaacatatacaactgtgaaccagctaatccctctgagaaaaactccccatctacccaatactgttacagcatacaatctctgttcttgggcattttgtcagtgatgctgatctttgccttcttccaggaacttgtaatagctggcatcgttgagaatgaatggaaaagaacgtgctccagacccaaatctaacatagttctcctgtcagcagaagaaaaaaaagaacagactattgaaataaaagaagaagtggttgggctaactgaaacatcttcccaaccaaagaatgaagaagacattgaaattattccaatccaagaagaggaagaagaagaaacagagacgaactttccagaacctccccaagatcaggaatcctcaccaatagaaaatgacagctctccttaagtgatttcttctgttttctgtttccttttttaaacattagtgttcatagcttccaagagacatgctgactttcatttcttgaggtactctgcacatacgcaccacatctctatctggcctttgcatggagtgaccatagctccttctctcttacattgaatgtagagaatgtagccattgtagcagcttgtgttgtcacgcttcttcttttgagcaactttcttacactgaagaaaggcagaatgagtgcttcagaatgtgatttcctactaacctgttccttggataggctttttagtatagtatttttttttgtcattttctccatcaacaaccagggagactgcacctgatggaaaagatatatgactgcttcatgacattcctaaactatcttttttttattccacatctacgtttttggtggagtcccttttgcatcattgttttaaggatgataaaaaaaaataacaactagggacaatacagaacccattccatttatctttctacagggctgacattgtggcacattcttagagttaccacaccccatgagggaagctctaaatagccaacacccatctgttttttgtaaaaacagcatagcttatacatggacatgtctctgccttaacttttcctaactcccactctaggctattgtttgcatgtctacctacttttagccattatgcgagaaaagaaaaaaatgaccatagaaaatgccaccatgaggtgcccaaatttcaaataataattaacatttagttatatttataatttccagatgacaaagtatttcatcaaataacttcatttgatgttccatgatcaagaaagaatccctatctctattttacaagtaattcaaagaggccaaataacttgtaaacaagaaaaggtaacttgtcaacagtcataactagtaattatgagagccttgtttcataaccaggtcttcttactcaaatcctgtgatgtttgaaataaccaaattgtctctccaatgtctgcataaactgtgagagccaagtcaacagcttttatcaagaatttactctctgaccagcaataaacaagcactgagagacacagagagccagattcagattttacccatggggataaaaagactcagactttcaccacatttggaaaactacttgcatcataaatatataataactggtagtttatatgaagcagacactaagtgctatagacactctcagaatatcatacttggaaacaatgtaattaaaatgccgaatctgagtcaacagctgccctacttttcaattcagatatactagtaccttacctagaaataatgttaacctagggtgaagtcactataatctgtagtctattatttgggcatttgctacatgatgagtgctgccagattgtggcaggtaaagagacaatgtaatttgcactccctatgatatttctacatttttagcgaccactagtggaagacattccccaaaattagaaaaaaaggagatagaagatttctgtctatgtaaagttctcaaaatttgttctaaattaataaaactatctttgtgttcttttctgcaacagatgattcc

SEQ ID NO: 3568 - protein, 181 aa, Homosapiens
MIMNSLSLFAAISGMILSIMDILNIKISHFLKMESLNFIRAHTPYINIYNCEPANPSEKNSPSTQYCYSIQSLFLGILSVMLIFAFFQELVIAGIVENEWKRTCSRPKSNIVLLSAEEKKEQTIEIKEEVVGLTETSSQPKNEEDIEIIPIQEEEEEETETNFPEPPQDQESSPIENDSSP

SEQ ID NO: 3569 - DNA, 2719 bp, Homosapiens
gtgttaaaccaaagtaattggagcgaagcccaaggtagcagaagctactgatttcctgtcacctgatgtctatcagcgatttcatcttcaggcctggactacaccactcaccctcccagtgtgcttgagaaacaaactgcacccactgaactccgcagctagcatccaaatcagcccttgagatttgaggccttggagactcaggagttttgagagcaaaatgacaacacccagaaattcagtaaatgggactttcccggcagagccaatgaaaggccctattgctatgcaatctggtccaaaaccactcttcaggaggatgtcttcactggtgggccccacgcaaagcttcttcatgagggaatctaagactttgggggctgtccagattatgaatgggctcttccacattgccctggggggtcttctgatgatcccagcagggatctatgcacccatctgtgtgactgtgtggtaccctctctggggaggcattatgtatattatttccggatcactcctggcagcaacggagaaaaactccaggaagtgtttggcaagtcaaaggaaaaatgataatgaattcattgagcctctttgctgccatttctggaatgattctttcaatcatggacatacttaatattaaaatttcccattttttaaaaatggagagtctgaattttattagagctcacacaccatatattaacatatacaactgtgaaccagctaatccctctgagaaaaactccccatctacccaatactgttacagcatacaatctctgttcttgggcattttgtcagtgatgctgatctttgccttcttccaggaacttgtaatagctggcatcgttgagaatgaatggaaaagaacgtgctccagacccaaatctaacatagttctcctgtcagcagaagaaaaaaaagaacagactattgaaataaaagaagaagtggttgggctaactgaaacatcttcccaaccaaagaatgaagaagacattgaaattattccaatccaagaagaggaagaagaagaaacagagacgaactttccagaacctccccaagatcaggaatcctcaccaatagaaaatgacagctctccttaagtgatttcttctgttttctgtttccttttttaaacattagtgttcatagcttccaagagacatgctgactttcatttcttgaggtactctgcacatacgcaccacatctctatctggcctttgcatggagtgaccatagctccttctctcttacattgaatgtagagaatgtagccattgtagcagcttgtgttgtcacgcttcttcttttgagcaactttcttacactgaagaaaggcagaatgagtgcttcagaatgtgatttcctactaacctgttccttggataggctttttagtatagtatttttttttgtcattttctccatcaacaaccagggagactgcacctgatggaaaagatatatgactgcttcatgacattcctaaactatcttttttttattccacatctacgtttttggtggagtcccttttgcatcattgttttaaggatgataaaaaaaaataacaactagggacaatacagaacccattccatttatctttctacagggctgacattgtggcacattcttagagttaccacaccccatgagggaagctctaaatagccaacacccatctgttttttgtaaaaacagcatagcttatacatggacatgtctctgccttaacttttcctaactcccactctaggctattgtttgcatgtctacctacttttagccattatgcgagaaaagaaaaaaatgaccatagaaaatgccaccatgaggtgcccaaatttcaaataataattaacatttagttatatttataatttccagatgacaaagtatttcatcaaataacttcatttgatgttccatgatcaagaaagaatccctatctctattttacaagtaattcaaagaggccaaataacttgtaaacaagaaaaggtaacttgtcaacagtcataactagtaattatgagagccttgtttcataaccaggtcttcttactcaaatcctgtgatgtttgaaataaccaaattgtctctccaatgtctgcataaactgtgagagccaagtcaacagcttttatcaagaatttactctctgaccagcaataaacaagcactgagagacacagagagccagattcagattttacccatggggataaaaagactcagactttcaccacatttggaaaactacttgcatcataaatatataataactggtagtttatatgaagcagacactaagtgctatagacactctcagaatatcatacttggaaacaatgtaattaaaatgccgaatctgagtcaacagctgccctacttttcaattcagatatactagtaccttacctagaaataatgttaacctagggtgaagtcactataatctgtagtctattatttgggcatttgctacatgatgagtgctgccagattgtggcaggtaaagagacaatgtaatttgcactccctatgatatttctacatttttagcgaccactagtggaagacattccccaaaattagaaaaaaaggagatagaagatttctgtctatgtaaagttctcaaaatttgttctaaattaataaaactatctttgtgttcttttctgcaacagatgattcc

SEQ ID NO: 3570 - protein, 181 aa, Homosapiens; identical to SEQ ID NO: 3568

SEQ ID NO: 3571 - DNA, 2893 bp, Homosapiens
gtgttaaaccaaagtaattggagcgaagcccaaggtagcagaagctactgatttcctgtcacctgatgtctatcagcgatttcatcttcaggcctggactacaccactcaccctcccagtgtgcttgagaaacaaactgcacccactgaactccgcagctagcatccaaatcagcccttgagatttgaggccttggagactcagaactcagcagtaggccttgcctcagatccaaggtcactcggaagaggccatgtctaccctcaatgacactcatggaggaaatgctgagagaagcattcagatgcatgacacaaggtaagactgccaaaaatcttgttcttgctctcctcattttgttatttgttttatttttaggagttttgagagcaaaatgacaacacccagaaattcagtaaatgggactttcccggcagagccaatgaaaggccctattgctatgcaatctggtccaaaaccactcttcaggaggatgtcttcactggtgggccccacgcaaagcttcttcatgagggaatctaagactttgggggctgtccagattatgaatgggctcttccacattgccctggggggtcttctgatgatcccagcagggatctatgcacccatctgtgtgactgtgtggtaccctctctggggaggcattatgtatattatttccggatcactcctggcagcaacggagaaaaactccaggaagtgtttggcaagtcaaaggaaaaatgataatgaattcattgagcctctttgctgccatttctggaatgattctttcaatcatggacatacttaatattaaaatttcccattttttaaaaatggagagtctgaattttattagagctcacacaccatatattaacatatacaactgtgaaccagctaatccctctgagaaaaactccccatctacccaatactgttacagcatacaatctctgttcttgggcattttgtcagtgatgctgatctttgccttcttccaggaacttgtaatagctggcatcgttgagaatgaatggaaaagaacgtgctccagacccaaatctaacatagttctcctgtcagcagaagaaaaaaaagaacagactattgaaataaaagaagaagtggttgggctaactgaaacatcttcccaaccaaagaatgaagaagacattgaaattattccaatccaagaagaggaagaagaagaaacagagacgaactttccagaacctccccaagatcaggaatcctcaccaatagaaaatgacagctctccttaagtgatttcttctgttttctgtttccttttttaaacattagtgttcatagcttccaagagacatgctgactttcatttcttgaggtactctgcacatacgcaccacatctctatctggcctttgcatggagtgaccatagctccttctctcttacattgaatgtagagaatgtagccattgtagcagcttgtgttgtcacgcttcttcttttgagcaactttcttacactgaagaaaggcagaatgagtgcttcagaatgtgatttcctactaacctgttccttggataggctttttagtatagtatttttttttgtcattttctccatcaacaaccagggagactgcacctgatggaaaagatatatgactgcttcatgacattcctaaactatcttttttttattccacatctacgtttttggtggagtcccttttgcatcattgttttaaggatgataaaaaaaaataacaactagggacaatacagaacccattccatttatctttctacagggctgacattgtggcacattcttagagttaccacaccccatgagggaagctctaaatagccaacacccatctgttttttgtaaaaacagcatagcttatacatggacatgtctctgccttaacttttcctaactcccactctaggctattgtttgcatgtctacctacttttagccattatgcgagaaaagaaaaaaatgaccatagaaaatgccaccatgaggtgcccaaatttcaaataataattaacatttagttatatttataatttccagatgacaaagtatttcatcaaataacttcatttgatgttccatgatcaagaaagaatccctatctctattttacaagtaattcaaagaggccaaataacttgtaaacaagaaaaggtaacttgtcaacagtcataactagtaattatgagagccttgtttcataaccaggtcttcttactcaaatcctgtgatgtttgaaataaccaaattgtctctccaatgtctgcataaactgtgagagccaagtcaacagcttttatcaagaatttactctctgaccagcaataaacaagcactgagagacacagagagccagattcagattttacccatggggataaaaagactcagactttcaccacatttggaaaactacttgcatcataaatatataataactggtagtttatatgaagcagacactaagtgctatagacactctcagaatatcatacttggaaacaatgtaattaaaatgccgaatctgagtcaacagctgccctacttttcaattcagatatactagtaccttacctagaaataatgttaacctagggtgaagtcactataatctgtagtctattatttgggcatttgctacatgatgagtgctgccagattgtggcaggtaaagagacaatgtaatttgcactccctatgatatttctacatttttagcgaccactagtggaagacattccccaaaattagaaaaaaaggagatagaagatttctgtctatgtaaagttctcaaaatttgttctaaattaataaaactatctttgtgttcttttctgcaacagatgattcc

SEQ ID NO: 3572 - protein, 181 aa, Homosapiens; identical to SEQ ID NO: 3568

SEQ ID NO: 3573 - DNA, 3583 bp, Homosapiens
gtgttaaaccaaagtaattggagcgaagcccaaggtagcagaagctactgatttcctgtcacctgatgtctatcagcgatttcatcttcaggcctggactacaccactcaccctcccagtgtgcttgagaaacaaactgcacccactgaactccgcagctagcatccaaatcagcccttgagatttgaggccttggagactcagaactcagcagtaggccttgcctcagatccaaggtcactcggaagaggccatgtctaccctcaatgacactcatggaggaaatgctgagagaagcattcagatgcatgacacaaggtaagactgccaaaaatcttgttcttgctctcctcattttgttatttgttttatttttaggagttttgagagcaaaatgacaacacccagaaattcagtaaatgggactttcccggcagagccaatgaaaggccctattgctatgcaatctggtccaaaaccactcttcaggaggatgtcttcactggtgggccccacgcaaagcttcttcatgagggaatctaagactttgggggctgtccagattatgaatgggctcttccacattgccctggggggtcttctgatgatcccagcagggatctatgcacccatctgtgtgactgtgtggtaccctctctggggaggcattatgtatattatttccggatcactcctggcagcaacggagaaaaactccaggaagtgtttggcaagtcaaaggaaaaatgataatgaattcattgagcctctttgctgccatttctggaatgattctttcaatcatggacatacttaatattaaaatttcccattttttaaaaatggagagtctgaattttattagagctcacacaccatatattaacatatacaactgtgaaccagctaatccctctgagaaaaactccccatctacccaatactgttacagcatacaatctctgttcttgggcattttgtcagtgatgctgatctttgccttcttccaggaacttgtaatagctggcatcgttgagaatgaatggaaaagaacgtgctccagacccaaatctaacatagttctcctgtcagcagaagaaaaaaaagaacagactattgaaataaaagaagaagtggttgggctaactgaaacatcttcccaaccaaagaatgaagaagacattgaaattattccaatccaagaagaggaagaagaagaaacagagacgaactttccagaacctccccaagatcaggaatcctcaccaatagaaaatgacagctctccttaagtgatttcttctgttttctgtttccttttttaaacattagtgttcatagcttccaagagacatgctgactttcatttcttgaggtactctgcacatacgcaccacatctctatctggcctttgcatggagtgaccatagctccttctctcttacattgaatgtagagaatgtagccattgtagcagcttgtgttgtcacgcttcttcttttgagcaactttcttacactgaagaaaggcagaatgagtgcttcagaatgtgatttcctactaacctgttccttggataggctttttagtatagtatttttttttgtcattttctccatcaacaaccagggagactgcacctgatggaaaagatatatgactgcttcatgacattcctaaactatcttttttttattccacatctacgtttttggtggagtcccttttgcatcattgttttaaggatgataaaaaaaaataacaactagggacaatacagaacccattccatttatctttctacagggctgacattgtggcacattcttagagttaccacaccccatgagggaagctctaaatagccaacacccatctgttttttgtaaaaacagcatagcttatacatggacatgtctctgccttaacttttcctaactcccactctaggctattgtttgcatgtctacctacttttagccattatgcgagaaaagaaaaaaatgaccatagaaaatgccaccatgaggtgcccaaatttcaaataataattaacatttagttatatttataatttccagatgacaaagtatttcatcaaataacttcatttgatgttccatgatcaagaaagaatccctatctctattttacaagtaattcaaagaggccaaataacttgtaaacaagaaaaggtaacttgtcaacagtcataactagtaattatgagagccttgtttcataaccaggtcttcttactcaaatcctgtgatgtttgaaataaccaaattgtctctccaatgtctgcataaactgtgagagccaagtcaacagcttttatcaagaatttactctctgaccagcaataaacaagcactgagagacacagagagccagattcagattttacccatggggataaaaagactcagactttcaccacatttggaaaactacttgcatcataaatatataataactggtagtttatatgaagcagacactaagtgctatagacactctcagaatatcatacttggaaacaatgtaattaaaatgccgaatctgagtcaacagctgccctacttttcaattcagatatactagtaccttacctagaaataatgttaacctagggtgaagtcactataatctgtagtctattatttgggcatttgctacatgatgagtgctgccagattgtggcaggtaaagagacaatgtaatttgcactccctatgatatttctacatttttagcgaccactagtggaagacattccccaaaattagaaaaaaaggagatagaagatttctgtctatgtaaagttctcaaaatttgttctaaattaataaaactatctttgtgttcttttctgcaacagatgattccaacatgggtgtttgtctattcttctttactcttgaaacattagaccatgggaggctcttacagccttgagttgatatttatacaacccaaatctaggtttgaacggtgaggtgtcaggtcatcaaatattcatgtctatatagtcttacacaggttctcaaaaaaaatgttcatgggataggtcattgataatggattccttattctgagaactccagacgactgaaatatatgagagaaggaaaaggacatagtaggagcaggcctgagaaaaaaatgaaagtcagaaatctttaaaaaaatacaagatcttatttctatcttattttttctcctcttctgaaatatatatgaggattcctctccaaacccatggtttctctaagaattttgagtcatttgtatgacctcaaataattagttttagctgacctcacataactccttataataggagacatctttaatgtctgctattaaagaaggatgaaaattcctatgaccttctccccgattatccctttggcaatatagagtcaaataataacattgaccaatagtaaacatgctttgccaagaagtagaagatatattctctagccttagtttttcctcccaatttgcatttttgtaaaaataatgttgtatccacaaaggaaataaactttaaaaacccaagtgcactcattg

SEQ ID NO: 3574 - protein, 181 aa, Homosapiens; identical to SEQ ID NO: 3568

SEQ ID NO: 3575 - DNA, 3672 bp, Homosapiens
gtgttaaaccaaagtaattggagcgaagcccaaggtagcagaagctactgatttcctgtcacctgatgtctatcagcgatttcatcttcaggcctggactacaccactcaccctcccagtgtgcttgagaaacaaactgcacccactgaactccgcagctagcatccaaatcagcccttgagatttgaggccttggagactcagatcctgaacaagagagaacaaaatctctactttgatggaacttccattctgtggggaagagactgacaataagcaattaaataaataagaactcagcagtaggccttgcctcagatccaaggtcactcggaagaggccatgtctaccctcaatgacactcatggaggaaatgctgagagaagcattcagatgcatgacacaaggtaagactgccaaaaatcttgttcttgctctcctcattttgttatttgttttatttttaggagttttgagagcaaaatgacaacacccagaaattcagtaaatgggactttcccggcagagccaatgaaaggccctattgctatgcaatctggtccaaaaccactcttcaggaggatgtcttcactggtgggccccacgcaaagcttcttcatgagggaatctaagactttgggggctgtccagattatgaatgggctcttccacattgccctggggggtcttctgatgatcccagcagggatctatgcacccatctgtgtgactgtgtggtaccctctctggggaggcattatgtatattatttccggatcactcctggcagcaacggagaaaaactccaggaagtgtttggcaagtcaaaggaaaaatgataatgaattcattgagcctctttgctgccatttctggaatgattctttcaatcatggacatacttaatattaaaatttcccattttttaaaaatggagagtctgaattttattagagctcacacaccatatattaacatatacaactgtgaaccagctaatccctctgagaaaaactccccatctacccaatactgttacagcatacaatctctgttcttgggcattttgtcagtgatgctgatctttgccttcttccaggaacttgtaatagctggcatcgttgagaatgaatggaaaagaacgtgctccagacccaaatctaacatagttctcctgtcagcagaagaaaaaaaagaacagactattgaaataaaagaagaagtggttgggctaactgaaacatcttcccaaccaaagaatgaagaagacattgaaattattccaatccaagaagaggaagaagaagaaacagagacgaactttccagaacctccccaagatcaggaatcctcaccaatagaaaatgacagctctccttaagtgatttcttctgttttctgtttccttttttaaacattagtgttcatagcttccaagagacatgctgactttcatttcttgaggtactctgcacatacgcaccacatctctatctggcctttgcatggagtgaccatagctccttctctcttacattgaatgtagagaatgtagccattgtagcagcttgtgttgtcacgcttcttcttttgagcaactttcttacactgaagaaaggcagaatgagtgcttcagaatgtgatttcctactaacctgttccttggataggctttttagtatagtatttttttttgtcattttctccatcaacaaccagggagactgcacctgatggaaaagatatatgactgcttcatgacattcctaaactatcttttttttattccacatctacgtttttggtggagtcccttttgcatcattgttttaaggatgataaaaaaaaataacaactagggacaatacagaacccattccatttatctttctacagggctgacattgtggcacattcttagagttaccacaccccatgagggaagctctaaatagccaacacccatctgttttttgtaaaaacagcatagcttatacatggacatgtctctgccttaacttttcctaactcccactctaggctattgtttgcatgtctacctacttttagccattatgcgagaaaagaaaaaaatgaccatagaaaatgccaccatgaggtgcccaaatttcaaataataattaacatttagttatatttataatttccagatgacaaagtatttcatcaaataacttcatttgatgttccatgatcaagaaagaatccctatctctattttacaagtaattcaaagaggccaaataacttgtaaacaagaaaaggtaacttgtcaacagtcataactagtaattatgagagccttgtttcataaccaggtcttcttactcaaatcctgtgatgtttgaaataaccaaattgtctctccaatgtctgcataaactgtgagagccaagtcaacagcttttatcaagaatttactctctgaccagcaataaacaagcactgagagacacagagagccagattcagattttacccatggggataaaaagactcagactttcaccacatttggaaaactacttgcatcataaatatataataactggtagtttatatgaagcagacactaagtgctatagacactctcagaatatcatacttggaaacaatgtaattaaaatgccgaatctgagtcaacagctgccctacttttcaattcagatatactagtaccttacctagaaataatgttaacctagggtgaagtcactataatctgtagtctattatttgggcatttgctacatgatgagtgctgccagattgtggcaggtaaagagacaatgtaatttgcactccctatgatatttctacatttttagcgaccactagtggaagacattccccaaaattagaaaaaaaggagatagaagatttctgtctatgtaaagttctcaaaatttgttctaaattaataaaactatctttgtgttcttttctgcaacagatgattccaacatgggtgtttgtctattcttctttactcttgaaacattagaccatgggaggctcttacagccttgagttgatatttatacaacccaaatctaggtttgaacggtgaggtgtcaggtcatcaaatattcatgtctatatagtcttacacaggttctcaaaaaaaatgttcatgggataggtcattgataatggattccttattctgagaactccagacgactgaaatatatgagagaaggaaaaggacatagtaggagcaggcctgagaaaaaaatgaaagtcagaaatctttaaaaaaatacaagatcttatttctatcttattttttctcctcttctgaaatatatatgaggattcctctccaaacccatggtttctctaagaattttgagtcatttgtatgacctcaaataattagttttagctgacctcacataactccttataataggagacatctttaatgtctgctattaaagaaggatgaaaattcctatgaccttctccccgattatccctttggcaatatagagtcaaataataacattgaccaatagtaaacatgctttgccaagaagtagaagatatattctctagccttagtttttcctcccaatttgcatttttgtaaaaataatgttgtatccacaaaggaaataaactttaaaaacccaagtgcactcattg

SEQ ID NO: 3576 - protein, 181 aa, Homosapiens; identical to SEQ ID NO: 3568

SEQ ID NO: 3577 - DNA, 3409 bp, Homosapiens
gtgttaaaccaaagtaattggagcgaagcccaaggtagcagaagctactgatttcctgtcacctgatgtctatcagcgatttcatcttcaggcctggactacaccactcaccctcccagtgtgcttgagaaacaaactgcacccactgaactccgcagctagcatccaaatcagcccttgagatttgaggccttggagactcaggagttttgagagcaaaatgacaacacccagaaattcagtaaatgggactttcccggcagagccaatgaaaggccctattgctatgcaatctggtccaaaaccactcttcaggaggatgtcttcactggtgggccccacgcaaagcttcttcatgagggaatctaagactttgggggctgtccagattatgaatgggctcttccacattgccctggggggtcttctgatgatcccagcagggatctatgcacccatctgtgtgactgtgtggtaccctctctggggaggcattatgtatattatttccggatcactcctggcagcaacggagaaaaactccaggaagtgtttggcaagtcaaaggaaaaatgataatgaattcattgagcctctttgctgccatttctggaatgattctttcaatcatggacatacttaatattaaaatttcccattttttaaaaatggagagtctgaattttattagagctcacacaccatatattaacatatacaactgtgaaccagctaatccctctgagaaaaactccccatctacccaatactgttacagcatacaatctctgttcttgggcattttgtcagtgatgctgatctttgccttcttccaggaacttgtaatagctggcatcgttgagaatgaatggaaaagaacgtgctccagacccaaatctaacatagttctcctgtcagcagaagaaaaaaaagaacagactattgaaataaaagaagaagtggttgggctaactgaaacatcttcccaaccaaagaatgaagaagacattgaaattattccaatccaagaagaggaagaagaagaaacagagacgaactttccagaacctccccaagatcaggaatcctcaccaatagaaaatgacagctctccttaagtgatttcttctgttttctgtttccttttttaaacattagtgttcatagcttccaagagacatgctgactttcatttcttgaggtactctgcacatacgcaccacatctctatctggcctttgcatggagtgaccatagctccttctctcttacattgaatgtagagaatgtagccattgtagcagcttgtgttgtcacgcttcttcttttgagcaactttcttacactgaagaaaggcagaatgagtgcttcagaatgtgatttcctactaacctgttccttggataggctttttagtatagtatttttttttgtcattttctccatcaacaaccagggagactgcacctgatggaaaagatatatgactgcttcatgacattcctaaactatcttttttttattccacatctacgtttttggtggagtcccttttgcatcattgttttaaggatgataaaaaaaaataacaactagggacaatacagaacccattccatttatctttctacagggctgacattgtggcacattcttagagttaccacaccccatgagggaagctctaaatagccaacacccatctgttttttgtaaaaacagcatagcttatacatggacatgtctctgccttaacttttcctaactcccactctaggctattgtttgcatgtctacctacttttagccattatgcgagaaaagaaaaaaatgaccatagaaaatgccaccatgaggtgcccaaatttcaaataataattaacatttagttatatttataatttccagatgacaaagtatttcatcaaataacttcatttgatgttccatgatcaagaaagaatccctatctctattttacaagtaattcaaagaggccaaataacttgtaaacaagaaaaggtaacttgtcaacagtcataactagtaattatgagagccttgtttcataaccaggtcttcttactcaaatcctgtgatgtttgaaataaccaaattgtctctccaatgtctgcataaactgtgagagccaagtcaacagcttttatcaagaatttactctctgaccagcaataaacaagcactgagagacacagagagccagattcagattttacccatggggataaaaagactcagactttcaccacatttggaaaactacttgcatcataaatatataataactggtagtttatatgaagcagacactaagtgctatagacactctcagaatatcatacttggaaacaatgtaattaaaatgccgaatctgagtcaacagctgccctacttttcaattcagatatactagtaccttacctagaaataatgttaacctagggtgaagtcactataatctgtagtctattatttgggcatttgctacatgatgagtgctgccagattgtggcaggtaaagagacaatgtaatttgcactccctatgatatttctacatttttagcgaccactagtggaagacattccccaaaattagaaaaaaaggagatagaagatttctgtctatgtaaagttctcaaaatttgttctaaattaataaaactatctttgtgttcttttctgcaacagatgattccaacatgggtgtttgtctattcttctttactcttgaaacattagaccatgggaggctcttacagccttgagttgatatttatacaacccaaatctaggtttgaacggtgaggtgtcaggtcatcaaatattcatgtctatatagtcttacacaggttctcaaaaaaaatgttcatgggataggtcattgataatggattccttattctgagaactccagacgactgaaatatatgagagaaggaaaaggacatagtaggagcaggcctgagaaaaaaatgaaagtcagaaatctttaaaaaaatacaagatcttatttctatcttattttttctcctcttctgaaatatatatgaggattcctctccaaacccatggtttctctaagaattttgagtcatttgtatgacctcaaataattagttttagctgacctcacataactccttataataggagacatctttaatgtctgctattaaagaaggatgaaaattcctatgaccttctccccgattatccctttggcaatatagagtcaaataataacattgaccaatagtaaacatgctttgccaagaagtagaagatatattctctagccttagtttttcctcccaatttgcatttttgtaaaaataatgttgtatccacaaaggaaataaactttaaaaacccaagtgcactcattg

SEQ ID NO: 3578 - protein, 181 aa, Homosapiens; identical to SEQ ID NO: 3568

SEQ ID NO: 3579 - DNA, 1167 bp, Homosapiens
acacaggttggagcagagaaagaggaaacatagaggtgccaaaggaacaaagacataatgatgtcatccaagccaacaagccatgctgaagtaaatgaaaccatacccaacccttacccaccaagcagctttatggctcctggatttcaacagcctctgggttcaatcaacttagaaaaccaagctcagggtgctcagcgtgctcagccctacggcatcacatctccgggaatctttgctagcagtcaaccgggtcaaggaaatatacaaatgataaatccaagtgtgggaacagcagtaatgaactttaaagaagaagcaaaggcactaggggtgatccagatcatggttggattgatgcacattggttttggaattgttttgtgtttaatatccttctcttttagagaagtattaggttttgcctctactgctgttattggtggatacccattctggggtggcctttcttttattatctctggctctctctctgtgtcagcatccaaggagctttcccgttgtctggtgaaaggcagcctgggaatgaacattgttagttctatcttggccttcattggagtgattctgctgctggtggatatgtgcatcaatggggtagctggccaagactactgggccgtgctttctggaaaaggcatttcagccacgctgatgatcttctccctcttggagttcttcgtagcttgtgccacagcccattttgccaaccaagcaaacaccacaaccaatatgtctgtcctggttattccaaatatgtatgaaagcaaccctgtgacaccagcgtcttcttcagctcctcccagatgcaacaactactcagctaatgcccctaaatagtaaaagaaaaaggggtatcagtctaatctcatggagaaaaactacttgcaaaaacttcttaagaagatgtcttttattgtctacaatgatttctagtctttaaaaactgtgtttgagatttgtttttaggttggtcgctaatgatggctgtatctcccttcactgtctcttcctacattaccactactacatgctggcaaaggtgaaggatcagaggactgaaaaatgattctgcaactctcttaaagttagaaatgtttctgttcatattactttttccttaataaaatgtcattagaaacaaaa

SEQ ID NO: 3580 - protein, 267 aa, Homosapiens
MMSSKPTSHAEVNETIPNPYPPSSFMAPGFQQPLGSINLENQAQGAQRAQPYGITSPGIFASSQPGQGNIQMINPSVGTAVMNFKEEAKALGVIQIMVGLMHIGFGIVLCLISFSFREVLGFASTAVIGGYPFWGGLSFIISGSLSVSASKELSRCLVKGSLGMNIVSSILAFIGVILLLVDMCINGVAGQDYWAVLSGKGISATLMIFSLLEFFVACATAHFANQANTTTNMSVLVIPNMYESNPVTPASSSAPPRCNNYSANAPK

SEQ ID NO: 3581 - DNA, 420 bp, Homosapiens
gagccggccgggtgctgggctcctggctatccctgtgatggtagctcagcgagatctggggacctggcgctgagcgcgttgccagccgggatcttcctcttcatctaggcctgggcgctggcgtgagaactcggactgggtcctggacgagcgccccccgaaactccttggaaccttgaacaagtaaaatgcaggaagtttgctaataaagacatcaccaaaggttaaagagaaaatcatctagaggaaatgctggcagtatggcatgtgttctttaacaaatctctacagcagattctctcgttttagggactatccagattatgattggcatctttcacattttcatgtggtactttctattggttttgtatatgggacaaattaaaggagcctttggaacgtatgaacctgtaactt

SEQ ID NO: 3582 - protein, 40 aa, Homosapiens
MCSLTNLYSRFSRFRDYPDYDWHLSHFHVVLSIGFVYGTN

SEQ ID NO: 3583 - DNA, 335 bp, Homosapiens
tcttcctaataagagtaacaaagtatccgactcgatctggaaaacttgggagggaagtatcacgtattttactgttcttctacggtttggaattttctattgcacttacacactcaatatacagctgttccaatttgtttcgaagacaaaatgatcttacatctgttactgaggaagctgagagcactccttaaaaaccctagaaatatgagaattttgctgttgctgatgcctggtgtgggtcctaatgatatctctgtataacaaagcagttacgaagcctacagattttgtgcaaaataaaatacaaacaaggtgaatttttctcctcattc

SEQ ID NO: 3584 - protein, 37 aa, Homosapiens
MILHLLLRKLRALLKNPRNMRILLLLMPGVGPNDISV

SEQ ID NO: 3585 - DNA, 762 bp, Homosapiens
gaggcagggtgaggggcgccaccgaggaagcgcccaccgggctcccggggctgccaggccccaaattgaggaagttgactgccagatcacactctgttggcccacgcagatagattccattcatcctttctaatgtctacaccatattttggataacatgccatcatctcacattgtgttgaaagaagaaaccagaatgttggggttgatgtatgccatatggatgaatttaaacagtttcggccttgcaataattggtatacttctaattgcatgtgaaattatactctttttaacgaaagatgaaactattcagtggccacatgtacccagtaacagagggagcaaagcaaatcttatcctcaaagaactgcagctgcttgttagatctacctggtggttccatagagaaactgctcagagaacctgcctttacctcgcctaaaacagaactatcccggagctcagttcatcaactcaggatccagtagtgtaatacagaagcctgttacgagatataaggcactttgccctcggaaatctcactgtcggaatccttggaaatcacaccacgcacaacttctatttcttcataatttgcaaagaaccagtgtgactccagtcaagaacaaaagattaattgtgaattagcgaagaactctaattttttcaagcagccacatggaaaacgcattctaatgaaatcctttccattgctcttttttcttagttcttcaataaagcatgcgatttgatcacaaa

SEQ ID NO: 3586 - protein, 95 aa, Homosapiens; identical to SEQ ID NO: 529

SEQ ID NO: 3587 - DNA, 667 bp, Homosapiens
ggcagggtgaggggcgccaccgaggaagcgcccaccgggctcccggggctgccaggccccaaattgaggaagttgactgccagatcacactctgttggcccacgcagatagattccattcatcctttctaatgtctacaccatattttggataacatgccatcatctcacattgtgttgaaagaagaaaccagaatgttggggttgatgtatgccatatggatgaatttaaacagtttcggccttgcaataattggtatacttctaattgcatgtgaaattatactctttttaacgaaagatgaaactattcagtggccacatatggttggtatgatgcttttacaatatttactactctgcaccatcttagagatgaccattgtaatcataatcatccagtgggttgtaagagcatttcatcatgaaaaacacactgaagaaagcactttgccctcggaaatctcactgtcggaatccttggaaatcacaccacgcacaacttctatttcttcataatttgcaaagaaccagtgtgactccagtcaagaacaaaagattaattgtgaattagcgaagaactctaattttttcaagcagccacatggaaaacgcattctaatgaaatcctttccattgctcttttttcttagttcttcaataaagca

SEQ ID NO: 3588 - protein, 120 aa, Homosapiens
MPSSHIVLKEETRMLGLMYAIWMNLNSFGLAIIGILLIACEIILFLTKDETIQWPHMVGMMLLQYLLLCTILEMTIVIIIIQWVVRAFHHEKHTEESTLPSEISLSESLEITPRTTSISS

SEQ ID NO: 3589 - DNA, 849 bp, Homosapiens
agggtgaggggcgccaccgaggaagcgcccaccgggctcccggggctgccaggccccaaattgaggaagttgactgccagatcacactctgttggcccacgcagatagattccattcatcctttctaatgtctacaccatattttggataacatgccatcatctcacattgtgttgaaagaagaaaccagaatgttggggttgatgtatgccatatggatgaatttaaacagtttcggccttgcaataattggtatacttctaattgcatgtgaaattatactctttttaacgaaagatgaaactattcagtggccacatgtacccagtaacagagggagcaaagcaaatcttatcctcaaagaactgcagctgcttgttagatctacctggtggttccatagagaaactgctcagagaacctgcctttacctcgcctaaaacagaactatcccggagctcagcaaaggagtccattcatcctctataactgctatacaatatctctgttaaaatgctgagaagatttatcctaaaagaaggcaccaaagcaatggggttcatcaactcaggatccagtagtgtaatacagaagcctgttacgagatataaggcactttgccctcggaaatctcactgtcggaatccttggaaatcacaccacgcacaacttctatttcttcataatttgcaaagaaccagtgtgactccagtcaagaacaaaagattaattgtgaattagcgaagaactctaattttttcaagcagccacatggaaaacgcattctaatgaaatcctttccattgctcttttttcttagttcttcaataaagcatgcgatttgatcac

SEQ ID NO: 3590 - protein, 95 aa, Homosapiens; identical to SEQ ID NO: 529

SEQ ID NO: 3591 - DNA, 749 bp, Homosapiens
gggggatgaaggacgccaccgaggaagcagaccccaccgggctcccgaggctgccaggccccccgctcagggcgctgcctgcagaaccacgcccccctgtccctgtgctaagagggtgacgcgagtgcccgaagccctggcctggttaccattcgcgactccctcgtcctgggttctcccattgccaggaatgttttactagtaaccatggtatagttgagacgatccactcttgtcctacgcatttcggcacaatacaggcgtctaggaggcttacctggcattgcctgagagaatcttccatccatttaagtacccagtaacagagggagcaaagcaaatcttatcctcaaagaactgcagctgcttgttagatctacctggtggttccatagagaaactgctcagagaacctgcctttacctcgcctaaaacagaactatcccggagctcagttcatcaactcaggatccagtagtgtaatacagaagcctgttacgagatataaggcactttgccctcggaaatctcactgtcggaatccttggaaatcacaccacgcacaacttctatttcttcataatttgcaaagaaccagtgtgactccagtcaagaacaaaagattaattgtgaattagcgaagaactctaattttttcaagcagccacatggaaaacgcattctaatgaaatcctttccattgctcttttttcttagttcttcaataaagcatgcgatttgatcacaaa

SEQ ID NO: 3592 - protein, 37 aa, Homosapiens
MKDATEEADPTGLPRLPGPPLRALPAEPRPPVPVLRG

SEQ ID NO: 3593 - DNA, 859 bp, Homosapiens
aaaacaggaaataaatacgaatgaaactgagctctaagcagcatgtaacctggcctgcatccaggaaatagaggacttcggatccttctaaccctaccacccaactggccccagtacattcattctctcaggaaaaaaaacaaggtccccacagcaaagaaaaggaataggatcaagagatacgtggctgctggcagagcaagcatgaattcgatgacttcagcagttccggtggccaattctgtgttggtggtggcaccccacaatggttatcctgtgaccccaggaattatgtctcacgtgcccctgtatccaaacagccagccgcaagtccacctagttcctgggaacccacctagtttggtgtcgaatgtgaatgggcagcctgtgcagaaagctctgaaagaaggcaaaaccttgggggccatccagatcatcattggcctggctcacatcggcctcggctccatcatggcgacggttctcgtaggggaatacctgtctatttcattctacggaggctttcccttctggggaggcttgtggtttatcatttcaggatctctctccgtggcagcagaaaatcagccatattcttattgcctgctgtctggcagtttgggcttgaacatcgtcagtgcaatctgctctgcagttggagtcatactcttcatcacagatctaagtattccccacccatatgcctaccccgactattatccttacgcctggggtgtgattgtgcctctcaggatgcatttcttagccgcttctaccaagcagatgtttaataaccacttgctaaatggagaggaaggagaagaaaaggggctaaggagaggcctctccagaagagaga

SEQ ID NO: 3594 - protein, 217 aa, Homosapiens
MNSMTSAVPVANSVLVVAPHNGYPVTPGIMSHVPLYPNSQPQVHLVPGNPPSLVSNVNGQPVQKALKEGKTLGAIQIIIGLAHIGLGSIMATVLVGEYLSISFYGGFPFWGGLWFIISGSLSVAAENQPYSYCLLSGSLGLNIVSAICSAVGVILFITDLSIPHPYAYPDYYPYAWGVIVPLRMHFLAASTKQMFNNHLLNGEEGEEKGLRRGLSRR

SEQ ID NO: 3595 - DNA, 1354 bp, Homosapiens
aaaacaggaaataaatacgaatgaaactgagctctaagcagcatgtaacctggcctgcatccaggaaatagaggacttcggatccttctaaccctaccacccaactggccccagtacattcattctctcaggaaaaaaaacaaggtccccacagcaaagaaaaggaataggatcaagagatacgtggctgctggcagagcaagcatgaattcgatgacttcagcagttccggtggccaattctgtgttggtggtggcaccccacaatggttatcctgtgaccccaggaattatgtctcacgtgcccctgtatccaaacagccagccgcaagtccacctagttcctgggaacccacctagtttggtgtcgaatgtgaatgggcagcctgtgcagaaagctctgaaagaaggcaaaaccttgggggccatccagatcatcattggcctggctcacatcggcctcggctccatcatggcgacggttctcgtaggggaatacctgtctatttcattctacggaggctttcccttctggggaggcttgtggtttatcatttcaggatctctctccgtggcagcagaaaatcagccatattcttattgcctgctgtctggcagtttgggcttgaacatcgtcagtgcaatctgctctgcagttggagtcatactcttcatcacagatctaagtattccccacccatatgcctaccccgactattatccttacgcctggggtgtgaaccctggaatggcgatttctggcgtgctgctggtcttctgcctcctggagtttggcatcgcatgcgcatcttcccactttggctgccagttggtctgctgtcaatcaagcaatgtgagtgtcatctatccaaacatctatgcagcaaacccagtgatcaccccagaaccggtgacctcaccaccaagttattccagtgagatccaagcaaataagtaaggctacagattctggaagcatctttcactgggaccaaaagaagtcctcctccctttctgggcttccataacccaggtcgttcctgttctgacagctgaggaaacgtctctcccactgtttgtactctcaccttcattcttcaattcagtctaggaaaccatgctgtttctctatcaagaagaagacagagattttaaacagatgttaaccaagagggactccctagggcacatgcatcagcacatatgtgggcatccagcctctggggccttggcacacacacattcgtgtgctctgctgcatgtgagcttgtgggttagaggaacaaatatctagacattcaatcttcactctttcaattgtgcattcatttaataaatagatactgagcattcaa

SEQ ID NO: 3596 - protein, 250 aa, Homosapiens; identical to SEQ ID NO: 531

SEQ ID NO: 3597 - DNA, 247 bp, Homosapiens
ctaccacccaactggccccagtacattcattctctcagttcttggcagcatgaattcgatgacttcagcagttccggtggccaattctgtgttggtggtggcaccccacaatggttatcctgtgaccccaggaattatgtctcacgtgcccctgtatccaaacagccagccgcaagtccacctagttcctgggaacccacctagtttggtgtcgaatgtgaatgggcagcctgtgcagaaagctctg

SEQ ID NO: 3598 - protein, 65 aa, Homosapiens
MNSMTSAVPVANSVLVVAPHNGYPVTPGIMSHVPLYPNSQPQVHLVPGNPPSLVSNVNGQPVQKA

SEQ ID NO: 3599 - DNA, 1067 bp, Homosapiens
tcacaggaggccttttcctgtggcctcccccttcccaccatggcgctcaactccttctttttcctctaaccatctccctgttctctctgtgtcttgtccataccctccaattcctaccgacggcctccccagagcagtgtcactgctcccctctctgactccagagcacaccctcaggtctccacacccaaagcaacctatcaaggggcttccctaaacatggtcatcttttttctcagaggaacactaccaagtaaatgttgcaataacaattcttttacccccatacttgatacttacaaaaacccggtgggaaatttccccccacgaggctgagagaggataggggacttccgcaaagccacaaagagtccatggcagggccccagtgagaggtcagttcggactcccagtcccgtgctcctgtcctccccatctgctctgcctacagaaccctggaatggcgatttctggcgtgctgctggtcttctgcctcctggagtttggcatcgcatgcgcatcttcccactttggctgccagttggtctgctgtcaatcaagcaatgtgagtgtcatctatccaaacatctatgcagcaaacccagtgatcaccccagaaccggtgacctcaccaccaagttattccagtgagatccaagcaaataagtaaggctacagattctggaagcatctttcactgggaccaaaagaagtcctcctccctttctgggcttccataacccaggtcgttcctgttctgacagctgaggaaacgtctctcccactgtttgtactctcaccttcattcttcaattcagtctaggaaaccatgctgtttctctatcaagaagaagacagagattttaaacagatgttaaccaagagggactccctagggcacatgcatcagcacatatgtgggcatccagcctctggggccttggcacacacacattcgtgtgctctgctgcatgtgagcttgtgggttagaggaacaaatatctagacattcaatcttcactctttcaattgtgcattcatttaataaatagatactgagcattcaa

SEQ ID NO: 3600 - protein, 69 aa, Homosapiens
MAISGVLLVFCLLEFGIACASSHFGCQLVCCQSSNVSVIYPNIYAANPVITPEPVTSPPSYSSEIQANK

SEQ ID NO: 3601 - DNA, 1536 bp, Homosapiens
atcgccttgaagttacgcttgaaggaggaaaactcatcaattttcggggaatcccggctttggcagcgtgctgctcatggttcgccgcggccacgtgggcatcttcttcatcgagggcggcgtccccttctggggaggagcctgcttcatcatctccggatccctctcagtggcagccgagaagaaccacaccagttgcctggtgaggagcagcctgggcaccaacatcctcagcgtcatggcggcctttgctgggacagccattctgctcatggattttggtgttaccaaccgggatgtggacaggggctatctggccgtgcttactatcttcactgtcctggagttcttcacagcggtcattgccatgcacttcgggtgccaagccatccatgcccaggccagtgcacctgtgatcttcctgccaaacgccttcagcgcagacttcaacatccccagcccggcagcctctgcgccccctgcctatgacaatgtggcatatgcccaaggagtcgtctgagtagcagatgtggcacctgcgggtggagtccagccttttccctctgggcccagcctctccccacccccaccttgttcatcaggggccagccccatcccagctgccctccctcaccacatctacacatactccggcatctgagtgaagtgtccccagggacatctctcccacactttccccagtgctttctttctaaaagacaccgggctgacgtcaggggtgtgtgtccttcagctccctgagccctgtcacccttccaggacacccaccttgtgcatctaagcatttctctgctcattggggaaatcctggcctcattggagactcaggttcgaggcctgccctgaccctcgggcctcgggaaggtcagagagcccggaatcctccagaatggaagagtctgactctggcattccacagaggtgccgataccaggccaaggcctcacagcagggtagtggcctggccgcaggtctcctggccccaagatcagctctgtcctttgtcatctgttgccacatccatggaactcaggtttcctatttggaaactagagtgttgaaccagataaggttcatcaggcccttccagctccccaggctccctgaagtcctgggtctaggccaggcattgtccccctgcttcctggaaaccctcattttccttgtctgtaatatgaagtcagcattggccccgccccccaccccctaccatctcccaatggaggggaggttgcaggggagagctgccgccagcccactcctgaggcaccaccacagtcagcatcgacaggggcacagcagtggcagtttgggacctccctgtgcctctcagcactcccttccccacccccatagcccaaggacaaggctaccacagaaggttaccacaggacctgggcttcgtctccaggggacaaggagacactgtcagcctggtgttcaccaggcctggtagatgagatggcttgtctcatccacaccacagaaggaaataaaccatgtggcttaaatttt

SEQ ID NO: 3602 - protein, 147 aa, Homosapiens; identical to SEQ ID NO: 533

SEQ ID NO: 3603 - DNA, 2110 bp, Homosapiens
tcgccttgaagttacgcttgaaggaggaaaactcatcaattttcggggaatcccgcctttgtttcccaggctctctgagcacgatgtctgcagctcccgccagcaatggagtgtttgttgtcatcccgccaaacaacgccagtggcctctgcccacctccggccattctgcccacatccatgtgccaacctccagggattatgcagtttgaggagccaccgctgggggcacagacaccaagggccacacagccacctgacttgcggcccgtggagacattcctgacaggagagcccaaagttttgggggctttggcagcgtgctgctcatggttcgccgcggccacgtgggcatcttcttcatcgagggcggcgtccccttctggggaggagcctgcttcatcatctccggatccctctcagtggcagccgagaagaaccacaccagttgcctgctcattccccagcacttcaggggacctgcaaagtgccaggggaggggcaccacccaggcagaccagacgcagactgtgcatgtccaggagaagaagacagggatactctttcaatacacaagccagggtggaaagtgaggtccatgctcatggtcattccgagaaaggaaagatgctagaagatctcctgtaagagtcctgctgggccttggtgagcagagaggacttagaaataccacagggaaagctggagaatgcacggaggagtgtgggcagggtcgccactgaaaccacgcctggctccatccaacgaaggcaaaggtgaggagcagcctgggcaccaacatcctcagcgtcatggcggcctttgctgggacagccattctgctcatggattttggtgttaccaaccgggatgtggacaggggctatctggccgtgcttactatcttcactgtcctggagttcttcacagcggtcattgccatgcacttcgggtgccaagccatccatgcccaggccagtgcacctgtgatcttcctgccaaacgccttcagcgcagacttcaacatccccagcccggcagcctctgcgccccctgcctatgacaatgtggcatatgcccaaggagtcgtctgagtagcagatgtggcacctgcgggtggagtccagccttttccctctgggcccagcctctccccacccccaccttgttcatcaggggccagccccatcccagctgccctccctcaccacatctacacatactccggcatctgagtgaagtgtccccagggacatctctcccacactttccccagtgctttctttctaaaagacaccgggctgacgtcaggggtgtgtgtccttcagctccctgagccctgtcacccttccaggacacccaccttgtgcatctaagcatttctctgctcattggggaaatcctggcctcattggagactcaggttcgaggcctgccctgaccctcgggcctcgggaaggtcagagagcccggaatcctccagaatggaagagtctgactctggcattccacagaggtgccgataccaggccaaggcctcacagcagggtagtggcctggccgcaggtctcctggccccaagatcagctctgtcctttgtcatctgttgccacatccatggaactcaggtttcctatttggaaactagagtgttgaaccagataaggttcatcaggcccttccagctccccaggctccctgaagtcctgggtctaggccaggcattgtccccctgcttcctggaaaccctcattttccttgtctgtaatatgaagtcagcattggccccgccccccaccccctaccatctcccaatggaggggaggttgcaggggagagctgccgccagcccactcctgaggcaccaccacagtcagcatcgacaggggcacagcagtggcagtttgggacctccctgtgcctctcagcactcccttccccacccccatagcccaaggacaaggctaccacagaaggttaccacaggacctgggcttcgtctccaggggacaaggagacactgtcagcctggtgttcaccaggcctggtagatgagatggcttgtctcatccacaccacagaaggaaataaaccatgtggcttaaattttg

SEQ ID NO: 3604 - protein, 187 aa, Homosapiens
MSAAPASNGVFVVIPPNNASGLCPPPAILPTSMCQPPGIMQFEEPPLGAQTPRATQPPDLRPVETFLTGEPKVLGALAACCSWFAAATWASSSSRAASPSGEEPASSSPDPSQWQPRRTTPVACSFPSTSGDLQSARGGAPPRQTRRRLCMSRRRRQGYSFNTQARVESEVHAHGHSEKGKMLEDLL

SEQ ID NO: 3605 - DNA, 966 bp, Homosapiens
cttgaagttacgcttgaaggaggaaaactcatcaattttcggggaatcccgcctttgtttcccaggctctctgagcacgatgtctgcagctcccgccagcaatggagtgtttgttgtcatcccgccaaacaacgccagtggcctctgcccacctccggccattctgcccacatccatgtgccaacctccagggattatgcagtttgaggagccaccgctgggggcacagacaccaagggccacacagccacctgacttgcggcccgtggagacattcctgacaggagagcccaaagttttggggacggtgcagatcctcatcggcctcatccacctaggctttggcagcgtgctgctcatggttcgccgcggccacgtgggcatcttcttcatcgagggcggcgtccccttctggggaggagcctgcttcatcatctccggatccctctcagtggcagccgagaagaaccacaccagttgcctggtgaggagcagcctgggcaccaacatcctcagcgtcatggcggcctttgctgggacagccattctgctcatggattttggtgttaccaaccgggatgtggacaggggctatctggccgtgcttactatcttcactgtcctggagttcttcacagcggtcattgccatgcacttcgggtgccaagccatccatgcccaggccagtgcacctgtgatcttcctgccaaacgccttcagcgcagacttcaacatccccagcccggcagcctctgcgccccctgcctatgacaatgtggcatatgcccaaggagtcgtctgagtagcagatgtggcacctgcgggtggagtccagccttttccctctgggcccagcctctccccacccccaccttgttcatcaggggccagccccatcccagctgccctccctcaccacatctacacatactccggcatctgagtgaagtgtccccagggacatct

SEQ ID NO: 3606 - protein, 240 aa, Homosapiens
MSAAPASNGVFVVIPPNNASGLCPPPAILPTSMCQPPGIMQFEEPPLGAQTPRATQPPDLRPVETFLTGEPKVLGTVQILIGLIHLGFGSVLLMVRRGHVGIFFIEGGVPFWGGACFIISGSLSVAAEKNHTSCLVRSSLGTNILSVMAAFAGTAILLMDFGVTNRDVDRGYLAVLTIFTVLEFFTAVIAMHFGCQAIHAQASAPVIFLPNAFSADFNIPSPAASAPPAYDNVAYAQGVV

SEQ ID NO: 3607 - DNA, 2296 bp, Homosapiens
tctctggggagctccggcagcgcaagagggcaaagcacagctggaagctcagagctgcagtcccaggtcctgggccagggcccccatccagcatcaatgaaagcagaagccacagttattcccagccgttgtgctagggggctcccatcatggcaagtcctcagcccagtccagccctggcagacaagtgcaccccagaacacgacccagcccaagctcctggctccacaccagcacgagaagtcccagaagaagagcagccttcttaaggagctgggggccttccacatcaccatcgctctgctgcacctggtctttgggggctacctggcctctatagtcaagaaccttcacctggtggtgctgaagtcttggtatccattctggggggctgcctcttttctcatttcagggatcttggcgataacaatgaagaccttttctaaaacttacctgaagatgttgtgcctgatgacaaacctcatcagcctcttttgcgtgctgtctggcctcttcgtcatctccaaggatctctttctggagagcccatttgagtccccgatctggagaatgtaccccaactccacggtccacatccagaggctggagctggccttgctctgcttcactgtcctagagctcttcctgccagtgcccacagctgtcacagcctggagaggggactgcccatctgcaaagaatgatgatgcatgccttgttccgaatacaccattgcatctcaaaggcctgccggtggagcccccgccatcctaccagagtgtgattcaaggcgacgcacaacacaagcaacatcagaggctcagagaagttaagcaagttgccccggacacatggatagtcactgacggagctgcgatctggacccagactgcaaactgaagagccactgcctgacaatgcccaaacttggttggagcatagcccctgctctcccaaagttgcactttcactgggaagatgagatttgcacatacaaaaggctagagcgatggtctatacagcaaagtcagccctcacagctcctgggaacgctgtcctctcagataagccatttcttacatagttgatggctcgatatctgtggtggcccagattgttttgttttgtttcgctttgttttgttttcttttgttttgttgagatggagtctcgctctgttgcccagcccagagtacagtggcactatctcagctcactgcaatctccgcctccctggttcaagtgattctcctatctcagcctcccaagtagctgggactataggcacacgccaccacgcccagctaatttttatatttttagtagagacaggattgcaccatattggtcagcctggtctcaaactcctgacctcaggtgatccacctgcctcagcctcccaaagtgctgggattacaggcgtgagccactgtgcccagcccaggttttgaagttgtccgagatagcagtctgctctctactgccttataaaatccctgtgtgaagggatgctctcagtatcatttgcccttgcacagaatatccctggggtttgaggttctttgaattctccctctttgtcatctctttcgctgccacttctggctgtggtcactagcttggccatagcacctctcttctccacttctgatctgctgcttctaaccttctatagattgcagctggctttaaaatagattgtaaagtgtaaggcattaggttctgagacagcggcagagagagccatgcaaatgtttaggacaacccagtctttctttttttttttttttttttttttttttgagacggagtctcactctgtcacccaggctggagtgctgtggtgcaatctcggctcactgcaacctctgcctcccgagttcaagcaattctcctgcctcagcctcccgagtagctgggattacaggcgaccgccaccacgcctggctactttttgtatttttagtagagacagggtttcaccacgttagccatgatggtctcaaacttctgacctcataatccacccaccttggcctcccaaagtgctaggattacaggcatgagccaccacccctggctgaaacccaatctttcaaaacatgaaagggggtgatggagaaaaccttagcttggttgtctaaagacatgggtgcaaactctaggctagctctgccaatcacttactgtgcgggtttgactcagtcccttcccctcactaggtcccagtttctccatttgtaaaacaagcaattgtgctacattgatggtttacatcaataaaggttgaaacggc

SEQ ID NO: 3608 - protein, 267 aa, Homosapiens
MKAEATVIPSRCARGLPSWQVLSPVQPWQTSAPQNTTQPKLLAPHQHEKSQKKSSLLKELGAFHITIALLHLVFGGYLASIVKNLHLVVLKSWYPFWGAASFLISGILAITMKTFSKTYLKMLCLMTNLISLFCVLSGLFVISKDLFLESPFESPIWRMYPNSTVHIQRLELALLCFTVLELFLPVPTAVTAWRGDCPSAKNDDACLVPNTPLHLKGLPVEPPPSYQSVIQGDAQHKQHQRLREVKQVAPDTWIVTDGAAIWTQTAN

SEQ ID NO: 3609 - DNA, 354 bp, Homosapiens
gtcccaggggcaccgcaggattgcagaaccctagaaagcttgggcttctctgacctgagagcagcactttgacctcaccctcaacactccacctctctgtcacccaagaggagtagcttctcccagcaggctccgctcctcccatcgtttcgtgctcaacggcaaggcctttgctgacactatgcaatcagatcaaattcagaagaggatgagtggatgcagctactacactccttggtttcaaattttgtgctaattgaaactgcctcattgctctcattgattttctttgtaacagataaatgctattaaattgaattgcaaaatatataataaaataccaccattacttgc

SEQ ID NO: 3610 - protein, 31 aa, Homosapiens
MQLLHSLVSNFVLIETASLLSLIFFVTDKCY

SEQ ID NO: 3611 - DNA, 490 bp, Homosapiens
gtcctcccactttcccttttctacttgctcgctcttctttccccaggaaactttgcaagaaaggcaaaagcgaatcccaggaaaaagactggctcatcaatcacatgttgactgcgctcgcgcgaattgcgcatgcgcatgctgagccccactctccccaaccccggtcccgcctctccacaccccactgcctctgtccccagcagactgaatccggttcctctccacttttcaatactgaaagattaaaatggggaggttgcagggagcagagcttttccctagcacccactttcccaaaccagtctctgcagaagccccagagaatctaactcatgcctgtccagtctacagcaaaaatatttattgagtgcctgttgcatacaggcacaatcctaggcaccggcaaatacagacaatagaccaaagtccctgccctcgaggagctttcattctgatggagagaaaacataataaacaagcaaaatgc

SEQ ID NO: 3612 - protein, 75 aa, Homosapiens
MLTALARIAHAHAEPHSPQPRSRLSTPHCLCPQQTESGSSPLFNTERLKWGGCREQSFSLAPTFPNQSLQKPQRI

SEQ ID NO: 3613 - DNA, 2000 bp, Homosapiens
cccgcctctccacccctcaccaacatggccgcctcagcaacagcccccctcctgtgcgtcacggacgcggcgactcctgacgtcataggaaggcgccggtttcggcgggggctgcacgtgcgcaggggtgtggaaacttaccggctgagccatggatacaccgttaaggcgcagccgacggctgggaggcctaaggcccgaatcccccgagagcctcacctcagtttcgcggacgagacgggcccttgtggagttcgagtcgaacccagaagaaacgagggagcccgggtctcctccgagtgtgcagcgggctggcctggggtcccccgaaaggccgccgaagacaagcccaggatcaccccgtctgcagcagggtgcaggcttggagtcaccccaagggcagccagagccaggcgcagcgtccccccagcgtcagcaagacctacacctggagtcgcctcaaagacagccagagtacagtcctgaatccccacgatgtcagccgaagccaagtgaggaggcaccaaagtgttctcaggaccagggagtactggcctcggagttggcccagaataaggaggagctgaccccgggggccccccagcatcagctaccgccggtcccaggatcaccagagccttaccccggtcagcaagctcccggtccggagccctctcagccactactggagctgacacccagggcacctggctccccccggggtcagcatgagccgagcaagccacctccagctggggagacggtgacaggcggcttcggggcaaagaagcgaaaaggttcttcatcccaggccccagcgtccaagaagttgaataaagaggagcttcctgtaatcccgaaggggaagcccaaatcggggcgagtgtggaaggaccgctccaagaaaagattctcccagatgcttcaggacaagcccctgcgcacatcgtggcagcggaagatgaaggaacgacaggagaggaagctggccaaggactttgcccgtcacctggaggaggagaaggagaggcgccgccaggagaagaaacagcgccgggctgagaacctgaaacgccgcctggagaatgagcggaaggcagaggtcgtccaagtgatccgaaaccccgccaagctcaagcgggcaaagaagaagcagctgcgctccattgagaagcgggacaccctggccctgctgcagaagcagccgccccagcagccggcagccaagatctgagctcaggacggcccgaggccttccatggccaacaaccatgtcagacacagcacctcaggccgctgctcagatgcctctgctggagctggcactccaaacccatggctccagaacagggacccccaccccgaccggggctcctcggcctttgaaggcttccaggcaggtctgtgtgggacagaagcccagagggggcctgggacctggcagagatgggggcgggaagagattcagctcccatccctccttcctctccttctccaagtgccttcaaaccaagaactgtacattcttctggttcctcagtgagctggtgactggcaggtgactccctcagcagtgtatgccctttctcagcatcctaggtccatcccaggcctggaggctgacagttgggaatccagcttcccccacaccttcccaaaggctgctctgagcacctccacaccccactgcctctgtccccagcagactgaatccggttcctctccacttttcaatactgaaagattaaaatggggaggttgcagggagcagagcttttccctagcacccactttcccaaaccagtctctgcagaagccccagagaatctaactcatgcctgtccagtctacagcaaaaatatttattgagtgcctgttgcatacaggcacaatcctaggcaccggcaaatacagacaatagaccaaagtccctgccctcgaggagctttcattctgatggagagaaaacataataaacaagcaaaatgcaccacgtgtcc

SEQ ID NO: 3614 - protein, 360 aa, Homosapiens; identical to SEQ ID NO: 537

SEQ ID NO: 3615 - DNA, 2531 bp, Homosapiens
cccgcctctccacccctcaccaacatggccgcctcagcaacagcccccctcctgtgcgtcacggacgcggcgactcctgacgtcataggaaggcgccggtttcggcgggggctgcacgtgcgcaggggtgtggaaacttaccggctgagccatggatacaccgttaaggcgcagccgacggctgggaggcctaaggcccgaatcccccgagagcctcacctcagtttcgcggacgagacgggcccttgtggagttcgagtcgaacccagaagaaacgagggagcccgggtctcctccgagtgtgcagcgggctggcctggggtcccccgaaaggccgccgaagacaagcccaggatcaccccgtctgcagcagggtgcaggcttggagtcaccccaagggcagccagagccaggcgcagcgtccccccagcgtcagcaagacctacacctggagtcgcctcaaagacagccagagtacagtcctgaatccccacgatgtcagccgaagccaagtgaggaggcaccaaagtgttctcaggaccagggagtactggcctcggagttggcccagaataaggaggagctgaccccgggggccccccagcatcagctaccgccggtcccaggatcaccagagccttaccccggtcagcaagctcccggtccggagccctctcagccactactggagctgacacccagggcacctggctccccccggggtcagcatgagccgagcaagccacctccagctggggagacggtgacaggcggcttcggggcaaagaagcgaaaaggttcttcatcccaggccccagcgtccaagaagttgaataaagaggagcttcctgtaatcccgaaggggaagcccaaatcggggcgagtgtggaaggaccgctccaagaaaagattctcccagatgcttcaggacaagcccctgcgcacatcgtggcagcggaagatgaaggaacgacaggagaggaagctggccaaggactttgcccgtcacctggaggaggagaaggagaggcgccgccaggagaagaaacagcgccgggctgagaacctgaaacgccgcctggagaatgagcggaaggcagaggtcgtccaagtgatccgaaaccccgccaagctcaagcgggcaaagaagaagcagctgcgctccattgagaagcgggacaccctggccctgctgcagaagcagccgccccagcagccggcagccaagatctgagctcaggacggcccgaggccttccatggccaacaaccatgtcagacacagcacctcaggccgctgctcagatgcctctgctggagctggcactccaaacccatggctccagaacagggacccccaccccgaccggggctcctcggcctttgaaggcttccaggcaggtctgtgtgggacagaagcccagagggggcctgggacctggcagagatgggggcgggaagagattcagctcccatccctccttcctctccttctccaagtgccttcaaaccaagaactgtacattcttctggttcctcagtgagctggtgactggcaggtgactccctcagcagtgtatgccctttctcagcatcctaggtccatcccaggcctggaggctgacagttgggaatccagcttcccccacaccttcccaaaggctgctctgagcacctccacaccccactgcctctgtccccagcagactgaatccggttcctctccacttttcaatactgaaagattaaaatggggaggttgcagggagcagagcttttccctagcacccactttcccaaaccagtctctgcagaagccccagagaatctaactcatgcctgtccagtctacagcaaaaatatttattgagtgcctgttgcatacaggcacaatcctaggcaccggcaaatacagacaatagaccaaagtccctgccctcgaggagctttcattctgatggagagaaaacataataaacaagcaaaatgcaccacgtgtccaatgggggaagtgctatgagtaaagggggaagggatgggagggagcaggggcgaggtgtcaacacagggtggctctgcagctagctgggcacctcactgttccctttgctcagcacctgctgtgggccaggccttcagtgaccctggcctttggtggcagaaaaaacacaggaccaagatctcaagagtttctcatctgcttcttccactgacatttcatccaccaagcaaaattcattgacaccaacttttcggtccctgggctgcagagctcaaacacagcagtctctgaccccaagtccacggcaggtggaggaatgagacggggtgcagtggaagtgataggtcagaggtgcaagttacccctcccatccgcaaaagggaaatggtagctgcccagccccatgtggcctggaggcggggctgcacagatcttgggattaccagtgcccagagggatcccacagaacaccaggccgacagggaggctggtccgcttagctaagaaatgacgtgtgctgtagtcttaga

SEQ ID NO: 3616 - protein, 360 aa, Homosapiens; identical to SEQ ID NO: 537

SEQ ID NO: 3617 - DNA, 1636 bp, Homosapiens
catggccgcctcagcaacagcccccctcctgtgcgtcacggacgcggcgactcctgacgtcataggaaggcgccggtttcggcgggggctgcacgtgcgcaggggtgtggaaacttaccggctgagccatggatacaccgttaaggcgcagccgacggctgggaggcctaaggcccgaatcccccgagagcctcacctcagtttcgcggacgagacgggcccttgtggagttcgagtcgaacccagaagaaacgagggagcccgggtctcctccgagtgtgcagcgggctggcctggggtcccccgaaaggccgccgaagacaagcccaggatcaccccgtctgcagcagggtgcaggcttggagtcaccccaagggcagccagagccaggcgcagcgtccccccagcgtcagcaagacctacacctggagtcgcctcaaagacagccagagtacagtcctgaatccccacgatgtcagccgaagccaagtgaggaggcaccaaagtgttctcaggaccagggagtactggcctcggagttggcccagaataaggaggagctgaccccgggggccccccagcatcagctaccgccggtcccaggatcaccagagccttaccccggtcagcaagctcccggtccggagccctctcagccactactggagctgacacccagggcacctggctccccccggggtcagcatgagccgagcaagccacctccagctggggagacggtgacaggcggcttcggggcaaagaagcgaaaaggttcttcatcccaggccccagcgtccaagaagttgaataaagaggagcttcctgtaatcccgaaggggaagcccaaatcggggcgagtgtggaaggaccgctccaagaaaagattctcccagatgcttcaggacaagcccctgcgcacatcgtggcagcggaagatgaaggaacgacaggagaggaagctggccaaggactttgcccgtcacctggaggaggagaaggagaggcgccgccaggagaagaaacagcgccgggctgagaacctgaaacgccgcctggagaatgagcggaaggcagaggtcgtccaagtgatccgaaaccccgccaagctcaagcgggcaaagaagaagcagctgcgctccattgagaagcgggacaccctggccctgctgcagaagcagccgccccagcagccggcagccaagatctgagctcaggacggcccgaggccttccatggccaacaaccatgtcagacacagcacctcaggccgctgctcagatgcctctgctggagctggcactccaaacccatggctccagaacagggacccccaccccgaccggggctcctcggcctttgaaggcttccaggcaggtctgtgtgggacagaagcccagagggggcctgggacctggcagagatgggggcgggaagagattcagctcccatccctccttcctctccttctccaagtgccttcaaaccaagaactgtacattcttctggttcctcagtgagctggtgactggcaggtgactccctcagcagtgtatgccctttctcagcatcctaggtccatcccaggcctggaggctgacagttgggaatccagcttcccccacactttcccaaa

SEQ ID NO: 3618 - protein, 360 aa, Homosapiens; identical to SEQ ID NO: 537

SEQ ID NO: 3619 - DNA, 1690 bp, Homosapiens
ataggaaggcgccggtttcggcgggggctgcacgtgcgcaggggtgtggaaacttaccggctgagccatggatacaccgttaaggcgcagccgacggctgggaggcctaaggcccgaatcccccgagagcctcacctcagtttcgcggacgagacgggcccttgtggagttcgagtcgaacccagaagaaacgagggagcccgggtctcctccgagtgtgcagcgggctggcctggggtcccccgaaaggccgccgaagacaagcccaggatcaccccgtctgcagcagggtgcaggcttggagtcaccccaagggcagccagagccaggcgcagcgtccccccagcgtcagcaagacctacacctggagtcgcctcaaagacagccagagtacagtcctgaatccccacgatgtcacatgagccgagcaagccacctccagctggggagacggtgacaggcggcttcggggcaaagaagcgaaaaggttcttcatcccaggccccagcgtccaagaagttgaataaagaggagcttcctgtaatcccgaaggggaagcccaaatcggggcgagtgtggaaggaccgctccaagaaaagattctcccagatgcttcaggacaagcccctgcgcacatcgtggcagcggaagatgaaggaacgacaggagaggaagctggccaaggactttgcccgtcacctggaggaggagaaggagaggcgccgccaggagaagaaacagcgccgggctgagaacctgaaacgccgcctggagaatgagcggaaggcagaggtcgtccaagtgatccgaaaccccgccaagctcaagcgggcaaagaagaagcagctgcgctccattgagaagcgggacaccctggccctgctgcagaagcagccgccccagcagccggcagccaagatctgagctcaggacggcccgaggccttccatggccaacaaccatgtcagacacagcacctcaggccgctgctcagatgcctctgctggagctggcactccaaacccatggctccagaacagggacccccaccccgaccggggctcctcggcctttgaaggcttccaggcaggtctgtgtgggacagaagcccagagggggcctgggacctggcagagatgggggcgggaagagattcagctcccatccctccttcctctccttctccaagtgccttcaaaccaagaactgtacattcttctggttcctcagtgagctggtgactggcaggtgactccctcagcagtgtatgccctttctcagcatcctaggtccatcccaggcctggaggctgacagttgggaatccagcttcccccacaccttcccaaaggctgctctgagcacctccacaccccactgcctctgtccccagcagactgaatccggttcctctccacttttcaatactgaaagattaaaatggggaggttgcagggagcagagcttttccctagcacccactttcccaaaccagtctctgcagaagccccagagaatctaactcatgcctgtccagtctacagcaaaaatatttattgagtgcctgttgcatacaggcacaatcctaggcaccggcaaatacagacaatagaccaaagtccctgccctcgaggagctttcattctgatggagagaaaacataataaacaagcaaaatgcaccacgtgtcc

SEQ ID NO: 3620 - protein, 170 aa, Homosapiens
MSHEPSKPPPAGETVTGGFGAKKRKGSSSQAPASKKLNKEELPVIPKGKPKSGRVWKDRSKKRFSQMLQDKPLRTSWQRKMKERQERKLAKDFARHLEEEKERRRQEKKQRRAENLKRRLENERKAEVVQVIRNPAKLKRAKKKQLRSIEKRDTLALLQKQPPQQPAAKI

SEQ ID NO: 3621 - DNA, 2221 bp, Homosapiens
ataggaaggcgccggtttcggcgggggctgcacgtgcgcaggggtgtggaaacttaccggctgagccatggatacaccgttaaggcgcagccgacggctgggaggcctaaggcccgaatcccccgagagcctcacctcagtttcgcggacgagacgggcccttgtggagttcgagtcgaacccagaagaaacgagggagcccgggtctcctccgagtgtgcagcgggctggcctggggtcccccgaaaggccgccgaagacaagcccaggatcaccccgtctgcagcagggtgcaggcttggagtcaccccaagggcagccagagccaggcgcagcgtccccccagcgtcagcaagacctacacctggagtcgcctcaaagacagccagagtacagtcctgaatccccacgatgtcacatgagccgagcaagccacctccagctggggagacggtgacaggcggcttcggggcaaagaagcgaaaaggttcttcatcccaggccccagcgtccaagaagttgaataaagaggagcttcctgtaatcccgaaggggaagcccaaatcggggcgagtgtggaaggaccgctccaagaaaagattctcccagatgcttcaggacaagcccctgcgcacatcgtggcagcggaagatgaaggaacgacaggagaggaagctggccaaggactttgcccgtcacctggaggaggagaaggagaggcgccgccaggagaagaaacagcgccgggctgagaacctgaaacgccgcctggagaatgagcggaaggcagaggtcgtccaagtgatccgaaaccccgccaagctcaagcgggcaaagaagaagcagctgcgctccattgagaagcgggacaccctggccctgctgcagaagcagccgccccagcagccggcagccaagatctgagctcaggacggcccgaggccttccatggccaacaaccatgtcagacacagcacctcaggccgctgctcagatgcctctgctggagctggcactccaaacccatggctccagaacagggacccccaccccgaccggggctcctcggcctttgaaggcttccaggcaggtctgtgtgggacagaagcccagagggggcctgggacctggcagagatgggggcgggaagagattcagctcccatccctccttcctctccttctccaagtgccttcaaaccaagaactgtacattcttctggttcctcagtgagctggtgactggcaggtgactccctcagcagtgtatgccctttctcagcatcctaggtccatcccaggcctggaggctgacagttgggaatccagcttcccccacaccttcccaaaggctgctctgagcacctccacaccccactgcctctgtccccagcagactgaatccggttcctctccacttttcaatactgaaagattaaaatggggaggttgcagggagcagagcttttccctagcacccactttcccaaaccagtctctgcagaagccccagagaatctaactcatgcctgtccagtctacagcaaaaatatttattgagtgcctgttgcatacaggcacaatcctaggcaccggcaaatacagacaatagaccaaagtccctgccctcgaggagctttcattctgatggagagaaaacataataaacaagcaaaatgcaccacgtgtccaatgggggaagtgctatgagtaaagggggaagggatgggagggagcaggggcgaggtgtcaacacagggtggctctgcagctagctgggcacctcactgttccctttgctcagcacctgctgtgggccaggccttcagtgaccctggcctttggtggcagaaaaaacacaggaccaagatctcaagagtttctcatctgcttcttccactgacatttcatccaccaagcaaaattcattgacaccaacttttcggtccctgggctgcagagctcaaacacagcagtctctgaccccaagtccacggcaggtggaggaatgagacggggtgcagtggaagtgataggtcagaggtgcaagttacccctcccatccgcaaaagggaaatggtagctgcccagccccatgtggcctggaggcggggctgcacagatcttgggattaccagtgcccagagggatcccacagaacaccaggccgacagggaggctggtccgcttagctaagaaatgacgtgtgctgtagtcttaga

SEQ ID NO: 3622 - protein, 170 aa, Homosapiens; identical to SEQ ID NO: 3620

SEQ ID NO: 3623 - DNA, 1659 bp, Homosapiens
acgtgcgcaggggtgtggaaacttaccggctgagccatggatacaccgttaaggcgcagccgacggctgggaggcctaaggcccgaatcccccgagagcctcacctcagtttcgcggacgagacgggcccttgtggagttcgagtcgaacccagaagaaacgagggagcccgggtctcctccgagtgtgcagcgggctggcctggggtcccccgaaaggccgccgaagacaagcccaggatcaccccgtctgcagcagggtgcaggcttggagtcaccccaagggcagccagagccaggcgcagcgtccccccagcgtcagcaagggagctgaccccgggggccccccagcatcagctaccgccggtcccaggatcaccagagccttaccccggtcacaagccacctccagctggggagacggtgacaggcggcttcggggcaaagaagcgaaaaggttcttcatcccaggccccagcgtccaagaagttgaataaagaggagcttcctgtaatcccgaaggggaagcccaaatcggggcgagtgtggaaggaccgctccaagaaaagattctcccagatgcttcaggacaagcccctgcgcacatcgtggcagcggaagatgaaggaacgacaggagaggaagctggccaaggactttgcccgtcacctggaggaggagaaggagaggcgccgccaggagaagaaacagcgccgggctgagaacctgaaacgccgcctggagaatgagcggaaggcagaggtcgtccaagtgatccgaaaccccgccaagctcaagcgggcaaagaagaagcagctgcgctccattgagaagcgggacaccctggccctgctgcagaagcagccgccccagcagccggcagccaagatctgagctcaggacggcccgaggccttccatggccaacaaccatgtcagacacagcacctcaggccgctgctcagatgcctctgctggagctggcactccaaacccatggctccagaacagggacccccaccccgaccggggctcctcggcctttgaaggcttccaggcaggtctgtgtgggacagaagcccagagggggcctgggacctggcagagatgggggcgggaagagattcagctcccatccctccttcctctccttctccaagtgccttcaaaccaagaactgtacattcttctggttcctcagtgagctggtgactggcaggtgactccctcagcagtgtatgccctttctcagcatcctaggtccatcccaggcctggaggctgacagttgggaatccagcttcccccacaccttcccaaaggctgctctgagcacctccacaccccactgcctctgtccccagcagactgaatccggttcctctccacttttcaatactgaaagattaaaatggggaggttgcagggagcagagcttttccctagcacccactttcccaaaccagtctctgcagaagccccagagaatctaactcatgcctgtccagtctacagcaaaaatatttattgagtgcctgttgcatacaggcacaatcctaggcaccggcaaatacagacaatagaccaaagtccctgccctcgaggagctttcattctgatggagagaaaacataataaacaagcaaaatgcaccacgtgtcc

SEQ ID NO: 3624 - protein, 104 aa, Homosapiens
MLQDKPLRTSWQRKMKERQERKLAKDFARHLEEEKERRRQEKKQRRAENLKRRLENERKAEVVQVIRNPAKLKRAKKKQLRSIEKRDTLALLQKQPPQQPAAKI

SEQ ID NO: 3625 - DNA, 2190 bp, Homosapiens
acgtgcgcaggggtgtggaaacttaccggctgagccatggatacaccgttaaggcgcagccgacggctgggaggcctaaggcccgaatcccccgagagcctcacctcagtttcgcggacgagacgggcccttgtggagttcgagtcgaacccagaagaaacgagggagcccgggtctcctccgagtgtgcagcgggctggcctggggtcccccgaaaggccgccgaagacaagcccaggatcaccccgtctgcagcagggtgcaggcttggagtcaccccaagggcagccagagccaggcgcagcgtccccccagcgtcagcaagggagctgaccccgggggccccccagcatcagctaccgccggtcccaggatcaccagagccttaccccggtcacaagccacctccagctggggagacggtgacaggcggcttcggggcaaagaagcgaaaaggttcttcatcccaggccccagcgtccaagaagttgaataaagaggagcttcctgtaatcccgaaggggaagcccaaatcggggcgagtgtggaaggaccgctccaagaaaagattctcccagatgcttcaggacaagcccctgcgcacatcgtggcagcggaagatgaaggaacgacaggagaggaagctggccaaggactttgcccgtcacctggaggaggagaaggagaggcgccgccaggagaagaaacagcgccgggctgagaacctgaaacgccgcctggagaatgagcggaaggcagaggtcgtccaagtgatccgaaaccccgccaagctcaagcgggcaaagaagaagcagctgcgctccattgagaagcgggacaccctggccctgctgcagaagcagccgccccagcagccggcagccaagatctgagctcaggacggcccgaggccttccatggccaacaaccatgtcagacacagcacctcaggccgctgctcagatgcctctgctggagctggcactccaaacccatggctccagaacagggacccccaccccgaccggggctcctcggcctttgaaggcttccaggcaggtctgtgtgggacagaagcccagagggggcctgggacctggcagagatgggggcgggaagagattcagctcccatccctccttcctctccttctccaagtgccttcaaaccaagaactgtacattcttctggttcctcagtgagctggtgactggcaggtgactccctcagcagtgtatgccctttctcagcatcctaggtccatcccaggcctggaggctgacagttgggaatccagcttcccccacaccttcccaaaggctgctctgagcacctccacaccccactgcctctgtccccagcagactgaatccggttcctctccacttttcaatactgaaagattaaaatggggaggttgcagggagcagagcttttccctagcacccactttcccaaaccagtctctgcagaagccccagagaatctaactcatgcctgtccagtctacagcaaaaatatttattgagtgcctgttgcatacaggcacaatcctaggcaccggcaaatacagacaatagaccaaagtccctgccctcgaggagctttcattctgatggagagaaaacataataaacaagcaaaatgcaccacgtgtccaatgggggaagtgctatgagtaaagggggaagggatgggagggagcaggggcgaggtgtcaacacagggtggctctgcagctagctgggcacctcactgttccctttgctcagcacctgctgtgggccaggccttcagtgaccctggcctttggtggcagaaaaaacacaggaccaagatctcaagagtttctcatctgcttcttccactgacatttcatccaccaagcaaaattcattgacaccaacttttcggtccctgggctgcagagctcaaacacagcagtctctgaccccaagtccacggcaggtggaggaatgagacggggtgcagtggaagtgataggtcagaggtgcaagttacccctcccatccgcaaaagggaaatggtagctgcccagccccatgtggcctggaggcggggctgcacagatcttgggattaccagtgcccagagggatcccacagaacaccaggccgacagggaggctggtccgcttagctaagaaatgacgtgtgctgtagtcttaga

SEQ ID NO: 3626 - protein, 104 aa, Homosapiens; identical to SEQ ID NO: 3624

SEQ ID NO: 3627 - DNA, 637 bp, Homosapiens
cttaccggctgagccatggatacaccgttaaggcgcagccgacggtggcctggggtcccccgaaaggccgccgaagacaagcccaggatcaccccgtctgcagcagggtgcaggcttggagtcaccccaagggcagccagagccaggcgcagcgtccccccagcgtcagcaagacctacacctggagtcgcctcaaagacagccagagtacagtcctgaatccccacgatgtcagccgaagccaagtgaggaggcaccaaagtgttctcaggaccagggagtactggcctcggagttggcccagaataaggaggagctgaccccgggggccccccagcatcagctaccgccggtcccaggatcaccagagccttaccccggtcagcaagctcccggtccggagccctctcagccactactggagctgacacccagggcacctggctccccccggggtcagcatgagccgagcaagccacctccagctggggagacggtgacaggcggcttcggggcaaagaagcgaaaaggttcttcatcccaggccccagcgtccaagaagttgaataaagaggagcttcctgtaatcccgaaggggaagcccaaatcggggcgagtgtggaaggaccgctccaag

SEQ ID NO: 3628 - protein, 67 aa, Homosapiens
MDTPLRRSRRWPGVPRKAAEDKPRITPSAAGCRLGVTPRAARARRSVPPASARPTPGVASKTARVQS

SEQ ID NO: 3629 - DNA, 631 bp, Homosapiens
gaaaccccgccaagctcaagcgggcaaagaagaagcagctgcgctccattgagaagcgggacaccctggccctgctgcagaagcagccgccccagcagccggcagccaagatctgagctcaggacggcccgaggccttccatggccaacaaccatgtcagacacagcacctcaggccgctgctcagatgcctctgctggagctggcactccaaacccatggctccagaacagggacccccaccccgaccggggctcctcggcctttgaaggcttccaggcaggtctgtgtgggacagaagcccagagggggcctgggacctggcagagatgggggcgggaagagattcagctcccatccctccttcctctccttctccaagtgccttcaaaccaagaactgtacattcttctggttcctcagtgagctggtgactggcagagcttttccctagcacccactttcccaaaccagtctctgcagaagccccagagaatctaactcatgcctgtccagtctacagcaaaaatatttattgagtgcctgttgcatacaggcacaatcctaggcaccggcaaatacagacaatagaccaaagtccctgccctcgaggagctttcattctgatggag

SEQ ID NO: 3630 - protein, 99 aa, Homosapiens
MSDTAPQAAAQMPLLELALQTHGSRTGTPTPTGAPRPLKASRQVCVGQKPRGGLGPGRDGGGKRFSSHPSFLSFSKCLQTKNCTFFWFLSELVTGRAFP

SEQ ID NO: 3631 - DNA, 3478 bp, Homosapiens
cagcctccctctcccacctctgtctgcccgctgcctcttgtctagctgctgtcaggagctgactgcctccagggctggaatcctgtgctccctctgtgcccagagccccacgatgtcggccaacgccacactgaagccactctgccccatcctggagcagatgagccgtctccagagccacagcaacaccagcatccgctacatcgaccacgcggccgtgctgctgcacgggctggcctcgctgctgggcctggtggagaatggagtcatcctcttcgtggtgggctgccgcatgcgccagaccgtggtcaccacctgggtgctgcacctggcgctgtccgacctgttggcctctgcttccctgcccttcttcacctacttcttggccgtgggccactcgtgggagctgggcaccaccttctgcaaactgcactcctccatcttctttctcaacatgttcgccagcggcttcctgctcagcgccatcagcctggaccgctgcctgcaggtggtgcggccggtgtgggcgcagaaccaccgcaccgtggccgcggcgcacaaagtctgcctggtgctttgggcactagcggtgctcaacacggtgccctatttcgtgttccgggacaccatctcgcggctggacgggcgcattatgtgctactacaatgtgctgctcctgaacccggggcctgaccgcgatgccacgtgcaactcgcggcaggtggccctggccgtcagcaagttcctgctggccttcctggtgccgctggcgatcatcgcctcgagccacgcggccgtgagcctgcggttgcagcaccgcggccgccggcggccaggccgcttcgtgcgcctggtggcggccgtcgtggccgccttcgcgctctgctgggggccctaccacgtgttcagcctgctggaggcgcgggcgcacgcaaacccggggctgcggccgctcgtgtggcgcgggctgcccttcgtcaccagcctggccttcttcaacagcgtggccaacccggtgctctacgtgctcacctgccccgacatgctgcgcaagctgcggcgctcgctgcgcacggtgctggagagcgtgctggtggacgacagcgagctgggtggcgcgggaagcagccgccgccgccgcacctcctccaccgcccgctcggcctcccctttagctctctgcagccgcccggaggaaccgcggggccccgcgcgtctcctcggctggctgctgggcagctgcgcagcgtccccgcagacgggccccctgaaccgggcgctgagcagcacctcgagttagaacccggcccacgtagggcggcactcacacgcgaaagtatcaccagggtgccgcggttcaattcgatatccggactcctgccgcagtgatcaaagtccgaggggcgggacccaggcacctgcattttaaagcgccccgggagactctgaatctttttcagaaacagtgagttaaagcagtgcttctcaaaccttgatgtgcctgtgaatcacctaggggtcttgttaagtgcagtctgatccaggaggccggggccgggtactgagagtctgcacttaacaagctcccaggccgagaagccagtgcggcaggttcacaggcgaggcctggagtaacacaaagtgaaactcataatagacttcccactctagggcagtggagtcggaagggcacacggggtgcgtctccccggagttcagttttaccagatgatgggggaggggggaaggagttttatgttaaaccatccatgtatttttggagaagagagaggaaaggtttgagaagcactgttccagcctgccctcttcatttagccaatgcttactgcgctagacgcttcatcccacaatcttaaggggcagcttctattagccagtctttacagctgagcacattctggctcagggaggttaagtgacttgcccagtttcagggctaacgaccacagggtctgcactctaaccctaggcatcacatgctcaatgactctctggtgagcgaggacattctctgacctactcgagggacttaagatgctaccttgtgacccagcactgcccaaagtgcttccaaggcagaagcagcaggggatggcgtggtcaagcactcgggaaacctggggctaatcaaatccaatgggggaaatgactaaaagtcttcggtcgttagaagttgaatgggcacagcaactctaagactacagcacacgtcatttcttagctaagcggaccagcctccctgtcggcctggtgttctgtgggatccctctgggcactggtaatcccaagatctgtgcagccccgcctccaggccacatggggctgggcagctaccatttcccttttgcggatgggaggggtaacttgcacctctgacctatcacttccactgcaccccgtctcattcctccacctgccgtggacttggggtcagagactgctgtgtttgagctctgcagcccagggaccgaaaagttggtgtcaatgaattttgcttggtggatgaaatgtcagtggaagaagcagatgagaaactcttgagatcttggtcctgtgttttttctgccaccaaaggccagggtcactgaaggcctggcccacagcaggtgctgagcaaagggaacagtgaggtgcccagctagctgcagagccaccctgtgttgacacctcgcccctgctccctcccatcccttccccctttactcatagcacttcccccattggacacgtggtgcattttgcttgtttattatgttttctctccatcagaatgaaagctcctcgagggcagggactttggtctattgtctgtatttgccggtgcctaggattgtgcctgtatgcaacaggcactcaataaatatttttgctgtagactggacaggcatgagttagattctctggggcttctgcagagactggtttgggaaagtgggtgctagggaaaagctctgctccctgcaacctccccattttaatctttcagtattgaaaagtggagaggaaccggattcagtctgctggggacagaggcagtggggtgtggaggtgctcagagcagcctttgggaaggtgtgggggaagctggattcccaactgtcagcctccaggcctgggatggacctaggatgctgagaaagggcatacactgctgagggagtcacctgccagtcaccagctcactgaggaaccagaagaatgtacagttcttggtttgaaggcacttggagaaggagaggaaggagggatgggagctgaatctcttcccgcccccatctctgccaggtcccaggccccctctgggcttctgtcccacacagacctgcctggaagccttcaaaggccgaggagccccggtcggggtgggggtccctgttctggagccatgggtttggagtgccagctccagcagaggcatctgagcagcggcctgaggtgctgtgtctgacatggttgt

SEQ ID NO: 3632 - protein, 395 aa, Homosapiens
MSANATLKPLCPILEQMSRLQSHSNTSIRYIDHAAVLLHGLASLLGLVENGVILFVVGCRMRQTVVTTWVLHLALSDLLASASLPFFTYFLAVGHSWELGTTFCKLHSSIFFLNMFASGFLLSAISLDRCLQVVRPVWAQNHRTVAAAHKVCLVLWALAVLNTVPYFVFRDTISRLDGRIMCYYNVLLLNPGPDRDATCNSRQVALAVSKFLLAFLVPLAIIASSHAAVSLRLQHRGRRRPGRFVRLVAAVVAAFALCWGPYHVFSLLEARAHANPGLRPLVWRGLPFVTSLAFFNSVANPVLYVLTCPDMLRKLRRSLRTVLESVLVDDSELGGAGSSRRRRTSSTARSASPLALCSRPEEPRGPARLLGWLLGSCAASPQTGPLNRALSSTSS

SEQ ID NO: 3633 - DNA, 1711 bp, Homosapiens
ggattctgaagcggaaggagagctgtctcctccagctggtggaaactgcttcctatcctcctcctggagagcccaactcccagagcagatggcagaggagacctttagatggggcggtcacatgtcccagctggccttataacaactgtcccagggaactattaatagatctaccttacacacatctggactttcagatctgaaacgccctggtttggatgacagattatatggtgaacctacttttagagtgtagttcaactcatttgtcacatggatgagaaaatcagtccataaagggtttgctggggccaacaccagcctaagtggagagtaagcgtccattctcctagaccggcacttaaagcctggctgtcacccagccatcccgtctctgtgctggatggacaccaaaccccaaggccctcatctgcctttgtcccagctactgtccagtgcttcagagatggctacttcgtcctcgtagtgtcccaagaaatggccttgacacacaggatcacactggccaacatccacctggcctatgcccccaccagctgctccccaacacagcacacggaagctttcgtggtcttctacttccctctcacccactgtggaaccacaatgcaggtggctggcgaccagctcatctatgagaactggctggtgtctggcatccacatccaaaaggggccacagggttccatcacgcgggacagcaccttccagcttcatgtgcgctgtgtcttcaacgccagtgacttcctgcccattcaggcatccattttcccacccccatcgcctgctcctatgacccagcccggccccctgcggcttgagctgcggattgccaaagacgagaccttcagctcgtactatggggaggatgactatcccatcgtgaggctgctccgagaaccagtccatgtggaggtccggcttctgcagaggacagaccccaacctggtcctgctgctgcaccagtgctggggcgctcccagtgccaaccccttccagcagccccagtggcccatcctgtcagacggatgccctttcaagggcgacagctacagaacccaaatggtagccttggacggggccacacctttccagtcgcactaccagcgattcactgttgctaccttcgccctcctggactcaggctcccagagagccctcagaggactggtgtcatggaaagcagcgggcttcgggtcagcaagaagcagcagcctagacttggcccagctcggggattccatgtccttccctttgtgcttcctgcccggtggcactgagccagccactttgatgttcttctccttccaccaggtttacttgttctgcagcacctctgcctgccacacctcagggctggagacttgctccactgcatgtagcactggcactacaagacagcgacgatcctcaggtcaccgtaatgacactgccaggccccaggacatcgtgagctctccggggccagtgggctttgaggattcttatgggcaggagcccacacttgggcccacagactccaatgggaactccagcctgagacctctcctttgggcggtccttttgctgccagctgttgccctggtccttgggtttggtgtctttgtgggcctgagccagacctgggcccagaagctctgggaaagcaacagacagtgaatgggcccaataaacaatcatttcaaaccta

SEQ ID NO: 3634 - protein, 393 aa, Homosapiens
MALTHRITLANIHLAYAPTSCSPTQHTEAFVVFYFPLTHCGTTMQVAGDQLIYENWLVSGIHIQKGPQGSITRDSTFQLHVRCVFNASDFLPIQASIFPPPSPAPMTQPGPLRLELRIAKDETFSSYYGEDDYPIVRLLREPVHVEVRLLQRTDPNLVLLLHQCWGAPSANPFQQPQWPILSDGCPFKGDSYRTQMVALDGATPFQSHYQRFTVATFALLDSGSQRALRGLVSWKAAGFGSARSSSLDLAQLGDSMSFPLCFLPGGTEPATLMFFSFHQVYLFCSTSACHTSGLETCSTACSTGTTRQRRSSGHRNDTARPQDIVSSPGPVGFEDSYGQEPTLGPTDSNGNSSLRPLLWAVLLLPAVALVLGFGVFVGLSQTWAQKLWESNRQ

SEQ ID NO: 3635 - DNA, 1571 bp, Homosapiens
ggattctgaagcggaaggagagctgtctcctccagctggtggaaactgcttcctatcctcctcctggagagcccaactcccagagcagatggcagaggagacctttagatggggcggtcacatgtcccagctggccttataacaactgtcccagggaactattaatagatctaccttacacacatctggactttcagatctgaaacgccctggtttggatgacagattatatggtgaacctacttttagagtgtagttcaactcatttgtcacatggatgagaaaatcagtccataaagggtttgctggggccaacaccagcctaagtggagagtaagcgtccattctcctagaccggcacttaaagcctggctgtcacccagccatcccgtctctgtgctggatggacaccaaaccccaaggccctcatctgcctttgtcccagctactgtccagtgcttcagagatggctacttcgtcctcgtagtgtcccaagaaatggccttgacacacaggatcacactggccaacatccacctggcctatgcccccaccagctgctccccaacacagcacacggaagctttcgtggtcttctacttccctctcacccactgtggaaccacaatgcaggtggctggcgaccagctcatctatgagaactggctggtgtctggcatccacatccaaaaggggccacagggttccatcacgcgggacagcaccttccagcttcatgtgcgctgtgtcttcaacgccagtgacttcctgcccattcaggcatccattttcccacccccatcgcctgctcctatgacccagcccggccccctgcggcttgagctgcggattgccaaagacgagaccttcagctcgtactatggggaggatgactatcccatcgtgaggctgctccgagaaccagtccatgtggaggtccggcttctgcagaggacagaccccaacctggtcctgctgctgcaccagtgctggggcgctcccagtgccaaccccttccagcagccccagtggcccatcctgtcagacggatgccctttcaagggcgacagctacagaacccaaatggtagccttggacggggccacacctttccagtcgcactaccagcgattcactgttgctaccttcgccctcctggactcaggctcccagagagccctcagaggactggtttacttgttctgcagcacctctgcctgccacacctcagggctggagacttgctccactgcatgtagcactggcactacaagacagcgacgatcctcaggtcaccgtaatgacactgccaggccccaggacatcgtgagctctccggggccagtgggctttgaggattcttatgggcaggagcccacacttgggcccacagactccaatgggaactccagcctgagacctctcctttgggcggtccttttgctgccagctgttgccctggtccttgggtttggtgtctttgtgggcctgagccagacctgggcccagaagctctgggaaagcaacagacagtgaatgggcccaataaacaatcatttcaaacctactga

SEQ ID NO: 3636 - protein, 345 aa, Homosapiens
MALTHRITLANIHLAYAPTSCSPTQHTEAFVVFYFPLTHCGTTMQVAGDQLIYENWLVSGIHIQKGPQGSITRDSTFQLHVRCVFNASDFLPIQASIFPPPSPAPMTQPGPLRLELRIAKDETFSSYYGEDDYPIVRLLREPVHVEVRLLQRTDPNLVLLLHQCWGAPSANPFQQPQWPILSDGCPFKGDSYRTQMVALDGATPFQSHYQRFTVATFALLDSGSQRALRGLVYLFCSTSACHTSGLETCSTACSTGTTRQRRSSGHRNDTARPQDIVSSPGPVGFEDSYGQEPTLGPTDSNGNSSLRPLLWAVLLLPAVALVLGFGVFVGLSQTWAQKLWESNRQ

SEQ ID NO: 3637 - DNA, 2341 bp, Homosapiens
gggcaatttccgttaggtgctgaaggctgtggcgcgcggctgtccccattcccacgtgaagcgctacgctagcatcgctcggctggcggctcccagctcgccgcggagcagtcccggcagcagcgggggaccggaagtggctcgcggaggctcagaagctagtcccggagcccggcgtgtggcgcctcggagcacggtgacggcgccatgtccctaatctgctccatctctaacgaagtgccggagcacccatgtgtatcccctgtctctaatcatgtttatgagcggcggctcatcgagaagtacattgcggagaatggtaccgaccccatcaacaaccagcctctctccgaggagcagctcatcgacatcaaagttgctcacccaatccggcccaagcctccctcagccaccagcatcccggccattctgaaagctttgcaggatgagtgggatgcagtcatgctgcacagcttcactctgcgccagcagctgcagacaacccgccaagagctgtcacacgctctgtaccagcacgatgccgcctgccgtgtcattgcccgtctcaccaaggaagtcactgctgcccgagaagctctggctaccctgaaaccacaggctggcctcattgtgccccaggctgtgccaagttcccaaccaagtgttgtgggtgcgggtgagccaatggatttgggtgagctggtgggaatgaccccagagattattcagaagcttcaagacaaagccactgtgctaaccacggagcgcaagaagagagggaagactgtgcctgaggagctggtgaagccagaagagctcagcaaataccggcaggtggcatcccacgtggggttgcacagtgccagcattcctgggatcctggccctggacctctgcccgtccgacaccaacaagatcctcactggtggggcggataaaaatgtcgttgtgtttgacaaaagttctgaacaaatcctggctaccctcaaaggccataccaagaaggtcaccagcgtggtgtttcacccttcccaggacctggtgttttctgcttcccccgatgccactatcaggatttggtcggtccccaatgcctcttgtgtacaggtggttcgggcccatgagagtgctgtgacaggcctcagccttcatgccactggcgactatctcctgagctcctccgatgatcagtactgggctttctctgacatccagacagggcgtgtgctcaccaaggtgacagatgagacctccggctgctctctcacctgtgcacagttccaccctgacggactcatctttggaacaggaaccatggactctcagatcaagatctgggacttgaaggaacgtactaatgtggccaacttccctggccactcgggccccatcactagcatcgccttctctgagaatggttactacctggctacagcggctgatgactcctctgtcaagctctgggatctgcgcaagcttaagaactttaagactttgcagctggataacaactttgaggtaaagtcactgatctttgaccagagtggtacctacctggctcttgggggcacggatgtccagatctacatctgcaaacaatggacggagattcttcactttacagagcatagcggcctgaccacaggggtggccttcgggcatcacgccaagttcatcgcttcaacaggcatggacagaagcctcaagttctacagcctgtaggccctggcccttctgatggaagctgggcctcatctcagtagaggggtagaattagggtttgggggggggggtggggggaatctatggggggagggggctctgtggggtgggacattcacatcatttcactctggtctgagtggtggcctgagaaccatggtggcatggaccaccctcatccatgcaactccaggccccatgggaacggatgtggaaggaagaactgtcaccctcttaaggcccagggtcggagcccagggcctctcccttcctgtcgttcaatggacgtggtggtggctgttccacacccattttgttgcagttcctgtgagacaggagaggctgagccaagggaactgtgaaggggatgggcaggagggcttgtgcagggttttgtaagcagtgatctagtttcattaaaaaaagaaaacaataaccataaccacctccccgtgtctgtctgcaccaggagcacctgggactgggaaggtcaaggggagggagcacacactgggacactggcttccgggaagcccatcttcctttcctttcacagctcttaccctttttttttttttttaattgcacagcagaaataaaaacaaatctgcagatgaaa

SEQ ID NO: 3638 - protein, 504 aa, Homosapiens; identical to SEQ ID NO: 543

SEQ ID NO: 3639 - DNA, 2162 bp, Homosapiens
gggcaatttccgttaggtgctgaaggctgtggcgcgcggctgtccccattcccacgtgaagcgctacgctagcatcgctcggctggcggctcccagctcgccgcggagcagtcccggcagcagcgggggaccggaagtggctcgcggaggctcagaagctagtcccggagcccggcgtgtggcgcctcggagcacggtgacggcgccatgtccctaatctgctccatctctaacgaagtgccggagcacccatgtgtatcccctgtctctaatcatgtttatgagcggcggctcatcgagaagtacattgcggagaatggtaccgaccccatcaacaaccagcctctctccgaggagcagctcatcgacatcaaagttgctcacccaatccggcccaagcctccctcagccaccagcatcccggccattctgaaagctttgcaggatgagtgggatgcagtcatgctgcacagcttcactctgcgccagcagctgcagacaacccgccaagagctgtcacacgctctgtaccagcacgatgccgcctgccgtgtcattgcccgtctcaccaaggaagtcactgctgcccgagaagctctggctaccctgaaaccacaggctggcctcattgtgccccaggctgtgccaagttcccaaccaagtgttgtgggtgcgggtgagccaatggatttgggtgagctggtgggaatgaccccagagattattcagaagcttcaagacaaagccactgtgctaaccacggagcgcaagaagagagggaagactgtgcctgaggagctggtgaagccagaagagctcagcaaataccggcaggtggcatcccacgtggggttgcacagtgccagcattcctgggatcctggccctggacctctgcccgtccgacaccaacaagatcctcactggtggggcggataaaaatgtcgttgtgtttgacaaaagttctgaacaaatcctggctaccctcaaaggccataccaagaaggtcaccagcgtggtgtttcacccttcccaggacctggtgttttctgcttcccccgatgccactatcaggatttggtcggtccccaatgcctcttgtgtacaggtggttcgggcccatgagagtgctgtgacaggcctcagccttcatgccactggcgactatctcctgagctcctccgatgatcagtactgggctttctctgacatccagacagggcgtgtgctcaccaaggtgacagatgagacctccggctgctctctcacctgtgcacagttccaccctgacggactcatctttggaacaggaaccatggactctcagatcaagatctgggacttgaaggaacgtactaatgtggccaacttccctggccactcgggccccatcactagcatcgccttctctgagaatggttactacctggctacagcggctgatgactcctctgtcaagctctgggatctgcgcaagcttaagaactttaagactttgcagctggataacaactttgaggtaaagtcactgatctttgaccagagtggtacctacctggctcttgggggcacggatgtccagatctacatctgcaaacaatggacggagattcttcactttacagagcatagcggcctgaccacaggggtggccttcgggcatcacgccaagttcatcgcttcaacaggcatggacagaagcctcaagttctacagcctgtaggccctggcccttctgatggaagctgggcctcatctcagtagaggggtagaattagggtttgggggggggggtggggggaatctatggggggagggggctctgtggggtgggacattcacatcatttcactctggtctgagtggtggcctgagaaccatggtggcatggaccaccctcatccatgcaactccaggccccatgggaacggatgtggaaggaagaactgtcaccctcttaaggcccagggtcggagcccagggcctctcccttcctgtcgttcaatggacgtggtggtggctgttccacacccattttgttgcagttcctgtgagacaggagaggctgagccaagggaactgtgaaggggatgggcaggagggcttgtgcagggttttgtaagcagtgatctagtttcattaaaaaaagaaaacaataaccat

SEQ ID NO: 3640 - protein, 504 aa, Homosapiens; identical to SEQ ID NO: 543

SEQ ID NO: 3641 - DNA, 810 bp, Homosapiens
cactgtgccacgggaccctggtctttgaaaccttggcgtgcgcgagaatttcccagtgagtttgttaaaatgcagattcctcgggtctgcgtagacagactgtgccccacgcttttctaagtcagttgtttctcgggctaccctttaagagacactgctggatggcctggtgaagaaaatacagaaacagatgggtacaagaactaagaaaacggctaagaaagtgttttggtcctgactactaccatttcgctctgtgatttggggcaattcacattgccctttcttctttgtcaaaagacaaaatcacaacaaacttagttcaaagattttttttttcttaagagacggactctggcaatgttgcccaggctggaaggcagtggctattcacaggtgcggtcatagcaatcatggctatcacaggtgcatcctggaactcctggcctcaagtgatccttctgcctcagcctccggagtagctgggacttaaggtatgacagagccaaaactccaagtcatgtcagtagggcatgcccaatagaaaatgctttgacatctaacaacacccagaaccaatgattcctccctgtggtaccaagaagacctagacatgatcggaacctaaatgctggaactctttcaggagcaaagggtctgttgaccagaaagatccaggggtaaaatccacctcaacatacccgtgtagtcaaatttgacaccctccaatcagaccctgccaagccaaaattcctaatacgtttccttgccatctgtattagtctgttttcacgctgctgacaaagacat

SEQ ID NO: 3642 - protein, 41 aa, Homosapiens
SFCLSLRSSWDLRYDRAKTPSHVSRACPIENALTSNNTQNQ

SEQ ID NO: 3643 - DNA, 2416 bp, Homosapiens
gtagctctagaactacatgacccaaaatgccgagtggtggcaagaggaggattagcttccactccgatttcaaagatccagtttacccactctacagcccagatatagtcacttatttcccctttccagccagagacttccgttccctgctggaacttccgatcccattcttctctcggtgggaatgcttgtggggggaaaaagaaacgcaatagataaagcggggcgcatgcgctcccggcacaggcttcgattgtgaggaaggccggctagtctccgagctcatcccgccttgcgcatgcggagaaggtaaaccagcgccccgagttgaggcgcgggtttggtggcgcgtttcagcgaagtcgcacgtgaaggatagcagtggcctgagaaagacccagtcatggcagcctccagcatcagttcaccatggggaaagcatgtgttcaaagccattctgatggtcctagtggcccttatcctcctccactcagcattggcccagtcccgtcgagactttgcaccaccaggccaacagaagagagaagccccagttgatgtcttgacccagataggtcgatctgtgcgagggacactggatgcctggattgggccagagaccatgcacctggtgtcagagtcttcgtcccaagtgttgtgggccatctcatcagccatttctgtggccttctttgctctgtctgggatcgccgcacagctgctgaatgccttgggactagctggtgattacctcgcccagggcctgaagctcagccctggccaggtccagaccttcctgctgtggggagcaggggccctggtcgtctactggctgctgtctctgctcctcggcttggtcttggccttgctggggcggatcctgtggggcctgaagcttgtcatcttcctggccggcttcgtggccctgatgaggtcggtgcctgacccttccacccgggccctgctactcctggccttgctgatcctctacgccctgctgagccggctcactggctcccgagcctctggggcccaactcgaggccaaggtgcgagggctggaacgccaggtggaggagctgcgctggcgccagaggcgagcggccaagggggcccgcagtgtggaggaggagtgagccggatgccccacacaccgccagtgtcataccaaagagctgagctgcttcggggccatgcagccctcctgccagccccctgcccttttcttgccctgtctctgaaccttcagaacattgatccttgccgcagccccactagccaagagaaacagagaaagaccattccccctgcctgtccttgcggccctgtcttctgaggttctctgtctggggttggctctcttaaccctttctctgctcccagcctgcctcaccagggaaggttggaggggcctccctctggcttctgcatctgcgccagcaaacatcactgccgttggtctctcatgacttaactggcttccctctgctgctgccttggcttcctcctaatgctcgtgctctcctgtccttctgaagttgctccttggccaaatctccagctcccttcttgttttcctcatcctcctaccctgtactcccaccaaaccatggtcctttaaggcacgctcctgtcctcctcattgcccagcagtagggaggggcaggggtaaggggacctgaggataaagggtggggaaacagggtcccctgaggcctgtgggggctgcaggggaggaggatgtaccttgtgtctctttcaagtgccttaatccgagccagcagggccttctgcttgcctgctgccatactgtatgtaggaaagtgttctgtggctgctttgtgtcaagaaaagagcagtcactctcagaatcttgattccccatcagccaaagcaaaagatggctgctgctttgtaggcatgtgcctgcaagtgggaccttgctgggcattatatgccctgtgggggtttcagagaccctgaaagaggagggaggacccgcctccttgtctgcacaactgcatgcacttctctccccatcgctccacaacctgaaaccgagaaggagttgctgaccagtgcccaccccggcagcccgggaggaacacaggcagctcctttcccttcacgtggtctgcagagagcagggtgagctgccagctgcccctctccaccagggtaccctgtcttggtggttaggggccacttttcctttgaggctctagtggaggtggatgtccttctctgccaggcttggcacatgatgtgaagaataaatgcccaattcttactgttcaggtttgatgtggaatcacagctgcagtgatatatattttttatcagtgcttggttggttttaaataaagtgcacgctattttattatcttgttctgaataaaatgtatttactccaagtc

SEQ ID NO: 3644 - protein, 243 aa, Homosapiens; identical to SEQ ID NO: 545

SEQ ID NO: 3645 - DNA, 2068 bp, Homosapiens
atttcccctttccagccagagacttccgttccctgctggaacttccgatcccattcttctctcggtgggaatgcttgtggggggaaaaagaaacgcaatagataaagcggggcgcatgcgctcccggcacaggcttcgattgtgaggaaggccggctagtctccgagctcatcccgccttgcgcatgcggagaaggtaaaccagcgccccgagttgaggcgcgggtttggtggcgcgtttcagcgaagtcgcacgtgaaggatagcagtggcctgagaaagacccagtcatggcagcctccagcatcagttcaccatggggaaagcatgtgttcaaagccttctttgctctgtctgggatcgccgcacagctgctgaatgccttgggactagctggtgattacctcgcccagggcctgaagctcagccctggccaggtccagaccttcctgctgtggggagcaggggccctggtcgtctactggctgctgtctctgctcctcggcttggtcttggccttgctggggcggatcctgtggggcctgaagcttgtcatcttcctggccggcttcgtggccctgatgaggtcggtgcctgacccttccacccgggccctgctactcctggccttgctgatcctctacgccctgctgagccggctcactggctcccgagcctctggggcccaactcgaggccaaggtgcgagggctggaacgccaggtggaggagctgcgctggcgccagaggcgagcggccaagggggcccgcagtgtggaggaggagtgagccggatgccccacacaccgccagtgtcataccaaagagctgagctgcttcggggccatgcagccctcctgccagccccctgcccttttcttgccctgtctctgaaccttcagaacattgatccttgccgcagccccactagccaagagaaacagagaaagaccattccccctgcctgtccttgcggccctgtcttctgaggttctctgtctggggttggctctcttaaccctttctctgctcccagcctgcctcaccagggaaggttggaggggcctccctctggcttctgcatctgcgccagcaaacatcactgccgttggtctctcatgacttaactggcttccctctgctgctgccttggcttcctcctaatgctcgtgctctcctgtccttctgaagttgctccttggccaaatctccagctcccttcttgttttcctcatcctcctaccctgtactcccaccaaaccatggtcctttaaggcacgctcctgtcctcctcattgcccagcagtagggaggggcaggggtaaggggacctgaggataaagggtggggaaacagggtcccctgaggcctgtgggggctgcaggggaggaggatgtaccttgtgtctctttcaagtgccttaatccgagccagcagggccttctgcttgcctgctgccatactgtatgtaggaaagtgttctgtggctgctttgtgtcaagaaaagagcagtcactctcagaatcttgattccccatcagccaaagcaaaagatggctgctgctttgtaggcatgtgcctgcaagtgggaccttgctgggcattatatgccctgtgggggtttcagagaccctgaaagaggagggaggacccgcctccttgtctgcacaactgcatgcacttctctccccatcgctccacaacctgaaaccgagaaggagttgctgaccagtgcccaccccggcagcccgggaggaacacaggcagctcctttcccttcacgtggtctgcagagagcagggtgagctgccagctgcccctctccaccagggtaccctgtcttggtggttaggggccacttttcctttgaggctctagtggaggtggatgtccttctctgccaggcttggcacatgatgtgaagaataaatgcccaattcttactgttcaggtttgatgtggaatcacagctgcagtgatatatattttttatcagtgcttggttggttttaaataaagtgcacgctattttattatcttgttctgaataaaatgtatttactccaagtc

SEQ ID NO: 3646 - protein, 165 aa, Homosapiens
MAASSISSPWGKHVFKAFFALSGIAAQLLNALGLAGDYLAQGLKLSPGQVQTFLLWGAGALVVYWLLSLLLGLVLALLGRILWGLKLVIFLAGFVALMRSVPDPSTRALLLLALLILYALLSRLTGSRASGAQLEAKVRGLERQVEELRWRQRRAAKGARSVEEE

SEQ ID NO: 3647 - DNA, 734 bp, Homosapiens
actgtccctctgtcttctgtggcatcctttgccttgcagccacagcccagctagcccaggccaagggagtccgacccccaccccgaagcacagggaagttgctgccctttcccgcagtgacaggaatcctctcaaaggttctggaaggcaaggatgcggccatccctggagacgccaaggaccatcatgtgaggtggcttttatcctcctcgcccctactggtacagacgagaagaaactgtgactcagaagttaagcattttcccatggtcactgggctacacagaaaggccaggatttgaacccaagcttctgcttccacccatcttcattaggagtcaagttatactgtgggtctcaaccatggctgctcactggaatcacctggaagcttcccaagtactgatgtctgtgtccccagcccagaggttctgatatcattgtctgggtgtggcctagccttggatctgcaaaagctccctaggcagttccactgcatgaagttgagaaccactgatacagagtgacctcacctccccacccccaatggaggtgctatggtttgaagagcaaaactcatgttgaaatttaactgttcttgcacctcctgcagagcctgggagctcccagtccagccaaggatgttggatctcatggtcctaagtacttctttgacaccccattcccctcagtaaaatagtttgaccccttctccaccaaaaaaaaaaaaaaaa

SEQ ID NO: 3648 - protein, 38 aa, Homosapiens
MLKFNCSCTSCRAWELPVQPRMLDLMVLSTSLTPHSPQ

SEQ ID NO: 3649 - DNA, 1551 bp, Homosapiens
ctgaagctcagccctggccaggtccagaccttcctgctgtggggagcaggggccctggtcgtctactggctgctgtctctgctcctcggcttggtcttggccttgctggggcggatcctgtggggcctgaagcttgtcatcttcctggccggcttcgtggccctgatgaggtcggtgcctgacccttccacccgggccctgctactcctggccttgctgatcctctacgccctgctgagccggctcactggctcccgagcctctggggcccaactcgaggccaaggtgcgagggctggaacgccaggtggaggagctgcgctggcgccagaggcgagcggccaagggggcccgcagtgtggaggaggagtgagccggatgccccacacaccgccagtgtcataccaaagagctgagctgcttcggggccatgcagccctcctgccagccccctgcccttttcttgccctgtctctgaaccttcagaacattgatccttgccgcagccccactagccaagagaaacagagaaagaccattccccctgcctgtccttgcggccctgtcttctgaggttctctgtctggggttggctctcttaaccctttctctgctcccagcctgcctcaccagggaaggttggaggggcctccctctggcttctgcatctgcgccagcaaacatcactgccgttggtctctcatgacttaactggcttccctctgctgctgccttggcttcctcctaatgctcgtgctctcctgtccttctgaagttgctccttggccaaatctccagctcccttcttgttttcctcatcctcctaccctgtactcccaccaaaccatggcctgtgggggctgcaggggaggaggatgtaccttgtgtctctttcaagtgccttaatccgagccagcagggccttctgcttgcctgctgccatactgtatgtaggaaagtgttctgtggctgctttgtgtcaagaaaagagcagtcactctcagaatcttgattccccatcagccaaagcaaaagatggctgctgctttgtaggcatgtgcctgcaagtgggaccttgctgggcattatatgccctgtgggggtttcagagaccctgaaagaggagggaggacccgcctccttgtctgcacaactgcatgcacttctctccccatcgctccacaacctgaaaccgagaaggagttgctgaccagtgcccaccccggcagcccgggaggaacacaggcagctcctttcccttcacgtggtctgcagagagcagggtgagctgccagctgcccctctccaccagggtaccctgtcttggtggttaggggccacttttcctttgaggctctagtggaggtggatgtccttctctgccaggcttggcacatgatgtgaagaataaatgcccaattcttactgttcaggtttgatgtggaatcacagctgcagtgatatatattttttatcagtgcttggttggttttaaataaagtgcacgctattttattatcttgttctgaataaaatgtatttactccaagtc

SEQ ID NO: 3650 - protein, 52 aa, Homosapiens
MLVLSCPSEVAPWPNLQLPSCFPHPPTLYSHQTMACGGCRGGGCTLCLFQVP

SEQ ID NO: 3651 - DNA, 1096 bp, Homosapiens
cattgatccttgccgcagccccactagccaagagaaacagagaaagaccattccccctgcctgtccttgcggccctgtcttctgaggttctctgtctggggttggctctcttaaccctttctctgctcccagcctgcctcaccagggaaggttggaggggcctccctctggcttctgcatctgcgccagcaaacatcactgccgttggtctctcatgacttaactggcttccctctgctgctgccttggcttcctcctaatgctcgtgctctcctgtccttctgaagttgctccttggccaaatctccagctcccttcttgttttcctcatcctcctaccctgtactcccaccaaaccatggtcctttaaggcacgctcctgtcctcctcattgcccagcagtagggaggggcaggggtaaggggacctgaggataaagggtggggaaacagggtcccctgaggcctgtgggggctgcaggggaggaggatgtaccttgtgtctctttcaagtgccttaatccgagccagcagggccttctgcttgcctgctgccatactgtatgtaggaaagtgttctgtggctgctttgtgtcaagaaaagagcagtcactctcagaatcttgattccccatcagccaaagcaaaagatggctgctgctttgtaggcatgtgcctgcaagtgggaccttgctgggcattatatgccctgtgggggtttcagagaccctgaaagaggagggaggacccgcctccttgtctgcacaactgcatgcacttctctccccatcgagctcctttcccttcacgtggtctgcagagagcagggtgagctgccagctgcccctctccaccagggtaccctgtcttggtggttaggggccacttttcctttgaggctctagtggaggtggatgtccttctctgccaggcttggcacatgatgtgaagaataaatgcccaattcttactgttcaggtttgatgtggaatcacagctgcagtgatatatattttttatcagtgcttggttggttttaaataaagtgcacgctattttattatcttgttctgaataaaatgtatttactccaagtc

SEQ ID NO: 3652 - protein, 66 aa, Homosapiens
MPCGGFRDPERGGRTRLLVCTTACTSLPIELLSLHVVCREQGELPAAPLHQGTLSWWLGATFPLRL

SEQ ID NO: 3653 - DNA, 3718 bp, Homosapiens
gctttttcttccctgatcagaagcttccgtgagggagccacacagaactcaccgagtccctcctggcagaggcggccgtcctctgttgcttccagggacgtggccctcttcccgacctcggtcgcctgagcgcgcagggattggggatccgtagggcactaggacccggcggggcggagggggcagcccatgtgctgcgattcgctccctcccaccccactgctcccgctccattgtctgggaattgcagccgcggggcgggcggcggcggcggcggcggcggccgggacccagcgggccaggtggggacggcgcggagcgggtgcgggagatgccgtgcgggactggggccacctgagccgcccgcctcgtccccgccttctgtgggaaggatgtgcgcgcggatggccggtcgcacaacagcggcccctcgggggccctacggcccctggctctgcctcctggtggccctcgccctggacgtcgtgagagtggactgtggccaggctcccctggaccctgtctacctgccggcagccctggagctcctagacgcccctgaacacttccgtgtgcagcaggtgggccactacccacctgccaactcctctctgagctcccgatctgagacctttctgctcctacagccctggcccagggcccagccacttctccgggcctcctacccaccttttgccactcagcaggtggtcccccctcgagtcactgagccccaccaacggccagtcccatgggacgtgcgggccgtttcagtggaagcggctgtgactccagcagagccctacgcccgggttctcttccacctcaaagggcaggattggccaccagggtctggcagcctgccctgtgcccggctccatgccacacaccctgccggcactgctcaccaagcctgccgcttccagccatccctgggcgcctgcgtggtggagctggagcttccctcgcactggttctcacaggcctccaccacacgggccgagctggcctacacgcttgagcctgcagctgagggccctgggggctgtggctccggcgaggagaacgaccctggggagcaggccctcccagtggggggtgtggagctgcgcccagcagaccccccgcagtaccaggaggtacctctggacgaggctgtgactctgcgggtgcctgacatgccagtgcggcccggccagctctttagtgctaccctcctgcttcggcacaacttcacagccagcctcctgaccctgcggatcaaggtgaagaaggggctgcatgtgacagccgcccgcccagcccagcccacactctggactgccaagctggaccgcttcaagggctccaggcaccacaccaccctcatcacctgccaccgtgctgggctcacagagccagattccagcagtccccttgaactgtctgagttcctatgggtggactttgtggtggagaatagcactggtgggggcgtagcggtcactcgccccgtcacgtggcagctggagtacccaggccaggcccctgaagcagagaaggacaaaatggtgtgggaaatcctggtgtctgagcgggacatcagagcccttatcccactggccaaggctgaggagctggtgaatacagcaccactgactggagtgccccagcatgtccccgtgcgccttgtcactgtggacggcgggggggccttggtggaggtgacagagcatgtcggctgcgagtctgccaacacacaggtcctgcaggtgtctgaggcctgtgatgccgtgttcgtggctggcaaggagagccggggcgcccggggggtgcgagtggacttctggtggcgccggctccgcgcctcgctgcggctgaccgtgtgggcccccctgctaccgctgcgtatcgagctcaccgacaccaccctcgagcaggtccgcggctggagggtacctggccctgctgaagggcctgcggaacccgctgcagaggcgtcggatgaggccgagcggcgcgcccgtggctgccacctgcagtaccagcgggccggtgtgcgcttcctcgcccccttcgcggcccacccgctggacggcggccgccgcctcacgcacctgcttggccccgactggctgctagacgtgtcccacctcgtggcgccacacgcccgcgtgctggactcgcgtgtagcctctctggagggtggccgtgtcgtggtgggccgggagcccggtgtcacctccattgaggtgcgttccccactgtctgactccatcctgggggagcaggcgctggctgtgacggacgacaaggtctcagtgctggagctgagggtgcagccagtgatgggcatctcgctgaccttgagccggggcactgcccaccccggggaggtcacagctacgtgctgggcacagtcagcccttcccgccccaaagcaggaggtggccctctccctatggctgtccttctctgatcacactgtggccccagctgagctctacgaccgccgtgacctgggactgtccgtctcagccgaggagcctggtgccatcctgccagctgaggagcagggtgcccagctcggggtggtggtgagtggggcaggcgccgaggggctgccgctgcatgtggctctgcacccgcccgagccctgccgccggggccgccaccgtgtgcctctggcctctggcaccgcctggctggggctgccccctgcctccactccagcccctgctctcccatccagccctgcttggagcccaccagccacagaagccaccatgggtggtaaacggcaggtggcaggcagtgtcgggggcaacacaggtgtgaggggcaagtttgagcgggcagaggaggaggccaggaaggaggagaccgaagccagggaggaggaggaggaagaggaggaggagatggtccctgcccctcagcatgtcactgagctagagctgggcatgtacgccctgctgggagtcttctgcgtggccatcttcatcttcttggtcaatggtgtggtcttcgtcctgcgctatcagcgcaaagaacctcccgacagtgccactgaccccacctccccccagccccacaactgggtctggctgggcactgaccaggaggaactgagccgccagctggaccggcagtcccctggcccgcccaagggggaggggagctgcccctgtgagagtgggggaggaggggaggcccctaccctggcccctggccctcctgggggcaccaccagctcctcaagcaccctggcccgaaaggaggctggggggcggcggaagcgagtagagtttgtgacatttgcgccagcccctccagcccagtcacctgaggagcctgtaggggcccctgctgtgcagtccatccttgtggcaggcgaggaggacatccgctgggtgtgtgaggacatggggctgaaggaccctgaggagcttcgcaactacatggagaggatccggggcagctcctgaccctccacagccacctggtcagccaccagctggggcaacgagggtggaggtcccactgagcctctcgcctgcccccgccactcgtctggtgcttgttgatccaagtcccctgcctggtcccccacaaggactcccatccaggccccctctgccctgccccttgtcatggaccatggtcgtgaggaagggctcatgccccttatttatgggaaccatttcattctaacagaataaaccgagaaggaaaccag

SEQ ID NO: 3654 - protein, 1024 aa, Homosapiens; identical to SEQ ID NO: 547

SEQ ID NO: 3655 - DNA, 3925 bp, Homosapiens
gctttttcttccctgatcagaagcttccgtgagggagccacacagaactcaccgagtccctcctggcagaggcggccgtcctctgttgcttccagggacgtggccctcttcccgacctcggtcgcctgagcgcgcagggattggggatccgtagggcactaggacccggcggggcggagggggcagcccatgtgctgcgattcgctccctcccaccccactgctcccgctccattgtctgggaattgcagccgcggggcgggcggcggcggcggcggcggcggccgggacccagcgggccaggtggggacggcgcggagcgggtgcgggagatgccgtgcgggactggggccacctgagccgcccgcctcgtccccgccttctgtgggaaggatgtgcgcgcggatggccggtcgcacaacagcggcccctcgggggccctacggcccctggctctgcctcctggtggccctcgccctggacgtcgtgagagtggactgtggccaggctcccctggaccctgtctacctgccggcagccctggagctcctagacgcccctgaacacttccgtgtgcagcaggtgggccactacccacctgccaactcctctctgagctcccgatctgagacctttctgctcctacagccctggcccagggcccagccacttctccgggcctcctacccaccttttgccactcagcaggtggtcccccctcgagtcactgagccccaccaacggccagtcccatgggacgtgcgggccgtttcagtggaagcggctgtgactccagcagagccctacgcccgggttctcttccacctcaaagggcaggattggccaccagggtctggcagcctgccctgtgcccggctccatgccacacaccctgccggcactgctcaccaagcctgccgcttccagccatccctgggcgcctgcgtggtggagctggagcttccctcgcactggttctcacaggcctccaccacacgggccgagctggcctacacgcttgagcctgcagctgagggccctgggggctgtggctccggcgaggagaacgaccctggggagcaggccctcccagtggggggtgtggagctgcgcccagcagaccccccgcagtaccaggaggtacctctggacgaggctgtgactctgcgggtgcctgacatgccagtgcggcccggccagctctttagtgctaccctcctgcttcggcacaacttcacagccagcctcctgaccctgcggatcaaggtgaagaaggggctgcatgtgacagccgcccgcccagcccagcccacactctggactgccaagctggaccgcttcaagggctccaggcaccacaccaccctcatcacctgccaccgtgctgggctcacagagccagattccagcagtccccttgaactgtctgagttcctatgggtggactttgtggtggagaatagcactggtgggggcgtagcggtcactcgccccgtcacgtggcagctggagtacccaggccaggcccctgaagcagagaaggacaaaatggtgtgggaaatcctggtgtctgagcgggacatcagagcccttatcccactggccaaggctgaggagctggtgaatacagcaccactgactggagtgccccagcatgtccccgtgcgccttgtcactgtggacggcgggggggccttggtggaggtgacagagcatgtcggctgcgagtctgccaacacacaggtcctgcaggtgtctgaggcctgtgatgccgtgttcgtggctggcaaggagagccggggcgcccggggggtgcgagtggacttctggtggcgccggctccgcgcctcgctgcggctgaccgtgtgggcccccctgctaccgctgcgtatcgagctcaccgacaccaccctcgagcaggtccgcggctggagggtacctggccctgctgaagggcctgcggaacccgctgcagaggcgtcggatgaggccgagcggcgcgcccgtggctgccacctgcagtaccagcgggccggtgtgcgcttcctcgcccccttcgcggcccacccgctggacggcggccgccgcctcacgcacctgcttggccccgactggctgctagacgtgtcccacctcgtggcgccacacgcccgcgtgctggactcgcgtgtagcctctctggagggtggccgtgtcgtggtgggccgggagcccggtgtcacctccattgaggtgcgttccccactgtctgactccatcctgggggagcaggcgctggctgtgacggacgacaaggtctcagtgctggagctgagggtgcagccagtgatgggcatctcgctgaccttgagccggggcactgcccaccccggggaggtcacagctacgtgctgggcacagtcagcccttcccgccccaaagcaggaggtggccctctccctatggctgtccttctctgatcacactgtggccccagctgagctctacgaccgccgtgacctgggactgtccgtctcagccgaggagcctggtgccatcctgccagctgaggagcagggtgcccagctcggggtggtggtgagtggggcaggcgccgaggggctgccgctgcatgtggctctgcacccgcccgagccctgccgccggggccgccaccgtgtgcctctggcctctggcaccgcctggctggggctgccccctgcctccactccagcccctgctctcccatccagccctgcttggagcccaccagccacagaagccaccatgggtggtaaacggcaggtggcaggcagtgtcgggggcaacacaggtgtgaggggcaagtttgagcgggcagaggaggaggccaggaaggaggagaccgaagccagggaggaggaggaggaagaggaggaggagatggtccctgcccctcagcatgtcactgagctagagctgggcatgtacgccctgctgggagtcttctgcgtggccatcttcatcttcttggtcaatggtgtggtcttcgtcctgcgctatcagcgcaaagaacctcccgacagtgccactgaccccacctccccccagccccacaactgggtctggctgggcactgaccaggaggaactgagccgccagctggaccggcagtcccctggcccgcccaagggggaggggagctgcccctgtgagagtgggggaggaggggaggcccctaccctggcccctggccctcctgggggcaccaccagctcctcaagcaccctggcccgaaaggaggctggggggcggcggaagcgagtagagtttgtgacatttgcgccagcccctccagcccagtcacctgaggagcctgtaggggcccctgctgtgcagtccatccttgtggcaggcgaggaggacatccgctgggtgtgtgaggacatggggctgaaggaccctgaggagcttcgcaactacatggagaggatccggggcagctcctgaccctccacagccacctggtcagccaccagctggggcaacgagggtggaggtcccactgagcctctcgcctgcccccgccactcgtctggtgcttgttgatccaagtcccctgcctggtcccccacaaggactcccatccaggccccctctgccctgccccttgtcatggaccatggtcgtgaggaagggctcatgccccttatttatgggaaccatttcattctaacagaataaaccgagaaggaaaccagagctgggactgctgccgtctgtccggtagagtgaagcaagggggctggaatagggcctgttcagcccctgtccctgctgaaacggctgtgggaggctgggccctgggacgccctctcatagcgtccagcgatccagacaaataggagagccgtgacggcctgaatgccagccagcaggaagaagtagaggtccatccggcaattgtt

SEQ ID NO: 3656 - protein, 1024 aa, Homosapiens; identical to SEQ ID NO: 547

SEQ ID NO: 3657 - DNA, 766 bp, Homosapiens
cgctccattgtctgggaattgcagccgcggggcgggcggcggcggcggcggcggcggccgggacccagcgggccaggtggggacggcgcggagcgggtgcgggagatgccgtgcgggactggggccacctgagccgcccgcctcgtccccgccttctgtgggaaggatgtgcgcgcggatggccggtcgcacaacagcggcccctcgggggccctacggcccctggctctgcctcctggtggccctcgccctggacgtcgtgagagggctccctgaccttggcgtctccagggatggccgcatccttgccttccagaacctttgagaggattcctgtcactgcgggaaagggcagcaacttccctgtgcttcggggtgggggtcggactcccttggcctgggctagctgggctgtggctgcaaggcaaaggatgccacagaagacagagggacagtgaaacattctctgccctccccaccgagagagccgagcgctgggtgatgggagtccgtgggagtcaggctaagagcatcttgtaattatggaggcaatggagtaggaggcgaacctgaagccagtggctgcccccagagagcagtggtcacttgttacgcttggggcagggggcagggagagcctgtcagtcatatgctccttggtggggagggccaggaaggaggttgaaaccaattcccccacccccacccacagtccagctgtggggctgagagggagctagctgtggggttgctttcagccacctgc

SEQ ID NO: 3658 - protein, 52 aa, Homosapiens
MCARMAGRTTAAPRGPYGPWLCLLVALALDVVRGLPDLGVSRDGRILAFQNL

SEQ ID NO: 3659 - DNA, 2739 bp, Homosapiens
cgctccattgtctgggaattgcagccgcggggcgggcggcggcggcggcggcggcggccgggacccagcgggccaggtggggacggcgcggagcgggtgcgggagatgccgtgcgggactggggccacctgagccgcccgcctcgtccccgccttctgtgggaaggatgtgcgcgcggatggccggtcgcacaacagcggcccctcgggggccctacggcccctggctctgcctcctggtggccctcgccctggacgtcgtgagagtggactgtggccaggctcccctggaccctgggctgcatgtgacagccgcccgcccagcccagcccacactctggactgccaagctggaccgcttcaagggctccaggcaccacaccaccctcatcacctgccaccgtgctgggctcacagagccagattccagcagtccccttgaactgtctgagttcctatgggtggactttgtggtggagaatagcactggtgggggcgtagcggtcactcgccccgtcacgtggcagctggagtacccaggccaggcccctgaagcagagaaggacaaaatggtgtgggaaatcctggtgtctgagcgggacatcagagcccttatcccactggccaaggctgaggagctggtgaatacagcaccactgactggagtgccccagcatgtccccgtgcgccttgtcactgtggacggcgggggggccttggtggaggtgacagagcatgtcggctgcgagtctgccaacacacaggtcctgcaggtgtctgaggcctgtgatgccgtgttcgtggctggcaaggagagccggggcgcccggggggtgcgagtggacttctggtggcgccggctccgcgcctcgctgcggctgaccgtgtgggcccccctgctaccgctgcgtatcgagctcaccgacaccaccctcgagcaggtccgcggctggagggtacctggccctgctgaagggcctgcggaacccgctgcagaggcgtcggatgaggccgagcggcgcgcccgtggctgccacctgcagtaccagcgggccggtgtgcgcttcctcgcccccttcgcggcccacccgctggacggcggccgccgcctcacgcacctgcttggccccgactggctgctagacgtgtcccacctcgtggcgccacacgcccgcgtgctggactcgcgtgtagcctctctggagggtggccgtgtcgtggtgggccgggagcccggtgtcacctccattgaggtgcgttccccactgtctgactccatcctgggggagcaggcgctggctgtgacggacgacaaggtctcagtgctggagctgagggtgcagccagtgatgggcatctcgctgaccttgagccggggcactgcccaccccggggaggtcacagctacgtgctgggcacagtcagcccttcccgccccaaagcaggaggtggccctctccctatggctgtccttctctgatcacactgtggccccagctgagctctacgaccgccgtgacctgggactgtccgtctcagccgaggagcctggtgccatcctgccagctgaggagcagggtgcccagctcggggtggtggtgagtggggcaggcgccgaggggctgccgctgcatgtggctctgcacccgcccgagccctgccgccggggccgccaccgtgtgcctctggcctctggcaccgcctggctggggctgccccctgcctccactccagcccctgctctcccatccagccctgcttggagcccaccagccacagaagccaccatgggtggtaaacggcaggtggcaggcagtgtcgggggcaacacaggtgtgaggggcaagtttgagcgggcagaggaggaggccaggaaggaggagaccgaagccagggaggaggaggaggaagaggaggaggagatggtccctgcccctcagcatgtcactgagctagagctgggcatgtacgccctgctgggagtcttctgcgtggccatcttcatcttcttggtcaatggtgtggtcttcgtcctgcgctatcagcgcaaagaacctcccgacagtgccactgaccccacctccccccagccccacaactgggtctggctgggcactgaccaggaggaactgagccgccagctggaccggcagtcccctggcccgcccaagggggaggggagctgcccctgtgagagtgggggaggaggggaggcccctaccctggcccctggccctcctgggggcaccaccagctcctcaagcaccctggcccgaaaggaggctggggggcggcggaagcgagtagagtttgtgacatttgcgccagcccctccagcccagtcacctgaggagcctgtaggggcccctgctgtgcagtccatccttgtggcaggcgaggaggacatccgctgggtgtgtgaggacatggggctgaaggaccctgaggagcttcgcaactacatggagaggatccggggcagctcctgaccctccacagccacctggtcagccaccagctggggcaacgagggtggaggtcccactgagcctctcgcctgcccccgccactcgtctggtgcttgttgatccaagtcccctgcctggtcccccacaaggactcccatccaggccccctctgccctgccccttgtcatggaccatggtcgtgaggaagggctcatgccccttatttatgggaaccatttcattctaacagaataaaccgagaaggaaaccag

SEQ ID NO: 3660 - protein, 773 aa, Homosapiens
MCARMAGRTTAAPRGPYGPWLCLLVALALDVVRVDCGQAPLDPGLHVTAARPAQPTLWTAKLDRFKGSRHHTTLITCHRAGLTEPDSSSPLELSEFLWVDFVVENSTGGGVAVTRPVTWQLEYPGQAPEAEKDKMVWEILVSERDIRALIPLAKAEELVNTAPLTGVPQHVPVRLVTVDGGGALVEVTEHVGCESANTQVLQVSEACDAVFVAGKESRGARGVRVDFWWRRLRASLRLTVWAPLLPLRIELTDTTLEQVRGWRVPGPAEGPAEPAAEASDEAERRARGCHLQYQRAGVRFLAPFAAHPLDGGRRLTHLLGPDWLLDVSHLVAPHARVLDSRVASLEGGRVVVGREPGVTSIEVRSPLSDSILGEQALAVTDDKVSVLELRVQPVMGISLTLSRGTAHPGEVTATCWAQSALPAPKQEVALSLWLSFSDHTVAPAELYDRRDLGLSVSAEEPGAILPAEEQGAQLGVVVSGAGAEGLPLHVALHPPEPCRRGRHRVPLASGTAWLGLPPASTPAPALPSSPAWSPPATEATMGGKRQVAGSVGGNTGVRGKFERAEEEARKEETEAREEEEEEEEEMVPAPQHVTELELGMYALLGVFCVAIFIFLVNGVVFVLRYQRKEPPDSATDPTSPQPHNWVWLGTDQEELSRQLDRQSPGPPKGEGSCPCESGGGGEAPTLAPGPPGGTTSSSSTLARKEAGGRRKRVEFVTFAPAPPAQSPEEPVGAPAVQSILVAGEEDIRWVCEDMGLKDPEELRNYMERIRGSS

SEQ ID NO: 3661 - DNA, 2526 bp, Homosapiens
gctacatactacctgtgtgaggctctttaagcctcagtgacctcatctgtgaaatggtggtgagaggggaagggacatttacagcccttttctccctcccttgcccacaactactgtgccccagcatggcacccgggtcagcccctgccagctctggagctgtcatcatctctccctcttatgcctcttcagtggactgtggccaggctcccctggaccctgtctacctgccggcagccctggagctcctagacgcccctgaacacttccgtgtgcagcaggtgggccactacccacctgccaactcctctctgagctcccgatctgagacctttctgctcctacagccctggcccagggcccagccacttctccgggcctcctacccaccttttgccactcagcaggtggtcccccctcgagtcactgagccccaccaacggccagtcccatgggacgtgcgggccgtttcagtggaagcggctgtgactccagcagagccctacgcccgggttctcttccacctcaaagggcaggattggccaccagggtctggcagcctgccctgtgcccggctccatgccacacaccctgccggcactgctcaccaagcctgccgcttccagccatccctgggcgcctgcgtggtggagctggagcttccctcgcactggttctcacaggcctccaccacacgggccgagctggcctacacgcttgagcctgcagctgagggccctgggggctgtggctccggcgaggagaacgaccctggggagcaggccctcccagtggggggtgtggagctgcgcccagcagaccccccgcagtaccaggaggtacctctggacgaggctgtgactctgcgggtgcctgacatgccagtgcggcccggccagctctttagtgctaccctcctgcttcggcacaacttcacagccagcctcctgaccctgcggatcaaggtgaagaaggggctgcatgtgacagccgcccgcccagcccagcccacactctggactgccaagctggaccgcttcaagggctccaggcaccacaccaccctcatcacctgccaccgtgctgggctcacagagccagattccagcagtccccttgaactgtctgagttcctatgggtggactttgtggtggagaatagcactggtgggggcgtagcggtcactcgccccgtcacgtggcagctggagtacccaggccaggcccctgaagcagagaaggacaaaatggtgtgggaaatcctggtgtctgagcgggacatcagagcccttatcccactggccaaggctgaggagctggtgaatacagcaccactgactggagtgccccagcatgtccccgtgcgccttgtcactgtggacggcgggggggccttggtggaggtgacagagcatgtcggctgcgagtctgccaacacacaggtcctgcaggtgtctgaggcctgtgatgccgtgttcgtggctggcaaggagagccggggcgcccggggggtgcgagtggacttctggtggcgccggctccgcgcctcgctgcggctgaccgtgtgggcccccctgctaccgctgcgtatcgagctcaccgacaccaccctcgagcaggtccgcggctggagggtacctggccctgctgaagggtgagtggaggcctgaggaagctggcaggccttggcgagtcacactgggacggagagggcgcaggggacacagccatgggcccaagtcggggtcagaaaaactgccctgttgcttgcagttccttctgcccacctccaccctgggccgcccagccaatgatcgctttctgtgaaattgctgacttccgcatccctctcctccttccctgcctcacttctcccgtagcaccctccacttcctaatctacgtcagtactggttaatgttgcctgtccatcctttccacgctcctcccccgagaatgtcagccccttgaagctgcggtctgtctatgctggtcgtaccctcagagcctaagatgacacagagctcaggaaatgaacaccctcggagggggctccccaaaacccagggagaggtggcccacgcctctggaatctagcttccaggcccttcagagagtgagcgcccccagggtccccgtaagagagcgtctcccctgcggtccacttgggagcaagagcggtgatcgaggcacagcgccagtcgggagtgggctggggcggctcgcctgcaggtggaagggcctgaccccaagaggggcggatgtctgcgtttgagaaacaggagctgctggtgattaggagccgccggggacgagctgcgggtctccagcagctgggccctgggcaggctggggccgctcagcgctgacggccagtcccggcctccccgccctgcaggcctgcggaacccgctgcagaggcgtcggatgaggccgagcggcgcgcccgtggctgccacctgcagtaccagcgggccggtgtgcgcttcctcgcccccttcgcggcccacccgctggacggcggccg

SEQ ID NO: 3662 - protein, 534 aa, Homosapiens [sequence omitted]

SEQ ID NO: 3663 - DNA, 4040 bp, Homosapiens
gctacatactacctgtgtgaggctctttaagcctcagtgacctcatctgtgaaatggtggtgagaggggaagggacatttacagcccttttctccctcccttgcccacaactactgtgccccagcatggcacccgggtcagcccctgccagctctggagctgtcatcatctctccctcttatgcctcttcagtggactgtggccaggctcccctggaccctgtctacctgccggcagccctggagctcctagacgcccctgaacacttccgtgtgcagcaggtgggccactacccacctgccaactcctctctgagctcccgatctgagacctttctgctcctacagccctggcccagggcccagccacttctccgggcctcctacccaccttttgccactcagcaggtggtcccccctcgagtcactgagccccaccaacggccagtcccatgggacgtgcgggccgtttcagtggaagcggctgtgactccagcagagccctacgcccgggttctcttccacctcaaagggcaggattggccaccagggtctggcagcctgccctgtgcccggctccatgccacacaccctgccggcactgctcaccaagcctgccgcttccagccatccctgggcgcctgcgtggtggagctggagcttccctcgcactggttctcacaggcctccaccacacgggccgagctggcctacacgcttgagcctgcagctgagggccctgggggctgtggctccggcgaggagaacgaccctggggagcaggccctcccagtggggggtgtggagctgcgcccagcagaccccccgcagtaccaggaggtacctctggacgaggctgtgactctgcgggtgcctgacatgccagtgcggcccggccagctctttagtgctaccctcctgcttcggcacaacttcacagccagcctcctgaccctgcggatcaaggtgaagaaggggctgcatgtgacagccgcccgcccagcccagcccacactctggactgccaagctggaccgcttcaagggctccaggcaccacaccaccctcatcacctgccaccgtgctgggctcacagagccagattccagcagtccccttgaactgtctgagttcctatgggtggactttgtggtggagaatagcactggtgggggcgtagcggtcactcgccccgtcacgtggcagctggagtacccaggccaggcccctgaagcagagaaggacaaaatggtgtgggaaatcctggtgtctgagcgggacatcagagcccttatcccactggccaaggtaaggagacctccatctctgcctgggaaggctggaggccaagtcccaggagccccatgagctgaggggcctggggctgagcccctcctccacccccaggctgaggagctggtgaatacagcaccactgactggagtgccccagcatgtccccgtgcgccttgtcactgtggacggcgggggggccttggtggaggtgacagagcatgtcggctgcgagtctgccaacacacaggtcctgcaggtgagtggcaggtgcccagctcatgtgagtctgcatttgtgtgggcacagttacgcacacacacctttcctccttcctcatgtgggtccccaagagaacagcttcttcttgagacgagaaacctcatgggaggaaccacagcttcaacttcttttgttccagccacctctctcccgagtcaagtaaccctaacagccccccgaccttagacactttcacgctcattattgcactggcaagtgcgctggcctgagagagtcgagagcacatactctgggatcagaaagttttagtttgaaacacatctttgttgtcaaccagctttgtgatcatgggctggtctcttaacctctctgagcctcgttacctaaactttaaaatgagaacatatcttcgggttgttgtaagaattaaaagcactttaagacagtatttagcagatagcaggggctgaaacaatggcagttattgctgttataatatgatgtaataattatacaatggtaaaaattattattattattattaccggtgattgtgaagtgaaataaaagggagggtggtagagcaacttcctctatcttgaagttctaagaggggaagcatggagtctgcatgtatgcaaatcccagccacctgaagggggaaggtgcctttccccacttgtggtcctttgctcaaatgtgtgtggttcctgctggagggccttggtgggagatctgctttgtcccacctctgcctacctggctgtagctggttgccaggtggctccaagagcaatgtcaaaggccagcatgaataaggagccaaagttttgggttcacacccctgctctgccaggaggaagactggtatgcaatggccagttcccctgactgagccccagggaacctcaaggaatggcccctacagtaaaatcttaaacaaagaacaggggcttaaccaacaatcctgctgcaacatgcattccagtgacacacagagctgaactcagtgggagcccgtcctacggcctgaggtcagggctgctctcttctggcccatgccttttttttttttttaatctatttattttgaaacagagtctcactctgtccccaggctggagtgcaatggtacagtccggctcactgcagtctcagctacccaggctcaagggatcctcccacctcagcctccccagtagctaggactacaggcatgtgccaccacacccggctgatttattgtattttttgtagagagggagttttgccatgttgcccaggctggtctcaaactcctggactcaagcgatccacccacctcggcctctcagagtgctgggactacaggcatgagccacccacccggcccagcctcacacctgtctttagtggcttagcccgcccacctgccctctgcccttccataggtgtctgaggcctgtgatgccgtgttcgtggctggcaaggagagccggggcgcccggggggtgcgagtggacttctggtggcgccggctccgcgcctcgctgcggctgaccgtgtgggcccccctgctaccgctgcgtatcgagctcaccgacaccaccctcgagcaggtccgcggctggagggtacctggccctgctgaagggtgagtggaggcctgaggaagctggcaggccttggcgagtcacactgggacggagagggcgcaggggacacagccatgggcccaagtcggggtcagaaaaactgccctgttgcttgcagttccttctgcccacctccaccctgggccgcccagccaatgatcgctttctgtgaaattgctgacttccgcatccctctcctccttccctgcctcacttctcccgtagcaccctccacttcctaatctacgtcagtactggttaatgttgcctgtccatcctttccacgctcctcccccgagaatgtcagccccttgaagctgcggtctgtctatgctggtcgtaccctcagagcctaagatgacacagagctcaggaaatgaacaccctcggagggggctccccaaaacccagggagaggtggcccacgcctctggaatctagcttccaggcccttcagagagtgagcgcccccagggtccccgtaagagagcgtctcccctgcggtccacttgggagcaagagcggtgatcgaggcacagcgccagtcgggagtgggctggggcggctcgcctgcaggtggaagggcctgaccccaagaggggcggatgtctgcgtttgagaaacaggagctgctggtgattaggagccgccggggacgagctgcgggtctccagcagctgggccctgggcaggctggggccgctcagcgctgacggccagtcccggcctccccgccctgcaggcctgcggaacccgctgcagaggcgtcggatgaggccgagcggcgcgcccgtggctgccacctgcagtaccagcgggccggtgtgcgcttcctcgcccccttcgcggcccacccgctggacggcggccgc

SEQ ID NO: 3664 - protein, 437 aa, Homosapiens
MVVRGEGTFTALFSLPCPQLLCPSMAPGSAPASSGAVIISPSYASSVDCGQAPLDPVYLPAALELLDAPEHFRVQQVGHYPPANSSLSSRSETFLLLQPWPRAQPLLRASYPPFATQQVVPPRVTEPHQRPVPWDVRAVSVEAAVTPAEPYARVLFHLKGQDWPPGSGSLPCARLHATHPAGTAHQACRFQPSLGACVVELELPSHWFSQASTTRAELAYTLEPAAEGPGGCGSGEENDPGEQALPVGGVELRPADPPQYQEVPLDEAVTLRVPDMPVRPGQLFSATLLLRHNFTASLLTLRIKVKKGLHVTAARPAQPTLWTAKLDRFKGSRHHTTLITCHRAGLTEPDSSSPLELSEFLWVDFVVENSTGGGVAVTRPVTWQLEYPGQAPEAEKDKMVWEILVSERDIRALIPLAKVRRPPSLPGKAGGQVPGAP

SEQ ID NO: 3665 - DNA, 599 bp, Homosapiens
cccacctccccccagccccacaactgggtctggctgggcactgaccaggaggaactgagccgccagctggaccggcagtcccctggcccgcccaagggggaggggagctgcccctgtgagagtgggggaggaggggaggcccctaccctggcccctggccctcctgggggcaccaccagctcctcaagcaccctggcccgaaaggaggctggggggcggcggaagcgagtagagtttgtgacatttgcgccagcccctccagcccagtcacctgaggagcctgtaggggcccctgctgtgcagtccatccttgtggcaggcgaggaggacatccgctgggtgtgtgaggacatggggctgaaggaccctgaggagcttcgcaactacatggagaggatccggggcagctcctgaccctccacagccacctggtcagccaccagctggggcaacgagggtggaggtcccactgagcctctcgcctgcccccgccactcgtctggtgcccttgtcatggaccatggtcgtgaggaagggctcatgccccttatttatgggaaccatttcattctaacagaataaaccgagaaggaaaccag

SEQ ID NO: 3666 - protein, 57 aa, Homosapiens
AASWTGSPLARPRGRGAAPVRVGEEGRPLPWPLALLGAPPAPQAPWPERRLGGGGSE

SEQ ID NO: 3667 - DNA, 5176 bp, Homosapiens
atcacagaggcccagggcatgtggaaagggggaaagtctgggaataaagtgaggtgctgccccgtaccagctagcatggggcctggcacaaagccgtctcagcaatccaactccctcggtggtacggcaagaggaactctggagacagcttcctcctgctatacctcctgcgggagttgaattactgggatggctttgtgccaggctaggtccttgaataagtcacctcatctctctgggcctgtttcctcatgtgtacaatgggtggcttaaacgagaggcttttccagctctgctgcattcagattgtccgacttggtagctgaggcctagagagggtgtgtcagttgcccaaggccccacggcaggcaggtcaggggcaagctcacaaaagtgagtactttgcaacagtggttccccagcctggctgtgcttcagaatcaccggcagagcttttaaaaatatgctgttttaaaaacagattccaagtccaaccacaggctattgaatcagaattgctggggaagtttctagtttaagaaacttttcagatgatacagatactcagagttgagaactattgtcttccactcaccatattactcctcagtggggaggttagtgatgtgtttgtgtgtgtgtgtgtgtgtgtgtgtgtgtgtgtgtgtgtgtgtgtgtgtgataggagggtgggcagcagcttaatgctagcccccaggccataaggtcattgccttccatacccccttcacaggaacatttgttggagctcccagcctgctacttaggggcacacagtatttctatgatgagatggcggcatgtggtgggagggtgtccatggctgattctcagtcataccaatcagatactgacttccttccataccagttggtaaatggctgctgccctgagcagtccacatgctctcccctgccccagcccttcctgtgggagtctcctggatcctactccattatatagcaactaaaggggcagtgcgtggtattggaggtggcccctgggccctgctcctgcagctgtgtccagagccattctggcaagtccatgtctatgcagtgcttgtgtcaacctgtggactcagcttggcttcagtgtcagatgagaactccctgtgggggcagccattatctttcccatttcagcaaacatttatccatgcttaccctgtgctgggccctggggacacaaatactagtcagaccagctgtgcctgggctctgggataaggctgcacgcactgcctacaggcctgagagcagagcacaggaagctccctgcccagcccagctacctaggagaaaggagggtgggaaggtgactatctccctgagactgggagaggggacagctgcccagctgtcctgtggtacggcgctgaggaatgccacctaggagttgggagggggcatggccgtttctgttccagcctcacccctgtctctcttggcagatgcagtccacctatgtcctgcagggtcttcacctccacatcccaaacattttcccagccaacccggccaacatctctgtggccctgagagcccagggcagcagctacacggtgagagataaagcatgtgttcggcacccagttcagccaggtagcggcttcctctgagaagaggaggaaatgaaactgccttcacactcccctttcctgcctgcaaggcaacctcaggatacaggaaaagcacctggagggtgggaggacttgtgtcacagcgcagggatcctgccaagatgctcaactgcttgaaggaattcaggccagctgcacacccccatgctgctgctctgaagcaggtctcgctgcctaatttgcaccctcagatcaagcatacttaggtcccttttcaactcttccttgtcccctctttctctgggacccttagatacctagatctctgcctttcccagaactttctaaaccagttccttggcatttcagactcatgaaatgaatgatctgcagagctggcagatatatgagaaatttgccattgtagtccatttccttgcccatggcagacatcactagtcaatcatgactttttttatgctgagcccataaatgttccataatcagccactaccaattgataaaagttagaatacaagaggaacctatttgccatctctacataatcccactccctggttacacagctgaggagcatgaactccagagagggaaaggagctggaccccagggtcacccagggccagtctagagtccaggtctcctgactgcagccaggctccttgcactctgctagcctgcctctcctgacttcctcctgcccagatcccggaagcctggctcctcctggccaatgttgtggtggtgctgattctggtccctctgaaggaccgcttgatcgaccctttactgctgcggtgcaagctgcttccctctgctctgcagaagatggcgctggggatgttctttggttttacctccgtcattgtggcaggtgtgcagaggggtgtggggcagggggctgaactttgggcttggggaagtctgcttccaccatgggctgatgctgaagtggtagcctggaccaagttcagcctctcccagtgggcgtcagtgttggcttcccagaggtgcaagctgaaagagaccctcctatctaatccagctgcccctcattttgacagaagaagaaactcaggccgagagaggaacaaatattttcccccagtgaattatcagctccttgaaggcagagatagtttttctttttttattcactgctatgaacatgcacgtgggccctccataaatgtgttgaatgaattttccacttagtggcaaatgaagacttaaaaaaaaattatcttccttcttccatttcaaaaggatctgaagccatttgttacaaagtgggggttggtgggggcagtgggggggatcagctaaagaagtctttcacactgttgcacaaacctgaaccctttttacttagtaactttatgaccctgaagttccttagagtctctgagctatgtctttaaaatggggacaggtgtcattcggaccctgagcagggctctgcccttgtggaactcagtctgatggggggtgttgtgaggattacagcagatgaagtctgtaaagcactcagtagtgtgcctggatcacaagtatgagctggagaaatgaaagctccataaacggtattgtgttgaaagtgtgaaaacccaactagattttattccagctatatccttaaagcagtttgtcctattttatcctcacaataatcctgggaatgttattcctgcttcttgagtaagggaactgagtctagagaggttaagtgatttgcccaaggtcacacagctagccaggctgggaacccaggtcccccaactccatgtccaatgttcattccactagagcacagctatctcccaagcaacacaggagaaggagataacatagttaaacttgaaagccaggttagaaacactacagcaatacttgacgttgcagtagagaagtcatgtgatatcatggaaagtaggccagctttgaaaccagacataccagagctcaaatccagccctgactacttatcagctgtgtgactgtgggctagttgcttaactttctagttaagcacttgaaagtgctagttatttcactttcttccgcagcaaggatgcatggtaaatgcctagcacataacaggttctccattaatgagagttgttagtgttattgagtgcaaaactcagcttggagcttctagcagccaagaccaaaagggaggagttggtcacatcttggccccctcctccaccccccagtccagcattcttttccttgcctgctgctcaatctttggctgcttcatgagtaccccatccccaccatgtacaagctcttctgtgggctaagctgcctggggtgggcctgactataatccccctctgctcctccaccaggagtcctggagatggagcgcttacactacatccaccacaacgagaccgtgtcccagcagattggggaggtcctgtacaacgcggcaccactgtccatctggtggcagatccctcagtacctgctcattgggatcagtgagatctttgccagcatcccaggcctggagtttgcctactcagaggccccgcgctccatgcagggtgccatcatgggcatcttcttctgcctgtcgggggtgggctcactgttgggctccagcctagtggcactgctgtccttgcccgggggctggctgcactgccccaaggactttgggaacatcaacaattgccggatggacctctacttcttcctgctggctggcattcaggccgtcacggctctcctatttgtctggatcgctggacgctatgagagggcgtcccagggcccagcctcccacagccgtttcagcagggacaggggctgaacaggccctattccagcccccttgcttcactctaccggacagacggcagcagtcccagctctggtttccttctcggtttattctgttagaatgaaatggttcccataaataaggggcatgagcccttcctcacgaccatggtccatgacaaggggcagggcagagggggcctggatgggagtccttgtgggggaccaggcaggggacttggatcaacaagcaccagacgagtggcgggggcaggcgagaggctcagtgggacctccaccctcgttgccccagctggtggctgaccaggtggctgtggagggtcaggagctgccccggatcctctccatgtagttgcgaagctcctcagggtccttcagccccatgtcctcacacacccagcggatgtcctcctcgcctgccacaaggatggactgcacagcaggggcccctacaggctcctcaggtgactgggctggaggggctggcgcaaatgtcacaaactctactcgcttccgccgccccccagcctcctttcgggccagggtgcttgaggagctggtggtgcccccaggagggccaggggccagggtaggggcctcccctcctcccccactctcacaggggcagctcccctcccccttgggcgggccaggggactgccggtccagctggcggctcagttcctcctggtcagtgcccagccagacccagttgtggggctggggggaggtggg

SEQ ID NO: 3668 - protein, 152 aa, Homosapiens [sequence omitted]

SEQ ID NO: 3669 - DNA, 2705 bp, Homosapiens
ggagttgagaattagggaggaggtggtagagtccgggtagtgagcggagggacaggaagggtagggcaagaaagggagaggggacaggagggaagggtgggccaaagcggtgagaaaggagggccagccagttgggtgggggagagggccgaggcccgggggcaggagtgcagggctctgaggcggggagaggagaggagagaagagccgcggggggcccagcccggagccaggatgcccgcgccgcgcgcccgggagcagccccgcgtgcccggggagcgccagccgctgctgcctcgcggtgcgcggggccctcgacggtggcggcgggcggcgggcgcggccgtgctgctggtggagatgctggagcgcgccgccttcttcggcgtcaccgccaacctcgtgctgtacctcaacagcaccaacttcaactggaccggcgagcaggcgacgcgcgccgcgctggtattcctgggcgcctcctacctgctggcgcccgtgggcggctggctggccgacgtgtacctgggccgctaccgcgcggtcgcgctcagcctgctgctctacctggccgcctcgggcctgctgcccgccaccgccttccccgacggccgcagctccttctgcggagagatgcccgcgtcgccgctgggacctgcctgcccctcggccggctgcccgcgctcctcgcccagcccctactgcgcgcccgtcctctacgcgggcctgctgctactcggcctggccgccagctccgtccggagcaacctcacctccttcggtgccgaccaggtgatggatctcggccgcgacgccacccgccgcttcttcaactggttttactggagcatcaacctgggtgctgtgctgtcgctgctggtggtggcgtttattcagcagaacatcagcttcctgctgggctacagcatccctgtgggctgtgtgggcctggcatttttcatcttcctctttgccacccccgtcttcatcaccaagcccccgatgggcagccaagtgtcctctatgcttaagctcgctctccaaaactgctgcccccagctgtggcaacgacactcggccagagaccgtcaatgtgcccgcgtgctggccgacgagaggtctccccagccaggggcttccccgcaagaggacatcgccaacttccaggtgctggtgaagatcttgcccgtcatggtgaccctggtgccctactggatggtctacttccagatgcagtccacctatgtcctgcagggtcttcacctccacatcccaaacattttcccagccaacccggccaacatctctgtggccctgagagcccagggcagcagctacacgatcccggaagcctggctcctcctggccaatgttgtggtggtgctgattctggtccctctgaaggaccgcttgatcgaccctttactgctgcggtgcaagctgcttccctctgctctgcagaagatggcgctggggatgttctttggttttacctccgtcattgtggcaggagtcctggagatggagcgcttacactacatccaccacaacgagaccgtgtcccagcagattggggaggtcctgtacaacgcggcaccactgtccatctggtggcagatccctcagtacctgctcattgggatcagtgagatctttgccagcatcccaggcctggagtttgcctactcagaggccccgcgctccatgcagggtgccatcatgggcatcttcttctgcctgtcgggggtgggctcactgttgggctccagcctagtggcactgctgtccttgcccgggggctggctgcactgccccaaggactttgggaacatcaacaattgccggatggacctctacttcttcctgctggctggcattcaggccgtcacggctctcctatttgtctggatcgctggacgctatgagagggcgtcccagggcccagcctcccacagccgtttcagcagggacaggggctgaacaggccctattccagcccccttgcttcactctaccggacagacggcagcagtcccagctctggtttccttctcggtttattctgttagaatgaaatggttcccataaataaggggcatgagcccttcctcacgaccatggtccatgacaaggggcagggcagagggggcctggatgggagtccttgtgggggaccaggcaggggacttggatcaacaagcaccagacgagtggcgggggcaggcgagaggctcagtgggacctccaccctcgttgccccagctggtggctgaccaggtggctgtggagggtcaggagctgccccggatcctctccatgtagttgcgaagctcctcagggtccttcagccccatgtcctcacacacccagcggatgtcctcctcgcctgccacaaggatggactgcacagcaggggcccctacaggctcctcaggtgactgggctggaggggctggcgcaaatgtcacaaactctactcgcttccgccgccccccagcctcctttcgggccagggtgcttgaggagctggtggtgcccccaggagggccaggggccagggtaggggcctcccctcctcccccactctcacaggggcagctcccctcccccttgggcgggccaggggactgccggtccagctggcggctcagttcctcctggtcagtgcccagccagacccagttgtggggctggggggaggtggg

SEQ ID NO: 3670 - protein, 581 aa, Homosapiens; identical to SEQ ID NO: 551

SEQ ID NO: 3671 - DNA, 4587 bp, Homosapiens
atcacagaggcccagggcatgtggaaagggggaaagtctgggaataaagtgaggtgctgccccgtaccagctagcatggggcctggcacaaagccgtctcagcaatccaactccctcggtggtacggcaagaggaactctggagacagcttcctcctgctatacctcctgcgggagttgaattactgggatggctttgtgccaggctaggtccttgaataagtcacctcatctctctgggcctgtttcctcatgtgtacaatgggtggcttaaacgagaggcttttccagctctgctgcattcagattgtccgacttggtagctgaggcctagagagggtgtgtcagttgcccaaggccccacggcaggcaggtcaggggcaagctcacaaaagtgagtactttgcaacagtggttccccagcctggctgtgcttcagaatcaccggcagagcttttaaaaatatgctgttttaaaaacagattccaagtccaaccacaggctattgaatcagaattgctggggaagtttctagtttaagaaacttttcagatgatacagatactcagagttgagaactattgtcttccactcaccatattactcctcagtggggaggttagtgatgtgtttgtgtgtgtgtgtgtgtgtgtgtgtgtgtgtgtgtgtgtgtgtgtgtgtgataggagggtgggcagcagcttaatgctagcccccaggccataaggtcattgccttccatacccccttcacaggaacatttgttggagctcccagcctgctacttaggggcacacagtatttctatgatgagatggcggcatgtggtgggagggtgtccatggctgattctcagtcataccaatcagatactgacttccttccataccagttggtaaatggctgctgccctgagcagtccacatgctctcccctgccccagcccttcctgtgggagtctcctggatcctactccattatatagcaactaaaggggcagtgcgtggtattggaggtggcccctgggccctgctcctgcagctgtgtccagagccattctggcaagtccatgtctatgcagtgcttgtgtcaacctgtggactcagcttggcttcagtgtcagatgagaactccctgtgggggcagccattatctttcccatttcagcaaacatttatccatgcttaccctgtgctgggccctggggacacaaatactagtcagaccagctgtgcctgggctctgggataaggctgcacgcactgcctacaggcctgagagcagagcacaggaagctccctgcccagcccagctacctaggagaaaggagggtgggaaggtgactatctccctgagactgggagaggggacagctgcccagctgtcctgtggtacggcgctgaggaatgccacctaggagttgggagggggcatggccgtttctgttccagcctcacccctgtctctcttggcagatgcagtccacctatgtcctgcagggtcttcacctccacatcccaaacattttcccagccaacccggccaacatctctgtggccctgagagcccagggcagcagctacacggtgagagataaagcatgtgttcggcacccagttcagccaggtagcggcttcctctgagaagaggaggaaatgaaactgccttcacactcccctttcctgcctgcaaggcaacctcaggatacaggaaaagcacctggagggtgggaggacttgtgtcacagcgcagggatcctgccaagatgctcaactgcttgaaggaattcaggccagctgcacacccccatgctgctgctctgaagcaggtctcgctgcctaatttgcaccctcagatcaagcatacttaggtcccttttcaactcttccttgtcccctctttctctgggacccttagatacctagatctctgcctttcccagaactttctaaaccagttccttggcatttcagactcatgaaatgaatgatctgcagagctggcagatatatgagaaatttgccattgtagtccatttccttgcccatggcagacatcactagtcaatcatgactttttttatgctgagcccataaatgttccataatcagccactaccaattgataaaagttagaatacaagaggaacctatttgccatctctacataatcccactccctggttacacagctgaggagcatgaactccagagagggaaaggagctggaccccagggtcacccagggccagtctagagtccaggtctcctgactgcagccaggctccttgcactctgctagcctgcctctcctgacttcctcctgcccagatcccggaagcctggctcctcctggccaatgttgtggtggtgctgattctggtccctctgaaggaccgcttgatcgaccctttactgctgcggtgcaagctgcttccctctgctctgcagaagatggcgctggggatgttctttggttttacctccgtcattgtggcaggtgtgcagaggggtgtggggcagggggctgaactttgggcttggggaagtctgcttccaccatgggctgatgctgaagtggtagcctggaccaagttcagcctctcccagtgggcgtcagtgttggcttcccagaggtgcaagctgaaagagaccctcctatctaatccagctgcccctcattttgacagaagaagaaactcaggccgagagaggaacaaatattttcccccagtgaattatcagctccttgaaggcagagatagtttttctttttttattcactgctatgaacatgcacgtgggccctccataaatgtgttgaatgaattttccacttagtggcaaatgaagacttaaaaaaaaattatcttccttcttccatttcaaaaggatctgaagccatttgttacaaagtgggggttggtgggggcagtgggggggatcagctaaagaagtctttcacactgttgcacaaacctgaaccctttttacttagtaactttatgaccctgaagttccttagagtctctgagctatgtctttaaaatggggacaggtgtcattcggaccctgagcagggctctgcccttgtggaactcagtctgatggggggtgttgtgaggattacagcagatgaagtctgtaaagcactcagtagtgtgcctggatcacaagtatgagctggagaaatgaaagctccataaacggtattgtgttgaaagtgtgaaaacccaactagattttattccagctatatccttaaagcagtttgtcctattttatcctcacaataatcctgggaatgttattcctgcttcttgagtaagggaactgagtctagagaggttaagtgatttgcccaaggtcacacagctagccaggctgggaacccaggtcccccaactccatgtccaatgttcattccactagagcacagctatctcccaagcaacacaggagaaggagataacatagttaaacttgaaagccaggttagaaacactacagcaatacttgacgttgcagtagagaagtcatgtgatatcatggaaagtaggccagctttgaaaccagacataccagagctcaaatccagccctgactacttatcagctgtgtgactgtgggctagttgcttaactttctagttaagcacttgaaagtgctagttatttcactttcttccgcagcaaggatgcatggtaaatgcctagcacataacaggttctccattaatgagagttgttagtgttattgagtgcaaaactcagcttggagcttctagcagccaagaccaaaagggaggagttggtcacatcttggccccctcctccaccccccagtccagcattcttttccttgcctgctgctcaatctttggctgcttcatgagtaccccatccccaccatgtacaagctcttctgtgggctaagctgcctggggtgggcctgactataatccccctctgctcctccaccaggagtcctggagatggagcgcttacactacatccaccacaacgagaccgtgtcccagcagattggggaggtcctgtacaacgcggcaccactgtccatctggtggcagatccctcagtacctgctcattgggatcagtgagatctttgccagcatcccaggcctggagtttgcctactcagaggccccgcgctccatgcagggtgccatcatgggcatcttcttctgcctgtcgggggtgggctcactgttgggctccagcctagtggcactgctgtccttgcccgggggctggctgcactgccccaaggactttgggaacatcaacaattgccggatggacctctacttcttcctgctggctggcattcaggccgtcacggctctcctatttgtctggatcgctggacgctatgagagggcgtcccagggcccagcctcccacagccgtttcagcagggacaggggctgaacaggccctattccagcccccttgcttcactctaccggacagacggcagcagtcccagctctggtttccttctcggtttattctgttagaatgaaatggttcccataaataaggggcatgagcccttcctcacgac

SEQ ID NO: 3672 - protein, 152 aa, Homosapiens [sequence omitted]

SEQ ID NO: 3673 - DNA, 1889 bp, Homosapiens
gggtagggcaagaaagggagaggggacaggagggaagggtgggccaaagcggtgagaaaggagggccagccagttgggtgggggagagggccgaggcccgggggcaggagtgcagggctctgaggcggggagaggagaggagagaagagccgcggggggcccagcccggagccaggatgcccgcgccgcgcgcccgggagcagccccgcgtgcccggggagcgccagccgctgctgcctcgcggtgcgcggggccctcgacggtggcggcgggcggcgggcgcggccgtgctgctggtggagatgctggagcgcgccgccttcttcggcgtcaccgccaacctcgtgctgtacctcaacagcaccaacttcaactggaccggcgagcaggcgacgcgcgccgcgctggtattcctgggcgcctcctacctgctggcgcccgtgggcggctggctggccgacgtgtacctgggccgctaccgcgcggtcgcgctcagcctgctgctctacctggccgcctcgggcctgctgcccgccaccgccttccccgacggccgcagctccttctgcggagagatgcccgcgtcgccgctgggacctgcctgcccctcggccggctgcccgcgctcctcgcccagcccctactgcgcgcccgtcctctacgcgggcctgctgctactcggcctggccgccagctccgtccggagcaacctcacctccttcggtgccgaccaggtgatggatctcggccgcgacgccacccgccgcttcttcaactggttttactggagcatcaacctgggtgctgtgctgtcgctgctggtggtggcgtttattcagcagaacatcagcttcctgctgggctacagcatccctgtgggctgtgtgggcctggcatttttcatcttcctctttgccacccccgtcttcatcaccaagcccccgatgggcagccaagtgtcctctatgcttaagctcgctctccaaaactgctgcccccagctgtggcaacgacactcggccagagaccgtcaatgtgcccgcgtgctggccgacgagaggtctccccagccaggggcttccccgcaagaggacatcgccaacttccaggtgctggtgaagatcttgcccgtcatggtgaccctggtgccctactggatggtctacttccagatgcagtccacctatgtcctgcagggtcttcacctccacatcccaaacattttcccagccaacccggccaacatctctgtggccctgagagcccagggcagcagctacacggagtcctggagatggagcgcttacactacatccaccacaacgagaccgtgtcccagcagattggggaggtcctgtacaacgcggcaccactgtccatctggtggcagatccctcagtacctgctcattgggatcagtgagatctttgccagcatcccaggcctggagtttgcctactcagaggccccgcgctccatgcagggtgccatcatgggcatcttcttctgcctgtcgggggtgggctcactgttgggctccagcctagtggcactgctgtccttgcccgggggctggctgcactgccccaaggactttgggaacatcaacaattgccggatggacctctacttcttcctgctggctggcattcaggccgtcacggctctcctatttgtctggatcgctggacgctatgagagggcgtcccagggcccagcctcccacagccgtttcagcagggacaggggctgaacaggccctattccagcccccttgcttcactctaccggacagacggcagcagtcccagctctggtttccttctcggtttattctgttagaatgaaatggttcccataaataaggggcatgagcccttcctcacgac

SEQ ID NO: 3674 - protein, 456 aa, Homosapiens
MPAPRAREQPRVPGERQPLLPRGARGPRRWRRAAGAAVLLVEMLERAAFFGVTANLVLYLNSTNFNWTGEQATRAALVFLGASYLLAPVGGWLADVYLGRYRAVALSLLLYLAASGLLPATAFPDGRSSFCGEMPASPLGPACPSAGCPRSSPSPYCAPVLYAGLLLLGLAASSVRSNLTSFGADQVMDLGRDATRRFFNWFYWSINLGAVLSLLVVAFIQQNISFLLGYSIPVGCVGLAFFIFLFATPVFITKPPMGSQVSSMLKLALQNCCPQLWQRHSARDRQCARVLADERSPQPGASPQEDIANFQVLVKILPVMVTLVPYWMVYFQMQSTYVLQGLHLHIPNIFPANPANISVALRAQGSSYTESWRWSAYTTSTTTRPCPSRLGRSCTTRHHCPSGGRSLSTCSLGSVRSLPASQAWSLPTQRPRAPCRVPSWASSSACRGWAHCWAPA

SEQ ID NO: 3675 - DNA, 2116 bp, Homosapiens
ggagttgagaattagggaggaggtggtagagtccgggtagtgagcggagggacaggaagggtagggcaagaaagggagaggggacaggagggaagggtgggccaaagcggtgagaaaggagggccagccagttgggtgggggagagggccgaggcccgggggcaggagtgcagggctctgaggcggggagaggagaggagagaagagccgcggggggcccagcccggagccaggatgcccgcgccgcgcgcccgggagcagccccgcgtgcccggggagcgccagccgctgctgcctcgcggtgcgcggggccctcgacggtggcggcgggcggcgggcgcggccgtgctgctggtggagatgctggagcgcgccgccttcttcggcgtcaccgccaacctcgtgctgtacctcaacagcaccaacttcaactggaccggcgagcaggcgacgcgcgccgcgctggtattcctgggcgcctcctacctgctggcgcccgtgggcggctggctggccgacgtgtacctgggccgctaccgcgcggtcgcgctcagcctgctgctctacctggccgcctcgggcctgctgcccgccaccgccttccccgacggccgcagctccttctgcggagagatgcccgcgtcgccgctgggacctgcctgcccctcggccggctgcccgcgctcctcgcccagcccctactgcgcgcccgtcctctacgcgggcctgctgctactcggcctggccgccagctccgtccggagcaacctcacctccttcggtgccgaccaggtgatggatctcggccgcgacgccacccgccgcttcttcaactggttttactggagcatcaacctgggtgctgtgctgtcgctgctggtggtggcgtttattcagcagaacatcagcttcctgctgggctacagcatccctgtgggctgtgtgggcctggcatttttcatcttcctctttgccacccccgtcttcatcaccaagcccccgatgggcagccaagtgtcctctatgcttaagctcgctctccaaaactgctgcccccagctgtggcaacgacactcggccagagaccgtcaatgtgcccgcgtgctggccgacgagaggtctccccagccaggggcttccccgcaagaggacatcgccaacttccaggtgctggtgaagatcttgcccgtcatggtgaccctggtgccctactggatggtctacttccagatgcagtccacctatgtcctgcagggtcttcacctccacatcccaaacattttcccagccaacccggccaacatctctgtggccctgagagcccagggcagcagctacacgatcccggaagcctggctcctcctggccaatgttgtggtggtgctgattctggtccctctgaaggaccgcttgatcgaccctttactgctgcggtgcaagctgcttccctctgctctgcagaagatggcgctggggatgttctttggttttacctccgtcattgtggcaggagtcctggagatggagcgcttacactacatccaccacaacgagaccgtgtcccagcagattggggaggtcctgtacaacgcggcaccactgtccatctggtggcagatccctcagtacctgctcattgggatcagtgagatctttgccagcatcccaggcctggagtttgcctactcagaggccccgcgctccatgcagggtgccatcatgggcatcttcttctgcctgtcgggggtgggctcactgttgggctccagcctagtggcactgctgtccttgcccgggggctggctgcactgccccaaggactttgggaacatcaacaattgccggatggacctctacttcttcctgctggctggcattcaggccgtcacggctctcctatttgtctggatcgctggacgctatgagagggcgtcccagggcccagcctcccacagccgtttcagcagggacaggggctgaacaggccctattccagcccccttgcttcactctaccggacagacggcagcagtcccagctctggtttccttctcggtttattctgttagaatgaaatggttcccataaataaggggcatgagcccttcctcacgac

SEQ ID NO: 3676 - protein, 581 aa, Homosapiens; identical to SEQ ID NO: 551

SEQ ID NO: 3677 - DNA, 3252 bp, Homosapiens
actcacaggttgggtttgatcgcatgcgtgtcggagaggagagagcagagagagacacaggaacaagaacagcaaagggtagagcagacctgcgccaggggcgcacaacggccgtgtccacctcccggccccaagatggtgcttcccacaggcagccacgcgtagcagccagagacagctccagacatgtggctcttcttcgggatcactggattgctgacggcagccctctcaggtcatccatctccagccccacctgaccagctcaacaccagcagtgcagagagtgagctctgggagccaggggagcggcttccggtccgtctgacaaacgggagcagcagctgcagcgggacggtggaggtgcggctcgaggcgtcctgggagcccgcgtgcggggcgctctgggacagccgcgccgccgaggccgtgtgccgagcactgggctgcggcggggcggaggccgcctctcagctcgccccgccgacccctgagctgccgcccccgcctgcagccgggaacaccagcgtagcagctaatgccactctggccggggcgcccgccctcctgtgcagcggcgccgagtggcggctctgcgaggtggtggagcacgcgtgccgcagcgacgggaggcgggcccgtgtcacctgtgcagagaaccgcgcgctgcgcctggtggacggtggcggcgcctgcgccggccgcgtggagatgctggagcatggcgagtggggatcagtgtgcgatgacacttgggacctggaggacgcccacgtggtgtgcaggcaactgggctgcggctgggcagtccaggccctgcccggcttgcacttcacgcccggccgcgggcctatccaccgggaccaggtgaactgctcgggggccgaagcttacctgtgggactgcccggggctgccaggacagcactactgcggccacaaagaggacgcgggcgcggtgtgctcagagcaccagtcctggcgcctgacagggggcgctgaccgctgcgaggggcaggtggaggtacacttccgaggggtctggaacacagtgtgtgacagtgagtggtacccatcggaggccaaggtgctctgccagtccttgggctgtggaactgcggttgagaggcccaaggggctgccccactccttgtccggcaggatgtactactcatgcaatggggaggagctcaccctctccaactgctcctggcggttcaacaactccaacctctgcagccagtcgctggcagccagggtcctctgctcagcttcccggagtttgcacaatctgtccactcccgaagtccctgcaagtgttcagacagtcactatagaatcttctgtgacagtgaaaatagagaacaaggaatctcgggagctaatgctcctcatcccctccatcgttctgggaattctcctccttggctccctcatcttcatagccttcatcctcttgagaattaaaggaaaatatgccctccccgtaatggtgaaccaccagcacctacccaccaccatcccggcagggagcaatagctatcaaccggtccccatcaccatccccaaagaagttttcatgctgcccatccaggtccaggccccgccccctgaggactcagactctggctcggactcagactatgagcactatgacttcagcgcccagcctcctgtggccctgaccaccttctacaattcccagcggcatcgggtcacagatgaggaggtccagcaaagcaggttccagatgccacccttggaggaaggacttgaagagttgcatgcctcccacatcccaactgccaaccctggacactgcattacagacccgccatccctgggccctcagtatcacccgaggagcaacagtgagtcgagcacctcttcaggggaggattactgcaatagtcccaaaagcaagctgcctccatggaacccccaggtgttttcttcagagaggagttccttcctggagcagcccccaaacttggagctggccggcacccagccagccttttcagcagggcccccggctgatgacagctccagcacctcatccggggagtggtaccagaacttccagccaccaccccagcccccttcggaggagcagtttggctgtccagggtcccccagccctcagcctgactccaccgacaacgatgactacgatgacatcagcgcagcctaggccggggccagccgaggctcctggggtggctctgaccctctggcctcctgctctacctactccctttcccctttcccaccctcccagctcacctccccatggagctgagaggcctcccttggagagatggaaggaaacgttataccttgtacccctcggtctccatccatcaagccaaacctgctgccacagccctcccccggccccagatagcagccccagggaggatgctgcctccaagaggtgtgagccctctgtctcggggatgaacaagcagagtctgggctacctcttgacagctggtggaggggagttggggagctggactggatgactctggaggccccttccaaacctcaagtgtccggcgctttgattgcctgagtttctgacacttcagggcccagaggtcctgcgaggggcagaactggacccccatgccagtgctgctgcaggagggcccatatactagggtctgctgagctgttgtcactgatcggtgggcgctgggggggtagggtagcacaccagctgtcccaggctttgctccgggcggtaactgcacttgggcagggaatatagccttcctgggcacaactagctgacaatgacaggttgactgtgtacccccaaccaaggagctggggcccaaggccagtcctgccccagagacactccaagtccgccaggggcacagaccagttctgcagtgactgtccctggacaatgggtctttattctgagtttcctatggtttacaaagagggccccagcccagccccaccacagatcccagagataggggcccagtctccatgggggcaaggagcatagagatgttttccaggaaggggctcagaagctgcactaggccccgagtccccatgtgtctccttgaattgatgaggatgctcctgggagggatgcgtgactatgtggtgttgcacccggggctgcaaacgtctccgtgcagcccccagagagaggcccatgggctcagaccaggctttgttgtcctgctctgagtatcctgagattaaactgaattgctgaatgaaa

SEQ ID NO: 3678 - protein, 668 aa, Homosapiens
MWLFFGITGLLTAALSGHPSPAPPDQLNTSSAESELWEPGERLPVRLTNGSSSCSGTVEVRLEASWEPACGALWDSRAAEAVCRALGCGGAEAASQLAPPTPELPPPPAAGNTSVAANATLAGAPALLCSGAEWRLCEVVEHACRSDGRRARVTCAENRALRLVDGGGACAGRVEMLEHGEWGSVCDDTWDLEDAHVVCRQLGCGWAVQALPGLHFTPGRGPIHRDQVNCSGAEAYLWDCPGLPGQHYCGHKEDAGAVCSEHQSWRLTGGADRCEGQVEVHFRGVWNTVCDSEWYPSEAKVLCQSLGCGTAVERPKGLPHSLSGRMYYSCNGEELTLSNCSWRFNNSNLCSQSLAARVLCSASRSLHNLSTPEVPASVQTVTIESSVTVKIENKESRELMLLIPSIVLGILLLGSLIFIAFILLRIKGKYALPVMVNHQHLPTTIPAGSNSYQPVPITIPKEVFMLPIQVQAPPPEDSDSGSDSDYEHYDFSAQPPVALTTFYNSQRHRVTDEEVQQSRFQMPPLEEGLEELHASHIPTANPGHCITDPPSLGPQYHPRSNSESSTSSGEDYCNSPKSKLPPWNPQVFSSERSSFLEQPPNLELAGTQPAFSAGPPADDSSSTSSGEWYQNFQPPPQPPSEEQFGCPGSPSPQPDSTDNDDYDDISAA

SEQ ID NO: 3679 - DNA, 3134 bp, Homosapiens
gtttgatcgcatgcgtgtcggagaggagagagcagagagagacacaggaacaagaacagcaaagggtagagcagacctgcgccaggggcgcacaacggccgtgtccacctcccggccccaagatggtgcttcccacaggcagccacgcgtagcagccagagacagctccagacatgtggctcttcttcgggatcactggattgctgacggcagccctctcaggtcatccatctccagccccacctgaccagctcaacaccagcagtgcagagagtgagctctgggagccaggggagcggcttccggtccgtctgacaaacgggagcagcagctgcagcgggacggtggaggtgcggctcgaggcgtcctgggagcccgcgtgcggggcgctctgggacagccgcgccgccgaggccgtgtgccgagcactgggctgcggcggggcggaggccgcctctcagctcgccccgccgacccctgagctgccgcccccgcctgcagccgggaacaccagcgtagcagctaatgccactctggccggggcgcccgccctcctgtgcagcggcgccgagtggcggctctgcgaggtggtggagcacgcgtgccgcagcgacgggaggcgggcccgtgtcacctgtgcagagaaccgcgcgctgcgcctggtggacggtggcggcgcctgcgccggccgcgtggagatgctggagcatggcgagtggggatcagtgtgcgatgacacttgggacctggaggacgcccacgtggtgtgcaggcaactgggctgcggctgggcagtccaggccctgcccggcttgcacttcacgcccggccgcgggcctatccaccgggaccaggtgaactgctcgggggccgaagcttacctgtgggactgcccggggctgccaggacagcactactgcggccacaaagaggacgcgggcgcggtgtgctcagagcaccagtcctggcgcctgacagggggcgctgaccgctgcgaggggcaggtggaggtacacttccgaggggtctggaacacagtgtgtgacagtgagtggtacccatcggaggccaaggtgctctgccagtccttgggctgtggaactgcggttgagaggcccaaggggctgccccactccttgtccggcaggatgtactactcatgcaatggggaggagctcaccctctccaactgctcctggcggttcaacaactccaacctctgcagccagtcgctggcagccagggtcctctgctcagcttcccggagtttgcacaatctgtccactcccgaagtccctgcaagtgttcagacagtcactatagaatcttctgtgacagtgaaaatagagaacaaggaatctcgggagctaatgctcctcatcccctccatcgttctgggaattctcctccttggctccctcatcttcatagccttcatcctcttgagaattaaaggaaaatatgccctccccgtaatggtgaaccaccagcacctacccaccaccatcccggcagggagcaatagctatcaaccggtccccatcaccatccccaaagaagttttcatgctgcccatccaggtccaggccccgccccctgaggactcagactctggctcggactcagactatgagcactatgacttcagcgcccagcctcctgtggccctgaccaccttctacaattcccagcggcatcgggtcacagatgaggaggtccagcaaagcaggttccagatgccacccttggaggaaggacttgaagagttgcatgcctcccacatcccaactgccaaccctggacactgcattacagacccgccatccctgggccctcagtatcacccgaggagcaacagtgagtcgagcacctcttcaggggaggattactgcaatagtcccaaaagcaagctgcctccatggaacccccaggtgttttcttcagagaggagttccttcctggagcagcccccaaacttggagctggccggcacccagccagccttttcagggtcccccagccctcagcctgactccaccgacaacgatgactacgatgacatcagcgcagcctaggccggggccagccgaggctcctggggtggctctgaccctctggcctcctgctctacctactccctttcccctttcccaccctcccagctcacctccccatggagctgagaggcctcccttggagagatggaaggaaacgttataccttgtacccctcggtctccatccatcaagccaaacctgctgccacagccctcccccggccccagatagcagccccagggaggatgctgcctccaagaggtgtgagccctctgtctcggggatgaacaagcagagtctgggctacctcttgacagctggtggaggggagttggggagctggactggatgactctggaggccccttccaaacctcaagtgtccggcgctttgattgcctgagtttctgacacttcagggcccagaggtcctgcgaggggcagaactggacccccatgccagtgctgctgcaggagggcccatatactagggtctgctgagctgttgtcactgatcggtgggcgctgggggggtagggtagcacaccagctgtcccaggctttgctccgggcggtaactgcacttgggcagggaatatagccttcctgggcacaactagctgacaatgacaggttgactgtgtacccccaaccaaggagctggggcccaaggccagtcctgccccagagacactccaagtccgccaggggcacagaccagttctgcagtgactgtccctggacaatgggtctttattctgagtttcctatggtttacaaagagggccccagcccagccccaccacagatcccagagataggggcccagtctccatgggggcaaggagcatagagatgttttccaggaaggggctcagaagctgcactaggccccgagtccccatgtgtctccttgaattgatgaggatgctcctgggagggatgcgtgactatgtggtgttgcacccggggctgcaaacgtctccgtgcagcccccagagagaggcccatgggctcagaccaggctttgttgtcctgctctgagtatcctgagattaaactgaattgctgaatgaaa

SEQ ID NO: 3680 - protein, 633 aa, Homosapiens
MWLFFGITGLLTAALSGHPSPAPPDQLNTSSAESELWEPGERLPVRLTNGSSSCSGTVEVRLEASWEPACGALWDSRAAEAVCRALGCGGAEAASQLAPPTPELPPPPAAGNTSVAANATLAGAPALLCSGAEWRLCEVVEHACRSDGRRARVTCAENRALRLVDGGGACAGRVEMLEHGEWGSVCDDTWDLEDAHVVCRQLGCGWAVQALPGLHFTPGRGPIHRDQVNCSGAEAYLWDCPGLPGQHYCGHKEDAGAVCSEHQSWRLTGGADRCEGQVEVHFRGVWNTVCDSEWYPSEAKVLCQSLGCGTAVERPKGLPHSLSGRMYYSCNGEELTLSNCSWRFNNSNLCSQSLAARVLCSASRSLHNLSTPEVPASVQTVTIESSVTVKIENKESRELMLLIPSIVLGILLLGSLIFIAFILLRIKGKYALPVMVNHQHLPTTIPAGSNSYQPVPITIPKEVFMLPIQVQAPPPEDSDSGSDSDYEHYDFSAQPPVALTTFYNSQRHRVTDEEVQQSRFQMPPLEEGLEELHASHIPTANPGHCITDPPSLGPQYHPRSNSESSTSSGEDYCNSPKSKLPPWNPQVFSSERSSFLEQPPNLELAGTQPAFSGSPSPQPDSTDNDDYDDISAA

SEQ ID NO: 3681 - DNA, 3119 bp, Homosapiens
gtttgatcgcatgcgtgtcggagaggagagagcagagagagacacaggaacaagaacagcaaagggtagagcagacctgcgccaggggcgcacaacggccgtgtccacctcccggccccaagatggtgcttcccacaggcagccacgcgtagcagccagagacagctccagacatgtggctcttcttcgggatcactggattgctgacggcagccctctcaggtcatccatctccagccccacctgaccagctcaacaccagcagtgcagagagtgagctctgggagccaggggagcggcttccggtccgtctgacaaacgggagcagcagctgcagcgggacggtggaggtgcggctcgaggcgtcctgggagcccgcgtgcggggcgctctgggacagccgcgccgccgaggccgtgtgccgagcactgggctgcggcggggcggaggccgcctctcagctcgccccgccgacccctgagctgccgcccccgcctgcagccgggaacaccagcgtagcagctaatgccactctggccggggcgcccgccctcctgtgcagcggcgccgagtggcggctctgcgaggtggtggagcacgcgtgccgcagcgacgggaggcgggcccgtgtcacctgtgcagagaaccgcgcgctgcgcctggtggacggtggcggcgcctgcgccggccgcgtggagatgctggagcatggcgagtggggatcagtgtgcgatgacacttgggacctggaggacgcccacgtggtgtgcaggcaactgggctgcggctgggcagtccaggccctgcccggcttgcacttcacgcccggccgcgggcctatccaccgggaccaggtgaactgctcgggggccgaagcttacctgtgggactgcccggggctgccaggacagcactactgcggccacaaagaggacgcgggcgcggtgtgctcagagcaccagtcctggcgcctgacagggggcgctgaccgctgcgaggggcaggtggaggtacacttccgaggggtctggaacacagtgtgtgacagtgagtggtacccatcggaggccaaggtgctctgccagtccttgggctgtggaactgcggttgagaggcccaaggggctgccccactccttgtccggcaggatgtactactcatgcaatggggaggagctcaccctctccaactgctcctggcggttcaacaactccaacctctgcagccagtcgctggcagccagggtcctctgctcagcttcccggagtttgcacaatctgtccactcccgaagtccctgcaagtgttcagacagtcactatagaatcttctgtgacagtgaaaatagagaacaaggaatctcgggagctaatgctcctcatcccctccatcgttctgggaattctcctccttggctccctcatcttcatagccttcatcctcttgagaattaaaggaaaatatgccctccccgtaatggtgaaccaccagcacctacccaccaccatcccggcagggagcaatagctatcaaccggtccccatcaccatccccaaagaagttttcatgctgcccatccaggtccaggccccgccccctgaggactcagactctggctcggactcagactatgagcactatgacttcagcgcccagcctcctgtggccctgaccaccttctacaattcccagcggcatcgggtcacagatgaggaggtccagcaaagcaggttccagatgccacccttggaggaaggacttgaagagttgcatgcctcccacatcccaactgccaaccctggacactgcattacagacccgccatccctgggccctcagtatcacccgaggagcaacagtgagtcgagcacctcttcaggggaggattactgcaatagtcccaaaagcaagctgcctccatggaacccccaggtgttttcttcagagaggagttccttcctggagcagcccccaaacttggagctggccggcacccagccagccttttcagcagggcccccggctgatgacagctccagcacctcatccggggagtggtaccagaacttccaccgaggctcctggggtggctctgaccctctggcctcctgctctacctactccctttcccctttcccaccctcccagctcacctccccatggagctgagaggcctcccttggagagatggaaggaaacgttataccttgtacccctcggtctccatccatcaagccaaacctgctgccacagccctcccccggccccagatagcagccccagggaggatgctgcctccaagaggtgtgagccctctgtctcggggatgaacaagcagagtctgggctacctcttgacagctggtggaggggagttggggagctggactggatgactctggaggccccttccaaacctcaagtgtccggcgctttgattgcctgagtttctgacacttcagggcccagaggtcctgcgaggggcagaactggacccccatgccagtgctgctgcaggagggcccatatactagggtctgctgagctgttgtcactgatcggtgggcgctgggggggtagggtagcacaccagctgtcccaggctttgctccgggcggtaactgcacttgggcagggaatatagccttcctgggcacaactagctgacaatgacaggttgactgtgtacccccaaccaaggagctggggcccaaggccagtcctgccccagagacactccaagtccgccaggggcacagaccagttctgcagtgactgtccctggacaatgggtctttattctgagtttcctatggtttacaaagagggccccagcccagccccaccacagatcccagagataggggcccagtctccatgggggcaaggagcatagagatgttttccaggaaggggctcagaagctgcactaggccccgagtccccatgtgtctccttgaattgatgaggatgctcctgggagggatgcgtgactatgtggtgttgcacccggggctgcaaacgtctccgtgcagcccccagagagaggcccatgggctcagaccaggctttgttgtcctgctctgagtatcctgagattaaactgaattgctgaatgaaa

SEQ ID NO: 3682 - protein, 664 aa, Homosapiens
MWLFFGITGLLTAALSGHPSPAPPDQLNTSSAESELWEPGERLPVRLTNGSSSCSGTVEVRLEASWEPACGALWDSRAAEAVCRALGCGGAEAASQLAPPTPELPPPPAAGNTSVAANATLAGAPALLCSGAEWRLCEVVEHACRSDGRRARVTCAENRALRLVDGGGACAGRVEMLEHGEWGSVCDDTWDLEDAHVVCRQLGCGWAVQALPGLHFTPGRGPIHRDQVNCSGAEAYLWDCPGLPGQHYCGHKEDAGAVCSEHQSWRLTGGADRCEGQVEVHFRGVWNTVCDSEWYPSEAKVLCQSLGCGTAVERPKGLPHSLSGRMYYSCNGEELTLSNCSWRFNNSNLCSQSLAARVLCSASRSLHNLSTPEVPASVQTVTIESSVTVKIENKESRELMLLIPSIVLGILLLGSLIFIAFILLRIKGKYALPVMVNHQHLPTTIPAGSNSYQPVPITIPKEVFMLPIQVQAPPPEDSDSGSDSDYEHYDFSAQPPVALTTFYNSQRHRVTDEEVQQSRFQMPPLEEGLEELHASHIPTANPGHCITDPPSLGPQYHPRSNSESSTSSGEDYCNSPKSKLPPWNPQVFSSERSSFLEQPPNLELAGTQPAFSAGPPADDSSSTSSGEWYQNFHRGSWGGSDPLASCSTYSLSPFPPSQLTSPWS

SEQ ID NO: 3683 - DNA, 3038 bp, Homosapiens
gtttgatcgcatgcgtgtcggagaggagagagcagagagagacacaggaacaagaacagcaaagggtagagcagacctgcgccaggggcgcacaacggccgtgtccacctcccggccccaagatggtgcttcccacaggcagccacgcgtagcagccagagacagctccagacatgtggctcttcttcgggatcactggattgctgacggcagccctctcaggtcatccatctccagccccacctgaccagctcaacaccagcagtgcagagagtgagctctgggagccaggggagcggcttccggtccgtctgacaaacgggagcagcagctgcagcgggacggtggaggtgcggctcgaggcgtcctgggagcccgcgtgcggggcgctctgggacagccgcgccgccgaggccgtgtgccgagcactgggctgcggcggggcggaggccgcctctcagctcgccccgccgacccctgagctgccgcccccgcctgcagccgggaacaccagcgtagcagctaatgccactctggccggggcgcccgccctcctgtgcagcggcgccgagtggcggctctgcgaggtggtggagcacgcgtgccgcagcgacgggaggcgggcccgtgtcacctgtgcagagaaccgcgcgctgcgcctggtggacggtggcggcgcctgcgccggccgcgtggagatgctggagcatggcgagtggggatcagtgtgcgatgacacttgggacctggaggacgcccacgtggtgtgcaggcaactgggctgcggctgggcagtccaggccctgcccggcttgcacttcacgcccggccgcgggcctatccaccgggaccaggtgaactgctcgggggccgaagcttacctgtgggactgcccggggctgccaggacagcactactgcggccacaaagaggacgcgggcgcggtgtgctcagagcaccagtcctggcgcctgacagggggcgctgaccgctgcgaggggcaggtggaggtacacttccgaggggtctggaacacagtgtgtgacagtgagtggtacccatcggaggccaaggtgctctgccagtccttgggctgtggaactgcggttgagaggcccaaggggctgccccactccttgtccggcaggatgtactactcatgcaatggggaggagctcaccctctccaactgctcctggcggttcaacaactccaacctctgcagccagtcgctggcagccagggtcctctgctcagcttcccggagtttgcacaatctgtccactcccgaagtccctgcaagtgttcagacagtcactatagaatcttctgtgacagtgaaaatagagaacaaggaatctcgggagctaatgctcctcatcccctccatcgttctgggaattctcctccttggctccctcatcttcatagccttcatcctcttgagaattaaaggaaaatatgttttcatgctgcccatccaggtccaggccccgccccctgaggactcagactctggctcggactcagactatgagcactatgacttcagcgcccagcctcctgtggccctgaccaccttctacaattcccagcggcatcgggtcacagatgaggaggtccagcaaagcaggttccagatgccacccttggaggaaggacttgaagagttgcatgcctcccacatcccaactgccaaccctggacactgcattacagacccgccatccctgggccctcagtatcacccgaggagcaacagtgagtcgagcacctcttcaggggaggattactgcaatagtcccaaaagcaagctgcctccatggaacccccaggtgttttcttcagagaggagttccttcctggagcagcccccaaacttggagctggccggcacccagccagccttttcagggtcccccagccctcagcctgactccaccgacaacgatgactacgatgacatcagcgcagcctaggccggggccagccgaggctcctggggtggctctgaccctctggcctcctgctctacctactccctttcccctttcccaccctcccagctcacctccccatggagctgagaggcctcccttggagagatggaaggaaacgttataccttgtacccctcggtctccatccatcaagccaaacctgctgccacagccctcccccggccccagatagcagccccagggaggatgctgcctccaagaggtgtgagccctctgtctcggggatgaacaagcagagtctgggctacctcttgacagctggtggaggggagttggggagctggactggatgactctggaggccccttccaaacctcaagtgtccggcgctttgattgcctgagtttctgacacttcagggcccagaggtcctgcgaggggcagaactggacccccatgccagtgctgctgcaggagggcccatatactagggtctgctgagctgttgtcactgatcggtgggcgctgggggggtagggtagcacaccagctgtcccaggctttgctccgggcggtaactgcacttgggcagggaatatagccttcctgggcacaactagctgacaatgacaggttgactgtgtacccccaaccaaggagctggggcccaaggccagtcctgccccagagacactccaagtccgccaggggcacagaccagttctgcagtgactgtccctggacaatgggtctttattctgagtttcctatggtttacaaagagggccccagcccagccccaccacagatcccagagataggggcccagtctccatgggggcaaggagcatagagatgttttccaggaaggggctcagaagctgcactaggccccgagtccccatgtgtctccttgaattgatgaggatgctcctgggagggatgcgtgactatgtggtgttgcacccggggctgcaaacgtctccgtgcagcccccagagagaggcccatgggctcagaccaggctttgttgtcctgctctgagtatcctgagattaaactgaattgctgaatgaaa

SEQ ID NO: 3684 - protein, 601 aa, Homosapiens
MWLFFGITGLLTAALSGHPSPAPPDQLNTSSAESELWEPGERLPVRLTNGSSSCSGTVEVRLEASWEPACGALWDSRAAEAVCRALGCGGAEAASQLAPPTPELPPPPAAGNTSVAANATLAGAPALLCSGAEWRLCEVVEHACRSDGRRARVTCAENRALRLVDGGGACAGRVEMLEHGEWGSVCDDTWDLEDAHVVCRQLGCGWAVQALPGLHFTPGRGPIHRDQVNCSGAEAYLWDCPGLPGQHYCGHKEDAGAVCSEHQSWRLTGGADRCEGQVEVHFRGVWNTVCDSEWYPSEAKVLCQSLGCGTAVERPKGLPHSLSGRMYYSCNGEELTLSNCSWRFNNSNLCSQSLAARVLCSASRSLHNLSTPEVPASVQTVTIESSVTVKIENKESRELMLLIPSIVLGILLLGSLIFIAFILLRIKGKYVFMLPIQVQAPPPEDSDSGSDSDYEHYDFSAQPPVALTTFYNSQRHRVTDEEVQQSRFQMPPLEEGLEELHASHIPTANPGHCITDPPSLGPQYHPRSNSESSTSSGEDYCNSPKSKLPPWNPQVFSSERSSFLEQPPNLELAGTQPAFSGSPSPQPDSTDNDDYDDISAA

SEQ ID NO: 3685 - DNA, 3011 bp, Homosapiens
gtttgatcgcatgcgtgtcggagaggagagagcagagagagacacaggaacaagaacagcaaagggtagagcagacctgcgccaggggcgcacaacggccgtgtccacctcccggccccaagatggtgcttcccacaggcagccacgcgtagcagccagagacagctccagacatgtggctcttcttcgggatcactggattgctgacggcagccctctcaggtcatccatctccagccccacctgaccagctcaacaccagcagtgcagagagtgagctctgggagccaggggagcggcttccggtccgtctgacaaacgggagcagcagctgcagcgggacggtggaggtgcggctcgaggcgtcctgggagcccgcgtgcggggcgctctgggacagccgcgccgccgaggccgtgtgccgagcactgggctgcggcggggcggaggccgcctctcagctcgccccgccgacccctgagctgccgcccccgcctgcagccgggaacaccagcgtagcagctaatgccactctggccggggcgcccgccctcctgtgcagcggcgccgagtggcggctctgcgaggtggtggagcacgcgtgccgcagcgacgggaggcgggcccgtgtcacctgtgcagagaaccgcgcgctgcgcctggtggacggtggcggcgcctgcgccggccgcgtggagatgctggagcatggcgagtggggatcagtgtgcgatgacacttgggacctggaggacgcccacgtggtgtgcaggcaactgggctgcggctgggcagtccaggccctgcccggcttgcacttcacgcccggccgcgggcctatccaccgggaccaggtgaactgctcgggggccgaagcttacctgtgggactgcccggggctgccaggacagcactactgcggccacaaagaggacgcgggcgcggtgtgctcagagcaccagtcctggcgcctgacagggggcgctgaccgctgcgaggggcaggtggaggtacacttccgaggggtctggaacacagtgtgtgacagtgagtggtacccatcggaggccaaggtgctctgccagtccttgggctgtggaactgcggttgagaggcccaaggggctgccccactccttgtccggcaggatgtactactcatgcaatggggaggagctcaccctctccaactgctcctggcggttcaacaactccaacctctgcagccagtcgctggcagccagggtcctctgctcagcttcccggagtttgcacaatctgtccactcccgaagtccctgcaagtgttcagacagtcactatagaatcttctgtgacagtgaaaatagagaacaaggaatctcgggagctaatgctcctcatcccctccatcgttctgggaattctcctccttggctccctcatcttcatagccttcatcctcttgagaattaaaggaaaatatgccctccccgtaatggtgaaccaccagcacctacccaccaccatcccggcagggagcaatagctatcaaccggtccccatcaccatccccaaagaagattcccagcggcatcgggtcacagatgaggaggtccagcaaagcaggttccagatgccacccttggaggaaggacttgaagagttgcatgcctcccacatcccaactgccaaccctggacactgcattacagacccgccatccctgggccctcagtatcacccgaggagcaacagtgagtcgagcacctcttcaggggaggattactgcaatagtcccaaaagcaagctgcctccatggaacccccaggtgttttcttcagagaggagttccttcctggagcagcccccaaacttggagctggccggcacccagccagccttttcagggtcccccagccctcagcctgactccaccgacaacgatgactacgatgacatcagcgcagcctaggccggggccagccgaggctcctggggtggctctgaccctctggcctcctgctctacctactccctttcccctttcccaccctcccagctcacctccccatggagctgagaggcctcccttggagagatggaaggaaacgttataccttgtacccctcggtctccatccatcaagccaaacctgctgccacagccctcccccggccccagatagcagccccagggaggatgctgcctccaagaggtgtgagccctctgtctcggggatgaacaagcagagtctgggctacctcttgacagctggtggaggggagttggggagctggactggatgactctggaggccccttccaaacctcaagtgtccggcgctttgattgcctgagtttctgacacttcagggcccagaggtcctgcgaggggcagaactggacccccatgccagtgctgctgcaggagggcccatatactagggtctgctgagctgttgtcactgatcggtgggcgctgggggggtagggtagcacaccagctgtcccaggctttgctccgggcggtaactgcacttgggcagggaatatagccttcctgggcacaactagctgacaatgacaggttgactgtgtacccccaaccaaggagctggggcccaaggccagtcctgccccagagacactccaagtccgccaggggcacagaccagttctgcagtgactgtccctggacaatgggtctttattctgagtttcctatggtttacaaagagggccccagcccagccccaccacagatcccagagataggggcccagtctccatgggggcaaggagcatagagatgttttccaggaaggggctcagaagctgcactaggccccgagtccccatgtgtctccttgaattgatgaggatgctcctgggagggatgcgtgactatgtggtgttgcacccggggctgcaaacgtctccgtgcagcccccagagagaggcccatgggctcagaccaggctttgttgtcctgctctgagtatcctgagattaaactgaattgctgaatgaaa

SEQ ID NO: 3686 - protein, 592 aa, Homosapiens
MWLFFGITGLLTAALSGHPSPAPPDQLNTSSAESELWEPGERLPVRLTNGSSSCSGTVEVRLEASWEPACGALWDSRAAEAVCRALGCGGAEAASQLAPPTPELPPPPAAGNTSVAANATLAGAPALLCSGAEWRLCEVVEHACRSDGRRARVTCAENRALRLVDGGGACAGRVEMLEHGEWGSVCDDTWDLEDAHVVCRQLGCGWAVQALPGLHFTPGRGPIHRDQVNCSGAEAYLWDCPGLPGQHYCGHKEDAGAVCSEHQSWRLTGGADRCEGQVEVHFRGVWNTVCDSEWYPSEAKVLCQSLGCGTAVERPKGLPHSLSGRMYYSCNGEELTLSNCSWRFNNSNLCSQSLAARVLCSASRSLHNLSTPEVPASVQTVTIESSVTVKIENKESRELMLLIPSIVLGILLLGSLIFIAFILLRIKGKYALPVMVNHQHLPTTIPAGSNSYQPVPITIPKEDSQRHRVTDEEVQQSRFQMPPLEEGLEELHASHIPTANPGHCITDPPSLGPQYHPRSNSESSTSSGEDYCNSPKSKLPPWNPQVFSSERSSFLEQPPNLELAGTQPAFSGSPSPQPDSTDNDDYDDISAA

SEQ ID NO: 3687 - DNA, 4261 bp, Homosapiens
gactggaagtctggctccgcctcttagtaactgtggccttgggcaagtcatttcatgctgcggagcctcagttttctcatctggaacactgagccttcacaggctcctcatggagatgaataagacggtgcgtgctgtatacataaagctggggcacacagtgggcattcagatgttaccttccttccaaggaacccatatttttttcctgaatttgaattcctgaatccactggcactctgagccacgtagatccacatggccattggccgctgtcagcccccagctgttaaggacgcaaggtggccacaaagcattagtctgaacatccctggtgcctcccccaggttctctttgaatctggatttatttaaagagaggaggtgagtggtaggtgaggagggggctgttgttaggacatggatgggcacaggacatgtgtctggtgagcgtagctgccagggccggtccctgacaccccaaggagactttctggtcccagcccagcctacactcccacctgctctggagaggctgtgtttccttccaaggatggatgctgatgatgtctgatggcttctggatgtctgatctcaagggggccttctcttagggggctttaggccaccctggaaaggtctcagcatcaccccttggagcggggaggattttcaccccttgcccacacacaagctaaaactgcttctgctgcagctctgggagacctagaaccagggcccctcctgagagccagtgggtgggggcaggccccctggaaaatcgctgagagctcagcagtttcagccttcactcccctcctcactcccctcctccagcctgcagaaacctagcccagcctttgcacagagggtcttgctctggggaattctattcttgaatttaataccttgagtgtctagcctggcccaccagcttctgtcccacctccaggtgtttgctcgagctgtgccctctccctagaatgccttcttaactcttgctacttgttgagggcgcctgaagagtagaaagagtgaatctggggaacaaattcaaatttggatttgaattctggctctatcaatgccaggctatgtgaccgtgggctaggaacttaatttccctgagcctctttgtaaaatgggtttcataatagtgtctcctcacaaggtagccatgaggcaacgtctgtaaagcactcagcacagaggaagcactcggcacagaggaagtcctcgggaaatgtggatctgcttcccttgcctcagcgaaatgctccttgactttgaagtcctggcccaaagggcacctccccggcaataccttcctggactcactcaccagccccaccacttgcagagcagccctgtccctcctccaggttcctcaagcatgtctcctgcctctgcacctacctcagagagacaacattcgagtcagctcttaacatctggcctccaggctggaccacgggctctattacctttactttccacggcagagcgcagcatggctcaagaaatgctgcgggaggtgaagtgagttctagggacttccattaataataagagtaactagaatttgttgagcattcacagcacaccctgaggtgtttatcagagcccaggaaaccctctttctgggttcaaatccctgctctgcctcttaggggctctattgtcccagaaagttccttgtctcttgaatcctacatttccccgcctgcacgatagtgataataacagtgcttacttctgagcattgttaaggagattcaagaatttaaaactataaaaacccatggctttcttacccagagaagggcagaaaaatcgttggcagggtgcattgatatgactcggacaatttacaaaggtttttcatatatgcttttattttaaaatttttttgtttttattttgttttattttattttactaaaattttatttagtaaaaatagtacagaatttagaaaatacaaaaacagaaaaatttaaaaatttatcaatagctaccttcaaagataactgttgttactagcctcttgtagaatcttccagacatttcgttagagaggaatattgcaaacatacagaaatgcattgagaatgacatttgtttatttgtttatttgcttttgagatggtgtctcgcactgtcacccaggctggagtgcagtggtgcaatctcggctcactgcaacctttgcctcctgggttcaagtgattctcctgtctcagcctcccaagtagctgggactacaggcacacaccaccacacccggctaatttttgtatttcagtagagatggggtttcaccatgttggtcacactggtcttgaactcctgatctcaagtgatccacttgcctcggccttccaaagtgctgggattacaggcgtgagccaccgcgcctggcctgagaatgttttaatgaacccaatgcgtcctcaccacccagacttagaaaatgtttacacttttgccgtatttgctcagatctatattaataagaaagaaaaccatacagatactgttgaaataattcttatcctttcctccctagaacacacactccaaagtgtggtgtgtgtacccttttctcccacatttttatactcctattacacaaaaagtgtctccatacacaatggatggtattgagacatgtactatattttatataaattgtaccctcagcctctcgagtagctaggattgcaggcatgcgccaccatgcctggctaattgttttgtatttttagtagagacagggcttctccatgttggtcaggctgatcttgaactcccaacctcaggtgatacacccgcctcagcctcccaaagtgctgtgattacaggcgtgagccccgcgtttggcctcatcagccatttttctctgcacaatatccataaggctatgatcatcctgaatatgttgtttttcatctgttttttccatctacgatacatatatgcacacatattcatctttcacgtatttgcaggtatagtcattgattccacaagatcttgggcatttgccatgggccaggtattgggggtttttatggtaatctttccttagccctgtgaggtttttgtttcgttttcattttagaggtggaatctcaccctgttgcccaggctggagtgcagtgatgatcatagcttactgcaacctcgaactcctgggctcaagtgatcctcctgcctcagcctcctcagtagctagaattacaagcatgtgtccagctaatttacttatttatttattcatatatatctatatatatgtatatatatatgtatatatatctatagagagagagacaaaggatctcactctgttgcccaggctggagtgcagtggcaccatcttggctcactgcagcctcaaactcctcggcccaagtgatccaacctcagcctctcgactagctgggaccacaggtgcacaccaccatgtccagctaattttttgaattttggtagagacaaggttttgccttgttgcttaagctggtctcaaattcctgcgctcaagcaatccacccaccttggcctcccaaagtgctgggattacagcgtgagccacagcacccagcctcatttttttatttttaaatttattttgtagagatagggtctcactgtgttgcccaggctgttctcaaactcctggcctcaagcaatcctcctgcctcagccactgaaagtgctgggattacaagtgtgaaccactgtgcccagcttgtgaggctttttttttttatatataactatgaggtgagggaggcaaggggggcatgtgaagagattcgcccagggtcacactatagtaaggaggaagctgggtttctaacccaggcatgtttaatttcaatccagtgttctttctgatgcctatgatgtggtagatggttttttcccaaccaagacctactgaatgggaattctaaaagagggacctgagggccgggcgctgtggctcacacctgtaatcccagcactttgggaggccaaggtgagcagactacctgaggtcaggagttcaagaccagcctggccaacatggtgaaacccggtctctactaaaaatacaaaaattagccgagcatggtggcgtgcacctgtaatcccagctattagggagactgaggcaggagaatcactagaacttgggaggcagaggttgcagtgaaccaagatcgtgccactacactccagcctcggcgacagtgtgagactccgtctcc

SEQ ID NO: 3688 - protein, 118 aa, Homosapiens [sequence omitted]

SEQ ID NO: 3689 - DNA, 3804 bp, Homosapiens
ggtcttaagaccaggcctttgacattcacctgaagatggctctctgtgtgagagcgggggagtgcggatgagagacacagttggcaggggttctcgcatgccatatccctccgtgtcccatcctgccctgtctgaccccatcagccccactcacttcctcacctccacgctcttgccagcttgtgcctcatagccagctcttttcattgccttctggggataggaagaggaaagataacgctgaaggcagttccctggcaatgctgggaggttggaatagaccagagcgtcccacaccttattgtggaatcacttgggagcttgtcaaaaattcctgagcccctccccacacctaatgttatcagtcaggatgagaatttggctgtgtgtgacagaaagctccaaatgacagtgtcttgagaggttggcaggggcccaggccccttctttcttgctgctgtgcagtccctaagatgttgccttcatctacatggtccagaatggctcacctccatgtccacattccaggcaagggcaagggaacgatgggatgctggagatggccacagattcccgctcacaacccagcacccagaacgaaaacccactgagattccgagcccaggcatataagatgcaagactgagagtccacagtgctataacattgaaattaaaagtcagtggtacccggttcaaaagagctgactccaagatcccagacactcatatcctcaagactctataaatctctgattctgaaacgtgaaggtgccacagagcctgtgatgcagtgattccagaccatctgggtttcactctaggaaggcttcttgaaggagcaaacatctgtccttctcctgcccagagctgccaggtcacaaggacagaaccaagactcttgatacctctctaagtagcaggagggacagctggggctgggggctggggggttgtagggcactagagtttctgtccccaggctagattaaggcgaaggctctgctggattgggatatgaacctggaatttgatgggaaatgctaagccctctctgcctccggagttgtcctcccaccctattcagcctacccaggccccgggaaatccagcctcttctccaggctcctaaatgatgaggttgagccttcacccctccccaccaccgcctctgcttgcagattcccagcggcatcgggtcacagatgaggaggtccagcaaagcaggttccagatgccacccttggaggaaggtgagtcaggatgggaaggggtgtgaatggcagtcccacctccagagagtagctcagctcagcttgagaccttccagcaggaacctccctcaatgagtctttcctgactttcacaaatcctataggcagtaagtgctttctgaagtctgacttaaagccctcttgctgcactgcttctttcgtcaccattctccctttcctgccttaggacttgaagagttgcatgcctcccacatcccaactgccaaccctggacactgcattacagacccgccatccctgggccctcagtatcacccgaggagcaacagtgagtcgagcacctcttcaggggaggattactgcaatagtcccaaaagcaagctgcctccatggaacccccaggtgttttcttcagagaggagttccttcctggagcagcccccaaacttggagctggccggcacccagccagccttttcagcagggcccccggctgatgacagctccagcacctcatccggggagtggtaccagaacttccagccaccaccccagcccccttcggaggagcagtttggctgtccaggtgccaatatctggggaagggatgtgggagggggacagagagggactggggagtaaatgagtggggaactattggatgcattcgctcaaggggaaaaggagaaaggaagggtaaaagaagagagggaaagtaactttttaaaaaacaaagcaaggccaggcatggtagctcaagcctgtaatcccagcacaaggcaggaggattgcttgaggccaggaatttacgactagccccgggaacatagcaagaccagtctctacaaaactaaaaactaaatattagccaagggtagcacgtgcctatagtcccagctcctcaggaggctgaggtgggaggatcgtgtgagcccaggagatccaggctgcagtgagctatgatcgtatcactgtgtatcatgcccctgcagggtcagagcaagaccctctttctacaagaaaacaaacacaagcacaacaagaatatgaagaggtggggaaaatggatgtggacgggatggagaaatagtcaaacaggttgctttgataagaagtgagctccctgtcagtggaggcattcaagcagaagcagctggttggctccttgggggagactgtggtagcagaggggcttccaacattcaatcgtccaccgtgtcgtgcagtgtgccattgtggagaccatagccctgaaccagacagacgaggctattccctcagtgctgatgttctagtcagggacatggccggaagcaagatgatcagatggcttcatgcagcatcccacggggatagtgatgtggagccagaaccactcagctccgtcctgtggggcagcagggcaatgactgggtctcccactaatctgggcctctctgcccacagggtcccccagccctcagcctgactccaccgacaacgatgactacgatgacatcagcgcagcctaggccggggccagccgaggctcctggggtggctctgaccctctggcctcctgctctacctactccctttcccctttcccaccctcccagctcacctccccatggagctgagaggcctcccttggagagatggaaggaaacgttataccttgtacccctcggtctccatccatcaagccaaacctgctgccacagccctcccccggccccagatagcagccccagggaggatgctgcctccaagaggtgtgagccctctgtctcggggatgaacaagcagagtctgggctacctcttgacagctggtggaggggagttggggagctggactggatgactctggaggccccttccaaacctcaagtgtccggcgctttgattgcctgagtttctgacacttcagggcccagaggtcctgcgaggggcagaactggacccccatgccagtgctgctgcaggagggcccatatactagggtctgctgagctgttgtcactgatcggtgggcgctgggggggtagggtagcacaccagctgtcccaggctttgctccgggcggtaactgcacttgggcagggaatatagccttcctgggcacaactagctgacaatgacaggttgactgtgtacccccaaccaaggagctggggcccaaggccagtcctgccccagagacactccaagtccgccaggggcacagaccagttctgcagtgactgtccctggacaatgggtctttattctgagtttcctatggtttacaaagagggccccagcccagccccaccacagatcccagagataggggcccagtctccatgggggcaaggagcatagagatgttttccaggaaggggctcagaagctgcactaggccccgagtccccatgtgtctccttgaattgatgaggatgctcctgggagggatgcgtgactatgtggtgttgcacccggggctgcaaacgtctccgtgcagcccccagagagaggcccatgggctcagaccaggctttgttgtcctgctctgagtatcctgagattaaactgaattgctgaatgaaa

SEQ ID NO: 3690 - protein, 134 aa, Homosapiens
MPPTSQLPTLDTALQTRHPWALSITRGATVSRAPLQGRITAIVPKASCLHGTPRCFLQRGVPSWSSPQTWSWPAPSQPFQQGPRLMTAPAPHPGSGTRTSSHHPSPLRRSSLAVQVPISGEGMWEGDREGLGSK

SEQ ID NO: 3691 - DNA, 1126 bp, Homosapiens
tctccaggctcctaaatgatgaggttgagccttcacccctccccaccaccgcctctgcttgcagattcccagcggcatcgggtcacagatgaggaggtccagcaaagcaggttccagatgccacccttggaggaaggacttgaagagttgcatgcctcccacatcccaactgccaaccctggacactgcattacagacccgccatccctgggccctcagtatcacccgaggagcaacagtgagtcgagcacctcttcaggggaggattactgcaatagtcccaaaagcaagctgcctccatggaacccccaggtgttttcttcagagaggagttccttcctggagcagcccccaaacttggagctggccggcacccagccagccttttcagcagggcccccggctgatgacagctccagcacctcatccggggagtggtaccagaacttccagccaccaccccagcccccttcggaggagcagtttggctgtccaggtgccaatatctggggaagggatgtgggagggggacagagagggactggggagtaaatgagtggggaactattggatgcattcgctcaaggggaaaaggagaaaggaagggtaaaagaagagagggaaagtaactttttaaaaaacaaagcaaggccaggcatggtagctcaagcctgtaatcccagcacaaggcaggaggattgcttgaggccaggaatttacgactagccccgggaacatagcaagaccagtctctacaaaactaaaaactaaatattagccaagggtagcacgtgcctatagtcccagctcctcaggaggctgaggtgggaggatcgtgtgagcccaggagatccaggctgcagtgagctatgatcgtatcactgtgtatcatgcccctgcagggtcagagcaagaccctctttctacaagaaaacaaacacaagcacaacaagaatatgaagaggtggggaaaatggatgtggacgggatggagaaatagtcaaacaggttgctttgataagaagtgagctccctgtcagtggaggcattcaagcagaagcagctggttggctccttgggggagactgtggtagcagaggggcttccaacattcaatcgtccaccg

SEQ ID NO: 3692 - protein, 178 aa, Homosapiens
MMRLSLHPSPPPPLLADSQRHRVTDEEVQQSRFQMPPLEEGLEELHASHIPTANPGHCITDPPSLGPQYHPRSNSESSTSSGEDYCNSPKSKLPPWNPQVFSSERSSFLEQPPNLELAGTQPAFSAGPPADDSSSTSSGEWYQNFQPPPQPPSEEQFGCPGANIWGRDVGGGQRGTGE

SEQ ID NO: 3693 - DNA, 576 bp, Homosapiens
ggccccttccaaacctcaagtgtccggcgctttgattgcctgagtttctgacacttcagggcccagaggtcctgcgaggggcagaactggacccccatgccagtgctgctgcaggagggcccatatactagggtctgctgagctgttgtcactgatcggtgggcgctgggggggtagggtagcacaccagctgtcccaggctttgctccgggcggtaactgcacttgggcagggaatatagccttcctgggcacaactagctgacaatgacaggttgactgtggccccagcccagccccaccacagatcccagagataggggcccagtctccatgggggcaaggagcatagagatgttttccaggaaggggctcagaagctgcactaggccccgagtccccatgtgtctccttgaattgatgaggatgctcctgggagggatgcgtgactatgtggtgttgcacccggggctgcaaacgtctccgtgcagcccccagagagaggcccatgggctcagaccaggctttgttgtcctgctctgagtatcctgagattaaactgaattgctgaatgaaa

SEQ ID NO: 3694 - protein, 69 aa, Homosapiens
MGARSIEMFSRKGLRSCTRPRVPMCLLELMRMLLGGMRDYVVLHPGLQTSPCSPQREAHGLRPGFVVLL

SEQ ID NO: 3695 - DNA, 346 bp, Homosapiens
gggcccagaggtcctgcgaggggcagaactggacccccatgccagtgctgctgcaggagggcccatatactagggtctgctgagctgttgtcactgatcggtgggcgctgggggggtagggtagcacaccagctgaaggggctcagaagctgcactaggccccgagtccccatgtgtctccttgaattgatgaggatgctcctgggagggatgcgtgactatgtggtgttgcacccggggctgcaaacgtctccgtgcagcccccagagagaggcccatgggctcagaccaggctttgttgtcctgctctgagtatcctgagattaaactgaattgctgaatgaaa

SEQ ID NO: 3696 - protein, 46 aa, Homosapiens
MCLLELMRMLLGGMRDYVVLHPGLQTSPCSPQREAHGLRPGFVVLL

SEQ ID NO: 3697 - DNA, 710 bp, Homosapiens
gatgtccactaatggagaaagagatgaatggcgatatatgtacatctacatgtgtatccgcatttctctgcaatacaaaaggagcaaaccactgctaacacagtgtggactcccagaccatgactgtgagggaagaaggcggaaacgagtgtgcagcgtgcaatttcatttttatcgtattctggaaatgacaacgttctgagccactactgctgggtgtctgctcctggggtacctgctggccctgaatcacccctctggattcctgggactccaggaactttgggatccagagaagcgagctcttccatcccaggacccatgactgcccacgctgttgagcttctgagggcagggaccatgttttctctctcagagccagggctgcatgttggaactggccctgacagtgtcagttaaactttcacgaaacaaatgttcctgaacttgaagccataggacaggactctgaagatcacagaatcacacagtgagaaaatgatgcccttttcagctctgcaccagtccttctcatgacagaaaggagagtgtctcgggttggttcgaggatgtctttaacccctctcatcgttgcccgtctcgacacagaaccaagaacaggcgggtcctagactcagactctagtggacgaatgtgtccagcaaaagtaacagcattactttattttacaattatcttcaacgtatacc

SEQ ID NO: 3698 - protein, 66 aa, Homosapiens
MSTNGERDEWRYMYIYMCIRISLQYKRSKPLLTQCGLPDHDCEGRRRKRVCSVQFHFYRILEMTTF

SEQ ID NO: 3699 - DNA, 452 bp, Homosapiens
gcagcagtcaaacctggtctatttatgccgaagcccaagtgcaggtgctcagaggagctcaagggcagaagaattagtcagggcacagatcttccggatcgctactgtatggggaccataacatcactgtaaggcccctgtgctgagccacaaaccccacttggaacaaagaaaactcccagagagcagagctgtgaggagggatagatattatgctgtggtgcagccagacaagccccaccttgttgtgcctccagaagaagcacattcttggcctgggtggtaacaataacatctggatggaaatatcaagtggtatcaggcttccagaccaccattcatgaaagagctaaccttacatatgcttgatcaaatgacgaaaagcttcagccagaaacagttttgcctgggttctgaatcttccctgagctcttaaattctacccagtgagc

SEQ ID NO: 3700 - protein, 35 aa, Homosapiens
MPKPKCRCSEELKGRRISQGTDLPDRYCMGTITSL

SEQ ID NO: 3701 - DNA, 3127 bp, Homosapiens
gagatacccggccagacaccctcacctgcggtgcccagctgcccaggctgaggcaagagaaggccagaaaccatgcccatggggtctctgcaaccgctggccaccttgtacctgctggggatgctggtcgcttcctgcctcggacggctcagctggtatgacccagatttccaggcaaggctcacccgttccaactcgaagtgccagggccagctggaggtctacctcaaggacggatggcacatggtttgcagccagagctggggccggagctccaagcagtgggaggaccccagtcaagcgtcaaaagtctgccagcggctgaactgtggggtgcccttaagccttggccccttccttgtcacctacacacctcagagctcaatcatctgctacggacaactgggctccttctccaactgcagccacagcagaaatgacatgtgtcactctctgggcctgacctgcttagaaccccagaagacaacacctccaacgacaaggcccccgcccaccacaactccagagcccacagctcctcccaggctgcagctggtggcacagtctggcggccagcactgtgccggcgtggtggagttctacagcggcagcctggggggtaccatcagctatgaggcccaggacaagacccaggacctggagaacttcctctgcaacaacctccagtgtggctccttcttgaagcatctgccagagactgaggcaggcagagcccaagacccaggggagccacgggaacaccagcccttgccaatccaatggaagatccagaactcaagctgtacctccctggagcattgcttcaggaaaatcaagccccagaaaagtggccgagttcttgccctcctttgctcaggtttccagcccaaggtgcagagccgtctggtggggggcagcagcatctgtgaaggcaccgtggaggtgcgccagggggctcagtgggcagccctgtgtgacagctcttcagccaggagctcgctgcggtgggaggaggtgtgccgggagcagcagtgtggcagcgtcaactcctatcgagtgctggacgctggtgacccaacatcccgggggctcttctgtccccatcagaagctgtcccagtgccacgaactttgggagagaaattcctactgcaagaaggtgtttgtcacatgccaggatccaaaccccgcaggcctggccgcaggcacggtggcaagcatcatcctggccctggtgctcctggtggtgctgctggtcgtgtgcggcccccttgcctacaagaagctagtgaagaaattccgccagaagaagcagcgccagtggattggcccaacgggaatgaaccaaaacatgtctttccatcgcaaccacacggcaaccgtccgatcccatgctgagaaccccacagcctcccacgtggataacgaatacagccaacctcccaggaactcccacctgtcagcttatccagctctggaaggggctctgcatcgctcctccatgcagcctgacaactcctccgacagtgactatgatctgcatggggctcagaggctgtaaagaactgggatccatgagcaaaaagccgagagccagacctgtttgtcctgagaaaactgtccgctcttcacttgaaatcatgtccctatttctaccccggccagaacatggacagaggccagaagccttccggacaggcgctgctgccccgagtggcaggccagctcacactctgctgcacaacagctcggccgcccctccacttgtggaagctgtggtgggcagagccccaaaacaagcagccttccaactagagactcgggggtgtctgaagggggccccctttccctgcccgctggggagcggcgtctcagtgaaatcggctttctcctcagactctgtccctggtaaggagtgacaaggaagctcacagctgggcgagtgcattttgaatagttttttgtaagtagtgcttttcctccttcctgacaaatcgagcgctttggcctcttctgtgcagcatccacccctgcggatccctctggggaggacaggaaggggactcccggagacctctgcagccgtggtggtcagaggctgctcacctgagcacaaagacagctctgcacattcaccgcagctgccagccaggggtctgggtgggcaccaccctgacccacagcgtcaccccactccctctgtcttatgactcccctccccaaccccctcatctaaagacaccttcctttccactggctgtcaagcccacagggcaccagtgccacccagggcccggcacaaaggggcgcctagtaaaccttaaccaacttggttttttgcttcacccagcaattaaaagtcccaagctgaggtagtttcagtccatcacagttcatcttctaacccaagagtcagagatggggctggtcatgttcctttggtttgaataactcccttgacgaaaacagactcctctagtacttggagatcttggacgtacacctaatcccatggggcctcggcttccttaactgcaagtgagaagaggaggtctacccaggagcctcgggtctgatcaagggagaggccaggcgcagctcactgcggcggctccctaagaaggtgaagcaacatgggaacacatcctaagacaggtcctttctccacgccatttgatgctgtatctcctgggagcacaggcatcaatggtccaagccgcataataagtctggaagagcaaaagggagttactaggatatggggtgggctgctcccagaatctgctcagctttctgcccccaccaacaccctccaaccaggccttgccttctgagagcccccgtggccaagcccaggtcacagatcttcccccgaccatgctgggaatccagaaacagggaccccatttgtcttcccatatctggtggaggtgagggggctcctcaaaagggaactgagaggctgctcttagggagggcaaaggttcgggggcagccagtgtctcccatcagtgccttttttaataaaagctctttcatctatagtttggccaccatacagtggcctcaaagcaaccatggcctacttaaaaaccaaaccaaaaataaagagtttagttgaggagaaa

SEQ ID NO: 3702 - protein, 495 aa, Homosapiens
MPMGSLQPLATLYLLGMLVASCLGRLSWYDPDFQARLTRSNSKCQGQLEVYLKDGWHMVCSQSWGRSSKQWEDPSQASKVCQRLNCGVPLSLGPFLVTYTPQSSIICYGQLGSFSNCSHSRNDMCHSLGLTCLEPQKTTPPTTRPPPTTTPEPTAPPRLQLVAQSGGQHCAGVVEFYSGSLGGTISYEAQDKTQDLENFLCNNLQCGSFLKHLPETEAGRAQDPGEPREHQPLPIQWKIQNSSCTSLEHCFRKIKPQKSGRVLALLCSGFQPKVQSRLVGGSSICEGTVEVRQGAQWAALCDSSSARSSLRWEEVCREQQCGSVNSYRVLDAGDPTSRGLFCPHQKLSQCHELWERNSYCKKVFVTCQDPNPAGLAAGTVASIILALVLLVVLLVVCGPLAYKKLVKKFRQKKQRQWIGPTGMNQNMSFHRNHTATVRSHAENPTASHVDNEYSQPPRNSHLSAYPALEGALHRSSMQPDNSSDSDYDLHGAQRL

SEQ ID NO: 3703 - DNA, 3136 bp, Homosapiens
atgcccccgctcaaaggagtcaccagtgtctcagaagggttctgggcttccatctgcttccccctccttttgggtccctctgagaagcctcccaagatcgagctgtgtacagagcgagtcctcgctggccactcggaaggcggcggacgtccgcgccggcgcactagcccagagcggcctggtctccgcccagtgggcggggcctcttaccgggggcggggccgaggcgtgcggcgagcgctggaggggtctcgtgggcgctcccgtggttgtggcccgggcggccgcgagcgtgtgtgtgtggcacgatgtcgtggtaactcagaggcgcgcgaggcggggcggccaacggggtcgcggggcgagcacgcgcgccactggggcgccggacgttgcaagggggtcacatccggtagggggcgggcctggcggaccccggaagtgtgggcgcggctgcggtttaacccgcggtggcggcggcgacggcggccctggcagggaaggatggagacgctgaaggataagaccctgcaggagctggaggagttgcagaatgactcggaggcgattgaccagctggccctggagtcccctgaggtccaggacctacagctggaacgggagatggcactggccaccaaccggagcctggcagagcggaacttggagttccagggtcccctggagatcagccgctcaaacctctcggatagataccaggagctccggaagctcgtggagcggtgccaggagcagaaggcaaagctggagaaattttcttcagcactgcagccagggaccttgttagaccttctgcaggtggaaggcatgaagatcgaagaagagtccgaggccatggctgagaagttcctggagggcgaggtgcccctggaaacgttcctggagaatttttcctccatgaggatgctgtcccacctgcgccgggttcgcgtggaaaagctccaggaagtggtgaggaagcccagggcttcccaggagctggccggcgatgcccctccaccccgtccaccacccccggtgcgcccagtcccccagggaacaccccctgtggttgaagagcagccgcagccaccattagccatgcctccctaccctttgccctacagcccatcccccagcctgcctgtgggccccactgcccatggagccctgccaccggcccctttcccagtagtgtcccagccctccttctacagcgggcctctgggccccacttacccggcagcccagcttggacccaggggtgctgcgggttactcctggtccccacagaggagcatgccaccccggccgggctatcctgggaccccaatgggtgcctctgggcctgggtaccccttgcggggaggcagggcccccagtcctggttatcctcaacagtccccataccccgcaacaggaggaaaacctccctacccaatacagcctcagctccccagctttccaggccagccccagccctcagtgcccctgcagcccccttatccccccgggcccgcccctccctatgggttcccaccaccgccggggcctgcctggcctgggtattagacacactcctggccctcggcccctccctagtcccacccacgctcaacctttggcccagccatcgccgagattcgagggtcaactggaagtggcgttggtgctccctgtggacttgcgtcggcacccagaggccttggagggacaaggcactgggcggtgtgactggtcatggcacttgctggccttctggccagaggtcctcctggaagcccctcctttcagtgcctggctgcagcggtgctagccaggctggagtccagcacctctcgccggtgtctgtgtgagtgagcgcatgtgcgcatttatgagcatctacttgcggctgcactcagggccatttgaacccagtgcagagttatctctatgaggaggccccgggtctccagccccctccatctcccctggggtttggcatatttgacatggagccccatgccaagggatgcagctgttggtgtctgtccagtccattcaaggctagcctgcccatgcactgtggcaggggttggattggagggagagaacagagttgggaaaaacaacaggtttgagtcctataaagccataatttaactccagtagctgatgtcagacaagcttgtcctatgtcctatttgagtggcagcagcgccagcccagcaagaaggctgggggttgtcaaggttgtccccagaccttgcttgcagtggttggagaacccagggggctgccttgggccctctggccagagggaagcgggcagctctagccctggagattgtggtcacattggggcttgtttaggattggagggccaggtcacctccccagccaccctcccttctctcctctggggtccccactttagggcgactttgcccgaggcccacgcatccatccactcctttagtgccttgaatctcattcacaagcagccccctcccttcccctccccttctcactctgttgatgtaatcctcccacccccagtgtccatcctaagacaggcatcaaaagaggccctaactttacttcccaaatggtgctttttaaaaaacaccatcactacattaggggcaattttttcacacctccctgtcttcagaatgtaaagggtggggattatgtctctgtttaatatgcagccccctgcactgtggggtttggggcatgttcagtaataagaatgaatacaatagacaaagggggtgtgatgagtgttaacttggttgttccagaggtaaaccaggtctcagggaagagcctggagctgctattgcttaggaagttgtacgtgccttgaaatgtccactacctgaggacgcagcatctggtgggcccggggctgctggggccaaggagggaccttgaccttctggtgcctgcccctccccggcctatgtgccatccgcgtgacgctaggtcagcgctgccggttctttaccaaatgtgcttgcttctcctaagttatttataaagagaaatcactaatggactctactggtttgagtgcttctgagctggatgaccgaccgcctgtatgtttgtgtaattaattgccataataaactttgatgagtcacat

SEQ ID NO: 3704 - protein, 523 aa, Homosapiens
MPPLKGVTSVSEGFWASICFPLLLGPSEKPPKIELCTERVLAGHSEGGGRPRRRTSPERPGLRPVGGASYRGRGRGVRRALEGSRGRSRGCGPGGRERVCVARCRGNSEAREAGRPTGSRGEHARHWGAGRCKGVTSGRGRAWRTPEVWARLRFNPRWRRRRRPWQGRMETLKDKTLQELEELQNDSEAIDQLALESPEVQDLQLEREMALATNRSLAERNLEFQGPLEISRSNLSDRYQELRKLVERCQEQKAKLEKFSSALQPGTLLDLLQVEGMKIEEESEAMAEKFLEGEVPLETFLENFSSMRMLSHLRRVRVEKLQEVVRKPRASQELAGDAPPPRPPPPVRPVPQGTPPVVEEQPQPPLAMPPYPLPYSPSPSLPVGPTAHGALPPAPFPVVSQPSFYSGPLGPTYPAAQLGPRGAAGYSWSPQRSMPPRPGYPGTPMGASGPGYPLRGGRAPSPGYPQQSPYPATGGKPPYPIQPQLPSFPGQPQPSVPLQPPYPPGPAPPYGFPPPPGPAWPGY

SEQ ID NO: 3705 - DNA, 1626 bp, Homosapiens
ccggaagtgtgggcgcggctgcggtttaacccgcggtggcggcggcgacggcggccctggcagggaaggatggagacgctgaaggataagaccctgcaggagctggaggagttgcagaatgactcggaggcgattgaccagctggccctggagtcccctgaggtccaggacctacagctggaacgggagatggcactggccaccaaccggagcctggcagagcggaacttggagttccagggtcccctggagatcagccgctcaaacctctcggatagataccaggagctccggaagctcgtggagcggtgccaggagcagaaggcaaagctggagaaattttcttcagcactgcagccagggaccttgttagaccttctgcaggtggaaggcatgaagatcgaagaagagtccgaggtgagagggcgaggcgacacccctcttccctggacggggtgtcagtccctgcagcaggggcccttggaaggagaagcagatgtctgcaaagcatggaacaagggagctttcgtagatggcagaggtgaaggacatctttagtcctggggaggccttttgggtataaataacaggaacccagtcccactagctgaagcagaaacgggtgacagtggacaagggcagctcgcagccctggatggtagggcagcacagcaggaggcccccaggggctgaggccagctccctactccactctccctgcttcctgcttccctccggccacctcttcagcctctgtgggcaaactggtgctgtccactctgtgtctgggtggaagaagcttctaggccctcccagtccctgggctagtgctcatccaggtgttcagcacatatatgcagtggccactgtgggcctggcatgatgccaaggtgccaggacagaggtgaccacgacagagacagtcctcgccttcaagggactgacattctagtgagggagacagtgcatgtaccatatgtcagctgtgagaaggggcgtatgggcagggaagaggagggggtgcctgaggcggcgtgaggtgggagggctgcagctgaactcagaccctggggaaaatcaagaggccttgatcccagctgcccctgttgtcactggaccttatgtcttccaggccatggctgagaagttcctggagggcgaggtgcccctggaaacgttcctggagaatttttcctccatgaggatgctgtcccacctgcgccgggttcgcgtggaaaagctccaggaagtggtgaggaagcccagggcttcccaggagctggccggcgatgcccctccaccccgtccaccacccccggtgcgcccagtcccccagggaacaccccctgtggttgaagagcagccgcagccaccattagccatgcctccctaccctttgccctacagcccatcccccagcctgcctgtgggccccactgcctatgtgccatccgcgtgacgctaggtcagcgctgccggttctttaccaaatgtgcttgcttctcctaagttatttataaagagaaatcactaatggactctactggtttgagtgcttctgagctggatgaccgaccgcctgtatgtttgtgtaattaattgccataataaactttgatgagtcac

SEQ ID NO: 3706 - protein, 163 aa, Homosapiens
MYHMSAVRRGVWAGKRRGCLRRREVGGLQLNSDPGENQEALIPAAPVVTGPYVFQAMAEKFLEGEVPLETFLENFSSMRMLSHLRRVRVEKLQEVVRKPRASQELAGDAPPPRPPPPVRPVPQGTPPVVEEQPQPPLAMPPYPLPYSPSPSLPVGPTAYVPSA

SEQ ID NO: 3707 - DNA, 1395 bp, Homosapiens
gcaccttcctcccgtcttgccttctccctcgagttgggacccgggaagaaccatgaagtggctgctgctgctgggtctggtggcactctctgagtgcatcatgtacaaggtccccctcatcagaaagaagtccttgaggcgcaccctgtccgagcgtggcctgctgaaggacttcctgaagaagcacaacctcaacccagccagaaagtacttcccccagtggaaggctcccaccctggtagatgaacagcccctggagaactacctggatatggagtacttcggcactatcggcatcggaactcctgcccaggatttcaccgtcgtctttgacaccggctcctccaacctgtgggtgccctcagtctactgctccagtcttgcctgcaccaaccacaaccgcttcaaccctgaggattcttccacctaccagtccaccagcgagacagtctccatcacctacggcaccggcagcatgacaggcatcctcggatacgacactgtccaggttggaggcatctctgacaccaatcagatcttcggcctgagcgagacggaacctggctccttcctgtattatgctcccttcgatggcatcctggggctggcctaccccagcatttcctcctccggggccacacccgtctttgacaacatctggaaccagggcctggtttctcaggacctcttctctgtctacctcagcgccgatgaccagagtggcagcgtggtgatctttggtggcattgactcttcttactacactggaagtctgaactgggtgcctgttaccgtcgagggttactggcagatcaccgtggacagcatcaccatgaacggagaggccatcgcctgcgctgagggctgccaggccattgttgacaccggcacctctctgctgaccggcccaaccagccccattgccaacatccagagcgacatcggagccagcgagaactcagatggcgacatggtggtcagctgctcagccatcagcagcctgcccgacatcgtcttcaccatcaatggagtccagtaccccgtgccacccagtgcctacatcctgcagagcgaggggagctgcatcagtggcttccagggcatgaacctccccaccgaatctggagagctttggatcctgggtgatgtcttcatccgccagtactttaccgtcttcgacagggcaaacaaccaggtcggcctggcccccgtggcttaagcctaagtctcttcagccacctcccaggaagatctggcctctgtcctgtgcccactttagatgtatctaattctcctgactgttcttcccaggggagtgtggaggtcttggccctgttccctgtcctaccaataacgtagaataaaaacataacccactgaaacaggttttgtgga

SEQ ID NO: 3708 - protein, 388 aa, Homosapiens
MKWLLLLGLVALSECIMYKVPLIRKKSLRRTLSERGLLKDFLKKHNLNPARKYFPQWKAPTLVDEQPLENYLDMEYFGTIGIGTPAQDFTVVFDTGSSNLWVPSVYCSSLACTNHNRFNPEDSSTYQSTSETVSITYGTGSMTGILGYDTVQVGGISDTNQIFGLSETEPGSFLYYAPFDGILGLAYPSISSSGATPVFDNIWNQGLVSQDLFSVYLSADDQSGSVVIFGGIDSSYYTGSLNWVPVTVEGYWQITVDSITMNGEAIACAEGCQAIVDTGTSLLTGPTSPIANIQSDIGASENSDGDMVVSCSAISSLPDIVFTINGVQYPVPPSAYILQSEGSCISGFQGMNLPTESGELWILGDVFIRQYFTVFDRANNQVGLAPVA

SEQ ID NO: 3709 - DNA, 661 bp, Homosapiens
ggggaagaaatgtctgggctcacctcctagttcctccttggagagaagtacccctgagagctcagggagcttaacttgcttcttgccctcagcatcaccatgaacggagaggccatcgcctgcgctgagggctgccaggccattgttgacaccggcacctctctgctgaccggcccaaccagccccattgccaacatccagagcgacatcggagccagcgagaactcagatggcgacatggtggtcagctgctcagccatcagcagcctgcccgacatcgtcttcaccatcaatggagtccagtaccccgtgccacccagtgcctacatcctgcagagcgaggggagctgcatcagtggcttccagggcatgaacctccccaccgaatctggagagctttggatcctgggtgatgtcttcatccgccagtactttaccgtcttcgacagggcaaacaaccaggtcggcctggcccccgtggcttaagcctaagtctcttcagccacctcccaggaagatctggcctctgtcctgtgcccactttagatgtatctaattctcctgactgttcttcccaggggagtgtggaggtcttggccctgttccctgtcctaccaataacgtagaataaaaacataacccactgaaacaggttttgtgg

SEQ ID NO: 3710 - protein, 128 aa, Homosapiens
MNGEAIACAEGCQAIVDTGTSLLTGPTSPIANIQSDIGASENSDGDMVVSCSAISSLPDIVFTINGVQYPVPPSAYILQSEGSCISGFQGMNLPTESGELWILGDVFIRQYFTVFDRANNQVGLAPVA

SEQ ID NO: 3711 - DNA, 882 bp, Homosapiens
ggggaagaaatgtctgggctcacctcctagttcctccttggagagaagtacccctgagagctcagggagcttaacttgcttcttgccctcagcatcaccatgaacggagaggccatcgcctgcgctgagggctgccaggccattgttgacaccggcacctctctgctgaccggcccaaccagccccattgccaacatccagagcgacatcggagccagcgagaactcagatggcgacatggtggtcagctgctcagccatcagcagcctgcccgacatcgtcttcaccatcaatggagtccagtaccccgtgccacccagtgcctacatcctgcagagcgaggggagctgcatcagtggcttccagggcatgaacctccccaccgaatctggagagctttggatcctgggtgatgtcttcatccgccagtactttaccgtcttcgacagggcaaacaaccaggtcggcctggcccccgtggcttaagcctaagtctcttcagccacctcccaggaagatctggcctctgtcctgtgcccactttagatgtatctaattctcctgactgttcttcccaggggagtgtggaggtcttggccctgttccctgtcctaccaataacgtagaataaaaacataacccactgaaacaggttttgtggagctgcttctctttgctggtctttttccttcacattactggggttagaacgccagggcagggatgaaaatgaccacatccatttggatggcacccaacatagtgaccccagcagctgacacttcatgatggagccaagaagacagagaggcttcgggggttgtgctggaagcatcataaaaagacctgggggtcaaaatactgggctaattgtcttctcat

SEQ ID NO: 3712 - protein, 128 aa, Homosapiens; identical to SEQ ID NO: 3710

SEQ ID NO: 3713 - DNA, 1381 bp, Homosapiens
gcaccttcctcccatcttgccttctccctcgagttgggacccgggaagaaccatgaagtggctgctgctgctgggtctggtggcgctctctgagtgcatcatgtacaaggtccccctcatcagaaagaagtccttgaggcgcaccctgtccgagcgtggcctgctgaaggacttcctgaagaagcacaacctcaacccagccagaaagtacttcccccagtgggaggctcccaccctggtagatgaacagcccctggagaactacctggatatggagtacttcggcactatcggcatcggaactcctgcccaggatttcaccgtcgtctttgacaccggctcctccaacctgtgggtgccctcagtctactgctccagtcttgcctgcaccaaccacaaccgcttcaaccctgaggattcttccacctaccagtccaccagcgagacagtctccatcacctacggcaccggcagcatgacaggcatcctcggatacgacactgtccaggttggaggcatctctgacaccaatcagatcttcggcctgagcgagacggaacctggctccttcctgtattatgctcccttcgatggcatcctggggctggcctaccccagcatttcctcctccggggccacacccgtctttgacaacatctggaaccagggcctggtttctcaggacctcttctctgtctacctcagcgccgatgacaagagtggcagcgtggtgatctttggtggcattgactcttcttactacactggaagtctgaactgggtgcctgttaccgtcgagggttactggcagatcaccgtggacagcatcaccatgaacggagagaccatcgcctgtgctgagggctgccaggccattgttgacaccggcacctctctgctgaccggcccaaccagccccattgccaacatccagagcgacatcggagccagcgagaactcagatggcgacatggtggtcagctgctcagccatcagcagcctgcccgacatcgtcttcaccatcaatggagtccagtaccccgtgccacccagtgcctacatcctgcagagcgaggggagctgcatcagtggcttccagggcatgaacgtccccaccgaatctggagagctttggatcctgggtgatgtcttcatccgccagtactttaccgtcttcgacagggcaaacaaccaggtcggcctggcccctgtggcttaagcctaagtctcttcagccacctcccaggaagatctggcctccgtcctatgcccactttagatgtatctaattctcctgactgttcttcccaggggagtgtgaaggtcttggccctgttccctgtcctaccaataacgtagaataaaaacataacccactgaa

SEQ ID NO: 3714 - protein, 388 aa, Homosapiens; identical to SEQ ID NO: 559

SEQ ID NO: 3715 - DNA, 3733 bp, Homosapiens
gcctctcggagaggcatcagcaggcgggcggcgttgcctttgtgtgtttcgcttcgaggtgccagagaccctccccacaatcgtccgccgcgtcccctcgcggccctcggcccctcctctcggcgtcccaagcccccctgctcagctctgcgtgccatttcggggatcgctggttcgctccccacggcgccaggaggaggggcgagggccggcagccccctctcccgcgcgcggcgcaggagccgagcccagcccgggggacccgccgccgccggtcatgtgggccggactgctccttcgggccgcctgtgtcgcgctcctgctgccgggggcaccagcccgaggctacaccgggaggaagccgcccgggcacttcgcggccgagagacgccgactgggcccccacgtctgcctctctgggtttgggagtggctgctgccctggctgggcgccctctatgggtggtgggcactgcaccctgcccctctgctccttcggctgtgggagtggcatctgcatcgctcccaatgtctgctcctgccaggatggagagcaaggggccacctgcccagaaacccatggaccatgtggggagtacggctgtgaccttacctgcaaccatggaggctgtcaggaggtggcccgagtgtgccccgtgggcttctcgatgacggagacagctgttggcatcaggtgtacagacattgacgaatgtgtaacctcctcctgcgagggccactgtgtgaacacagaaggtgggtttgtgtgcgagtgtgggccgggcatgcagctgtctgccgaccgccacagctgccaagacactgacgaatgcctagggactccctgtcagcagagatgtaaaaacagcattggcagctacaagtgttcctgtcgaactggcttccaccttcatggcaaccggcactcctgtatgtaaacgagtgtcggaggccattggagaggcgagtctgtcaccattcctgccacaacaccgtgggcagcttcctatgcacatgccgacctggcttcaggctccgagctgaccgcgtgtcctgtgaagctttcccgaaagccgtgctggccccatctgccatcctgcaaccccggcaacacccgtccaagatgcttctgttgcttcctgaggccggccggcctgccctgtccccaggacatagccctccttctggggctccagggcccccagccggagtcaggaccacccgcctgccatctcccaccccacgactacccacatcctccccttctgcccctgtgtggctgctgtccaccctgctggccaccccagtgcctactgcctccctgctggggaacctcagacccccctcactccttcagggggaggtgatggggaccccttcctcacccaggggccctgagtccccccgactggcagcagggccctctccctgctggcacctgggagccatgcatgaatcaaggagtcgctggacagagcctgggtgttcccagtgctggtgcgaggacgggaaggtgacctgtgaaaaggtgaggtgtgaagctgcttgttcccacccaattccctccagagatggtgggtgctgcccatcgtgcacaggctgttttcacagtggtgtcgtccgagctgaaggggatgtgttttcacctcccaatgagaactgcaccgtctgtgtctgtctggctggaaacgtgtcctgcatctctcctgagtgtccttctggcccctgtcagacccccccacagacggattgctgtacttgtgttccagtgagatgctatttccacggccggtggtacgcagacggggctgtgttcagtgggggtggtgacgagtgtaccacctgtgtttgccagaatggggaggtggagtgctccttcatgccctgccctgagctggcctgcccccgagaagagtggcggctgggccctgggcagtgttgcttcacctgccaggagcccacaccctcgacaggctgctctcttgacgacaacggggttgagtttccgattggacagatctggtcgcctggtgacccctgtgagttatgcatctgccaggcagatggctcggtgagctgcaagaggacagactgtgtggactcctgccctcacccgatccggatccctggacagtgctgcccagactgttcagcaggctgcacctacacaggcagaatcttctataacaacgagaccttcccgtctgtgctggacccatgtctgagctgcatctgcctgctgggctcagtggcctgttcccccgtggactgccccatcacctgtacctaccctttccaccctgacggggagtgctgccccgtgtgccgagactgcaactacgagggaaggaaggtggcgaatggccaggtgttcaccttggatgatgaaccctgcacccggtgcacgtgccagctgggagaggtgagctgtgagaaggttccctgccagcgggcctgtgccgaccctgccctgcttcctggggactgctgctcttcctgtccagattccctgtctcctctggaagaaaagcaggggctctcccctcacggaaatgtggcattcagcaaagctggtcggagcctgcatggagacactgaggcccctgtcaactgtagctcctgtcctgggcccccgacagcatcaccctcgaggccggtgcttcatctcctccagctccttttaagaacgaacttgatgaaaacacagactttacctacaagcccggcaggagctcatggtccacactcactcgctttggggctgacagccactttcccaggggagcctggggcctcccctcgactctcaccagggccttcgacccctccaggagcccccactctacctctagcttccccaggggctcctcagccacctcctgtgactccagagcgctcgttctcagcctctggggcccagatagtgtccaggtggcctcctctgcctggcaccctcctgacggaagcttcagcactttccatgatggaccccagcccctcgaagacccccatcaccctcctcgggcctcgcgtgctttctcccaccacctctagactctccacagcccttgcagccaccacccaccctggcccccagcagcccccagtgggggcttctcggggggaagagtccaccatgtaaggaggtcactgtgtccgggagactctggagagaggacctctgccagtggcccagggtgtgtgcagggcagctccaaggatgaacctggtggggatgcctgggctccctcctgcaggggccctggtgaggatggaagacccccaaggctggatgtaaccttgttcccaagaagtgtttggaatgtgctgtaagaatggaggaagtcgtttccactgtcagcatcctccctggaccgcgtggctggctcatcttttgagaagggttgggactgccaagttctcctggaggaagagttgcgtccggctgggattccactcactgggactgtaccgccaggtgtcatgcgtctctctgaggtttcctgattaaaggttgtctcggtttccccatgctgcactgctcattcaccgcttacctgtgggaaggtgggaaacgtgaccccaagcccacaggtggtaagtgagcatccacctttaccccactgctggggagaaaagctggcaccaaattgtgactgggctggggaagggtctcctgtaagcacttggcggccttttatattgggagacttctttttatttttttccccaag

SEQ ID NO: 3716 - protein, 672 aa, Homosapiens
MLLLLPEAGRPALSPGHSPPSGAPGPPAGVRTTRLPSPTPRLPTSSPSAPVWLLSTLLATPVPTASLLGNLRPPSLLQGEVMGTPSSPRGPESPRLAAGPSPCWHLGAMHESRSRWTEPGCSQCWCEDGKVTCEKVRCEAACSHPIPSRDGGCCPSCTGCFHSGVVRAEGDVFSPPNENCTVCVCLAGNVSCISPECPSGPCQTPPQTDCCTCVPVRCYFHGRWYADGAVFSGGGDECTTCVCQNGEVECSFMPCPELACPREEWRLGPGQCCFTCQEPTPSTGCSLDDNGVEFPIGQIWSPGDPCELCICQADGSVSCKRTDCVDSCPHPIRIPGQCCPDCSAGCTYTGRIFYNNETFPSVLDPCLSCICLLGSVACSPVDCPITCTYPFHPDGECCPVCRDCNYEGRKVANGQVFTLDDEPCTRCTCQLGEVSCEKVPCQRACADPALLPGDCCSSCPDSLSPLEEKQGLSPHGNVAFSKAGRSLHGDTEAPVNCSSCPGPPTASPSRPVLHLLQLLLRTNLMKTQTLPTSPAGAHGPHSLALGLTATFPGEPGASPRLSPGPSTPPGAPTLPLASPGAPQPPPVTPERSFSASGAQIVSRWPPLPGTLLTEASALSMMDPSPSKTPITLLGPRVLSPTTSRLSTALAATTHPGPQQPPVGASRGEESTM

SEQ ID NO: 3717 - DNA, 3529 bp, Homosapiens
gcctctcggagaggcatcagcaggcgggcggcgttgcctttgtgtgtttcgcttcgaggtgccagagaccctccccacaatcgtccgccgcgtcccctcgcggccctcggcccctcctctcggcgtcccaagcccccctgctcagctctgcgtgccatttcggggatcgctggttcgctccccacggcgccaggaggaggggcgagggccggcagccccctctcccgcgcgcggcgcaggagccgagcccagcccgggggacccgccgccgccggtcatgtgggccggactgctccttcgggccgcctgtgtcgcgctcctgctgccgggggcaccagcccgaggctacaccgggaggaagccgcccgggcacttcgcggccgagagacgccgactgggcccccacgtctgcctctctgggtttgggagtggctgctgccctggctgggcgccctctatgggtggtgggcactgcaccctgcccctctgctccttcggctgtgggagtggcatctgcatcgctcccaatgtctgctcctgccaggatggagagcaaggggccacctgcccagaaacccatggaccatgtggggagtacggctgtgaccttacctgcaaccatggaggctgtcaggaggtggcccgagtgtgccccgtgggcttctcgatgacggagacagctgttggcatcaggtgtacagacattgacgaatgtgtaacctcctcctgcgagggccactgtgtgaacacagaaggtgggtttgtgtgcgagtgtgggccgggcatgcagctgtctgccgaccgccacagctgccaagacactgacgaatgcctagggactccctgtcagcagagatgtaaaaacagcattggcagctacaagtgttcctgtcgaactggcttccaccttcatggcaaccggcactcctgtatgtaaacgagtgtcggaggccattggagaggcgagtctgtcaccattcctgccacaacaccgtgggcagcttcctatgcacatgccgacctggcttcaggctccgagctgaccgcgtgtcctgtgaagctttcccgaaagccgtgctggccccatctgccatcctgcaaccccggcaacacccgtccaagatgcttctgttgcttcctgaggccggccggcctgccctgtccccaggacatagccctccttctggggctccagggcccccagccggagtcaggaccacccgcctgccatctcccaccccacgactacccacatcctccccttctgcccctgtgtggctgctgtccaccctgctggccaccccagtgcctactgcctccctgctggggaacctcagacccccctcactccttcagggggaggtgatggggaccccttcctcacccaggggccctgagtccccccgactggcagcagggccctctccctgctggcacctgggagccatgcatgaatcaaggagtcgctggacagagcctgggtgttcccagtgctggtgcgaggacgggaaggtgacctgtgaaaaggtgaggtgtgaagctgcttgttcccacccaattccctccagagatggtgggtgctgcccatcgtgcacaggctgttttcacagtggtgtcgtccgagctgaaggggatgtgttttcacctcccaatgagaactgcaccgtctgtgtctgtctggctggaaacgtgtcctgcatctctcctgagtgtccttctggcccctgtcagacccccccacagacggattgctgtacttgtgttccagtgagatgctatttccacggccggtggtacgcagacggggctgtgttcagtgggggtggtgacgagtgtaccacctgtgtttgccagaatggggaggtggagtgctccttcatgccctgccctgagctggcctgcccccgagaagagtggcggctgggccctgggcagtgttgcttcacctgccaggagcccacaccctcgacaggctgctctcttgacgacaacggggttgagtttccgattggacagatctggtcgcctggtgacccctgtgagttatgcatctgccaggcagatggctcggtgagctgcaagaggacagactgtgtggactcctgccctcacccgatccggatccctggacagtgctgcccagactgttcagcaggctgcacctacacaggcagaatcttctataacaacgagaccttcccgtctgtgctggacccatgtctgagctgcatctgcctgctgggctcagtggcctgttcccccgtggactgccccatcacctgtacctaccctttccaccctgacggggagtgctgccccgtgtgccgagactgcaactacgagggaaggaaggtggcgaatggccaggtgttcaccttggatgatgaaccctgcacccggtgcacgtgccagctgggagaggtgagctgtgagaaggttccctgccagcgggcctgtgccgaccctgccctgcttcctggggactgctgctcttcctgtccagattccctgtctcctctggaagaaaagcaggggctctcccctcacggaaatgtggcattcagcaaagctggtcggagcctgcatggagacactgaggcccctgtcaactgtagctcctgtcctgggcccccgacagcatcaccctcgaggccggtgcttcatctcctccagctccttttaagaacgaacttgatgaaaacacagactttacctacaagcccggcaggagctcatggtccacactcactcgctttggggctgacagccactttcccaggggagcctggggcctcccctcgactctcaccagggccttcgacccctccaggagcccccactctacctctagcttccccaggggctcctcagccacctcctgtgactccagagcgctcgttctcagcctctggggcccagatagtgtccaggtggcctcctctgcctggcaccctcctgacggaagcttcagcactttccatgatggaccccagcccctcgaagacccccatcaccctcctcgggcctcgcgtgctttctcccaccacctctagactctccacagcccttgcagccaccacccaccctggcccccagcagcccccagtgggggcttctcggggggaagagtccaccatgtaaggaggtcactgtgtccgggagactctggagagaggacctctgccagtggcccagggtgtgtgcagggcagctccaaggatgaacctggtggggatgcctgggctccctcctgcaggggccctggtgaggatggaagacccccaaggctggatgtaaccttgttcccaagaagtgtttggaatgtgctgtaagaatggaggaagtcgtttccactgtcagcatcctccctggaccgcgtggctggctcatcttttgagaagggttgggactgccaagttctcctggaggaagagttgcgtccggctgggattccactcactgggactgtaccgccaggtgtcatgcgtctctctgaggtttcctgattaaaggttgtctcggtttcccc

SEQ ID NO: 3718 - protein, 672 aa, Homosapiens; identical to SEQ ID NO: 3716

SEQ ID NO: 3719 - DNA, 3590 bp, Homosapiens
gcctctcggagaggcatcagcaggcgggcggcgttgcctttgtgtgtttcgcttcgaggtgccagagaccctccccacaatcgtccgccgcgtcccctcgcggccctcggcccctcctctcggcgtcccaagcccccctgctcagctctgcgtgccatttcggggatcgctggttcgctccccacggcgccaggaggaggggcgagggccggcagccccctctcccgcgcgcggcgcaggagccgagcccagcccgggggacccgccgccgccggtcatgtgggccggactgctccttcgggccgcctgtgtcgcgctcctgctgccgggggcaccagcccgaggctacaccgggaggaagccgcccgggcacttcgcggccgagagacgccgactgggcccccacgtctgcctctctgggtttgggagtggctgctgccctggctgggcgccctctatgggtggtgggcactgcaccctgcccctctgctccttcggctgtgggagtggcatctgcatcgctcccaatgtctgctcctgccaggatggagagcaaggggccacctgcccagaaacccatggaccatgtggggagtacggctgtgaccttacctgcaaccatggaggctgtcaggaggtggcccgagtgtgccccgtgggcttctcgatgacggagacagctgttggcatcaggtgtacagacattgacgaatgtgtaacctcctcctgcgagggccactgtgtgaacacagaaggtgggtttgtgtgcgagtgtgggccgggcatgcagctgtctgccgaccgccacagctgccaagacactgacgaatgcctagggactccctgtcagcagagatgtaaaaacagcattggcagctacaagtgttcctgtcgaactggcttccaccttcatggcaaccggcactcctgtatgtaaacgagtgtcggaggccattggagaggcgagtctgtcaccattcctgccacaacaccgtgggcagcttcctatgcacatgccgacctggcttcaggctccgagctgaccgcgtgtcctgtgaagctttcccgaaagccgtgctggccccatctgccatcctgcaaccccggcaacacccgtccaagatgcttctgttgcttcctgaggccggccggcctgccctgtccccaggacatagccctccttctggggctccagggcccccagccggagtcaggaccacccgcctgccatctcccaccccacgactacccacatcctccccttctgcccctgtgtggctgctgtccaccctgctggccaccccagtgcctactgcctccctgctggggaacctcagacccccctcactccttcagggggaggtgatggggaccccttcctcacccaggggccctgagtccccccgactggcagcagggccctctccctgctggcacctgggagccatgcatgaatcaaggagtcgctggacagagcctgggtgttcccagtgctggtgcgaggacgggaaggtgacctgtgaaaaggtgaggtgtgaagctgcttgttcccacccaattccctccagagatggtgggtgctgcccatcgtgcacaggctgttttcacagtggtgtcgtccgagctgaaggggatgtgttttcacctcccaatgagaactgcaccgtctgtgtctgtctggctggaaacgtgtcctgcatctctcctgagtgtccttctggcccctgtcagacccccccacagacggattgctgtacttgtgttccagtgagatgctatttccacggccggtggtacgcagacggggctgtgttcagtgggggtggtgacgagtgtaccacctgtgtttgccagaatggggaggtggagtgctccttcatgccctgccctgagctggcctgcccccgagaagagtggcggctgggccctgggcagtgttgcttcacctgccaggagcccacaccctcgacaggctgctctcttgacgacaacggggttgagtttccgattggacagatctggtcgcctggtgacccctgtgagttatgcatctgccagggcggggaggcaggggccggtgtcaccggtggggtcttggtgaagttcctccttcctccaggcagatggctcggtgagctgcaagaggacagactgtgtggactcctgccctcacccgatccggatccctggacagtgctgcccagactgttcagcaggctgcacctacacaggcagaatcttctataacaacgagaccttcccgtctgtgctggacccatgtctgagctgcatctgcctgctgggctcagtggcctgttcccccgtggactgccccatcacctgtacctaccctttccaccctgacggggagtgctgccccgtgtgccgagactgcaactacgagggaaggaaggtggcgaatggccaggtgttcaccttggatgatgaaccctgcacccggtgcacgtgccagctgggagaggtgagctgtgagaaggttccctgccagcgggcctgtgccgaccctgccctgcttcctggggactgctgctcttcctgtccagattccctgtctcctctggaagaaaagcaggggctctcccctcacggaaatgtggcattcagcaaagctggtcggagcctgcatggagacactgaggcccctgtcaactgtagctcctgtcctgggcccccgacagcatcaccctcgaggccggtgcttcatctcctccagctccttttaagaacgaacttgatgaaaacacagactttacctacaagcccggcaggagctcatggtccacactcactcgctttggggctgacagccactttcccaggggagcctggggcctcccctcgactctcaccagggccttcgacccctccaggagcccccactctacctctagcttccccaggggctcctcagccacctcctgtgactccagagcgctcgttctcagcctctggggcccagatagtgtccaggtggcctcctctgcctggcaccctcctgacggaagcttcagcactttccatgatggaccccagcccctcgaagacccccatcaccctcctcgggcctcgcgtgctttctcccaccacctctagactctccacagcccttgcagccaccacccaccctggcccccagcagcccccagtgggggcttctcggggggaagagtccaccatgtaaggaggtcactgtgtccgggagactctggagagaggacctctgccagtggcccagggtgtgtgcagggcagctccaaggatgaacctggtggggatgcctgggctccctcctgcaggggccctggtgaggatggaagacccccaaggctggatgtaaccttgttcccaagaagtgtttggaatgtgctgtaagaatggaggaagtcgtttccactgtcagcatcctccctggaccgcgtggctggctcatcttttgagaagggttgggactgccaagttctcctggaggaagagttgcgtccggctgggattccactcactgggactgtaccgccaggtgtcatgcgtctctctgaggtttcctgattaaaggttgtctcggtttcccc

SEQ ID NO: 3720 - protein, 374 aa, Homosapiens
MLLLLPEAGRPALSPGHSPPSGAPGPPAGVRTTRLPSPTPRLPTSSPSAPVWLLSTLLATPVPTASLLGNLRPPSLLQGEVMGTPSSPRGPESPRLAAGPSPCWHLGAMHESRSRWTEPGCSQCWCEDGKVTCEKVRCEAACSHPIPSRDGGCCPSCTGCFHSGVVRAEGDVFSPPNENCTVCVCLAGNVSCISPECPSGPCQTPPQTDCCTCVPVRCYFHGRWYADGAVFSGGGDECTTCVCQNGEVECSFMPCPELACPREEWRLGPGQCCFTCQEPTPSTGCSLDDNGVEFPIGQIWSPGDPCELCICQGGEAGAGVTGGVLVKFLLPPGRWLGELQEDRLCGLLPSPDPDPWTVLPRLFSRLHLHRQNLL

SEQ ID NO: 3721 - DNA, 747 bp, Homosapiens
ctctgaaatagacacttctggtggcattgttttttctaaaaatagggttttatggtactctgtaggttcctggtgagccagggttccagggaaaagctgagaaaggatttggatggtggtgacggtgcaggctttggctgctacaggaagcggaggagaccagaatcccaaccctgaccttccttctccttaaagatgcatagacttcctggaaggctcacatggcctttctcaagtagccgatcctctttaggggagacctgccatcttccagccgcgtcatgttgcctttcagggcaagccttggccagtttgcagcgttgctgtttcttttgcagggcggggaggcaggggccggtgtcaccggtggggtcttggtgaagttcctccttcctccaggcagatggctcggtgagctgcaagaggacagactgtgtggactcctgccctcacccgatccggatccctggacagtgctgcccagactgttcagcaggctgcacctacacaggcagaatcttctataacaacgagaccttcccgtctgtgctggacccatgtctgagctgcatctgcctgctgggctcagtggcctgttcccccgtggactgccccatcacctgtacctaccctttccaccctgacggggagtgctgccccgtgtgccgagactgcaactacgagggaaggaaggtggcgaatggccaggtgttcaccttggatgatgaaccctgcacccggtgcacg

SEQ ID NO: 3722 - protein, 81 aa, Homosapiens
MLPFRASLGQFAALLFLLQGGEAGAGVTGGVLVKFLLPPGRWLGELQEDRLCGLLPSPDPDPWTVLPRLFSRLHLHRQNLL

SEQ ID NO: 3723 - DNA, 1010 bp, Homosapiens
atttcctttctaatcctgatgattgctttagattgtggtcttattcaaaggtggggatgactgaggagggtgtttcctgataagcacgtgttccttaactcacccatccacctggagatcctttcacaccgagcggaagacagaaccagccacaggtttcatcgacggtgacttgattgagagtttcctggatattagccgccccaagatgcaggaggtggtggcaaacctacagtatgacgatggcagcggtatgaagcgagaggccactgcagacgacctcatcaaggttgtggaggagctaactcggatccattagccaagggcagggggcccctttgctgaccctccccaaaggctttgccctgctgccctccccctcctctccaccatcgtcttcttggccatgggaggcctttccctaagccagctgcccccagagccacagttcccctatgtggaagtggggcgggcttcatagagacttgggaatgagctgaaggtgaaacattttctccctggatttttaccagtctcacatgattccagccatcaccttagaccaccaagccttgattggtgttgccagttgtcctccttccggggaaggattttgcagttctttggctgaaaggaagctgtgcgtgtgtgtgtgtgtatgtgtgtgtgtgtatgtgtatctcacactcatgcattgtcctctttttatttagattggcagtgtagggagttgtgggtagtggggaagagggttaggagggtttcattgtctgtgaagtgagaccttccttttacttttcttctattgcctctgagagcatcaggcctagaggcctgactgccaagccatgggtagcctgggtgtaaaacctggagatggtggatgatccccacgccacagcccttttgtctctgcaaactgccttcttcggaaagaagaaggtgggaggatgtgaattgttagtttctgagttttaccaaataaagtagaatataagaagaaaggtaca

SEQ ID NO: 3724 - protein, 36 aa, Homosapiens
MQEVVANLQYDDGSGMKREATADDLIKVVEELTRIH

SEQ ID NO: 3725 - DNA, 1168 bp, Homosapiens
gcattctgagggactggggagagcaactgtacaagacctaggtgtttactagaggaggctgcagcacattagccctccctgagctgctcacctgggctgccctttacgtagaggatacatgctgtggggttgagctctctgcagctcactgcctccttcacttcttcagggctggtgacctcactgtcagagagctggtacaacctcctgctggacatgcagaatcgactcaataaagtcatcaaaagtgtggggaagatcgagcactcctggagatcctttcacaccgagcggaagacagaaccagccacaggtttcatcgacggtgacttgattgagagtttcctggatattagccgccccaagatgcaggaggtggtggcaaacctacagtatgacgatggcagcggtatgaagcgagaggccactgcagacgacctcatcaaggttgtggaggagctaactcggatccattagccaagggcagggggcccctttgctgaccctccccaaaggctttgccctgctgccctccccctcctctccaccatcgtcttcttggccatgggaggcctttccctaagccagctgcccccagagccacagttcccctatgtggaagtggggcgggcttcatagagacttgggaatgagctgaaggtgaaacattttctccctggatttttaccagtctcacatgattccagccatcaccttagaccaccaagccttgattggtgttgccagttgtcctccttccggggaaggattttgcagttctttggctgaaaggaagctgtgcgtgtgtgtgtgtgtatgtgtgtgtgtgtatgtgtatctcacactcatgcattgtcctctttttatttagattggcagtgtagggagttgtgggtagtggggaagagggttaggagggtttcattgtctgtgaagtgagaccttccttttacttttcttctattgcctctgagagcatcaggcctagaggcctgactgccaagccatgggtagcctgggtgtaaaacctggagatggtggatgatccccacgccacagcccttttgtctctgcaaactgccttcttcggaaagaagaaggtgggaggatgtgaattgttagtttctgagttttaccaaataaagtagaatataagaagaaaggtaca

SEQ ID NO: 3726 - protein, 86 aa, Homosapiens
MQNRLNKVIKSVGKIEHSWRSFHTERKTEPATGFIDGDLIESFLDISRPKMQEVVANLQYDDGSGMKREATADDLIKVVEELTRIH

SEQ ID NO: 3727 - DNA, 1445 bp, Homosapiens
gagactttaatcccaactggatgagtgctgtggaaatcttggatgatgacaattttctgggggctgaaaatgcctttaacttgtttgtgtgtcaaaaggataggtgagtagtggccagctctgggagtggtggggagggctgggagttccttggtctctggtggatgcaagcattgggttctgtgtcaggttcaggtgctcctgtttacagagatagaactttcctcgtcagagaataaaaggtgacagaaatccacctctttagactggctcccctactgtggagtatgtcagctccccagggaaattgagcaccgtgaccactgcacgtggtcctgtctcagggcctgtggtggaaacaggaggttcagaaagtgactttcttaccgcctttcagcgctgccaccactgacgaggagcggcagcacctccaggaggttggtcttttccacctgggcgagtttgtcaatgtcttttgccacggctctctggtaatgcaaatcgactcaataaagtcatcaaaagtgtggggaagatcgagcactcctggagatcctttcacaccgagcggaagacagaaccagccacaggtttcatcgacggtgacttgattgagagtttcctggatattagccgccccaagatgcaggaggtggtggcaaacctacagtatgacgatggcagcggtatgaagcgagaggccactgcagacgacctcatcaaggttgtggaggagctaactcggatccattagccaagggcagggggcccctttgctgaccctccccaaaggctttgccctgctgccctccccctcctctccaccatcgtcttcttggccatgggaggcctttccctaagccagctgcccccagagccacagttcccctatgtggaagtggggcgggcttcatagagacttgggaatgagctgaaggtgaaacattttctccctggatttttaccagtctcacatgattccagccatcaccttagaccaccaagccttgattggtgttgccagttgtcctccttccggggaaggattttgcagttctttggctgaaaggaagctgtgcgtgtgtgtgtgtgtatgtgtgtgtgtgtatgtgtatctcacactcatgcattgtcctctttttatttagattggcagtgtagggagttgtgggtagtggggaagagggttaggagggtttcattgtctgtgaagtgagaccttccttttacttttcttctattgcctctgagagcatcaggcctagaggcctgactgccaagccatgggtagcctgggtgtaaaacctggagatggtggatgatccccacgccacagcccttttgtctctgcaaactgccttcttcggaaagaagaaggtgggaggatgtgaattgttagtttctgagttttaccaaataaagtagaatataagaagaaaggtaca

SEQ ID NO: 3728 - protein, 38 aa, Homosapiens
MQIDSIKSSKVWGRSSTPGDPFTPSGRQNQPQVSSTVT

SEQ ID NO: 3729 - DNA, 4509 bp, Homosapiens
gggagtctgcgggcgagctcggaggacactggcgcacctcccccgccggctcacggccgcatccgccacatccgaaggcgccgcgacttcccggagaccccgaagcgtgcgctctcatccgggtcctgcgggcgctggcggaaagaggcgaggcggtgcctccgggggcggggcctccttcggttggcggcctcgggcttcgggagtcctccaagaggccaggtgaggccgtcccgtgatgccccgcgccccggccgctctggcctgcaacgtgtctctggggcggaggcagcggcagtggagttcgctgcgcgctgttgggggccacctgtcttttcgcttgtgtccctctttctagtgtcgcgctcgagtcccgacgggccgctccaagcctcgacatgtcgtacaactacgtggtaacggcccagaagcccaccgccgtgaacggctgcgtgaccggacactttacttcggccgaagacttaaacctgttgattgccaaaaacacgagattagagatctatgtggtcaccgccgaggggcttcggcccgtcaaagaggtgggcatgtatgggaagattgcggtcatggagcttttcaggcccaagggggagagcaaggacctgctgtttatcttgacagcgaagtacaatgcctgcatcctggagtataaacagagtggcgagagcattgacatcattacgcgagcccatggcaatgtccaggaccgcattggccgcccctcagagaccggcattattggcatcattgaccctgagtgccggatgattggcctgcgtctctatgatggccttttcaaggttattccactagatcgcgataataaagaactcaaggccttcaacatccgcctggaggagctgcatgtcattgatgtcaagttcctatatggttgccaagcacctactatttgctttgtctaccaggaccctcaggggcggcacgtaaaaacctatgaggtgtctctccgagaaaaggaattcaataagggcccttggaaacaggaaaatgtcgaagctgaagcttccatggtgatcgcagtcccagagccctttgggggggccatcatcattggacaggagtcaatcacctatcacaatggtgacaaatacctggctattgcccctcctatcatcaagcaaagcacgattgtgtgccacaatcgagtggaccctaatggctcaagatacctgctgggagacatggaaggccggctcttcatgctgcttttggagaaggaggaacagatggatggcaccgtcactctcaaggatctccgtgtagaactccttggagagacctctattgctgagtgcttgacataccttgataatggtgttgtgtttgtcgggtctcgcctgggtgactcccagcttgtgaagctcaacgttgacagtaatgaacaaggctcctatgtagtggccatggaaacctttaccaacttaggacccattgtcgatatgtgcgtggtggacctggagaggcaggggcaggggcagctggtcacttgctctggggctttcaaggaaggttctttgcggatcatccggaatggaattggaatccacgagcatgccagcattgacttaccaggcatcaaaggattatggccactgcggtctgaccctaatcgtgagactgatgacactttggtgctctcttttgtgggccagacaagagttctcatgttaaatggagaggaggtagaagaaaccgaactgatgggtttcgtggatgatcagcagactttcttctgtggcaacgtggctcatcagcagcttatccagatcacttcagcatcggtgaggttggtctctcaagaacccaaagctctggtcagtgaatggaaggagcctcaggccaagaacatcagtgtggcctcctgcaatagcagccaggtggtggtggctgtaggcagggccctctactatctgcagatccatcctcaggagctccggcagatcagccacacagagatggaacatgaagtggcttgcttggacatcaccccattaggagacagcaatggactgtcccctctttgtgccattggcctctggacggacatctcggctcgtatcttgaagttgccctcttttgaactactgcacaaggagatgctgggtggagagatcattcctcgctccatcctgatgaccacctttgagagtagccattacctcctttgtgccttgggagatggagcgcttttctactttgggctcaacattgagacaggtctgttgagcgaccgtaagaaggtgactttgggcacccagcccaccgtattgaggacttttcgttctctttctaccaccaacgtctttgcttgttctgaccgccccactgtcatctatagcagcaaccacaaattggtcttctcaaatgtcaacctcaaggaagtgaactacatgtgtcccctcaattcagatggctatcctgacagcctggcgctggccaacaatagcaccctcaccattggcaccatcgatgagatccagaagctgcacattcgcacagttcccctctatgagtctccaaggaagatctgctaccaggaagtgtcccagtgtttcggggtcctctccagccgcattgaagtccaagacacgagtgggggcacgacagccttgaggcccagcgctagcacccaggctctgtccagcagtgtaagctccagcaagctgttctccagcagcactgctcctcatgagacctcctttggagaagaggtggaggtgcacaacctacttatcattgaccaacacacctttgaagtgcttcatgcccaccagtttctgcagaatgaatatgccctcagtctggtttcctgcaagctgggcaaagaccccaacacttacttcattgtgggcacagcaatggtgtatcctgaagaggcagagcccaagcagggtcgcattgtggtctttcagtattcggatggaaaactacagactgtggctgaaaaggaagtgaaaggggccgtgtactctatggtggaatttaacgggaagctgttagccagcatcaatagcacggtgcggctctatgagtggacaacagagaaggagctgcgcactgagtgcaaccactacaacaacatcatggccctctacctgaagaccaagggcgacttcatcctggtgggcgaccttatgcgctcagtgctgctgcttgcctacaagcccatggaaggaaactttgaagagattgctcgagactttaatcccaactggatgagtgctgtggaaatcttggatgatgacaattttctgggggctgaaaatgcctttaacttgtttgtgtgtcaaaaggatagcgctgccaccactgacgaggagcggcagcacctccaggaggttggtcttttccacctgggcgagtttgtcaatgtcttttgccacggctctctggtaatgcagaatctgggtgagacttccacccccacacaaggctcggtgctcttcggcacggtcaacggcatgatagggctggtgacctcactgtcagagagctggtacaacctcctgctggacatgcagaatcgactcaataaagtcatcaaaagtgtggggaagatcgagcactcctggagatcctttcacaccgagcggaagacagaaccagccacaggtttcatcgacggtgacttgattgagagtttcctggatattagccgccccaagatgcaggaggtggtggcaaacctacagtatgacgatggcagcggtatgaagcgagaggccactgcagacgacctcatcaaggttgtggaggagctaactcggatccattagccaagggcagggggcccctttgctgaccctccccaaaggctttgccctgctgccctccccctcctctccaccatcgtcttcttggccatgggaggcctttccctaagccagctgcccccagagccacagttcccctatgtggaagtggggcgggcttcatagagacttgggaatgagctgaaggtgaaacattttctccctggatttttaccagtctcacatgattccagccatcaccttagaccaccaagccttgattggtgttgccagttgtcctccttccggggaaggattttgcagttctttggctgaaaggaagctgtgcgtgtgtgtgtgtgtatgtgtgtgtgtgtatgtgtatctcacactcatgcattgtcctctttttatttagattggcagtgtagggagttgtgggtagtggggaagagggttaggagggtttcattgtctgtgaagtgagaccttccttttacttttcttctattgcctctgagagcatcaggcctagaggcctgactgccaagccatgggtagcctgggtgtaaaacctggagatggtggatgatccccacgccacagcccttttgtctctgcaaactgccttcttcggaaagaagaaggtgggaggatgtgaattgttagtttctgagttttaccaaataaagtagaatataagaagaaaggtaca

SEQ ID NO: 3730 - protein, 1139 aa, Homosapiens
MSYNYVVTAQKPTAVNGCVTGHFTSAEDLNLLIAKNTRLEIYVVTAEGLRPVKEVGMYGKIAVMELFRPKGESKDLLFILTAKYNACILEYKQSGESIDIITRAHGNVQDRIGRPSETGIIGIIDPECRMIGLRLYDGLFKVIPLDRDNKELKAFNIRLEELHVIDVKFLYGCQAPTICFVYQDPQGRHVKTYEVSLREKEFNKGPWKQENVEAEASMVIAVPEPFGGAIIIGQESITYHNGDKYLAIAPPIIKQSTIVCHNRVDPNGSRYLLGDMEGRLFMLLLEKEEQMDGTVTLKDLRVELLGETSIAECLTYLDNGVVFVGSRLGDSQLVKLNVDSNEQGSYVVAMETFTNLGPIVDMCVVDLERQGQGQLVTCSGAFKEGSLRIIRNGIGIHEHASIDLPGIKGLWPLRSDPNRETDDTLVLSFVGQTRVLMLNGEEVEETELMGFVDDQQTFFCGNVAHQQLIQITSASVRLVSQEPKALVSEWKEPQAKNISVASCNSSQVVVAVGRALYYLQIHPQELRQISHTEMEHEVACLDITPLGDSNGLSPLCAIGLWTDISARILKLPSFELLHKEMLGGEIIPRSILMTTFESSHYLLCALGDGALFYFGLNIETGLLSDRKKVTLGTQPTVLRTFRSLSTTNVFACSDRPTVIYSSNHKLVFSNVNLKEVNYMCPLNSDGYPDSLALANNSTLTIGTIDEIQKLHIRTVPLYESPRKICYQEVSQCFGVLSSRIEVQDTSGGTTALRPSASTQALSSSVSSSKLFSSSTAPHETSFGEEVEVHNLLIIDQHTFEVLHAHQFLQNEYALSLVSCKLGKDPNTYFIVGTAMVYPEEAEPKQGRIVVFQYSDGKLQTVAEKEVKGAVYSMVEFNGKLLASINSTVRLYEWTTEKELRTECNHYNNIMALYLKTKGDFILVGDLMRSVLLLAYKPMEGNFEEIARDFNPNWMSAVEILDDDNFLGAENAFNLFVCQKDSAATTDEERQHLQEVGLFHLGEFVNVFCHGSLVMQNLGETSTPTQGSVLFGTVNGMIGLVTSLSESWYNLLLDMQNRLNKVIKSVGKIEHSWRSFHTERKTEPATGFIDGDLIESFLDISRPKMQEVVANLQYDDGSGMKREATADDLIKVVEELTRIH

SEQ ID NO: 3731 - DNA, 4196 bp, Homosapiens
gggagtctgcgggcgagctcggaggacactggcgcacctcccccgccggctcacggccgcatccgccacatccgaaggcgccgcgacttcccggagaccccgaagcgtgcgctctcatccgggtcctgcgggcgctggcggaaagaggcgaggcggtgcctccgggggcggggcctccttcggttggcggcctcgggcttcgggagtcctccaagaggccaggtgaggccgtcccgtgatgccccgcgccccggccgctctggcctgcaacgtgtctctggggcggaggcagcggcagtggagttcgctgcgcgctgttgggggccacctgtcttttcgcttgtgtccctctttctagtgtcgcgctcgagtcccgacgggccgctccaagcctcgacatgtcgtacaactacgtggtaacggcccagaagcccaccgccgtgaacggctgcgtgaccggacactttacttcggccgaagacttaaacctgttgattgccaaaaacacgagattagagatctatgtggtcaccgccgaggggcttcggcccgtcaaagaggtgggcatgtatgggaagattgcggtcatggagcttttcaggcccaagggggagagcaaggacctgctgtttatcttgacagcgaagtacaatgcctgcatcctggagtataaacagagtggcgagagcattgacatcattacgcgagcccatggcaatgtccaggaccgcattggccgcccctcagagaccggcattattggcatcattgaccctgagtgccggatgattggcctgcgtctctatgatggccttttcaaggttattccactagatcgcgataataaagaactcaaggccttcaacatccgcctggaggagctgcatgtcattgatgtcaagttcctatatggttgccaagcacctactatttgctttgtctaccaggaccctcaggggcggcacgtaaaaacctatgaggtgtctctccgagaaaaggaattcaataagggcccttggaaacaggaaaatgtcgaagctgaagcttccatggtgatcgcagtcccagagccctttgggggggccatcatcattggacaggagtcaatcacctatcacaatggtgacaaatacctggctattgcccctcctatcatcaagcaaagcacgattgtgtgccacaatcgagtggaccctaatggctcaagatacctgctgggagacatggaaggccggctcttcatgctgcttttggagaaggaggaacagatggatggcaccgtcactctcaaggatctccgtgtagaactccttggagagacctctattgctgagtgcttgacataccttgataatggtgttgtgtttgtcgggtctcgcctgggtgactcccagcttgtgaagctcaacgttgacagtaatgaacaaggctcctatgtagtggccatggaaacctttaccaacttaggacccattgtcgatatgtgcgtggtggacctggagaggcaggggcaggggcagctggtcacttgctctggggctttcaaggaaggttctttgcggatcatccggaatggaattggaatccacgagcatgccagcattgacttaccaggcatcaaaggattatggccactgcggtctgaccctaatcgtgagactgatgacactttggtgctctcttttgtgggccagacaagagttctcatgttaaatggagaggaggtagaagaaaccgaactgatgggtttcgtggatgatcagcagactttcttctgtggcaacgtggctcatcagcagcttatccaggtgataactgagaaaggggcaggtgttaccatatacttgaattgacctagatgcagtacagagcaccactggattttaaaacaaccaatttttatggctccaaaaataatgtaaaaattctagggaaaaaattacagataatccactactcagagatcacaactcttaaccttagagttgctccttttagctttatttttcttctgcaaatgtctgtgtatttatttacattttcttttatagactcgggtcattatatatataaacataaaaatatagtttcggatcctattttagcactaattatatcttccgagacactcaaattttttccctttgttaaactagtgatacatccttatttataaaattagaaaatgccaaaatgcacaaaaaaagaaaaaatcatgatgctaccatccaatatgactcttggcagccctttccacatactaattataaccgaagcttaccctattctgatccttactttcaatctatctgcaatacgggggcagatagccttctggcatattgttatccacgagaccactgtgcccggccctgattaagtatttttagagactcccaactcaaactctgactaggctccatctctgggcagttggcaaccaaatgggctgcgttggcagagaggtcggggagaatccctctagggtgacacttgttgaacaccatgctatatcttctgcagggtggggccttgctcctgaataaaggaaacacaagtcccagaactggattccgtgcaaactgctgattatgctttcttctttcaccttgtctgttttaagattgctcgagactttaatcccaactggatgagtgctgtggaaatcttggatgatgacaattttctgggggctgaaaatgcctttaacttgtttgtgtgtcaaaaggataggtgagtagtggccagctctgggagtggtggggagggctgggagttccttggtctctggtggatgcaagcattgggttctgtgtcaggttcaggtgctcctgtttacagagatagaactttcctcgtcagagaataaaaggtgacagaaatccacctctttagactggctcccctactgtggagtatgtcagctccccagggaaattgagcaccgtgaccactgcacgtggtcctgtctcagggcctgtggtggaaacaggaggttcagaaagtgactttcttaccgcctttcagcgctgccaccactgacgaggagcggcagcacctccaggaggttggtcttttccacctgggcgagtttgtcaatgtcttttgccacggctctctggtaatgcagaatctgggtgagacttccacccccacacaaggctcggtgctcttcggcacggtcaacggcatgatagggctggtgacctcactgtcagagagctggtacaacctcctgctggacatgcagaatcgactcaataaagtcatcaaaagtgtggggaagatcgagcactcctggagatcctttcacaccgagcggaagacagaaccagccacaggtttcatcgacggtgacttgattgagagtttcctggatattagccgccccaagatgcaggaggtggtggcaaacctacagtatgacgatggcagcggtatgaagcgagaggccactgcagacgacctcatcaaggttgtggaggagctaactcggatccattagccaagggcagggggcccctttgctgaccctccccaaaggctttgccctgctgccctccccctcctctccaccatcgtcttcttggccatgggaggcctttccctaagccagctgcccccagagccacagttcccctatgtggaagtggggcgggcttcatagagacttgggaatgagctgaaggtgaaacattttctccctggatttttaccagtctcacatgattccagccatcaccttagaccaccaagccttgattggtgttgccagttgtcctccttccggggaaggattttgcagttctttggctgaaaggaagctgtgcgtgtgtgtgtgtgtatgtgtgtgtgtgtatgtgtatctcacactcatgcattgtcctctttttatttagattggcagtgtagggagttgtgggtagtggggaagagggttaggagggtttcattgtctgtgaagtgagaccttccttttacttttcttctattgcctctgagagcatcaggcctagaggcctgactgccaagccatgggtagcctgggtgtaaaacctggagatggtggatgatccccacgccacagcccttttgtctctgcaaactgccttcttcggaaagaagaaggtgggaggatgtgaattgttagtttctgagttttaccaaataaagtagaatataagaagaaaggtaca

SEQ ID NO: 3732 - protein, 484 aa, Homosapiens
MSYNYVVTAQKPTAVNGCVTGHFTSAEDLNLLIAKNTRLEIYVVTAEGLRPVKEVGMYGKIAVMELFRPKGESKDLLFILTAKYNACILEYKQSGESIDIITRAHGNVQDRIGRPSETGIIGIIDPECRMIGLRLYDGLFKVIPLDRDNKELKAFNIRLEELHVIDVKFLYGCQAPTICFVYQDPQGRHVKTYEVSLREKEFNKGPWKQENVEAEASMVIAVPEPFGGAIIIGQESITYHNGDKYLAIAPPIIKQSTIVCHNRVDPNGSRYLLGDMEGRLFMLLLEKEEQMDGTVTLKDLRVELLGETSIAECLTYLDNGVVFVGSRLGDSQLVKLNVDSNEQGSYVVAMETFTNLGPIVDMCVVDLERQGQGQLVTCSGAFKEGSLRIIRNGIGIHEHASIDLPGIKGLWPLRSDPNRETDDTLVLSFVGQTRVLMLNGEEVEETELMGFVDDQQTFFCGNVAHQQLIQVITEKGAGVTIYLN

SEQ ID NO: 3733 - DNA, 2373 bp, Homosapiens
accgcctcgcctctttccgccagcgcccgcaggacccggatgagagcgcacgcttcggggtctccgggaagtcgcggcgccttcggatgtggcggatgcggccgtgagccggcgggggaggtgctgctgctgcctccactgtactcagacccaggtagcacaggattgtccatcctccagcagctcagtgcaacggtgtgaactcagcctgtttcagagcctccacaccatgacctccaagaagctggtgaactcggtggctggctgtgctgatgacgctcttgctggcctggtggcctgcaaccccaacctgcagctcctgcagggccaccgcgtggccctccgttctgacctggacagcctcaagggccgggtggcactgctgtcgggtgggggctctggccatgagcctgcccatgctggtttcatagggaaggggatgctgactggggtcatcgcgggagctgtgttcacctccccggcagtgggcagcatcctggcagccatcagggccgtggcccaggccggcacagtggggacgctccttatcgtgaagaactacactggggatcggctcaacttcggcctggcccgggagcaggcccgggctgaaggcatcccggtggagatggtggtgattggggacgacagcgccttcactgtcctgaagaaggcaggccggcgggggctgtgcggcacggtgcttatacacaaggtggcaggtgctctggctgaggctggtgtggggctggaggagatcgcaaagcaggtgaacgtggtcgccaaggccatgggtaccctgggggtgagcttatcctcctgcagcgtccctggttccaaacccaccttcgagctctcagccgacgaggtggagctgggcctggggatccacggggaagctggtgtgcgccggataaagatggcaaccgccgatgagattgtgaaactcatgctcgaccacatgacaaacaccaccaacgcgtcccatgtgcctgtgcagcccggctcctcagttgtgatgatggtcaacaacctgggtggcctgtcattcctggaactgggcatcatagccgacgctaccgtccgctccctggagggccgcggggtgaagattgcccgtgccctggtgggcaccttcatgtcagcactggagatgcctggcatttctctcaccctcctgctggtggatgagcctctcctgaaactgatagatgctgaaaccactgcagcagcctggcctaacgtggctgcagtctccattactgggcggaagcggagccgggtagcccctgccgagccccaggaggcccctgattccactgctgcaggaggctcagcctcgaagcggatggcgctggtgctggaacgggtgtgcagcactctcctgggcctggaggaacacctgaatgccctggaccgggctgctggtgacggcgactgtggcaccacccacagccgtgcggccagagcaatccaggagtggctgaaggagggcccaccccctgccagccctgcccagctgctctccaagttgtctgtcctgctcctggagaagatgggaggctcatctggggcgctctatggcctgttcctgactgcggctgcacagcccctgaaggccaagaccagcctcccagcctggtctgctgccatggatgccggcctggaagccatgcagaagtatggcaaggctgctccaggggacaggactatgctggattctctgtgggcagcggggcaggagctccaagcctggaagagcccaggagctgatctgttacaagtcctgaccaaagcagtcaagagtgccgaagctgcagccgaggccaccaagaatatggaagctggagccggaagagccagttatatcagctcagcacggctggagcagccagaccccggggcggtggcagctgctgccatcctccgggccatcttggaggtcttgcagagctagggtgtgtgactgcctcccttggcctcagctcctctcactgctgtgctgaggtggcctttgtcacttccttctgccttccaaccctcaccttcccccggcctggccccattggcccaccctctaagttgagcaggaaatcctccaccaagcttccagaactacagacagcacccagagtgagctggagtgggtccccatgcctctccagcatgccctttccctttgcaggagggtggagtccctgggtcatgccctcccctgccagctctgggcttcagagataaggcattttccttgtgcagcctttacctggcaatcctaatttggttttaagactccctgtgaaatgctttccgcaccttaaccccagtgagcgtgaaaaagaaagttaataaactataatacatggaagcaag

SEQ ID NO: 3734 - protein, 575 aa, Homosapiens; identical to SEQ ID NO: 565

SEQ ID NO: 3735 - DNA, 2856 bp, Homosapiens
accgcctcgcctctttccgccagcgcccgcaggacccggatgagagcgcacgcttcggggtctccgggaagtcgcggcgccttcggatgtggcggatgcggccgtgagccggcgggggaggtgctgctgctgcctccactgtactcagacccaggtagcacaggattgtccatcctccagcagctcagtgcaacggtgtgaactcagcctgtttcagagcctccacaccatgacctccaagaagctggtgaactcggtggctggctgtgctgatgacgctcttgctggcctggtggcctgcaaccccaacctgcagctcctgcagggccaccgcgtggccctccgttctgacctggacagcctcaagggccgggtggcactgctgtcgggtgggggctctggccatgagcctgcccatgctggtttcatagggaaggggatgctgactggggtcatcgcgggagctgtgttcacctccccggcagtgggcagcatcctggcagccatcagggccgtggcccaggccggcacagtggggacgctccttatcgtgaagaactacactggggatcggctcaacttcggcctggcccgggagcaggcccgggctgaaggcatcccggtggagatggtggtgattggggacgacagcgccttcactgtcctgaagaaggcaggccggcgggggctgtgcggcacggtgcttatacacaaggtggcaggtgctctggctgaggctggtgtggggctggaggagatcgcaaagcaggtgaacgtggtcgccaaggccatgggtaccctgggggtgagcttatcctcctgcagcgtccctggttccaaacccaccttcgagctctcagccgacgaggtggagctgggcctggggatccacggggaagctggtgtgcgccggataaagatggcaaccgccgatgagattgtgaaactcatgctcgaccacatgacaaacaccaccaacgcgtcccatgtgcctgtgcagcccggctcctcagttgtgatgatggtcaacaacctgggtggcctgtcattcctggaactgggcatcatagccgacgctaccgtccgctccctggagggccgcggggtgaagattgcccgtgccctggtgggcaccttcatgtcagcactggagatgcctggcatttctctcaccctcctgctggtggatgagcctctcctgaaactgatagatgctgaaaccactgcagcagcctggcctaacgtggctgcagtctccattactgggcggaagcggagccgggtagcccctgccgagccccaggaggcccctgattccactgctgcaggaggctcagcctcgaagcggatggcgctggtgctggaacgggtgtgcagcactctcctgggcctggaggaacacctgaatgccctggaccgggctgctggtgacggcgactgtggcaccacccacagccgtgcggccagagcaatccaggagtggctgaaggagggcccaccccctgccagccctgcccagctgctctccaagttgtctgtcctgctcctggagaagatgggaggctcatctggggcgctctatggcctgttcctgactgcggctgcacagcccctgaaggccaagaccagcctcccagcctggtctgctgccatggatgccggcctggaagccatgcagaagtatggcaaggctgctccaggggacaggactatgctggattctctgtgggcagcggggcaggagctccaagcctggaagagcccaggagctgatctgttacaagtcctgaccaaagcagtcaagagtgccgaagctgcagccgaggccaccaagaatatggaagctggagccggaagagccagttatatcagctcagcacggctggagcagccagaccccggggcggtggcagctgctgccatcctccgggccatcttggaggtcttgcagagctagggtgtgtgactgcctcccttggcctcagctcctctcactgctgtgctgaggtggcctttgtcacttccttctgccttccaaccctcaccttcccccggcctggccccattggcccaccctctaagttgagcaggaaatcctccaccaagcttccagaactacagacagcacccagagtgagctggagtgggtccccatgcctctccagcatgccctttccctttgcaggagggtggagtccctgggtcatgccctcccctgccagctctgggcttcagagataaggcattttccttgtgcagcctttacctggcaatcctaatttggttttaagactccctgtgaaatgctttccgcaccttaaccccagtgagcgtgaaaaagaaagttaataaactataatacatggaagcaagaaagacactgcctcctctgagggaccttttcccaagcatgtaaacaagggggcccacagccctggctgcaggcatcatgacccatcttctaccaggcagatctttattacctgagcccctaaggcagtgtctcctcagctgggctgcttccactgagacccccgacccatcccctttccagtacacacacctgatgcatgtaagaatggtagaggggcttttcttagcattgaattaataattcagtggctcctcgggagtcgaatgggcatttgggacaccagaaggaaaagaaatcatcatagtctaaggttcagttgtagatcaaaaaatgcagccaggccgggcacggtggctcacacctgcaatcccagcactttgggaggccaaggcaggcggatcccttacactcaggagttcaagaccagtctgggcaacatggtaaaaccctgtctctaccaaaaaatacaaaattagccaggc

SEQ ID NO: 3736 - protein, 575 aa, Homosapiens; identical to SEQ ID NO: 565

SEQ ID NO: 3737 - DNA, 1014 bp, Homosapiens
tgagagcgcacgcttcggggtctccgggaagtcgcggcgccttcggatgtggcggatgcggccgtgagccggcgggggagttcctccagatccagctggtgccctcgcctgacgtttgaacgaccacctgctcacctcctcccttttgcgcgttgattcttcagacttcaaagggcccaccggtctgcttgcccaacgttattagtgcccctattgctctacaaattcgaacctcaaacacaaaaccagtatttctccgtagggaaccttaatgagccaggagagccgtcagccctgcagcctccagggtaccccacatcaaacaggctccccgggaacaagaggaataccacgtggcttggcacactcgcagaatgccagagaggagccaacccccattttacagatgaggaagctgaggcttagggaggaattggtttacctaagaccctccccacaaccccaagtaggctgaggcagagctatgttgattcttcctattgtgcacccacacagaggccaacacgctgctgaaccaggctgaactgaggaaaagctagaaagtcatcgtggtttacatcttgcctttcccatagcagagactctgcctgactttggaggcactgaattatcagtagtaaaaacacactctgtagaaaaactagacattggtttagattctggctgttacctgtattaccttggacaagtccctagagctctctgagtctgtttcccagaagtaaaatgggtcacaaacctggctagctccccccattcccttcccttttggtgccaaggccagtgagggcaagcgtgtgacgagctttgttaactttttcgctgcatgtgatgcccgtgtaaaagatagttattctgaggatcactgtcctttagtgatgaagtgggtgctgttcctggacataaaggcagacctgtgcttgacatggattgatctgtcttctggcagtgaagtgcaggcatgaaccttggtcagccccacactcttctcca

SEQ ID NO: 3738 - protein, 67 aa, Homosapiens
MSQESRQPCSLQGTPHQTGSPGTRGIPRGLAHSQNAREEPTPILQMRKLRLREELVYLRPSPQPQVG

SEQ ID NO: 3739 - DNA, 2430 bp, Homosapiens
gcgcacgcttcggggtctccgggaagtcgcggcgccttcggatgtggcggatgcggccgtgagccggcgggggagttcctccagatccagctggtgccctcgcctgacgtttgaacgaccacctgctcacctcctcccttttgcgcgttgattcttcagacttcaaagggcccaccggtgctgctgctgcctccactgtactcagacccaggtagcacaggattgtccatcctccagcagctcagtgcaacggtgtgaactcagcctgtttcagagcctccacaccatgacctccaagaagctggtgaactcggtggctggctgtgctgatgacgctcttgctggcctggtggcctgcaaccccaacctgcagctcctgcagggccaccgcgtggccctccgttctgacctggacagcctcaagggccgggtggcactgctgtcgggtgggggctctggccatgagcctgcccatgctggtttcatagggaaggggatgctgactggggtcatcgcgggagctgtgttcacctccccggcagtgggcagcatcctggcagccatcagggccgtggcccaggccggcacagtggggacgctccttatcgtgaagaactacactggggatcggctcaacttcggcctggcccgggagcaggcccgggctgaaggcatcccggtggagatggtggtgattggggacgacagcgccttcactgtcctgaagaaggcaggccggcgggggctgtgcggcacggtgcttatacacaaggtggcaggtgctctggctgaggctggtgtggggctggaggagatcgcaaagcaggtgaacgtggtcgccaaggccatgggtaccctgggggtgagcttatcctcctgcagcgtccctggttccaaacccaccttcgagctctcagccgacgaggtggagctgggcctggggatccacggggaagctggtgtgcgccggataaagatggcaaccgccgatgagattgtgaaactcatgctcgaccacatgacaaacaccaccaacgcgtcccatgtgcctgtgcagcccggctcctcagttgtgatgatggtcaacaacctgggtggcctgtcattcctggaactgggcatcatagccgacgctaccgtccgctccctggagggccgcggggtgaagattgcccgtgccctggtgggcaccttcatgtcagcactggagatgcctggcatttctctcaccctcctgctggtggatgagcctctcctgaaactgatagatgctgaaaccactgcagcagcctggcctaacgtggctgcagtctccattactgggcggaagcggagccgggtagcccctgccgagccccaggaggcccctgattccactgctgcaggaggctcagcctcgaagcggatggcgctggtgctggaacgggtgtgcagcactctcctgggcctggaggaacacctgaatgccctggaccgggctgctggtgacggcgactgtggcaccacccacagccgtgcggccagagcaatccaggagtggctgaaggagggcccaccccctgccagccctgcccagctgctctccaagttgtctgtcctgctcctggagaagatgggaggctcatctggggcgctctatggcctgttcctgactgcggctgcacagcccctgaaggccaagaccagcctcccagcctggtctgctgccatggatgccggcctggaagccatgcagaagtatggcaaggctgctccaggggacaggactatgctggattctctgtgggcagcggggcaggagctccaagcctggaagagcccaggagctgatctgttacaagtcctgaccaaagcagtcaagagtgccgaagctgcagccgaggccaccaagaatatggaagctggagccggaagagccagttatatcagctcagcacggctggagcagccagaccccggggcggtggcagctgctgccatcctccgggccatcttggaggtcttgcagagctagggtgtgtgactgcctcccttggcctcagctcctctcactgctgtgctgaggtggcctttgtcacttccttctgccttccaaccctcaccttcccccggcctggccccattggcccaccctctaagttgagcaggaaatcctccaccaagcttccagaactacagacagcacccagagtgagctggagtgggtccccatgcctctccagcatgccctttccctttgcaggagggtggagtccctgggtcatgccctcccctgccagctctgggcttcagagataaggcattttccttgtgcagcctttacctggcaatcctaatttggttttaagactccctgtgaaatgctttccgcaccttaaccccagtgagcgtgaaaaagaaagttaataaactataatacatggaagcaag

SEQ ID NO: 3740 - protein, 575 aa, Homosapiens; identical to SEQ ID NO: 565

SEQ ID NO: 3741 - DNA, 296 bp, Homosapiens
ccactgtactcagacccaggtagcacaggattgtccatctacagacagcacccagagtgagctggagtgggtccccatgcctctccagcatgccctttccctttgcaggagggtggagtccctgggtcatgccctcccctgccagctctgggcttcagagataaggcattttccttgtgcagcctttacctggcaatcctaatttggttttaagactccctgtgaaatgctttccgcaccttaaccccagtgagcgtgaaaaagaaagttaataaactataatacatggaagcaag

SEQ ID NO: 3742 - protein, 41 aa, Homosapiens
MPLQHALSLCRRVESLGHALPCQLWASEIRHFPCAAFTWQS

SEQ ID NO: 3743 - DNA, 571 bp, Homosapiens
attattctgtccatttccatcccccactcccgcccacttactgtgtgagtccagcactgtgtgagtccttgataaaaacgatgagcaaatccccaggccttgagtgggtcagcagtgaccacatctatccgcagggatccacggggaagctggtgtgcgccggataaaggtaggtggtccctctggcacaggccgccctaaggccaaggccccccagatgcagctcattcctggctccctctgacagatggcaaccgccgatgagattgtgaaactcatgctcgaccacatgacaaacaccaccaacgcgtcccatgtgcctgtgcagcccggctcctcagttgtgatgatggtcaacaacctgggtggcctgtcattcctggaactgggcatcatagccgacgctaccgtccgctccctgggtgagccatgcactgggaaggggatcctacagccctttggaaagggctgagggagggtcttgtgatggcagagaacacggactgtgcgtcagataagcctgagttaaatcgtctctctgccacctaattgccggataccttgagcctct

SEQ ID NO: 3744 - protein, 74 aa, Homosapiens
MATADEIVKLMLDHMTNTTNASHVPVQPGSSVVMMVNNLGGLSFLELGIIADATVRSLGEPCTGKGILQPFGKG

SEQ ID NO: 3745 - DNA, 315 bp, Homosapiens
ggaaatcaggacatctccctcccgacctcagagccccagcttccaaggtccttgcttttctgttgttttctttccctgatgcccatttttcccttttggactgccacactctggtattgcagagggccgcggggtgaagattgcccgtgccctggtgggcaccttcatgtcagcactggagatgcctggcatttctctcaccctcctgctggtggatgagcctctcctgaaactgatagatgctgaaaccactgcagcagcctggcctaacgtggctgcagtctccattactgggcggaagcggagccgggtagc

SEQ ID NO: 3746 - protein, 48 aa, Homosapiens
MSALEMPGISLTLLLVDEPLLKLIDAETTAAAWPNVAAVSITGRKRSR

SEQ ID NO: 3747 - DNA, 905 bp, Homosapiens
ggaccgggctgctggtgacggcgactgtggcaccacccacaccctgcccagctgctctccaagttgtctgtcctgctcctggagaagatgggaggctcatctggggcgctctatggcctgttcctgactgcggctgcacagcccctgaaggccaagaccagcctcccagcctggtctgctgccatggatgccggcctggaagccatgcagaagtatggcaaggctgctccaggggacaggactatgctggattctctgtgggcagcggggcaggagctccaagcctggaagagcccaggagctgatctgttacaagtcctgaccaaagcagtcaagagtgccgaagctgcagccgaggccaccaagaatatggaagctggagccggaagagccagttatatcagctcagcacggctggagcagccagaccccggggcggtggcagctgctgccatcctccgggccatcttggaggtcttgcagagctagggtgtgtgactgcctcccttggcctcagctcctctcactgctgtgctgaggtggcctttgtcacttccttctgccttccaaccctcaccttcccccggcctggccccattggcccaccctctaagttgagcaggaaatcctccaccaagcttccagaactacagacagcacccagagtgagctggagtgggtccccatgcctctccagcatgccctttccctttgcaggagggtggagtccctgggtcatgccctcccctgccagctctgggcttcagagataaggcattttccttgtgcagcctttacctggcaatcctaatttggttttaagactccctgtgaaatgctttccgcaccttaaccccagtgagcgtgaaaaagaaagttaataaactataatacatggaagcaag

SEQ ID NO: 3748 - protein, 133 aa, Homosapiens [sequence omitted]

SEQ ID NO: 3749 - DNA, 1388 bp, Homosapiens
ggaccgggctgctggtgacggcgactgtggcaccacccacaccctgcccagctgctctccaagttgtctgtcctgctcctggagaagatgggaggctcatctggggcgctctatggcctgttcctgactgcggctgcacagcccctgaaggccaagaccagcctcccagcctggtctgctgccatggatgccggcctggaagccatgcagaagtatggcaaggctgctccaggggacaggactatgctggattctctgtgggcagcggggcaggagctccaagcctggaagagcccaggagctgatctgttacaagtcctgaccaaagcagtcaagagtgccgaagctgcagccgaggccaccaagaatatggaagctggagccggaagagccagttatatcagctcagcacggctggagcagccagaccccggggcggtggcagctgctgccatcctccgggccatcttggaggtcttgcagagctagggtgtgtgactgcctcccttggcctcagctcctctcactgctgtgctgaggtggcctttgtcacttccttctgccttccaaccctcaccttcccccggcctggccccattggcccaccctctaagttgagcaggaaatcctccaccaagcttccagaactacagacagcacccagagtgagctggagtgggtccccatgcctctccagcatgccctttccctttgcaggagggtggagtccctgggtcatgccctcccctgccagctctgggcttcagagataaggcattttccttgtgcagcctttacctggcaatcctaatttggttttaagactccctgtgaaatgctttccgcaccttaaccccagtgagcgtgaaaaagaaagttaataaactataatacatggaagcaagaaagacactgcctcctctgagggaccttttcccaagcatgtaaacaagggggcccacagccctggctgcaggcatcatgacccatcttctaccaggcagatctttattacctgagcccctaaggcagtgtctcctcagctgggctgcttccactgagacccccgacccatcccctttccagtacacacacctgatgcatgtaagaatggtagaggggcttttcttagcattgaattaataattcagtggctcctcgggagtcgaatgggcatttgggacaccagaaggaaaagaaatcatcatagtctaaggttcagttgtagatcaaaaaatgcagccaggccgggcacggtggctcacacctgcaatcccagcactttgggaggccaaggcaggcggatcccttacactcaggagttcaagaccagtctgggcaacatggtaaaaccctgtctctaccaaaaaatacaaaattagccaggc

SEQ ID NO: 3750 - protein, 133 aa, Homosapiens [sequence omitted]

SEQ ID NO: 3751 - DNA, 949 bp, Homosapiens
ctgctctccaagttgtctgtcctgctcctggagaagatgggaggctcatctggggcggtgggtgcctgggggctgaagggctgacagggaggtggctgggctggctggggtccaggccagcaccacatgctcagcgttgtcatcttccccagctctatggcctgttcctgactgcggctgcacagcccctgaaggccaagaccagcctcccagcctggtctgctgccatggatgccggcctggaagccatgcagaagtatggcaaggctgctccaggggacaggactatgctggattctctgtgggcagcggggcaggagctccaagcctggaagagcccaggagctgatctgttacaagtcctgaccaaagcagtcaagagtgccgaagctgcagccgaggccaccaagaatatggaagctggagccggaagagccagttatatcagctcagcacggctggagcagccagaccccggggcggtggcagctgctgccatcctccgggccatcttggaggtcttgcagagctagggtgtgtgactgcctcccttggcctcagctcctctcactgctgtgctgaggtggcctttgtcacttccttctgccttccaaccctcaccttcccccggcctggccccattggcccaccctctaagttgagcaggaaatcctccaccaagcttccagaactacagacagcacccagagtgagctggagtgggtccccatgcctctccagcatgccctttccctttgcaggagggtggagtccctgggtcatgccctcccctgccagctctgggcttcagagataaggcattttccttgtgcagcctttacctggcaatcctaatttggttttaagactccctgtgaaatgctttccgcaccttaaccccagtgagcgtgaaaaagaaagttaataaactataatacatggaagcaag

SEQ ID NO: 3752 - protein, 101 aa, Homosapiens [sequence omitted]

SEQ ID NO: 3753 - DNA, 1432 bp, Homosapiens
ctgctctccaagttgtctgtcctgctcctggagaagatgggaggctcatctggggcggtgggtgcctgggggctgaagggctgacagggaggtggctgggctggctggggtccaggccagcaccacatgctcagcgttgtcatcttccccagctctatggcctgttcctgactgcggctgcacagcccctgaaggccaagaccagcctcccagcctggtctgctgccatggatgccggcctggaagccatgcagaagtatggcaaggctgctccaggggacaggactatgctggattctctgtgggcagcggggcaggagctccaagcctggaagagcccaggagctgatctgttacaagtcctgaccaaagcagtcaagagtgccgaagctgcagccgaggccaccaagaatatggaagctggagccggaagagccagttatatcagctcagcacggctggagcagccagaccccggggcggtggcagctgctgccatcctccgggccatcttggaggtcttgcagagctagggtgtgtgactgcctcccttggcctcagctcctctcactgctgtgctgaggtggcctttgtcacttccttctgccttccaaccctcaccttcccccggcctggccccattggcccaccctctaagttgagcaggaaatcctccaccaagcttccagaactacagacagcacccagagtgagctggagtgggtccccatgcctctccagcatgccctttccctttgcaggagggtggagtccctgggtcatgccctcccctgccagctctgggcttcagagataaggcattttccttgtgcagcctttacctggcaatcctaatttggttttaagactccctgtgaaatgctttccgcaccttaaccccagtgagcgtgaaaaagaaagttaataaactataatacatggaagcaagaaagacactgcctcctctgagggaccttttcccaagcatgtaaacaagggggcccacagccctggctgcaggcatcatgacccatcttctaccaggcagatctttattacctgagcccctaaggcagtgtctcctcagctgggctgcttccactgagacccccgacccatcccctttccagtacacacacctgatgcatgtaagaatggtagaggggcttttcttagcattgaattaataattcagtggctcctcgggagtcgaatgggcatttgggacaccagaaggaaaagaaatcatcatagtctaaggttcagttgtagatcaaaaaatgcagccaggccgggcacggtggctcacacctgcaatcccagcactttgggaggccaaggcaggcggatcccttacactcaggagttcaagaccagtctgggcaacatggtaaaaccctgtctctaccaaaaaatacaaaattagccaggc

SEQ ID NO: 3754 - protein, 101 aa, Homosapiens [sequence omitted]

SEQ ID NO: 3755 - DNA, 484 bp, Homosapiens
tcatctggggcgctctatggcctgttcctgactgcggctgcacagcccctgaaggccaagaccagcctcccagcctggtctgctgccatggatgccggcctggaagccatgcagaagtatggcaaggctgctccaggggacaggactatgctggattctctgtgggcagcggggcaggagctccaagcctggaagagcccaggagctgatctgttacaagtcctgaccaaagcagtcaaggtgagtgaggctgggcccagccacctggggagacaggcttctagccagcagactcctgtctccatgtgaccctgagcaagttaataaccttcctggaccgcagtttccttctctgtacaatggagatgagcacctatctcagaaggtggttatgtggctaaggaaatatgtagagccccgcacactgcctgggatgtgacagggcctcagtgaatggtgacccttttccctgctggaagtagat

SEQ ID NO: 3756 - protein, 73 aa, Homosapiens
MDAGLEAMQKYGKAAPGDRTMLDSLWAAGQELQAWKSPGADLLQVLTKAVKVSEAGPSHLGRQASSQQTPVSM

SEQ ID NO: 3757 - DNA, 471 bp, Homosapiens
ctttccttggtggctttgcctgggtgctgggcctgccttctctggctgcttgctgcctgtctgctttccttggtggctttggcttctgcactccttggcgtcagcctctcaggtcccaagcttcagactgctgtgcttagtaagcaagtgagaagcctggggtttggagcccacctactctctggcagcatcagcatcctactcctggcaacatcaggccaacgtccaccccagcctcacattgccagatgttggcagaagggctaatattgaccgtcttgactggctggagccttcaaagccactgggatgtcctccaggcacctgggtcccatgaccagctccccatctccataggggtaggcatttcactggtttatgaagctcgagtttcattaaatatgttaagaatcaaagctgtctttgttcaggctgctataacaaaaatataatagcctgggtggcttaaac

SEQ ID NO: 3758 - protein, 67 aa, Homosapiens
MLAEGLILTVLTGWSLQSHWDVLQAPGSHDQLPISIGVGISLVYEARVSLNMLRIKAVFVQAAITKI

SEQ ID NO: 3759 - DNA, 1969 bp, Homosapiens
aagaaagggtgttaaaattctagatcacatatggacccgggaaggttttctcaccctctgttagtgacatcgagtctcccactagacaaaaataggtggaaaaatctctcgagggctcacattgttttgtcatcttcaggaaaaacaccaccaggccataccacagcctgcccagtgaggcggtctttgccaacagcaccgggatgctggtggtggcctttgggctgctggtgctctacatccttctggcttcatcttggaagcgcccagagccggggatcctgaccgacagacagcccctgctgcatgatggggagtgaagcagcaggaaggggctcccaagagctcctggtggtgcagcctgtgctcccctcagaagctctgctcttcccagggctcccggctggtttcagcaggcgactttcttccaatgctgggcccagacttcttgcctgggtgctggcctgccctctccggccgcttgctgcctgtctgctttccttggtggctttgcctgggtgctgggcctgccctctccggccgcttgctgcctgtctgctttccttggtggctttgcctgggtgctgggcctgccttctctggctgcttgctgcctgtctgctttccttggtggctttggcttctgcactccttggcgtcagcctctcaggtcctccattcacacgaggtcctcctcgctctggccgctcttgctgctcctgtctgaagaaatcagactgatttcctcttaagactcctagggatgtggtgaagagctgggactcaagtgcagtccacggtgtgaaacatgagggaggtgaggtgtccgtccacttcccccataaaggtgtgcatttcagttaggctgccccgccacagagcaggcttcatctgctctgccatccagccccatctggatgtgaggtggggtggagacatcatggggtgattgcagaaagggggagtggcggcccacgcagcttctgctgaggagctgaccgctctgagctgttctgtttcgtattgctgctctgtgtctgcatgtattgtgaccgtgcggctccacctcttccagctgctgctacagctgaggcctggatcccggcctttccctgtgacttacgtgtctgtcaccggcaggcagccctacaaatcctggtgacctgctctcccaagaacagagcctgtccccagatgtcccagtagcgatgagtaacagaggtggctgtggacttcctctacttctccttgctggatcagggccttcctgcctcccgctgggcaggtctggccttgctctcttggcagggccccagcccctctgaccactctgcagctcaccatgcagctgatgccaaagttgtggtgtccagtgtgcagcagccctgggagccactgccaccttcagaggggttccttgctgagacccacattgcttcacctggccccaccatggctgcttgcctggcccaacctagcgttctgtgccatgctagagcttgagctgttgctcttcttcaggggaggaaatagggtggagagcgggaagggtcttgctcctaagtgttgctgctgtggcttttttgccttctccaaagacgcactgccaggtcccaagcttcagactgctgtgcttagtaagcaagtgagaagcctggggtttggagcccacctactctctggcagcatcagcatcctactcctggcaacatcaggccaacgtccaccccagcctcacattgccagatgttggcagaagggctaatattgaccgtcttgactggctggagccttcaaagccactgggatgtcctccaggcacctgggtcccatgaccagctccccatctccataggggtaggcatttcactggtttatgaagctcgagtttcattaaatatgttaagaatcaaagctgtctttgttcaggctgctataacaaaaatataatagcctgggtggcttaaac

SEQ ID NO: 3760 - protein, 38 aa, Homosapiens
MLVVAFGLLVLYILLASSWKRPEPGILTDRQPLLHDGE

SEQ ID NO: 3761 - DNA, 1960 bp, Homosapiens
gccagtctggccgccatgttggagctttcgctgttcggggcccggcctgctccgggccctcccagcgtcgccgctagctgacttagggctcccgcccacactgcgcacggccttgctgagggccggctcgtagtgggaggcttcgcgttcacctgaacatttccgcctcctctggatgggggatgagaggcggggctgatgcatcgcagcagtcctggaccctgacttcggacttggagaagaaacgccgaggaggaacgggagttagggggttagcagcttggcgcgctgggagccggccacccctggtctccggacttcacttcccaggaggcctcgcgcgcgactggaagtgctgcgagcctataagaaggcgaggcggcacccgccgctctgctctggggcggcattgccagccggctgtaggcattcagggcagtgtcttctgcatctcctaggaacctcgggagcggcagctccggcgcctggtagcgagaggcgggttccggagatcccggcctcacttcgtcccactgtggttagggcgtcactggtgtaccgcctgccccagtcgtgggtggggcccaaactgccctggaaactcctccatgcagcgctgcacctgatggccttcgtcctcactgttgtggggctggttgctgtctttacgtttcacaaccatggaaggactgccaacctctactcccttcacagctggctgggcatcaccactgtcttcctcttcgcctgccagtggttcctgggctttgctgtcttcctcctgccctgggcgtccatgtggctgcgcagcctcctaaaacctatccacgtcttttttggagccgccatcctctctctgtccatcgcatccgtcatttcgggcattaatgagaagcttttcttcagtttgaaaaacaccaccaggccataccacagcctgcccagtgaggcggtctttgccaacagcaccgggatgctggtggtggcctttgggctgctggtgctctacatccttctggcttcatcttggaagcgcccagagccggggatcctgaccgacagacagctgctgctacagctgaggcctggatcccggcctttccctgtgacttacgtgtctgtcaccggcaggcagccctacaaatcctggtgacctgctctcccaagaacagagcctgtccccagatgtcccagtagcgatgagtaacagaggtggctgtggacttcctctacttctccttgctggatcagggccttcctgcctcccgctgggcaggtctggccttgctctcttggcagggccccagcccctctgaccactctgcagctcaccatgcagctgatgccaaagttgtggtgtccagtgtgcagcagccctgggagccactgccaccttcagaggggttccttgctgagacccacattgcttcacctggccccaccatggctgcttgcctggcccaacctagcgttctgtgccatgctagagcttgagctgttgctcttcttcaggggaggaaatagggtggagagcgggaagggtcttgctcctaagtgttgctgctgtggcttttttgccttctccaaagacgcactgccaggtcccaagcttcagactgctgtgcttagtaagcaagtgagaagcctggggtttggagcccacctactctctggcagcatcagcatcctactcctggcaacatcaggccaacgtccaccccagcctcacattgccagatgttggcagaagggctaatattgaccgtcttgactggctggagccttcaaagccactgggatgtcctccaggcacctgggtcccatgaccagctccccatctccataggggtaggcatttcactggtttatgaagctcgagtttcattaaatatgttaagaatcaaagctgtctttgttcaggctgctataacaaaaatataatagcctgggtggcttaaac

SEQ ID NO: 3762 - protein, 175 aa, Homosapiens
MAFVLTVVGLVAVFTFHNHGRTANLYSLHSWLGITTVFLFACQWFLGFAVFLLPWASMWLRSLLKPIHVFFGAAILSLSIASVISGINEKLFFSLKNTTRPYHSLPSEAVFANSTGMLVVAFGLLVLYILLASSWKRPEPGILTDRQLLLQLRPGSRPFPVTYVSVTGRQPYKSW

SEQ ID NO: 3763 - DNA, 3042 bp, Homosapiens
gctctatggccagtctggccgccatgttggagctttcgctgttcggggcccggcctgctccgggccctcccagcgtcgccgctagctgacttagggctcccgcccacactgcgcacggccttgctgagggccggctcgtagtgggaggcttcgcgttcacctgaacatttccgcctcctctggatgggggatgagaggcggggctgatgcatcgcagcagtcctggaccctgacttcggacttggagaagaaacgccgaggaggaacgggagttagggggttagcagcttggcgcgctgggagccggccacccctggtctccggacttcacttcccaggaggcctcgcgcgcgactggaagtgctgcgagcctataagaaggcgaggcggcacccgccgctctgctctggggcggcattgccagccggctgtaggcattcagggcagtgtcttctgcatctcctaggaacctcgggagcggcagctccggcgcctggtagcgagaggcgggttccggagatcccggcctcacttcgtcccactgtggttaggggtgagtcctgcaaatgttaagtgatttgctcaaggtgcccatttcgcaggaattggagcccaggccagttctctgagcctatcattagggctaaaggagtgcgtgatcagaatggtgtctggacggttctacttgtcctgcctgctgctggggtccctgggctctatgtgcatcctcttcactatctactggatgcagtactggcgtggtggctttgcctggaatggcagcatctacatgttcaactggcacccagtgcttatggttgctggcatggtggtattctatggaggtgcgtcactggtgtaccgcctgccccagtcgtgggtggggcccaaactgccctggaaactcctccatgcagcgctgcacctgatggccttcgtcctcactgttgtggggctggttgctgtctttacgtttcacaaccatggaaggactgccaacctctactcccttcacagctggctgggcatcaccactgtcttcctcttcgcctgccagtggttcctgggctttgctgtcttcctcctgccctgggcgtccatgtggctgcgcagcctcctaaaacctatccacgtcttttttggagccgccatcctctctctgtccatcgcatccgtcatttcgggcattaatgagaagcttttcttcagtttgaaaaacaccaccaggccataccacagcctgcccagtgaggcggtctttgccaacagcaccgggatgctggtggtggcctttgggctgctggtgctctacatccttctggcttcatcttggaagcgcccagagccggggatcctgaccgacagacagcccctgctgcatgatggggagtgaagcagcaggaaggggctcccaagagctcctggtggtgcagcctgtgctcccctcagaagctctgctcttcccagggctcccggctggtttcagcaggcgactttcttccaatgctgggcccagacttcttgcctgggtgctggcctgccctctccggccgcttgctgcctgtctgctttccttggtggctttgcctgggtgctgggcctgccctctccggccgcttgctgcctgtctgctttccttggtggctttgcctgggtgctgggcctgccttctctggctgcttgctgcctgtctgctttccttggtggctttggcttctgcactccttggcgtcagcctctcaggtcctccattcacacgaggtcctcctcgctctggccgctcttgctgctcctgtctgaagaaatcagactgatttcctcttaagactcctagggatgtggtgaagagctgggactcaagtgcagtccacggtgtgaaacatgagggaggtgaggtgtccgtccacttcccccataaaggtgtgcatttcagttaggctgccccgccacagagcaggcttcatctgctctgccatccagccccatctggatgtgaggtggggtggagacatcatggggtgattgcagaaagggggagtggcggcccacgcagcttctgctgaggagctgaccgctctgagctgttctgtttcgtattgctgctctgtgtctgcatgtattgtgaccgtgcggctccacctcttccagctgctgctacagctgaggcctggatcccggcctttccctgtgacttacgtgtctgtcaccggcaggcagccctacaaatcctggtgacctgctctcccaagaacagagcctgtccccagatgtcccagtagcgatgagtaacagaggtggctgtggacttcctctacttctccttgctggatcagggccttcctgcctcccgctgggcaggtctggccttgctctcttggcagggccccagcccctctgaccactctgcagctcaccatgcagctgatgccaaagttgtggtgtccagtgtgcagcagccctgggagccactgccaccttcagaggggttccttgctgagacccacattgcttcacctggccccaccatggctgcttgcctggcccaacctagcgttctgtgccatgctagagcttgagctgttgctcttcttcaggggaggaaatagggtggagagcgggaagggtcttgctcctaagtgttgctgctgtggcttttttgccttctccaaagacgcactgccaggtcccaagcttcagactgctgtgcttagtaagcaagtgagaagcctggggtttggagcccacctactctctggcagcatcagcatcctactcctggcaacatcaggccaacgtccaccccagcctcacattgccagatgttggcagaagggctaatattgaccgtcttgactggctggagccttcaaagccactgggatgtcctccaggcacctgggtcccatgaccagctccccatctccataggggtaggcatttcactggtttatgaagctcgagtttcattaaatatgttaagaatcaaagctgtctttgttcaggctgctataacaaaaatataatagcctgggtggcttaaac

SEQ ID NO: 3764 - protein, 242 aa, Homosapiens
MVSGRFYLSCLLLGSLGSMCILFTIYWMQYWRGGFAWNGSIYMFNWHPVLMVAGMVVFYGGASLVYRLPQSWVGPKLPWKLLHAALHLMAFVLTVVGLVAVFTFHNHGRTANLYSLHSWLGITTVFLFACQWFLGFAVFLLPWASMWLRSLLKPIHVFFGAAILSLSIASVISGINEKLFFSLKNTTRPYHSLPSEAVFANSTGMLVVAFGLLVLYILLASSWKRPEPGILTDRQPLLHDGE

SEQ ID NO: 3765 - DNA, 1529 bp, Homosapiens
gctctatggccagtctggccgccatgttggagctttcgctgttcggggcccggcctgctccgggccctcccagcgtcgccgctagctgacttagggctcccgcccacactgcgcacggccttgctgagggccggctcgtagtgggaggcttcgcgttcacctgaacatttccgcctcctctggatgggggatgagaggcggggctgatgcatcgcagcagtcctggaccctgacttcggacttggagaagaaacgccgaggaggaacgggagttagggggttagcagcttggcgcgctgggagccggccacccctggtctccggacttcacttcccaggaggcctcgcgcgcgactggaagtgctgcgagcctataagaaggcgaggcggcacccgccgctctgctctggggcggcattgccagccggctgtaggcattcagggcagtgtcttctgcatctcctaggaacctcgggagcggcagctccggcgcctggtagcgagaggcgggttccggagatcccggcctcacttcgtcccactgtggttaggggtgagtcctgcaaatgttaagtgatttgctcaaggtgcccatttcgcaggaattggagcccaggccagttctctgagcctatcattagggctaaaggagtgcgtgatcagaatggtgtctggacggttctacttgtcctgcctgctgctggggtccctgggctctatgtgcatcctcttcactatctactggatgcagtactggcgtggtggctttgcctggaatggcagcatctacatgttcaactggcacccagtgcttatggttgctggcatggtggtattctatggaggtgcgtcactggtgtaccgcctgccccagtccccctctgaccactctgcagctcaccatgcagctgatgccaaagttgtggtgtccagtgtgcagcagccctgggagccactgccaccttcagaggggttccttgctgagacccacattgcttcacctggccccaccatggctgcttgcctggcccaacctagcgttctgtgccatgctagagcttgagctgttgctcttcttcaggggaggaaatagggtggagagcgggaagggtcttgctcctaagtgttgctgctgtggcttttttgccttctccaaagacgcactgccaggtcccaagcttcagactgctgtgcttagtaagcaagtgagaagcctggggtttggagcccacctactctctggcagcatcagcatcctactcctggcaacatcaggccaacgtccaccccagcctcacattgccagatgttggcagaagggctaatattgaccgtcttgactggctggagccttcaaagccactgggatgtcctccaggcacctgggtcccatgaccagctccccatctccataggggtaggcatttcactggtttatgaagctcgagtttcattaaatatgttaagaatcaaagctgtctttgttcaggctgctataacaaaaatataatagcctgggtggcttaaac

SEQ ID NO: 3766 - protein, 182 aa, Homosapiens
MAASTCSTGTQCLWLLAWWYSMEVRHWCTACPSPPLTTLQLTMQLMPKLWCPVCSSPGSHCHLQRGSLLRPTLLHLAPPWLLAWPNLAFCAMLELELLLFFRGGNRVESGKGLAPKCCCCGFFAFSKDALPGPKLQTAVLSKQVRSLGFGAHLLSGSISILLLATSGQRPPQPHIARCWQKG

SEQ ID NO: 3767 - DNA, 2263 bp, Homosapiens
gctctatggccagtctggccgccatgttggagctttcgctgttcggggcccggcctgctccgggccctcccagcgtcgccgctagctgacttagggctcccgcccacactgcgcacggccttgctgagggccggctcgtagtgggaggcttcgcgttcacctgaacatttccgcctcctctggatgggggatgagaggcggggctgatgcatcgcagcagtcctggaccctgacttcggacttggagaagaaacgccgaggaggaacgggagttagggggttagcagcttggcgcgctgggagccggccacccctggtctccggacttcacttcccaggaggcctcgcgcgcgactggaagtgctgcgagcctataagaaggcgaggcggcacccgccgctctgctctggggcggcattgccagccggctgtaggcattcagggcagtgtcttctgcatctcctaggaacctcgggagcggcagctccggcgcctggtagcgagaggcgggttccggagatcccggcctcacttcgtcccactgtggttaggggtgagtcctgcaaatgttaagtgatttgctcaaggtgcccatttcgcaggaattggagcccaggccagttctctgagcctatcattagggctaaaggagtgcgtgatcagaatggtgtctggacggttctacttgtcctgcctgctgctggggtccctgggctctatgtgcatcctcttcactatctactggatgcagtactggcgtggtggctttgcctggaatggcagcatctacatgttcaactggcacccagtgcttatggttgctggcatggtggtattctatggaggtgcgtcactggtgtaccgcctgccccagtcgtgggtggggcccaaactgccctggaaactcctccatgcagcgctgcacctgatggccttcgtcctcactgttgtggggctggttgctgtctttacgtttcacaaccatggaaggactgccaacctctactcccttcacagctggctgggcatcaccactgtcttcctcttcgcctgccagtggttcctgggctttgctgtcttcctcctgccctgggcgtccatgtggctgcgcagcctcctaaaacctatccacgtcttttttggagccgccatcctctctctgtccatcgcatccgtcatttcgggcattaatgagaagcttttcttcagtttgaaaaacaccaccaggccataccacagcctgcccagtgaggcggtctttgccaacagcaccgggatgctggtggtggcctttgggctgctggtgctctacatccttctggcttcatcttggaagcgcccagagccggggatcctgaccgacagacagctgctgctacagctgaggcctggatcccggcctttccctgtgacttacgtgtctgtcaccggcaggcagccctacaaatcctggtgacctgctctcccaagaacagagcctgtccccagatgtcccagtagcgatgagtaacagaggtggctgtggacttcctctacttctccttgctggatcagggccttcctgcctcccgctgggcaggtctggccttgctctcttggcagggccccagcccctctgaccactctgcagctcaccatgcagctgatgccaaagttgtggtgtccagtgtgcagcagccctgggagccactgccaccttcagaggggttccttgctgagacccacattgcttcacctggccccaccatggctgcttgcctggcccaacctagcgttctgtgccatgctagagcttgagctgttgctcttcttcaggggaggaaatagggtggagagcgggaagggtcttgctcctaagtgttgctgctgtggcttttttgccttctccaaagacgcactgccaggtcccaagcttcagactgctgtgcttagtaagcaagtgagaagcctggggtttggagcccacctactctctggcagcatcagcatcctactcctggcaacatcaggccaacgtccaccccagcctcacattgccagatgttggcagaagggctaatattgaccgtcttgactggctggagccttcaaagccactgggatgtcctccaggcacctgggtcccatgaccagctccccatctccataggggtaggcatttcactggtttatgaagctcgagtttcattaaatatgttaagaatcaaagctgtctttgttcaggctgctataacaaaaatataatagcctgggtggcttaaac

SEQ ID NO: 3768 - protein, 263 aa, Homosapiens
MVSGRFYLSCLLLGSLGSMCILFTIYWMQYWRGGFAWNGSIYMFNWHPVLMVAGMVVFYGGASLVYRLPQSWVGPKLPWKLLHAALHLMAFVLTVVGLVAVFTFHNHGRTANLYSLHSWLGITTVFLFACQWFLGFAVFLLPWASMWLRSLLKPIHVFFGAAILSLSIASVISGINEKLFFSLKNTTRPYHSLPSEAVFANSTGMLVVAFGLLVLYILLASSWKRPEPGILTDRQLLLQLRPGSRPFPVTYVSVTGRQPYKSW

SEQ ID NO: 3769 - DNA, 944 bp, Homosapiens
gctctatggccagtctggccgccatgttggagctttcgctgttcggggcccggcctgctccgggccctcccagcgtcgccgctagctgacttagggctcccgcccacactgcgcacggccttgctgagggccggctcgtagtgggaggcttcgcgttcacctgaacatttccgcctcctctggatgggggatgagaggcggggctgatgcatcgcagcagtcctggaccctgacttcggacttggagaagaaacgccgaggaggaacgggagttagggggttagcagcttggcgcgctgggagccggccacccctggtctccggacttcacttcccaggaggcctcgcgcgcgactggaagtgctgcgagcctataagaaggcgaggcggcacccgccgctctgctctggggcggcattgccagccggctgtaggcattcagggcagtgtcttctgcatctcctaggaacctcgggagcggcagctccggcgcctggtagcgagaggcgggttccggagatcccggcctcacttcgtcccactgtggttaggggtgagtcctgcaaatgttaagtgatttgctcaaggtgcccatttcgcaggaattggagcccaggccagttctctgagcctatcattagggctaaaggagtgcgtgatcagaatggtgtctggacggttctacttgtcctgcctgctgctggggtccctgggctctatgtgcatcctcttcactatctactggatgcagtactggcgtggtggctttgcctggaatggcagcatctacatgttcaactggcacccagtgcttatggttgctggcatggtggtattctatggaggtggcacctgggtcccatgaccagctccccatctccataggggtaggcatttcactggtttatgaagctcgagtttcattaaatatgttaagaatcaaa

SEQ ID NO: 3770 - protein, 66 aa, Homosapiens
MVSGRFYLSCLLLGSLGSMCILFTIYWMQYWRGGFAWNGSIYMFNWHPVLMVAGMVVFYGGGTWVP

SEQ ID NO: 3771 - DNA, 413 bp, Homosapiens
ctttccttggtggctttgcctgggtgctgggcctgccttctctggctgcttgctgcctgtctgctttccttggtggctttggcttctgcactccttggcgtcagcctctcaggtcccaagcttcagactgctgtgcttagtaagcaagtgagaagcctggggtttggagcccacctactctctggcagcatcagcatcctactcctggcaacatcaggccaacgtccaccccagcctcacattgccagatgttggcagaagggctaatattgaccgtcttgactggctggagccttcaaagccactgggatgtcctccaggcacctgggtcccatgaccagctccccatctccataggggtaggcatttcactggtttatgaagctcgagtttcattaaatatgttaagaatc

SEQ ID NO: 3772 - protein, 54 aa, Homosapiens
MLAEGLILTVLTGWSLQSHWDVLQAPGSHDQLPISIGVGISLVYEARVSLNMLR

SEQ ID NO: 3773 - DNA, 1911 bp, Homosapiens
aagaaagggtgttaaaattctagatcacatatggacccgggaaggttttctcaccctctgttagtgacatcgagtctcccactagacaaaaataggtggaaaaatctctcgagggctcacattgttttgtcatcttcaggaaaaacaccaccaggccataccacagcctgcccagtgaggcggtctttgccaacagcaccgggatgctggtggtggcctttgggctgctggtgctctacatccttctggcttcatcttggaagcgcccagagccggggatcctgaccgacagacagcccctgctgcatgatggggagtgaagcagcaggaaggggctcccaagagctcctggtggtgcagcctgtgctcccctcagaagctctgctcttcccagggctcccggctggtttcagcaggcgactttcttccaatgctgggcccagacttcttgcctgggtgctggcctgccctctccggccgcttgctgcctgtctgctttccttggtggctttgcctgggtgctgggcctgccctctccggccgcttgctgcctgtctgctttccttggtggctttgcctgggtgctgggcctgccttctctggctgcttgctgcctgtctgctttccttggtggctttggcttctgcactccttggcgtcagcctctcaggtcctccattcacacgaggtcctcctcgctctggccgctcttgctgctcctgtctgaagaaatcagactgatttcctcttaagactcctagggatgtggtgaagagctgggactcaagtgcagtccacggtgtgaaacatgagggaggtgaggtgtccgtccacttcccccataaaggtgtgcatttcagttaggctgccccgccacagagcaggcttcatctgctctgccatccagccccatctggatgtgaggtggggtggagacatcatggggtgattgcagaaagggggagtggcggcccacgcagcttctgctgaggagctgaccgctctgagctgttctgtttcgtattgctgctctgtgtctgcatgtattgtgaccgtgcggctccacctcttccagctgctgctacagctgaggcctggatcccggcctttccctgtgacttacgtgtctgtcaccggcaggcagccctacaaatcctggtgacctgctctcccaagaacagagcctgtccccagatgtcccagtagcgatgagtaacagaggtggctgtggacttcctctacttctccttgctggatcagggccttcctgcctcccgctgggcaggtctggccttgctctcttggcagggccccagcccctctgaccactctgcagctcaccatgcagctgatgccaaagttgtggtgtccagtgtgcagcagccctgggagccactgccaccttcagaggggttccttgctgagacccacattgcttcacctggccccaccatggctgcttgcctggcccaacctagcgttctgtgccatgctagagcttgagctgttgctcttcttcaggggaggaaatagggtggagagcgggaagggtcttgctcctaagtgttgctgctgtggcttttttgccttctccaaagacgcactgccaggtcccaagcttcagactgctgtgcttagtaagcaagtgagaagcctggggtttggagcccacctactctctggcagcatcagcatcctactcctggcaacatcaggccaacgtccaccccagcctcacattgccagatgttggcagaagggctaatattgaccgtcttgactggctggagccttcaaagccactgggatgtcctccaggcacctgggtcccatgaccagctccccatctccataggggtaggcatttcactggtttatgaagctcgagtttcattaaatatgttaagaatc

SEQ ID NO: 3774 - protein, 38 aa, Homosapiens; identical to SEQ ID NO: 3760

SEQ ID NO: 3775 - DNA, 1902 bp, Homosapiens
gccagtctggccgccatgttggagctttcgctgttcggggcccggcctgctccgggccctcccagcgtcgccgctagctgacttagggctcccgcccacactgcgcacggccttgctgagggccggctcgtagtgggaggcttcgcgttcacctgaacatttccgcctcctctggatgggggatgagaggcggggctgatgcatcgcagcagtcctggaccctgacttcggacttggagaagaaacgccgaggaggaacgggagttagggggttagcagcttggcgcgctgggagccggccacccctggtctccggacttcacttcccaggaggcctcgcgcgcgactggaagtgctgcgagcctataagaaggcgaggcggcacccgccgctctgctctggggcggcattgccagccggctgtaggcattcagggcagtgtcttctgcatctcctaggaacctcgggagcggcagctccggcgcctggtagcgagaggcgggttccggagatcccggcctcacttcgtcccactgtggttagggcgtcactggtgtaccgcctgccccagtcgtgggtggggcccaaactgccctggaaactcctccatgcagcgctgcacctgatggccttcgtcctcactgttgtggggctggttgctgtctttacgtttcacaaccatggaaggactgccaacctctactcccttcacagctggctgggcatcaccactgtcttcctcttcgcctgccagtggttcctgggctttgctgtcttcctcctgccctgggcgtccatgtggctgcgcagcctcctaaaacctatccacgtcttttttggagccgccatcctctctctgtccatcgcatccgtcatttcgggcattaatgagaagcttttcttcagtttgaaaaacaccaccaggccataccacagcctgcccagtgaggcggtctttgccaacagcaccgggatgctggtggtggcctttgggctgctggtgctctacatccttctggcttcatcttggaagcgcccagagccggggatcctgaccgacagacagctgctgctacagctgaggcctggatcccggcctttccctgtgacttacgtgtctgtcaccggcaggcagccctacaaatcctggtgacctgctctcccaagaacagagcctgtccccagatgtcccagtagcgatgagtaacagaggtggctgtggacttcctctacttctccttgctggatcagggccttcctgcctcccgctgggcaggtctggccttgctctcttggcagggccccagcccctctgaccactctgcagctcaccatgcagctgatgccaaagttgtggtgtccagtgtgcagcagccctgggagccactgccaccttcagaggggttccttgctgagacccacattgcttcacctggccccaccatggctgcttgcctggcccaacctagcgttctgtgccatgctagagcttgagctgttgctcttcttcaggggaggaaatagggtggagagcgggaagggtcttgctcctaagtgttgctgctgtggcttttttgccttctccaaagacgcactgccaggtcccaagcttcagactgctgtgcttagtaagcaagtgagaagcctggggtttggagcccacctactctctggcagcatcagcatcctactcctggcaacatcaggccaacgtccaccccagcctcacattgccagatgttggcagaagggctaatattgaccgtcttgactggctggagccttcaaagccactgggatgtcctccaggcacctgggtcccatgaccagctccccatctccataggggtaggcatttcactggtttatgaagctcgagtttcattaaatatgttaagaatc

SEQ ID NO: 3776 - protein, 175 aa, Homosapiens; identical to SEQ ID NO: 3762

SEQ ID NO: 3777 - DNA, 1471 bp, Homosapiens
gctctatggccagtctggccgccatgttggagctttcgctgttcggggcccggcctgctccgggccctcccagcgtcgccgctagctgacttagggctcccgcccacactgcgcacggccttgctgagggccggctcgtagtgggaggcttcgcgttcacctgaacatttccgcctcctctggatgggggatgagaggcggggctgatgcatcgcagcagtcctggaccctgacttcggacttggagaagaaacgccgaggaggaacgggagttagggggttagcagcttggcgcgctgggagccggccacccctggtctccggacttcacttcccaggaggcctcgcgcgcgactggaagtgctgcgagcctataagaaggcgaggcggcacccgccgctctgctctggggcggcattgccagccggctgtaggcattcagggcagtgtcttctgcatctcctaggaacctcgggagcggcagctccggcgcctggtagcgagaggcgggttccggagatcccggcctcacttcgtcccactgtggttaggggtgagtcctgcaaatgttaagtgatttgctcaaggtgcccatttcgcaggaattggagcccaggccagttctctgagcctatcattagggctaaaggagtgcgtgatcagaatggtgtctggacggttctacttgtcctgcctgctgctggggtccctgggctctatgtgcatcctcttcactatctactggatgcagtactggcgtggtggctttgcctggaatggcagcatctacatgttcaactggcacccagtgcttatggttgctggcatggtggtattctatggaggtgcgtcactggtgtaccgcctgccccagtccccctctgaccactctgcagctcaccatgcagctgatgccaaagttgtggtgtccagtgtgcagcagccctgggagccactgccaccttcagaggggttccttgctgagacccacattgcttcacctggccccaccatggctgcttgcctggcccaacctagcgttctgtgccatgctagagcttgagctgttgctcttcttcaggggaggaaatagggtggagagcgggaagggtcttgctcctaagtgttgctgctgtggcttttttgccttctccaaagacgcactgccaggtcccaagcttcagactgctgtgcttagtaagcaagtgagaagcctggggtttggagcccacctactctctggcagcatcagcatcctactcctggcaacatcaggccaacgtccaccccagcctcacattgccagatgttggcagaagggctaatattgaccgtcttgactggctggagccttcaaagccactgggatgtcctccaggcacctgggtcccatgaccagctccccatctccataggggtaggcatttcactggtttatgaagctcgagtttcattaaatatgttaagaatc

SEQ ID NO: 3778 - protein, 182 aa, Homosapiens; identical to SEQ ID NO: 3766

SEQ ID NO: 3779 - DNA, 2205 bp, Homosapiens
gctctatggccagtctggccgccatgttggagctttcgctgttcggggcccggcctgctccgggccctcccagcgtcgccgctagctgacttagggctcccgcccacactgcgcacggccttgctgagggccggctcgtagtgggaggcttcgcgttcacctgaacatttccgcctcctctggatgggggatgagaggcggggctgatgcatcgcagcagtcctggaccctgacttcggacttggagaagaaacgccgaggaggaacgggagttagggggttagcagcttggcgcgctgggagccggccacccctggtctccggacttcacttcccaggaggcctcgcgcgcgactggaagtgctgcgagcctataagaaggcgaggcggcacccgccgctctgctctggggcggcattgccagccggctgtaggcattcagggcagtgtcttctgcatctcctaggaacctcgggagcggcagctccggcgcctggtagcgagaggcgggttccggagatcccggcctcacttcgtcccactgtggttaggggtgagtcctgcaaatgttaagtgatttgctcaaggtgcccatttcgcaggaattggagcccaggccagttctctgagcctatcattagggctaaaggagtgcgtgatcagaatggtgtctggacggttctacttgtcctgcctgctgctggggtccctgggctctatgtgcatcctcttcactatctactggatgcagtactggcgtggtggctttgcctggaatggcagcatctacatgttcaactggcacccagtgcttatggttgctggcatggtggtattctatggaggtgcgtcactggtgtaccgcctgccccagtcgtgggtggggcccaaactgccctggaaactcctccatgcagcgctgcacctgatggccttcgtcctcactgttgtggggctggttgctgtctttacgtttcacaaccatggaaggactgccaacctctactcccttcacagctggctgggcatcaccactgtcttcctcttcgcctgccagtggttcctgggctttgctgtcttcctcctgccctgggcgtccatgtggctgcgcagcctcctaaaacctatccacgtcttttttggagccgccatcctctctctgtccatcgcatccgtcatttcgggcattaatgagaagcttttcttcagtttgaaaaacaccaccaggccataccacagcctgcccagtgaggcggtctttgccaacagcaccgggatgctggtggtggcctttgggctgctggtgctctacatccttctggcttcatcttggaagcgcccagagccggggatcctgaccgacagacagctgctgctacagctgaggcctggatcccggcctttccctgtgacttacgtgtctgtcaccggcaggcagccctacaaatcctggtgacctgctctcccaagaacagagcctgtccccagatgtcccagtagcgatgagtaacagaggtggctgtggacttcctctacttctccttgctggatcagggccttcctgcctcccgctgggcaggtctggccttgctctcttggcagggccccagcccctctgaccactctgcagctcaccatgcagctgatgccaaagttgtggtgtccagtgtgcagcagccctgggagccactgccaccttcagaggggttccttgctgagacccacattgcttcacctggccccaccatggctgcttgcctggcccaacctagcgttctgtgccatgctagagcttgagctgttgctcttcttcaggggaggaaatagggtggagagcgggaagggtcttgctcctaagtgttgctgctgtggcttttttgccttctccaaagacgcactgccaggtcccaagcttcagactgctgtgcttagtaagcaagtgagaagcctggggtttggagcccacctactctctggcagcatcagcatcctactcctggcaacatcaggccaacgtccaccccagcctcacattgccagatgttggcagaagggctaatattgaccgtcttgactggctggagccttcaaagccactgggatgtcctccaggcacctgggtcccatgaccagctccccatctccataggggtaggcatttcactggtttatgaagctcgagtttcattaaatatgttaagaatc

SEQ ID NO: 3780 - protein, 263 aa, Homosapiens; identical to SEQ ID NO: 3768

SEQ ID NO: 3781 - DNA, 2984 bp, Homosapiens
gctctatggccagtctggccgccatgttggagctttcgctgttcggggcccggcctgctccgggccctcccagcgtcgccgctagctgacttagggctcccgcccacactgcgcacggccttgctgagggccggctcgtagtgggaggcttcgcgttcacctgaacatttccgcctcctctggatgggggatgagaggcggggctgatgcatcgcagcagtcctggaccctgacttcggacttggagaagaaacgccgaggaggaacgggagttagggggttagcagcttggcgcgctgggagccggccacccctggtctccggacttcacttcccaggaggcctcgcgcgcgactggaagtgctgcgagcctataagaaggcgaggcggcacccgccgctctgctctggggcggcattgccagccggctgtaggcattcagggcagtgtcttctgcatctcctaggaacctcgggagcggcagctccggcgcctggtagcgagaggcgggttccggagatcccggcctcacttcgtcccactgtggttaggggtgagtcctgcaaatgttaagtgatttgctcaaggtgcccatttcgcaggaattggagcccaggccagttctctgagcctatcattagggctaaaggagtgcgtgatcagaatggtgtctggacggttctacttgtcctgcctgctgctggggtccctgggctctatgtgcatcctcttcactatctactggatgcagtactggcgtggtggctttgcctggaatggcagcatctacatgttcaactggcacccagtgcttatggttgctggcatggtggtattctatggaggtgcgtcactggtgtaccgcctgccccagtcgtgggtggggcccaaactgccctggaaactcctccatgcagcgctgcacctgatggccttcgtcctcactgttgtggggctggttgctgtctttacgtttcacaaccatggaaggactgccaacctctactcccttcacagctggctgggcatcaccactgtcttcctcttcgcctgccagtggttcctgggctttgctgtcttcctcctgccctgggcgtccatgtggctgcgcagcctcctaaaacctatccacgtcttttttggagccgccatcctctctctgtccatcgcatccgtcatttcgggcattaatgagaagcttttcttcagtttgaaaaacaccaccaggccataccacagcctgcccagtgaggcggtctttgccaacagcaccgggatgctggtggtggcctttgggctgctggtgctctacatccttctggcttcatcttggaagcgcccagagccggggatcctgaccgacagacagcccctgctgcatgatggggagtgaagcagcaggaaggggctcccaagagctcctggtggtgcagcctgtgctcccctcagaagctctgctcttcccagggctcccggctggtttcagcaggcgactttcttccaatgctgggcccagacttcttgcctgggtgctggcctgccctctccggccgcttgctgcctgtctgctttccttggtggctttgcctgggtgctgggcctgccctctccggccgcttgctgcctgtctgctttccttggtggctttgcctgggtgctgggcctgccttctctggctgcttgctgcctgtctgctttccttggtggctttggcttctgcactccttggcgtcagcctctcaggtcctccattcacacgaggtcctcctcgctctggccgctcttgctgctcctgtctgaagaaatcagactgatttcctcttaagactcctagggatgtggtgaagagctgggactcaagtgcagtccacggtgtgaaacatgagggaggtgaggtgtccgtccacttcccccataaaggtgtgcatttcagttaggctgccccgccacagagcaggcttcatctgctctgccatccagccccatctggatgtgaggtggggtggagacatcatggggtgattgcagaaagggggagtggcggcccacgcagcttctgctgaggagctgaccgctctgagctgttctgtttcgtattgctgctctgtgtctgcatgtattgtgaccgtgcggctccacctcttccagctgctgctacagctgaggcctggatcccggcctttccctgtgacttacgtgtctgtcaccggcaggcagccctacaaatcctggtgacctgctctcccaagaacagagcctgtccccagatgtcccagtagcgatgagtaacagaggtggctgtggacttcctctacttctccttgctggatcagggccttcctgcctcccgctgggcaggtctggccttgctctcttggcagggccccagcccctctgaccactctgcagctcaccatgcagctgatgccaaagttgtggtgtccagtgtgcagcagccctgggagccactgccaccttcagaggggttccttgctgagacccacattgcttcacctggccccaccatggctgcttgcctggcccaacctagcgttctgtgccatgctagagcttgagctgttgctcttcttcaggggaggaaatagggtggagagcgggaagggtcttgctcctaagtgttgctgctgtggcttttttgccttctccaaagacgcactgccaggtcccaagcttcagactgctgtgcttagtaagcaagtgagaagcctggggtttggagcccacctactctctggcagcatcagcatcctactcctggcaacatcaggccaacgtccaccccagcctcacattgccagatgttggcagaagggctaatattgaccgtcttgactggctggagccttcaaagccactgggatgtcctccaggcacctgggtcccatgaccagctccccatctccataggggtaggcatttcactggtttatgaagctcgagtttcattaaatatgttaagaatc

SEQ ID NO: 3782 - protein, 242 aa, Homosapiens; identical to SEQ ID NO: 3764

SEQ ID NO: 3783 - DNA, 724 bp, Homosapiens
gctctatggccagtctggccgccatgttggagctttcgctgttcggggcccggcctgctccgggccctcccagcgtcgccgctagctgacttagggctcccgcccacactgcgcacggccttgctgagggccggctcgtagtgggaggcttcgcgttcacctgaacatttccgcctcctctggatgggggatgagaggcggggctgatgcatcgcagcagtcctggaccctgacttcggacttggagaagaaacgccgaggaggaacgggagttagggggttagcagcttggcgcgctgggagccggccacccctggtctccggacttcacttcccaggaggcctcgcgcgcgactggaagtgctgcgagcctataagaaggcgaggcggcacccgccgctctgctctggggcggcattgccagccggctgtaggcattcagggcagtgtcttctgcatctcctaggaacctcgggagcggcagctccggcgcctggtagcgagaggcgggttccggagatcccggcctcacttcgtcccactgtggttaggggtgagtcctgcaaatgttaagtgatttgctcaaggtgcccatttcgcaggaattggagcccaggccagttctctgagcctatcattagggctaaagccagagaactgggtgcatctgagccagtggagatttgtgacttctccttcttctaggagtgcgtgatcagaatgg

SEQ ID NO: 3784 - protein, 91 aa, Homosapiens
MRGGADASQQSWTLTSDLEKKRRGGTGVRGLAAWRAGSRPPLVSGLHFPGGLARDWKCCEPIRRRGGTRRSALGRHCQPAVGIQGSVFCIS

SEQ ID NO: 3785 - DNA, 743 bp, Homosapiens
agggtgggggacggaggcaggcaggcgagcaggcagggaggggaagaagagaagggaagctattaaacacacacacacacacacacactcacacacgcgcgcgcacacacccgccccaaccccccagaagcctcgggattgcagctgtttcatgtggggcagcagtgctggcagggacgccggccgggagcggccgggagcgggagccggtcgtgcgcgcgcggctggaggctcgctggggctccgctccccgcgggagctattgttggtctcgctggagctgagcgcagagcccggacctgctccttcctgggcgccccgctacggctcgcggagcagaggagccgcgccgccgagagagagaggagccaccggcgcggcgccttgcctccctgccgccgtcctcgccgcttccccggcggtagcagcctgcagccacgatggaaaaactgagaatcagagagggctagtgatctctcagacacttggtcggtaggatgcctttgaactctggatctctccacctggtctgattctgtccagaggcctgggaggattggcattattaagatgttattgaaaatgctggcacatataatcggcttggattagaaaccaaagctcttcgcagagtaacaagaaaagatcccgcaccatcctccaggatccaatggccttggagagagggctgcagggcccacggacattgctgactcttcagaacgtgctgacatggagccagg

SEQ ID NO: 3786 - protein, 114 aa, Homosapiens
MWGSSAGRDAGRERPGAGAGRARAAGGSLGLRSPRELLLVSLELSAEPGPAPSWAPRYGSRSRGAAPPRERGATGAAPCLPAAVLAASPAVAACSHDGKTENQRGLVISQTLGR

SEQ ID NO: 3787 - DNA, 833 bp, Homosapiens
atcctagcagctgagctctgccttcctggggaagtgaagatgagcaaaccattctcacttgcccctttgggtatggactagggaagtagggagagctggccagtcagcacaagggaagactgaagcaggcaagctgagagcatggaagtctccacaaaagagaaacaaaaagtcagaatgcctactccctgcagccacctttatttctgccagcttctggctccatttcaggtcatgcatagcacatgggtttatgcacaaagacctatttttggtatcttccttaaagcaatcaagcaagctgatcccagtaaaggggtaaacccagcaactaagttcacttcttgaccgctccattttcgtatctgtaaggtaatgctaatactatctttttgggaaggttatgaggattaaaaagtcatttgatctctaccaaatgctcagcaaatgcttcatggaagacaagccagctgctgctcttctgtgccctgcagttttcctcccacactctgcctcagcatcaatctcgttggcagcacagcccaccctctgggcgagcccaaggcctcttccaccctccagagaagagccctgaaatgacccacgcaggcacatacaatcaggggtctggaaacaagaccaagacggacgcacatctatttgcccaaataaattaagtagcattctgaacatgatgaatagtttggcaggaaaaaaacgttccagtaaatgcacgggctgacccaaaatggtccctccactggaatatggaaaatgaaaaaagatattgttttggctctagcctataaggcattaataaacaattggcatct

SEQ ID NO: 3788 - protein, 68 aa, Homosapiens [sequence omitted]

SEQ ID NO: 3789 - DNA, 318 bp, Homosapiens
aaaactttgtgatcttgaaccttaggttcataatctcacaaatgagaaggctccctccacactcttggaactgtacacccactgaaacccttaagatcaaaagaaactgcctctgtgcagttgaagactaaatcaatttttcagccataaatgagcatgctaacaaagatcttggaatttgtatttatggtaaaatgctttacatgcattctcattgaggcatatgagattcttaaatttaatttttgttcttgttcctgcctcaaatccaccaatgacttttcattgacgttagaatgaacattaaactctgtaaca

SEQ ID NO: 3790 - protein, 49 aa, Homosapiens
MSMLTKILEFVFMVKCFTCILIEAYEILKFNFCSCSCLKSTNDFSLTLE

SEQ ID NO: 3791 - DNA, 499 bp, Homosapiens
agatttgaagaagcaaactgggctattgtcagcatctgtgtggagaggttcagatgacaaggaactgaggactgcctctgatcaacagcccggaagaaagagatatcttttctcagcaagtagcagttcttttctacagtcaagcctcaggagctaagcagcctgacacttgtgagttatctggcatgaagtaattattttctcagaagatcttatcattgctgatcaagtatgagctctaaccaaggagctgcaaaacccggcatgtgttcatatttcactgaagaatacctaaaaaaccctggtatctgcaaatgtaatttgcaaagttgacaccttatttttccccagttagcattttctttagcttctgcaacatttaggtttatagaagtgtatctaatatctaaactttatagtacatgcaccagaaatgttttgtttctctttcatgcttttaaaaaatatatgttattaaatagagtgaaggtttaactgt

SEQ ID NO: 3792 - protein, 33 aa, Homosapiens
MSSNQGAAKPGMCSYFTEEYLKNPGICKCNLQS

SEQ ID NO: 3793 - DNA, 852 bp, Homosapiens
taaatgccctgcaccaataggtctccccaccttggtcaagaggttcagtgtatgtgctggcacacactttcaatgttgtggcaagtagtttaaaatattttctaaaccttcacgccttctgtttgtacagaacctcagtgtcagctacaggtgaaatataagaactttctaacgtctttcttgggcatgcacaccattttgcaatatgcgtgtttttccacattcccaggaatatgtcaaagctcttgaaagccctttacaggctactcatttcccagatttttcttttatggtttttggtcttattctttgccccaaccattatcactttctcagccctcttcaatttaaacaattgctgctgattgttttggaaaatgcctcaggaaaagattattcacactgagtgaactctgagtcaggtcaaattaaaaaaaaaaaaagtcctttccaggtaactgacagacaagtcaaatagtaacaattttctgaaggtggaattcttgagaaactctaaatcaaatccattccgttttctctgggaattgctatgctgataatttttacagcgtgatttcaaggttgttggtttccagtgctactgcaaagctgtgcagaaaggaatatgaatacagggcaagaaatatttccacagaagattaatcggttaatctcctcaagtccatggggacttcggctcaaaatattccaaattcacttttcctatgcattattttatttcttaatgactcaagagatgtgctgtgttctctttggaaactgctcattgttttcttactctgatttctttctccctctgttgttgcaaagataaaattatattaaaaagtc

SEQ ID NO: 3794 - protein, 69 aa, Homosapiens
MNTGQEIFPQKINRLISSSPWGLRLKIFQIHFSYALFYFLMTQEMCCVLFGNCSLFSYSDFFLPLLLQR

SEQ ID NO: 3795 - DNA, 941 bp, Homosapiens
atttagtaaccttaggcaatatctaatgatatgtgatttttgttgatgttttggttatattattatctttaccttttcaggttttaagacatttacattccattatataattaaaattaactgtaactgagacttcatattttctttctgagtctaaaattttataattaataaaataggctttataatattatgattatgtgaatgttatttattacagaatcaaatagtgtaaatagatccacagaagaagaagtataatgaacctgaaattgctaaaccccttttaaggaaaattttcctagcataatatatgaagtcttggtggggaccaaaaagctgaagaaatcagagataagtgctgcacattctaaggaaaggtgcaagacatctgcgtaagactagcttttctcttctagtctgtagaaaataattctacaaattttcaaaggaagagagtgagaacatgatttttaacagcatgattgagatacaatttatacactatacaattcacccatgtatagtgcatggttcaatggcttttaatatattcacagttgtgcaaccatcacaacaatcaatttcagaacaatttcattacccctgaaaagaagctcctcaccccttagccatcaccttgctgctatgaacatttgtgtacatgtttttgtgtgtacatatattttcatttctctggggtccctgtctaggcatggaattttttgatcacatggtaactctatctttaaccttttgagaaactcccagactgttttccaaagtggctgcattactttacactcccaccatcaatgtatgaagattcccatgttctacaccctggtcaacatttgctattatttgtcctattgatgataccccttctgttgaatgcaaagtggtatctcattgtggttttgatttgcattttcaagatg

SEQ ID NO: 3796 - protein, 47 aa, Homosapiens
MIFNSMIEIQFIHYTIHPCIVHGSMAFNIFTVVQPSQQSISEQFHYP

SEQ ID NO: 3797 - DNA, 598 bp, Homosapiens
taagaacaactgctaggctggtttttattgaacatggtttggaaatctctcgaacaaatgattcctgagacccaccccaattccaatgctatcattttgtgagttttattattcatctgaattcttacaactggtgtttggtaaccagaagaaacctgcaaggtgatgctcatttggacccaagcagtggtgaaattgctgactgaatcaaatagtgtaaatagatccacagaagaagaagtataatgaacctgaaattgctaaaccccttttaaggaaaattttcctagcataatatatgaagatggtccctctctttgttgcccaggctggagtgcagtggtgcgatcttgactcactgcaacctctacctcctggattcaagtgattctcctgcctcctgtagtcccaagtagctgggactacaggcacccgccaccaagtccagctaatttttgtatttttagtagagatggggtttcaccgtattggccaagctagtcttgaagtcctgacctcaagtgatctgcccccctcggcctctcaaagtgctgggattacaggcgtgagccactccactgagcctggccttttaatc

SEQ ID NO: 3798 - protein, 41 aa, Homosapiens
MGFHRIGQASLEVLTSSDLPPSASQSAGITGVSHSTEPGLL

SEQ ID NO: 3799 - DNA, 1248 bp, Homosapiens
gtacagccagtccccgccgcggaggtgccggtggagcctgggaccgggcgagtctccgccccgcttttgcagctaggggtgtgtttcaggggggattggggcaagccaagcaggcgaggacccgggcctgtgccgctttgcctacccctcatccctcggcaccaaggctacttgagccccagggtgttttttccttgttcccgccacctcctggtccctggcccaacatgatactgaccaaagctcagtacgacgagatagcccagtgcctagtgtctgtgccgcctaccaggcagagcctgaggaagctgaagcagaggtttcccagtcaatcgcaggccactctgctgagcatcttctcccaggagtaccagaaacacattaaaagaacacatgccaaacatcatacttcggaagcaattgaaagttattaccagaggtacctgaatggagtggtgaaaaatggagctgccccagtgctcctggacctggccaatgaggtggactatgcgccctcattaatggctcggcttatactggagaggtttctacaggaacacgaggaaactccaccctccaagtctattataaatagtatgctacgggacccttctcagattccagatggagttctagcaaatcaggtctatcagtgcattgtgaacgactgctgttacggaccactagtggactgcatcaagcatgccattggtcatgagcatgaggtcctgctgagagacttgcttctagagaaaaacctgtccttcctagatgaagatcagcttcgtgcaaagggttatgacaaaacaccagacttcattttacaagtaccagttgctgtagaagggcacataattcactggattgaaagcaaagcctcatttggtgatgaatgtagccaccacgcctacctgcatgaccagttctggagctactggaatagagatgggatctcacaatgttcctcaggctggtgtggaactcctgggctcagcgattcttctgcctcagccacccaaagtgctggaattacaggagcgaggaaacattttctaccaggaatctttatgaaatgtgtttgtaaataacaaaaaacattttcaaattgttggaaatttctcagcagttagtgcattaaaaaaaaaaaagtttcaaccagcatgtgtttcctcatcttaaacaataagtagcaatgtttggaaaatgtttgttatattatctctctaaataaaagttgatagttcccgt

SEQ ID NO: 3800 - protein, 286 aa, Homosapiens
MILTKAQYDEIAQCLVSVPPTRQSLRKLKQRFPSQSQATLLSIFSQEYQKHIKRTHAKHHTSEAIESYYQRYLNGVVKNGAAPVLLDLANEVDYAPSLMARLILERFLQEHEETPPSKSIINSMLRDPSQIPDGVLANQVYQCIVNDCCYGPLVDCIKHAIGHEHEVLLRDLLLEKNLSFLDEDQLRAKGYDKTPDFILQVPVAVEGHIIHWIESKASFGDECSHHAYLHDQFWSYWNRDGISQCSSGWCGTPGLSDSSASATQSAGITGARKHFLPGIFMKCVCK

SEQ ID NO: 3801 - DNA, 622 bp, Homosapiens
ccccgccgcggaggtgccggtggagcctgggaccgggcgagtctccgccccgcttttgcagctaggggtgtgtttcaggggggattggggcaagccaagcaggcgaggacccgggcctgtgccgctttgcctacccctcatccctcggcaccaaggctacttgagccccagggtgttttttccttgttcccgccacctcctggtccctggcccaacatgatactgaccaaagctcagtacgacgagatagcccagtgcctagtgtctgtgccgcctaccaggcagagcctgaggaagctgaagcagaggtttcccagtcaatcgcaggccactctgctgagcatcttctcccaggagtaccagaaacacattaaaagaacacatgccaaacatcatacttcggaagcaattgaaagttattaccagaggtacctgaatggagtggtgaaaaatggagctgccccagtgctcctggacctggccaatgaggtggactatgcgccctcattaatggctcggcttatactggagaggtttctacaggaacacgaggaaactccaccaagaccggagaaatactacttccaaatgcaaaggtgaattccactggtcttcctacaag

SEQ ID NO: 3802 - protein, 127 aa, Homosapiens
MILTKAQYDEIAQCLVSVPPTRQSLRKLKQRFPSQSQATLLSIFSQEYQKHIKRTHAKHHTSEAIESYYQRYLNGVVKNGAAPVLLDLANEVDYAPSLMARLILERFLQEHEETPPRPEKYYFQMQR

SEQ ID NO: 3803 - DNA, 2455 bp, Homosapiens
ccccgccgcggaggtgccggtggagcctgggaccgggcgagtctccgccccgcttttgcagctaggggtgtgtttcaggggggattggggcaagccaagcaggcgaggacccgggcctgtgccgctttgcctacccctcatccctcggcaccaaggctacttgagccccagggtgttttttccttgttcccgccacctcctggtccctggcccaacatgatactgaccaaagctcagtacgacgagatagcccagtgcctagtgtctgtgccgcctaccaggcagagcctgaggaagctgaagcagaggtttcccagtcaatcgcaggccactctgctgagcatcttctcccaggagtaccagaaacacattaaaagaacacatgccaaacatcatacttcggaagcaattgaaagttattaccagaggtacctgaatggagtggtgaaaaatggagctgccccagtgctcctggacctggccaatgaggtggactatgcgccctcattaatggctcggcttatactggagaggtttctacaggaacacgaggaaactccaccctccaagtctattataaatagtatgctacgggacccttctcagattccagatggagttctagcaaatcaggtctatcagtgcattgtgaacgactgctgttacggaccactagtggactgcatcaagcatgccattggtcatgagcatgaggtcctgctgagagacttgcttctagagaaaaacctgtccttcctagatgaagatcagcttcgtgcaaagggttatgacaaaacaccagacttcattttacaagtaccagttgctgtagaagggcacataattcactggattgaaagcaaagcctcatttggtgatgaatgtagccaccacgcctacctgcatgaccagttctggagctactggaatagatttgggccaggcttagtcatctattggtatggatttatccaggagctggactgcaaccgggaaaggggcatcctgctcaaagcctgtttccccacgaacattgtcaccttatgccacagcatagcttgaccctgaagatcctggaagagaagctgggaggaaaagagacccagcattgcattaccatcgtggaataatctagcgcaaacctaggaaagctgaagccacaaagtccaaagccacctttgtactcacctgcagagctccagaagaccttgatggcagcctgcctatgctgtgtgtttgctatattcaatctttacggcttcctgacttctgtgacagtaagccaagtgcaaaaatacacttgatgagaatttcctcttttaataatgttatttgaacaccacatattttagatttatcttatttgaaagtattagttccattgtgcctggaaaccacactcctttagattgggggccgagaggcgacaacccaacattgaggagagtttatttttaaacatggctagttgtcagtatgtacgtgagctagtatttttatgagtcgagttttttaaaggcacattctgtatactgcttagtatatgcattttataccatgtaattataaaacactcgagtaagttcagcattagaaatgtttagctttgtatgaactgagtgtgccagaaataaacctggagcaatttttaaataagcaaaataaaggagatttttctatttgttcactttaatttattcacttttgtgtacttttatgtactgcaaatcagatttcagtctaaagcgaaacatcagtaagttaataataaacctatcttttgggaagttgaatattaatctgtacccaaaacgtatttagtaaaatatttgcccccgccaccctgccatgctgacataacaacttttataatgttgaatagatgatatgggaaatactaataacaacaatgtaatttttgcagacagctttaacttatatacattgcttgatttttttcaaaagactaaatatgtcatttatactttgtttattttctaccaaagaaggtttgtaaaaatatgcctgctgcttttccttttgaaggacacaaacctggtcccaacatgtgtggattttaactctgagtggggtgcattaaatcaaaagagagaggcagaagatgaaatgctaaagaagggtcaggcaaacttctgtttcagtataaaattcatcatgcaggcttctgagtgaaatagaatgatttgaaaccactactgtattgcctggatacacacacacacacacacacacactttatacaaaaatgttaaaagcaggtttcctggcatgttctaaactgttttttctttaggaataaattacatttatctgcacagatgttgaaaatcctgttaaacccttgtcaaggatttgtttattttacattaaacaaatttattatgatgaacgtgaacaaataaattaaaaaataaaaaaggtacttgcgttttgt

SEQ ID NO: 3804 - protein, 281 aa, Homosapiens
MILTKAQYDEIAQCLVSVPPTRQSLRKLKQRFPSQSQATLLSIFSQEYQKHIKRTHAKHHTSEAIESYYQRYLNGVVKNGAAPVLLDLANEVDYAPSLMARLILERFLQEHEETPPSKSIINSMLRDPSQIPDGVLANQVYQCIVNDCCYGPLVDCIKHAIGHEHEVLLRDLLLEKNLSFLDEDQLRAKGYDKTPDFILQVPVAVEGHIIHWIESKASFGDECSHHAYLHDQFWSYWNRFGPGLVIYWYGFIQELDCNRERGILLKACFPTNIVTLCHSIA

SEQ ID NO: 3805 - DNA, 381 bp, Homosapiens
gccgcggaggtgccggtggagcctgggaccgggcgagtctccgccccgcttttgcagctaggggtgtgtttcaggggggattggggcaagccaagcaggcgaggacccgggcctgtgccgctttgcctacccctcatccctcggcaccaaggctacttgagccccagggtgttttttccttgttcccgccacctcctggtccctggcccaacatgatactgaccaaagctcagtacgacgagatagcccagtgcctagtgtctgtgccgcctaccaggcagagcctgaggaagctgaagcagaggtttcccagaaacacattaaaagaacacatgccaaacatcatacttcggaagcaattgaaagttattaccagaggta

SEQ ID NO: 3806 - protein, 55 aa, Homosapiens
MILTKAQYDEIAQCLVSVPPTRQSLRKLKQRFPRNTLKEHMPNIILRKQLKVITR

SEQ ID NO: 3807 - DNA, 2632 bp, Homosapiens
aagctcagctttctgtttagttgtgagattgcatactcaagaagaggaggaacataaaatacgtgatgtcttctcttaagtcaatcgcaggccactctgctgagcatcttctcccaggagtaccagaaacacattaaaagaacacatgccaaacatcatacttcggaagcaattgaaagttattaccagaggtacctgaatggagtggtgaaaaatggagctgccccagtgctcctggacctggccaatgaggtggactatgcgccctcattaatggctcggcttatactggagaggtttctacaggaacacgaggaaactccaccctccaagtctattataaatagtatgctacgggacccttctcagattccagatggagttctagcaaatcaggtctatcagtgcattgtgaacgactgctgttacggaccactagtggactgcatcaagcatgccattggtcatgagcatgaggtcctgctgagagacttgcttctagagaaaaacctgtccttcctagatgaagatcagcttcgtgcaaagggttatgacaaaacaccagacttcattttacaagtaccagttgctgtagaagggcacataattcactggattgaaagcaaagcctcatttggtgatgaatgtagccaccacgcctacctgcatgaccagttctggagctactggaatagatttgggccaggcttagtcatctattggtatggatttatccaggagctggactgcaaccgggaaaggggcatcctgctcaaagcctgtttccccacgaacattgtcaccttatgccacagcatagcttgaccctgaagatcctggaagagaagctgggaggaaaaggtgaatccggaagcaattttactttcctgcactgtaagatcctggcaacatctgccctgaacttcagctgaactcttgctgcccgtagtcacaccactacctctttagacaaacatatcaagagtttctgttttccttcatcccttgctgatgtgaacagccaagaactacagacacaacccactcattatcagcatttctgtctctgtcaaacaattagtttatagatagtcataatctttctttcttccggatggtttatccttgtatgctgaacaaaagaaaaaatgtgaagactgaaaggtgtgatttttcaattctcctcccagttaccgaatcaccctcttatttttttttccctaagcctccgttcactgtctctccctctccctttctcttcatgtgcactcacagagacccagcattgcattaccatcgtggaataatctagcgcaaacctaggaaagctgaagccacaaagtccaaagccacctttgtactcacctgcagagctccagaagaccttgatggcagcctgcctatgctgtgtgtttgctatattcaatctttacggcttcctgacttctgtgacagtaagccaagtgcaaaaatacacttgatgagaatttcctcttttaataatgttatttgaacaccacatattttagatttatcttatttgaaagtattagttccattgtgcctggaaaccacactcctttagattgggggccgagaggcgacaacccaacattgaggagagtttatttttaaacatggctagttgtcagtatgtacgtgagctagtatttttatgagtcgagttttttaaaggcacattctgtatactgcttagtatatgcattttataccatgtaattataaaacactcgagtaagttcagcattagaaatgtttagctttgtatgaactgagtgtgccagaaataaacctggagcaatttttaaataagcaaaataaaggagatttttctatttgttcactttaatttattcacttttgtgtacttttatgtactgcaaatcagatttcagtctaaagcgaaacatcagtaagttaataataaacctatcttttgggaagttgaatattaatctgtacccaaaacgtatttagtaaaatatttgcccccgccaccctgccatgctgacataacaacttttataatgttgaatagatgatatgggaaatactaataacaacaatgtaatttttgcagacagctttaacttatatacattgcttgatttttttcaaaagactaaatatgtcatttatactttgtttattttctaccaaagaaggtttgtaaaaatatgcctgctgcttttccttttgaaggacacaaacctggtcccaacatgtgtggattttaactctgagtggggtgcattaaatcaaaagagagaggcagaagatgaaatgctaaagaagggtcaggcaaacttctgtttcagtataaaattcatcatgcaggcttctgagtgaaatagaatgatttgaaaccactactgtattgcctggatacacacacacacacacacacacactttatacaaaaatgttaaaagcaggtttcctggcatgttctaaactgttttttctttaggaataaattacatttatctgcacagatgttgaaaatcctgttaaacccttgtcaaggatttgtttattttacattaaacaaatttattatgatgaacgtgaacaaataaattaaaaaataaaaaaggtacttgcgttttgt

SEQ ID NO: 3808 - protein, 183 aa, Homosapiens; identical to SEQ ID NO: 569

SEQ ID NO: 3809 - DNA, 565 bp, Homosapiens
gagcatcgtaaacattatttcaagaggtttccgaaaaggatctctaaaattatcagagaattcacaattcaagagtacctaacgaagaagaagggaaattaatccttcatatggctcaagtgttcacaagaaatgtggttgccagctaaagaggagaggagaaagattctgtgcaactgaaaggtctaccttaaacatcacagtccaacattcaacagtaccacagtgcatctacaatgtcccaagctttagctccgcaccctacagctgtctgggtaaaggagagcatgtgagtggacccaaagaatggctaggtaaagccctgtccaagtctagaacagcaacagccatgctgcagcaatgtggaaacagacctgaagaaaaaactagcactgtgaggatggcagacggaagatggaaagagcttgggtccttgaggacactgtggaactgctgaagagaccatggaattgagctgaccagcctccattcttattctgtgtaattatacatgtctatttttttaaatctccaaaccaaagaaataaaactcttcccaggcttc

SEQ ID NO: 3810 - protein, 35 aa, Homosapiens
MLQQCGNRPEEKTSTVRMADGRWKELGSLRTLWNC

SEQ ID NO: 3811 - DNA, 347 bp, Homosapiens
tcaatcgcaggccactctgctgagcatcttctcccaggagtaccagaaacacattaaaagaacacatgccaaacatcatacttcggaagcaattgaaagttattaccagagggacaggccatgttgttacctttcagatggattgacctcagtagccttttgttggaaatgtgcaggtcaaatgttcctgtctgtgctaagagacaggtttcaccgtgcttgccaggatggtctcgatctcctgaccttgtgatccgcctgcctcggcctcccaaagtgctgggattataggtgtgaaccactgcacctggcctccaatgttctattattgtaaataaaactgtgat

SEQ ID NO: 3812 - protein, 56 aa, Homosapiens
MLLPFRWIDLSSLLLEMCRSNVPVCAKRQVSPCLPGWSRSPDLVIRLPRPPKVLGL

SEQ ID NO: 3813 - DNA, 1867 bp, Homosapiens
aaacaaagaagtttctaaatgttggcctgatgacaaatgtgaattcacagaagatttacagaattctctaagattaggaattcttctagggcaaagactgcctatgccattggtcatgagcatgaggtcctgctgagagacttgcttctagagaaaaacctgtccttcctagatgaagatcagcttcgtgcaaagggttatgacaaaacaccagacttcattttacaagtaccagttgctgtagaagggcacataattcactggattgaaagcaaagcctcatttggtgatgaatgtagccaccacgcctacctgcatgaccagttctggagctactggaatagatttgggccaggcttagtcatctattggtatggatttatccaggagctggactgcaaccgggaaaggggcatcctgctcaaagcctgtttccccacgaacattgtcaccttatgccacagcatagcttgaccctgaagatcctggaagagaagctgggaggaaaagagacccagcattgcattaccatcgtggaataatctagcgcaaacctaggaaagctgaagccacaaagtccaaagccacctttgtactcacctgcagagctccagaagaccttgatggcagcctgcctatgctgtgtgtttgctatattcaatctttacggcttcctgacttctgtgacagtaagccaagtgcaaaaatacacttgatgagaatttcctcttttaataatgttatttgaacaccacatattttagatttatcttatttgaaagtattagttccattgtgcctggaaaccacactcctttagattgggggccgagaggcgacaacccaacattgaggagagtttatttttaaacatggctagttgtcagtatgtacgtgagctagtatttttatgagtcgagttttttaaaggcacattctgtatactgcttagtatatgcattttataccatgtaattataaaacactcgagtaagttcagcattagaaatgtttagctttgtatgaactgagtgtgccagaaataaacctggagcaatttttaaataagcaaaataaaggagatttttctatttgttcactttaatttattcacttttgtgtacttttatgtactgcaaatcagatttcagtctaaagcgaaacatcagtaagttaataataaacctatcttttgggaagttgaatattaatctgtacccaaaacgtatttagtaaaatatttgcccccgccaccctgccatgctgacataacaacttttataatgttgaatagatgatatgggaaatactaataacaacaatgtaatttttgcagacagctttaacttatatacattgcttgatttttttcaaaagactaaatatgtcatttatactttgtttattttctaccaaagaaggtttgtaaaaatatgcctgctgcttttccttttgaaggacacaaacctggtcccaacatgtgtggattttaactctgagtggggtgcattaaatcaaaagagagaggcagaagatgaaatgctaaagaagggtcaggcaaacttctgtttcagtataaaattcatcatgcaggcttctgagtgaaatagaatgatttgaaaccactactgtattgcctggatacacacacacacacacacacacactttatacaaaaatgttaaaagcaggtttcctggcatgttctaaactgttttttctttaggaataaattacatttatctgcacagatgttgaaaatcctgttaaacccttgtcaaggatttgtttattttacattaaacaaatttattatgatgaacgtgaacaaataaattaaaaaataaaaaaggtacttgcgttttgt

SEQ ID NO: 3814 - protein, 101 aa, Homosapiens [sequence omitted]

SEQ ID NO: 3815 - DNA, 1421 bp, Homosapiens
gacttcaggtgaaggacaggcagcaggagcagatgagatttagaataccaagactgtgtgtacacgcagatgtcagtggcagagaatgaagatcagcttcgtgcaaagggttatgacaaaacaccagacttcattttacaagtaccagttgctgtagaagggcacataattcactggattgaaagcaaagcctcatttggtgatgaatgtagccaccacgcctacctgcatgaccagttctggagctactggaatagatttgggccaggcttagtcatctattggtatggatttatccaggagctggactgcaaccgggaaaggggcatcctgctcaaagcctgtttccccacgaacattgtcaccttatgccacagcatagcttgaccctgaagatcctggaagagaagctgggaggaaaaggtgaatccggaagcaattttactttcctgcactgtaagatcctggcaacatctgccctgaacttcagctgaactcttgctgcccgtagtcacaccactacctctttagacaaacatatcaagagtttctgttttccttcatcccttgctgatgtgaacagccaagaactacagacacaacccactcattatcagcatttctgtctctgtcaaacaattagtttatagatagtcataatctttctttcttccggatggtttatccttgtatgctgaacaaaagaaaaaatgtgaagactgaaaggtgtgatttttcaattctcctcccagttaccgaatcaccctcttatttttttttccctaagcctccgttcactgtctctccctctccctttctcttcatgtgcactcacagagacccagcattgcattaccatcgtggaataatctagcgcaaacctaggaaagctgaagccacaaagtccaaagccacctttgtactcacctgcagagctccagaagaccttgatggcagcctgcctatgctgtgtgtttgctatattcaatctttacggcttcctgacttctgtgacagtaagccaagtgcaaaaatacacttgatgagaatttcctcttttaataatgttatttgaacaccacatattttagatttatcttatttgaaagtattagttccattgtgcctggaaaccacactcctttagattgggggccgagaggcgacaacccaacattgaggagagtttatttttaaacatggctagttgtcagtatgtacgtgagctagtatttttatgagtcgagttttttaaaggcacattctgtatactgcttagtatatgcattttataccatgtaattataaaacactcgagtaagttcagcattagaaatgtttagctttgtatgaactgagtgtgccagaaataaacctggagcaatttttaaataagcaaaataaaggagatttttctattt

SEQ ID NO: 3816 - protein, 105 aa, Homosapiens
MSVAENEDQLRAKGYDKTPDFILQVPVAVEGHIIHWIESKASFGDECSHHAYLHDQFWSYWNRFGPGLVIYWYGFIQELDCNRERGILLKACFPTNIVTLCHSIA

SEQ ID NO: 3817 - DNA, 2194 bp, Homosapiens
gacttcaggtgaaggacaggcagcaggagcagatgagatttagaataccaagactgtgtgtacacgcagatgtcagtggcagagaatgaagatcagcttcgtgcaaagggttatgacaaaacaccagacttcattttacaagtaccagttgctgtagaagggcacataattcactggattgaaagcaaagcctcatttggtgatgaatgtagccaccacgcctacctgcatgaccagttctggagctactggaatagatttgggccaggcttagtcatctattggtatggatttatccaggagctggactgcaaccgggaaaggggcatcctgctcaaagcctgtttccccacgaacattgtcaccttatgccacagcatagcttgaccctgaagatcctggaagagaagctgggaggaaaaggtgaatccggaagcaattttactttcctgcactgtaagatcctggcaacatctgccctgaacttcagctgaactcttgctgcccgtagtcacaccactacctctttagacaaacatatcaagagtttctgttttccttcatcccttgctgatgtgaacagccaagaactacagacacaacccactcattatcagcatttctgtctctgtcaaacaattagtttatagatagtcataatctttctttcttccggatggtttatccttgtatgctgaacaaaagaaaaaatgtgaagactgaaaggtgtgatttttcaattctcctcccagttaccgaatcaccctcttatttttttttccctaagcctccgttcactgtctctccctctccctttctcttcatgtgcactcacagagacccagcattgcattaccatcgtggaataatctagcgcaaacctaggaaagctgaagccacaaagtccaaagccacctttgtactcacctgcagagctccagaagaccttgatggcagcctgcctatgctgtgtgtttgctatattcaatctttacggcttcctgacttctgtgacagtaagccaagtgcaaaaatacacttgatgagaatttcctcttttaataatgttatttgaacaccacatattttagatttatcttatttgaaagtattagttccattgtgcctggaaaccacactcctttagattgggggccgagaggcgacaacccaacattgaggagagtttatttttaaacatggctagttgtcagtatgtacgtgagctagtatttttatgagtcgagttttttaaaggcacattctgtatactgcttagtatatgcattttataccatgtaattataaaacactcgagtaagttcagcattagaaatgtttagctttgtatgaactgagtgtgccagaaataaacctggagcaatttttaaataagcaaaataaaggagatttttctatttgttcactttaatttattcacttttgtgtacttttatgtactgcaaatcagatttcagtctaaagcgaaacatcagtaagttaataataaacctatcttttgggaagttgaatattaatctgtacccaaaacgtatttagtaaaatatttgcccccgccaccctgccatgctgacataacaacttttataatgttgaatagatgatatgggaaatactaataacaacaatgtaatttttgcagacagctttaacttatatacattgcttgatttttttcaaaagactaaatatgtcatttatactttgtttattttctaccaaagaaggtttgtaaaaatatgcctgctgcttttccttttgaaggacacaaacctggtcccaacatgtgtggattttaactctgagtggggtgcattaaatcaaaagagagaggcagaagatgaaatgctaaagaagggtcaggcaaacttctgtttcagtataaaattcatcatgcaggcttctgagtgaaatagaatgatttgaaaccactactgtattgcctggatacacacacacacacacacacacactttatacaaaaatgttaaaagcaggtttcctggcatgttctaaactgttttttctttaggaataaattacatttatctgcacagatgttgaaaatcctgttaaacccttgtcaaggatttgtttattttacattaaacaaatttattatgatgaacgtgaacaaataaattaaaaaataaaaaaggtacttgcgttttgt

SEQ ID NO: 3818 - protein, 105 aa, Homosapiens; identical to SEQ ID NO: 3816

SEQ ID NO: 3819 - DNA, 5931 bp, Homosapiens
agtattatcccctaaagacataagcaaaggacaaggtcagagcagtcagttgtattccttgttagtggctttgataagaggctttgggggaagaggttgaaactaacggctataatgaagttttgggttctctaaagatttcatttatcggtgctattggtctccccattaaatgcatgcctgttctgtgtacctttgcacacagtttgcataacatataatatttattactgaaaccttgcaaacttcttaaattgtatagaaaaggctgtgaaacttactcttagagaacataaaaatatagagaatgaaggtcataactccaaatattgagtgatacagtgttttgaaaaaaaaaaaaccagaataaaacaaaattagttactagagtagaaaaaatatagttttaatatgtattgatacatgtctttttgccctcccccaatttagtaaagatgcactaggtgttaataatattcttcttatcatacagtgtattttaatctagcattttagaaaactttttacaagttcatagataaaagccctgtcagaatgtgacttttcattttcagatgttgtgaactggatttctgcatgatttttatggaaatgactatacttttaaaatgtaaaacttttaataaaacaaaacaaatttaaagccctcaaaccttttcttggtggacctcatgtccccctgtgattcttaagtatatgttaactagtttcagatgtgttttgttcgctgactcaaaatcagctctttattttaagaaaagaaattgtgtaattagtacttaattgctttggatattttgggcatttggagaagagggtaattcaaaggccagagaaattaaactttcagaatgttctttatgcgtctgtaatttctttttaaaaaatgccctctaaagacagtcctgacaacttaaaaatgaatgaagacctgggttgtttttaaaaattaacatcatctttggatgtggttttattgatttatttaagataaattggagagaggaccattgaagtgctagaaaacaagatactatctagttcatctccttttcaggcaggtgttgtctaaatagctcacagatggcagtcttcttctcttacatttcaagatcttccaagatgaaaataaatttttccccactttaaaaatattacatttgatcaaatttaaatatttgcataattaagaatggtatatggtctgctgggaccaactgcaacttggttgacatgggcacatatcctgtatctgcagtgatttgagaggtctaggtcttgtttggtcatttaacttctctaggccagttatattgtgtataaattggaatgttggactagtaatctctacaattttgctagttcagaaaagtttctgaggcaaccattatctaaaaatctatgttttgtgaatctgaaggttaacaggtctgcttttaagtgataatattcctatattaattttgataatgagcacttgaactatgacattaatgaacttaatggttataaaatatattgggtttttaaatatataccttaaaccagaagacccttactttgtatctactgtagttgctgaataagacacataggaaggatttgaagattggtttcatattgattcccaaccatttgtggaagtcatactaaaagtactatttcagattattgccattacctttttttcattctaactaatattatttttactttgttcttaatctttatcatttttttcttgaagaaaacatcttatattactgttgaagaaacagtgaaacttgaagaaacagtttatgttacttaaacatctagtttccacttagaaaattcaaagaatcataagtaactacttggctcaaacatatgcagttttataagagcctgtatgaaatgtgtgattctcaaggaaaacataaattgtaaaactgactataaaagagatatatatatcaacagatcagtagccaaagaaaaaacagttgcccacccaacaatggcaccaggcacagattgggttttgtggaggaattctactaaaatgttaaggagtggataggtccagtgttatttaaaatacttgaggccaggcatggtggctcatgcctgtaatcccaccactttgggaggccgaggcaggcagattatttgaggtcaggagtttaagaccagcttggccaacatggggaaaccttgtctctactaaaaatacaaaaattagtcaggcatagtggcatgcacctgtaatcccagctacttgaaaggctgaggcagaagaatcacttgaacccaagagacgaaggttgcagtgagacgagatcgcgccactgcactcccacatgggcgacagagcaagacttcatctcaaaaaaaaaaacaaaaaaaaaggttgacttcaaagaaaaattttcccatcagtattaaggaaagagatgctgtcttttttacaaaattgagatgaacctcagatgaacatgtagaacagacagttgggaccaaggatgaaagataacagtgagagttctccaataaaaccttgaactttgagcctagttggtgcctttgtgccttgttgataattagggaattaaattaagaaaggaaattattgtcagtctggataggctttgtaaagacatggatactgttaaacgtgtacttgtattttactcattcatcttttgggggcattaagtgtcctggggcctagaacagtgaacaaggccacctgtttcgaaatgctgcttcctaccctggtaccatcatttcatctgaactttgccaagttgttacctcgtcctttcttagatctaggatgaaggaagcaagccaaaggttgaaacagaggagatgggacagtcagagtttagtaaatagattaaaggaagaagatacccaatacacagcattttacatgtttggcataacatctttactataaaaactagaagtctaatatcaccaatggtgacaaagacttccagatgctatcctttggctacaattattactgaatcagcttcatgttgagagagaaagagtgagagggagggagaaagagagacaggggtgtgtgtatgtgagagagagaaagagagagagcgagccagttgtagtttgttgaagttcaccacaaaaagatgggaaggatccccagccacacttgatgttttgtgtttaagttttgaggtttgggattgttaattctcatattaagtcacccatgcaatttaaattgtagatattatgttagtaattttggtgcagtgaacaggagtgcagcatctgtcttttaaagggatttttatgtgcatttggattgcttggtgacctttgaaattttgttttgcactgttatcagaaacgtaatcatttttctttctgaagcagattttaacatctgaaaaggttgatgaagctaggatagttttagtgaaatattaatctatctttttcaatgtcaccattgcttttaaaactgttcatcagctaccggaaacatcagcttaaggcactggagttgattttaattaaatattctcattgtggtcagagtatagttacagaacagaaacttgtccaatcttcttcatctacagctcactttccaaattctcttgtttttaaagtcatattatttcaatctgtatttctttatctcaatagttaacttgagattttttatatttcaaggaggggagattgttctgaatactggcaccaatccttcaaaatctagacagcttaaggatattgacttttaacaaaatttaacttaaatgtctactttaaatatgtgtcttgtcattaaaaggttatttacatttgaaatgctgacctttcaagttgtgcacaagagtgttctaaaacagagtttctgaacattggccatgaaaccactgtcttgggctgacaaatggattggaaataagctacccaacactgggaatgggccattaattttaatcaaaggtgatgcaggaaggcgaatgggatgcatgacaatgtcaacagcccagtaggtgttaagagaccacacagccttccttgttacttggtcgggccattagttgaggttgggtgaagacagaaagccatgtctggaattgaatgaccaggtcactccaaaatctaatggagaactccccatttcagaaatcacattgtactgccattagaagtcaaggacagcatttagaaaatattggtggattttttttttttttttttttttttaaacaatcacctttctagtttttcccaactttgtcaagcttcctgttttcctgccttctttccttcctaatagatcattgatatttacaggggactaagaaatcaaacagacttaggaaaaaaaatcttaaagccttaaaattgcttttcagaattacatattgttataaaactcaggtaaatgtcagaaacaatagcataccaaaggaattaagcaggataactaattctttatggcgatctcattgtccttgtctctttcttgtgtgtgggaatagtttcactaattgaaactaaactttcgtaattgctttattgaaggcattttttcataactgtgaaggccactgtgcttgcccctttactataaattttcaatactggctgataacatttgtaattttcacagtggtgaaagcctttattttaaatcagtaagtatattaccttattttgagtactttcaattacaaaaaaggtagtatatgacagcttgaactcgtgatgtttataataacgaaaacatgcagaaaaataatgaaagaagcatatctgaagcatatttacgcttcagtgttgttcagaaagttcattatttctgacacagcactgcatgcataagaaagatatgtatgactacagtagtaatttttatacatatttaagaaataaaaacaaatatattcctatcttgttaattgaatagtgttttaagtaaatagtgtttgttcttcctgtagatgaagatcagcttcgtgcaaagggttatgacaaaacaccagacttcattttacaagtaccagttgctgtagaagggcacataattcactggattgaaagcaaagcctcatttggtgatgaatgtagccaccacgcctacctgcatgaccagttctggagctactggaatagatttgggccaggcttagtcatctattggtatggatttatccaggagctggactgcaaccgggaaaggggcatcctgctcaaagcctgtttccccacgaacattgtcaccttatgccacagcatagcttgaccctgaagatcctggaagagaagctgggaggaaaagagacccagcattgcattaccatcgtggaataatctagcgcaaacctaggaaagctgaagccacaaagtccaaagccacctttgtactcacctgcagagctccagaagaccttgatggcagcctgcctatgctgtgtgtttgctatattcaatctttacggcttcctgacttctgtgacagtaagccaagtgcaaaaatacacttgatgagaatttcctcttttaataatgttatttgaacaccacatattttagatttatcttatttgaaagtattagttccattgtgcctggaaaccacactcctttagattgggggccgagaggcgacaacccaacattgaggagagtttatttttaaacatggctagttgtcagtatgtacgtgagctagtatttttatgagtcgagttttttaaaggcacattctgtatactgcttagtatatgcattttataccatgtaattataaaacactcgagtaagttcagcattagaaatgtttagctttgtatgaactgagtgtgccagaaataaacctggagcaatttttaaataagcaaaataaaggagatttttctatttgttcacttt

SEQ ID NO: 3820 - protein, 70 aa, Homosapiens [sequence omitted]

SEQ ID NO: 3821 - DNA, 1685 bp, Homosapiens
tcattccctggtatttcgagaatatgggagagaaccagtgtgccacacttaccaggtctttatcacctctgtgctgagtccagcaaggagaagcgttgatgcctttattcaacaaattcctatgaggactggagtagataaataagtttgaccccgaacatgatttgggccaggcttagtcatctattggtatggatttatccaggagctggactgcaaccgggaaaggggcatcctgctcaaagcctgtttccccacgaacattgtcaccttatgccacagcatagcttgaccctgaagatcctggaagagaagctgggaggaaaagagacccagcattgcattaccatcgtggaataatctagcgcaaacctaggaaagctgaagccacaaagtccaaagccacctttgtactcacctgcagagctccagaagaccttgatggcagcctgcctatgctgtgtgtttgctatattcaatctttacggcttcctgacttctgtgacagtaagccaagtgcaaaaatacacttgatgagaatttcctcttttaataatgttatttgaacaccacatattttagatttatcttatttgaaagtattagttccattgtgcctggaaaccacactcctttagattgggggccgagaggcgacaacccaacattgaggagagtttatttttaaacatggctagttgtcagtatgtacgtgagctagtatttttatgagtcgagttttttaaaggcacattctgtatactgcttagtatatgcattttataccatgtaattataaaacactcgagtaagttcagcattagaaatgtttagctttgtatgaactgagtgtgccagaaataaacctggagcaatttttaaataagcaaaataaaggagatttttctatttgttcactttaatttattcacttttgtgtacttttatgtactgcaaatcagatttcagtctaaagcgaaacatcagtaagttaataataaacctatcttttgggaagttgaatattaatctgtacccaaaacgtatttagtaaaatatttgcccccgccaccctgccatgctgacataacaacttttataatgttgaatagatgatatgggaaatactaataacaacaatgtaatttttgcagacagctttaacttatatacattgcttgatttttttcaaaagactaaatatgtcatttatactttgtttattttctaccaaagaaggtttgtaaaaatatgcctgctgcttttccttttgaaggacacaaacctggtcccaacatgtgtggattttaactctgagtggggtgcattaaatcaaaagagagaggcagaagatgaaatgctaaagaagggtcaggcaaacttctgtttcagtataaaattcatcatgcaggcttctgagtgaaatagaatgatttgaaaccactactgtattgcctggatacacacacacacacacacacacactttatacaaaaatgttaaaagcaggtttcctggcatgttctaaactgttttttctttaggaataaattacatttatctgcacagatgttgaaaatcctgttaaacccttgtcaaggatttgtttattttacattaaacaaatttattatgatgaacgtgaacaaataaattaaaaaataaaaaaggtacttgcgttttgt

SEQ ID NO: 3822 - protein, 66 aa, Homosapiens
MIWARLSHLLVWIYPGAGLQPGKGHPAQSLFPHEHCHLMPQHSLTLKILEEKLGGKETQHCITIVE

SEQ ID NO: 3823 - DNA, 2316 bp, Homosapiens
gtaaccgcgtcgcagtcgccgaagatggcggggcgaagtctgtgtctcacgagaagcagcgttccagggactccgttcccgccacccgttcagcaaccctctacacctggacccgacctcctcgccttggaggaagaatataagcgtttaaatgcagaattgcaggcaaaaacagctgacgtggttcaacaagctaaggaaataataagagatcggcaagaagtacgatctaggcctgtttcaacacaaatgaaatcatgtgatgacgaagatgattacagtttaagaggtctgttaccatctgaagggatagttcatcttcattcagaaactaagccaaagaccaaaaacattgatcctgtaaacaaggttcaaaacaaattacactctgcaaataaaggaaggaaaacaaattcaagtgttaaattgaaatactctgatgtccaaactgccgacgatgttgccattccagaggatttctcagacttttcccttgcaaaaacaattagcaaaattgaagggcaactggaggaagaaggcttacctgaatatatagatgatattttttctggtgttagtaatgacattggaacagaagcacagatcagatttctaaaggccaaactccatgttatgcaggaggaattggataatgttgtatgtgaatgcaataaaaaggaggatgaaattcagaatttaaagtctcaagtaaaaaattttgaagaagattttatgagacagcagcgaacaattaatatgcaacagtctcaagtagaaaaatacaaaactcttttcgaagaagcaaacaaaaagtatgatggattacagcaacagttgtcttcagtagaaagggtaattatttggtatttttcctaacttaatgccacagatacaagaaaattattaaggttacacatttgtatagatgccattttgacagttcagttattttattagtatttactgaaaactctttccccttacatagaatatttttaacaactttattgagatgtaattcacccttttaaagtatgcaattcaatggcttttggtgtattcatagaattgtgcaactatcaccacaaccattttcataatccctaaaagatacttcataccctttagccaccacaccctgaccctgctcccctcaatcccttacagccctaggcaaccactattctattttatgtctcaataaatttgtctattctggaaatcacatatacgtggaatcatataatatgtggtcttttgtgactgacttttacttaagatattttcaaggttcattcatgttgcagcccctatcagtattttatttctttttattggcaagtaacattctgttatatggatataacacatttaatttatctgtttatcagttcgtagctttaggttatttgggttgtttctactgtctgacaattttaaatactttgaatattcatgtacaagtttttgtgtgcacgtatgtttctatttctcttggttatatagccaggaatggaattgctgggtcatatggaaatcctatgttgaccttttgaggaattgctgactgttttccaacctgcctgtaccattttacattcctaccagtagtgcatgaagctcctaatttctacacatcctcaccaacatctgctagattatctttttgattatagccatactgcaagtgtaaaagggttacctcattgtggttttgatttgcatttccctaataactaatgatgttgaacatcttttcatgtgcttattggcatttgtatattttctttggagaaatgtctgttaaggtctttgcccattttttaaattggatttgaaaaaattactgaataataagaacttttaagttctttatgtgtttagatacaagtcccttatcaggtatattttgcaaatagttttcccctacagtgggttgtctttcactttctttatggtactctaaaggcacaaaagttttaaattttgatgaagtccagtttatctaatatttatttggtttcctgtgcttttggtgtcatatttaaggggagaatgtattttaaataaactatcctagcttatattagtgtgccattgtgaaaataaaaatatactgtttgagattgctttgtaaaatgtagtgacgataagaattatgtaatatagcatatcccgagatttagtaagaaaatgtgccccctttattagtacccttacatttctcgtttgtatggtcatatttaaaaaccctgctttttaaacattttggtcttgtataattagctttatcttgtaataaattttaatatcaaa

SEQ ID NO: 3824 - protein, 283 aa, Homosapiens
MAGRSLCLTRSSVPGTPFPPPVQQPSTPGPDLLALEEEYKRLNAELQAKTADVVQQAKEIIRDRQEVRSRPVSTQMKSCDDEDDYSLRGLLPSEGIVHLHSETKPKTKNIDPVNKVQNKLHSANKGRKTNSSVKLKYSDVQTADDVAIPEDFSDFSLAKTISKIEGQLEEEGLPEYIDDIFSGVSNDIGTEAQIRFLKAKLHVMQEELDNVVCECNKKEDEIQNLKSQVKNFEEDFMRQQRTINMQQSQVEKYKTLFEEANKKYDGLQQQLSSVERVIIWYFS

SEQ ID NO: 3825 - DNA, 1432 bp, Homosapiens
gtaaccgcgtcgcagtcgccgaagatggcggggcgaagtctgtgtctcacgagaagcagcgttccagggactccgttcccgccacccgttcagcaaccctctacacctggacccgacctcctcgccttggaggaagaatataagcgtttaaatgcagaattgcaggcaaaaacagctgacgtggttcaacaagctaaggaaataataagagatcggcaagaagtacgatctaggcctgtttcaacacaaatgaaatcatgtgatgacgaagatgattacagtttaagaggtctgttaccatctgaagggatagttcatcttcattcagaaactaagccaaagaccaaaaacattgatcctgtaaacaaggttcaaaacaaattacactctgcaaataaaggaaggaaaacaaattcaagtgttaaattgaaatactctgatgtccaaactgccgacgatgttgccattccagaggatttctcagacttttcccttgcaaaaacaattagcaaaattgaagggcaactggaggaagaaggcttacctgaatatatagatgatattttttctggtgttagtaatgacattggaacagaagcacagatcagatttctaaaggccaaactccatgttatgcaggaggaattggataatgttgtatgtgaatgcaataaaaaggaggatgaaattcagaatttaaagtctcaagtaaaaaattttgaagaagattttatgagacagcagcgaacaattaatatgcaacagtctcaagtagaaaaatacaaaactcttttcgaagaagcaaacaaaaagtatgatggattacagcaacagttgtcttcagtagaaagggaattagaaaataaaagaagactgcaaaaacaggctgcaagtagtcaaagtgccacagaggttcgcttgaatagagctctagaagaagcagaaaagtataaactggagttaagtaaattaaggcaaaataacaaggacatagcaaatgaagaacacaaaaaaattgaagtgttaaaatcagaaaacaagaagctagaaaaacaaaaaggagaattaatgatagggttcaagaaacagttaaaattaattgatgttttaaaaaggcaaaagatgcatattgaagctgccaagatgctatctttcactgaggaggaatttatgaaagcacttgaatggggaaattcataagtgatctacttcagttagtctctatgacaataagaaaactaaggctcagagaaaaagccaaaactagtacttgcatgacacctagtcaagtcctagtagtattcgactttcattttgtggatcaatttttatttggaaaatagcagcaattctcgtaggagtcagattaaaacgtctacaactaccttgaataacttcaactatcaggataattaaaactgcaaaccactgg

SEQ ID NO: 3826 - protein, 391 aa, Homosapiens; identical to SEQ ID NO: 571

SEQ ID NO: 3827 - DNA, 679 bp, Homosapiens
gaagatggcggggcgaagtctgtgtctcacggtcagttcaactccaggctcctggggagcgtctgggttccggcgactaggacgcctaacttcctttaacttcgggtctgaaagtctgtggctcttttacagagaagcagcgttccagggactccgttcccgccacccgttcagcaaccctctacacctggacccgacctcctcgccttggaggaagaatataagtaagaaattcggcggttgaacttttccttctttctttcatctgaatgaggctgcttacaagtacttttttctggagactggctggatcttcgggaccactcactctgcagcattcccttctcgtcatctcgttcacctgccgtttatcctttctttgtctttgatctgagtagttcgcctgcgtattagaagatatttgaagtgggcgaaaatttagcccaagcgtttaaatgcagaattgcaggcaaaaacagctgacgtggttcaacaagctaaggaaataatatgttaaattgaaatactctgatgtccaaactgccgacgatgttgccattccagaggatttctcagacttttcccttgcaaaaacaattagcaaaattgaagggcaactggaggaagaaggcttacctgaatatatagatgatattttttctggtgttagtaatgacat

SEQ ID NO: 3828 - protein, 79 aa, Homosapiens
MAGRSLCLTVSSTPGSWGASGFRRLGRLTSFNFGSESLWLFYREAAFQGLRSRHPFSNPLHLDPTSSPWRKNISKKFGG

SEQ ID NO: 3829 - DNA, 4440 bp, Homosapiens
gaagatggcggggcgaagtctgtgtctcacggtcagttcaactccaggctcctggggagcgtctgggttccggcgactaggacgcctaacttcctttaacttcgggtctgaaagtctgtggctcttttacagagaagcagcgttccagggactccgttcccgccacccgttcagcaaccctctacacctggacccgacctcctcgccttggaggaagaatataagcgtttaaatgcagaattgcaggcaaaaacagctgacgtggttcaacaagctaaggaaataataagagatcggcaagaagtacgatctaggcctgtttcaacacaaatgaaatcatgtgatgacgaagatgattacagtttaagaggtctgttaccatctgaagggatagttcatcttcattcagaaactaagccaaagaccaaaaacattgatcctgtaaacaaggttcaaaacaaattacactctgcaaataaaggaaggaaaacaaattcaagtgttaaattgaaatactctgatgtccaaactgccgacgatgttgccattccagaggatttctcagacttttcccttgcaaaaacaattagcaaaattgaagggcaactggaggaagaaggcttacctgaatatatagatgatattttttctggtgttagtaatgacattggaacagaagcacagatcagatttctaaaggccaaactccatgttatgcaggaggaattggataatgttgtatgtgaatgcaataaaaaggaggatgaaattcagaatttaaagtctcaagtaaaaaattttgaagaagattttatgagacagcagcgaacaattaatatgcaacagtctcaagtagaaaaatacaaaactcttttcgaagaagcaaacaaaaagtatgatggattacagcaacagttgtcttcagtagaaagggtaattatttggtatttttcctaacttaatgccacagatacaagaaaattattaaggttacacatttgtatagatgccattttgacagttcagttattttattagtatttactgaaaactctttccccttacatagaatatttttaacaactttattgagatgtaattcacccttttaaagtatgcaattcaatggcttttggtgtattcatagaattgtgcaactatcaccacaaccattttcataatccctaaaagatacttcataccctttagccaccacaccctgaccctgctcccctcaatcccttacagccctaggcaaccactattctattttatgtctcaataaatttgtctattctggaaatcacatatacgtggaatcatataatatgtggtcttttgtgactgacttttacttaagatattttcaaggttcattcatgttgcagcccctatcagtattttatttctttttattggcaagtaacattctgttatatggatataacacatttaatttatctgtttatcagttcgtagctttaggttatttgggttgtttctactgtctgacaattttaaatactttgaatattcatgtacaagtttttgtgtgcacgtatgtttctatttctcttggttatatagccaggaatggaattgctgggtcatatggaaatcctatgttgaccttttgaggaattgctgactgttttccaacctgcctgtaccattttacattcctaccagtagtgcatgaagctcctaatttctacacatcctcaccaacatctgctagattatctttttgattatagccatactgcaagtgtaaaagggttacctcattgtggttttgatttgcatttccctaataactaatgatgttgaacatcttttcatgtgcttattggcatttgtatattttctttggagaaatgtctgttaaggtctttgcccattttttaaattggatttgaaaaaattactgaataataagaacttttaagttctttatgtgtttagatacaagtcccttatcaggtatattttgcaaatagttttcccctacagtgggttgtctttcactttctttatggtactctaaaggcacaaaagttttaaattttgatgaagtccagtttatctaatatttatttggtttcctgtgcttttggtgtcatatttaaggggagaatgtattttaaataaactatcctagcttatattagtgtgccattgtgaaaataaaaatatactgtttgagattgctttgtaaaatgtagtgacgataagaattatgtaatatagcatatcccgagatttagtaagaaaatgtgccccctttattagtacccttacatttctcgtttgtatggtcatatttaaaaaccctgctttttaaacattttggtcttgtataattagctttatcttgtaataaattttaatatcaaaatcacttagacaaaatttatatgcagtaaattcacactttttagtgtacaattctatgagttttgacaaatgtatgcagtaatataactatcactataattgagacatagaacagttccatcagccccccaaaattccctgtgaatttagtgaaggccttccctaattccaccaccaggcaaccactgatctgtgtttggttcttaaattttggacttttcccaaatgtcacataaatagaatcgcattggatatagacttttgaatctgttttttttttttttttttcagttagcataaaacatttgatatggtttggctgtgtccccacccaaatttcatcttgaattcccacttgttgcgggagggagccggtgggaggtaattgaatcatgggggcaagtctttcctgtgctgttcttgtgatggcgaaaaagtctcaggagatctgatggttttaaaagggagagtttcccagtgcaaactttcttgtctgctgctatgtgagacatgccttttactttccaacatgattgtgaggcctccccagccatgtggaactgtgagtccaataaacctctctcttttgtaaattgcccagtcttgggtgtgtcttaccagcagcatgacgatgaactaatccagtaaattggtactagtagagtcaggcgctactgaaaagataccaaaaagtgttgaagtgaccttggaactgggtaagaggcagaggttggaaaagtttggagggctcagaaaaatacaggaaaatatgggaaagtttggaactccctagagacttgttgaatggctttgaccaatatactgataatgatatggacaatgaaatccaggctgaggtgatctcagatggagatgaggaacttgttaggaactagagcaaatgtgactcttgttatgttttagcaaagagactggtggcattttgtccctcccctagagatctgtggaactttgaacttgagagagatgatttagggtatctggtggaacaaatttctaagcagcaaagcactcaagaggtgacttggtgctgttaaaggcatccagttttgaaagggaaacagagcacaaaaggttggaaaatttgcagcctgagaatgcagtggaaaagaaaatcccattttctgaggagaaattcaagccggctgcagaaatttgcataagtcttgaggagctgaatgttaatccccaggacaatggggaaaatgtctcccaaggtatgcagaggtcttcacggcagcgcctcccatcacaggcccagagacctaggaggcatgattggttttgaaatgtgaggacatgagatttgggagggtcttggggtagaatatggtttggctgtgtccccacccaaatttcatcttgaattcccatgtgttgtgggagggacccagtgggaggtcattgaatcacaggggcaggtctttcctgtgctgttctcatgagagtgaataagtctcaggagatttgatggttttaaaaatgggaatttccctgcacaagctctcgtctgccaccatgtgagatgtgcctttaccttccagcatgattgtgaggcctccccagccatgtgaaactgtgagtgcagtaaatctctttcttttgtaaattgcccagtcttgggtatgtctttatcagcagcatgaaaacggactaatacaacattcaatatttatccctattatagtccattcctttttattgctgagtagtgtaaactatgaatgaatgtacttcagtttgtttccccactcatctagtaataaaagttaattatagtatttaatagtctgaacttgtgtttccagtatggtagccacttaccatatgtggctaaattgcgatgtgctataactataaagtaaaaatcagattttgaagaattcatgtaaaacagaatgaagaatgtaaaatatctcaaaatctctttaatattttttgtattggttatatgttgaaataatatttgaatatattaggttaagtgaaatatgttattaaaattaattttacctgtttgtt

SEQ ID NO: 3830 - protein, 208 aa, Homosapiens
MKSCDDEDDYSLRGLLPSEGIVHLHSETKPKTKNIDPVNKVQNKLHSANKGRKTNSSVKLKYSDVQTADDVAIPEDFSDFSLAKTISKIEGQLEEEGLPEYIDDIFSGVSNDIGTEAQIRFLKAKLHVMQEELDNVVCECNKKEDEIQNLKSQVKNFEEDFMRQQRTINMQQSQVEKYKTLFEEANKKYDGLQQQLSSVERVIIWYFS

SEQ ID NO: 3831 - DNA, 539 bp, Homosapiens
ggcggggcgaagtctgtgtctcacgagaagcagcgttccagggactccgttcccgccacccgttcagcaaccctctacacctggacccgacctcctcgccttggaggaagaatataagtaagaaattcggcggttgaacttttccttctttctttcatctgaatgaggctgcttacaagtacttttttctggagactggctggatcttcgggaccactcactctgcagcattcccttctcgtcatctcgttcacctgccgtttatcctttctttgtctttgatctgagtagttcgcctgcgtattagaagatatttgaagtgggcgaaaatttagcccaagcgtttaaatgcagaattgcaggcaaaaacagctgacgtggttcaacaagctaaggaaataataagagatcggcaagaagtacgatctaggcctgtttcaacacaaatgaaatcatgtgatgacgaagatgattacagtttaagcacactcttgattacccttgttgtaactgtggagttgtggagtaagctggtttta

SEQ ID NO: 3832 - protein, 30 aa, Homosapiens
MKSCDDEDDYSLSTLLITLVVTVELWSKLV

SEQ ID NO: 3833 - DNA, 2392 bp, Homosapiens
acttttggtcgagcggagggcgcgcagctccaccgttgccaagacgccgcgtaaacacccgagcgcgcgcagccaggtgcgctccttggggctgctggctgctgcgtttgcggcgggaggtggtggccgcggtcccacgagagggggtatttttcgtcagccaagatgggttccaaaaggagaaatttgagctgtagtgaaaggcatcagaaattagtagatgaaaactactgcaaaaaattacatgtccaagctctaaaaaacgtcaacagtcaaatcaggaatcaaatggtgcagaatgaaaatgataaccgtgttcagcgcaagcaatttctcagattattacaaaatgaacaatttgagttggatatggaagaggccattcaaaaggcagaagaaaacaagagattgaaagaactccagctcaaacaagaagaaaaactggctatggaattggcaaaactgaaacatgaaagtctaaaggacgaaaagatgaggcaacaagtaagagaaaacagcattgagcttagagaattggagaagaaattaaaagcagcttacatgaataaagaaagggcagctcagattgctgaaaaggatgccattaaatatgaacaaatgaaacgtgatgctgaaatagccaaaaccatgatggaagaacacaagagaataataaaggaagagaatgctgcagaagacaaacgaaacaaagcgaaagcacagtactatcttgacttagagaaacaacttgaagaacaagaaaaaaaaaagcaggaagcttatgagcagctgctaaaagagaaactcatgattgatgaaattgttaggaagatctatgaagaagatcagttggaaaaacaacaaaagttagaaaaaatgaatgcaatgcgaaggtatatagaagagtttcagaaagagcaggctctctggagaaaaaagaaacgtgaggagatggaagaagaaaacagaaaaatcatagagtttgctaacatgcagcagcaaagagaagaagatcggatggcaaaagttcaagaaaatgaggagaaaaggctacagcttcagaatgcgttgacacagaaattagaagaaatgctgcggcaacgtgaagatttggaacaagtgcgacaagaattataccaggaagaacaagctgaaatatataagagcaagctaaaagaagaagcagaaaagaaattgagaaagcaaaaagagatgaagcaagattttgaagaacaaatggccttgaaggaattagtgctacaggctgcaaaagaggaagaggagaactttagaaaaactatgctagctaaatttgctgaggatgatcgaatagaattaatgaatgctcagaaacaaagaatgaagcagctggaacacaggagggctgtggaaaaacttattgaagagcgtcgccaacaattccttgcagacaaacaacgtgaactagaagagtggcagttgcagcaaaggcggcaaggatttattaatgcaattattgaagaagaaaggctaaaacttcttaaagagcatgctacaaacttactaggctatctccctaaaggagtatttaaaaaagaggatgatattgatctgcttggtgaagagttcaggaaagtatatcaacaaaggagtgaaatttgtgaagagaaatgatatcatcaaaattgggtaaagcatagattttttgcatgttaccactagatgtcagcataacttttgttttacagttcagtggcattaggtatccattgtctgtttggattttgtaaatcatcactgaatttcataacttgtaaacaattatcagatacaaattaattttaatcaagctgttatttttgtactgataatttcaaaatccgatttctacaacactacagagcactgtttgcatccccatcctcaagacagtatatttaccttgactaatacagaactctaccccaaagtgaactgccttctgtctgtgtttacgaactttacttacttgatttagccagggaaataaatatttggaattttcttttaaagcatcttttttggtctactgtaagggaggagaattataaatgaaaagagtcaagaattttattatctgatgtgcttaattgtcacgctaagaacttaaaaaacaactcaaaaagagctaatagctaatctcctaaatctaaaaagggaattctttgaaattattttgctttcataatcaaatatattacttatgaagaataaaaataattcaaaccactacaataagtaaaatgggtatccatcacatactgtcatagagactaactgaagtagatcacttatgaatttccccattcaagtgctttcataaattcctcctcagtgaaagatagcatcttggcagcttcaatatgcatctgtt

SEQ ID NO: 3834 - protein, 495 aa, Homosapiens; identical to SEQ ID NO: 573

SEQ ID NO: 3835 - DNA, 1951 bp, Homosapiens
acttttggtcgagcggagggcgcgcagctccaccgttgccaagacgccgcgtaaacacccgagcgcgcgcagccaggtgcgctccttggggctgctggctgctgcgtttgcggcgggaggtggtggccgcggtcccacgagagggggtatttttcgtcagccaagatgggttccaaaaggagaaatttgagctgtagtgaaaggcatcagaaattagtagatgaaaactactgcaaaaaattacatgtccaagctctaaaaaacgtcaacagtcaaatcaggaatcaaatggtgcagaatgaaaatgataaccgtgttcagcgcaagcaatttctcagattattacaaaatgaacaatttgagttggatatggaagaggccattcaaaaggcagaagaaaacaagagattgaaagaactccagctcaaacaagaagaaaaactggctatggaattggcaaaactgaaacatgaaagtctaaaggacgaaaagatgaggcaacaagtaagagaaaacagcattgagcttagagaattggagaagaaattaaaagcagcttacatgaataaagaaagggcagctcagattgctgaaaaggatgccattaaatatgaacaaatgaaacgtgatgctgaaatagccaaaaccatgatggaagaacacaagagaataataaaggaagagaatgctgcagaagacaaacgaaacaaagcgaaagcacagtactatcttgacttagagaaacaacttgaagaacaagaaaaaaaaaagcaggaagcttatgagcagctgctaaaagagaaactcatgattgatgaaattgttaggaagatctatgaagaagatcagttggaaaaacaacaaaagttagaaaaaatgaatgcaatgcgaaggtatatagaagagtttcagaaagagcaggctctctggagaaaaaagaaacgtgaggagatggaagaagaaaacagaaaaatcatagagtttgctaacatgcagcagcaaagagaagaagatcggatggcaaaagttcaagaaaatgaggagaaaaggctacagcttcagaatgcgttgacacagaaattagaagaaatgctgcggcaacgtgaagatttggaacaagtgcgacaagaattataccaggaagaacaagctgaaatatataagagcaagctaaaagaagaagcagaaaagaaattgagaaagcaaaaagagatgaagcaagattttgaagaacaaatggccttgaaggaattagtgctacaggctgcaaaagaggaagaggagaactttagaaaaactatgctagctaaatttgctgaggatgatcgaatagaattaatgaatgctcagaaacaaagaatgaagcagctggaacacaggagggctgtggaaaaacttattgaagagcgtcgccaacaattccttgcagacaaacaacgtgaactagaagagtggcagttgcagcaaaggcggcaaggatttattaatgcaattattgaagaagaaaggctaaaacttcttaaagagcatgctacaaacttactaggctatctccctaaaggagtatttaaaaaagaggatgatattgatctgcttggtgaagagttcaggaaagtatatcaacaaaggagtgaaatttgtgaagagaaatgatatcatcaaaattgggtaaagcatagattttttgcatgttaccactagatgtcagcataacttttgttttacagttcagtggcattaggtatccattgtctgtttggattttgtaaatcatcactgaatttcataacttgtaaacaattatcagatacaaattaattttaatcaagctgttatttttgtactgataatttcaaaatccgatttctacaacactacagagcactgtttgcatccccatcctcaagacagtatatttaccttgactaatacagaactctaccccaaagtg

SEQ ID NO: 3836 - protein, 495 aa, Homosapiens; identical to SEQ ID NO: 573

SEQ ID NO: 3837 - DNA, 1022 bp, Homosapiens
acttttggtcgagcggagggcgcgcagctccaccgttgccaagacgccgcgtaaacacccgagcgcgcgcagccaggtgcgctccttggggctgctggctgctgcgtttgcggcgggaggtggtggccgcggtcccacgagagggggtatttttcgtcagccaagatgggttccaaaaggagaaatttgagctgtagtgaaaggcatcagaaattagtagatgaaaactactgcaaaaaattacatgtccaagctctaaaaaacgtcaacagtcaaatcaggaatcaaatggtgcagaatgaaaatgataaccgtgttcagcgcaagcaatttctcagattattacaaaatgaacaatttgagttggatatggaagaggccattcaaaaggcagaagaaaacaagagattgaaagaactccagctcaaacaagaagaaaaactggctatggaattggcaaaactgaaacatgaaagtctaaaggacgaaaagatgaggcaacaagtaagagaaaacagcattgagcttagagaattggagaagaaattaaaagcagcttacatgaataaagaaagggcagctcagattgctgaaaaggatgccattaaatatgaacaaatgaaacgtgatgctgaaatagccaaaaccatgatggaagaacacaagagaataataaaggaagagaatgctgcagaagacaaacgaaacaaagcgaaagcacagtactatcttgacttagagaaacaacttgaagaacaagaaaaaaaaaagcaggaagcttatgagcagctgctaaaagagaaactcatgattgatgaaattgttaggaagatctatgaagaagatcagttggaaaaacaacaaaagttagaaaaaatgaatgcaatgcgaaggtatatagaagagtttcagaaagagcaggctctctggagaaaaaagaaacgtgaggagatggaagaagaaaacagaaaaatcatagagtttgctaacatgcagcagcaaagagaagaagatcggatggc

SEQ ID NO: 3838 - protein, 284 aa, Homosapiens
MGSKRRNLSCSERHQKLVDENYCKKLHVQALKNVNSQIRNQMVQNENDNRVQRKQFLRLLQNEQFELDMEEAIQKAEENKRLKELQLKQEEKLAMELAKLKHESLKDEKMRQQVRENSIELRELEKKLKAAYMNKERAAQIAEKDAIKYEQMKRDAEIAKTMMEEHKRIIKEENAAEDKRNKAKAQYYLDLEKQLEEQEKKKQEAYEQLLKEKLMIDEIVRKIYEEDQLEKQQKLEKMNAMRRYIEEFQKEQALWRKKKREEMEEENRKIIEFANMQQQREEDR

SEQ ID NO: 3839 - DNA, 792 bp, Homosapiens
acaaaataaaataaacatcatttgccaccataaaccttttctttagagaggaaaaatttttgcagcaggacacaagggttctattaagtcatttcaatgctgagaaaaacaaattgagtaatagaactaatcacttccctatatatggatgttaagatgacaatttagattatttttcaaactaatcctgagaaaaaatctgtttacaatttaaacagtaatgttatgtaaaaagtattattaacaaatccactattacaaatatcaatctcctatatggtcttctatatatacacacaataaaatggtaaatatatgcaaaaatatttaaaaaaaaaacatgcacagatcactttcccctttggaatctggacttcctatcagatacctttgttttccttccccacctcatcctctgatactgttttttgtttctatcaccctaccaacactgaatactattccctataactctgcataaagccaatgagaaatatatttattttacattcaagctttaaatcttaaaatgaccctgttgtagcatatgacttatcaaataagcagccttttttttccctcttttttgcttgcttttttttttgttttgttttgttttttttgcagttgtcagtcttcatgatccattctgtggcgagctgggaaaaaacgcagttgctaagtcaacgtctgaacagtgtgaggctcctgaatatctcccaggaatctgcatccacagactgttggacggtccgagctgctctggctgaaaccaggcgatcctcggatcca

SEQ ID NO: 3840 - protein, 50 aa, Homosapiens
MIHSVASWEKTQLLSQRLNSVRLLNISQESASTDCWTVRAALAETRRSSD

SEQ ID NO: 3841 - DNA, 2233 bp, Homosapiens
agcagcagcacggccaccggcgggagcggcagcagcaccggcagccccggcggcgcggcctcggccccggccccggccccggccggcatgtatcgctccggggagcgcctgctgggcagccacgcgctgcccgcggagcagcgggacttcctgcccctagagacgaccaacaacaacaacaaccaccaccagcccggggcctgggcccgccgggcgggctcctcggcgtcctcgcctccctcggcgtcctcgtccccgcacccttcggccgccgtccccgccgccgatccagccgattcggcctcgggcagcagcaacaagaggaagcgcgacaacaaggccagcacgtatggactcaactacagcctgctgcagcccagcggagggcgggccgcggggggcggccgagcagacggcggcggggtcgtgtacagcgggaccccgtggaaacggaggaactacaaccagggagtcgtgggtctgcatgaagaaatcagtgatttttatgaatacatgtctccaagacctgaggaggagaagatgcggatggaggtggtgaacaggatcgagagtgtaattaaggagctctggcccagcgctgacgtccagatatttggaagttttaaaactggactttatttacctactagtgacatcgacctagtggtgtttgggaagtgggagaacctacccctctggactctggaagaagctcttcggaaacacaaagtcgcagatgaggattcggtgaaagttttagacaaagcaactgtacctattattaaattaacagattcttttactgaagtgaaagttgatatcagctttaatgtacagaatggcgtgagagcagctgacctcatcaaagattttaccaagaaatatcctgtattgccatacttggttttagtattgaaacaattcctattgcagagggaccttaatgaagtatttacaggtggaattggttcttatagtctctttttaatggcagtcagtttccttcagttacatcccagggaagatgcttgcatccccaatacaaactatggtgttctcttaatagaattttttgaattatatggacgacacttcaattatttaaagactggcatccggataaaggatggtggttcatatgtggccaaagatgaagtacagaaaaatatgctagatggctacaggccatcaatgctttatatcgaagatcctttacaaccaggtaacgatgttggaaggagttcatatggggccatgcaagtgaagcaggcctttgattatgcctacgttgttttgagtcatgctgtatcaccaatagcaaagtactatcccaacaatgaaacagaaagcatactaggtagaataattagagtaacagatgaagttgccacatatagagattggatatcaaagcagtggggcttgaagaatagacctgagccttcatgcaatggaaatggtgttaccttgatagtagatactcagcagttagataaatgtaataataatctatctgaagaaaatgaagcccttggaaaatgtagaagtaaaacctcggaatctcttagtaaacactcttcaaactcttcatcaggtccagtgtcgtcctcttctgccacacagtccagctctagtgatgtagattccgatgcaacaccatgcaaaaccccgaaacagctgctttgccgtccgtccactgggaaccgagtagggtcgcaagatgtatccttggagtcctctcaggcagttgggaaaatgcaaagcacccaaaccactaacacatccaacagcaccaacaaatctcagcatggatcagcaaggctctttcgttcttccagcaaaggcttccaagcattgtcttcagtgttaagaaatgtggactcctgtgaggtgctggaggtttgaatcatcttgaaaactttccaatcttgtctagttaccactgcagagacactaaggaatttaccagaaaaagatatttgatacaagtgatttaagaaatctcaacatttcctgaggccgtatcactgggcaaccagtgatgaaaactatgaatgaattgcacacctggaagattttttaagctaatgacagtttcttcaaagatgtcaattatttgccttggaaattttataaattgcatttctatgcacatcggcctctagtgcttaccactcggtttattattcataatctgcaattcaataaaggctttgtgttttcatttatcttc

SEQ ID NO: 3842 - protein, 605 aa, Homosapiens
MYRSGERLLGSHALPAEQRDFLPLETTNNNNNHHQPGAWARRAGSSASSPPSASSSPHPSAAVPAADPADSASGSSNKRKRDNKASTYGLNYSLLQPSGGRAAGGGRADGGGVVYSGTPWKRRNYNQGVVGLHEEISDFYEYMSPRPEEEKMRMEVVNRIESVIKELWPSADVQIFGSFKTGLYLPTSDIDLVVFGKWENLPLWTLEEALRKHKVADEDSVKVLDKATVPIIKLTDSFTEVKVDISFNVQNGVRAADLIKDFTKKYPVLPYLVLVLKQFLLQRDLNEVFTGGIGSYSLFLMAVSFLQLHPREDACIPNTNYGVLLIEFFELYGRHFNYLKTGIRIKDGGSYVAKDEVQKNMLDGYRPSMLYIEDPLQPGNDVGRSSYGAMQVKQAFDYAYVVLSHAVSPIAKYYPNNETESILGRIIRVTDEVATYRDWISKQWGLKNRPEPSCNGNGVTLIVDTQQLDKCNNNLSEENEALGKCRSKTSESLSKHSSNSSSGPVSSSSATQSSSSDVDSDATPCKTPKQLLCRPSTGNRVGSQDVSLESSQAVGKMQSTQTTNTSNSTNKSQHGSARLFRSSSKGFQALSSVLRNVDSCEVLEV

SEQ ID NO: 3843 - DNA, 3736 bp, Homosapiens
gatatttggaagttttaaaactggactttatttacctactagtgacatcgacctagtggtgtttgggaagtgggagaacctacccctctggactctggaagaagctcttcggaaacacaaagtcgcagatgaggattcggtgaaagttttagacaaagcaactgtacctattattaaattaacagattcttttactgaagtgaaagttgatatcagctttaatgtacagaatggcgtgagagcagctgacctcatcaaagattttaccaagaaatatcctgtattgccatacttggttttagtattgaaacaattcctattgcagagggaccttaatgaagtatttacaggtggaattggttcttatagtctctttttaatggcagtcagtttccttcagttacatcccagggaagatgcttgcatccccaatacaaactatggtgttctcttaatagaattttttgaattatatggacgacacttcaattatttaaagactggcatccggataaaggatggtggttcatatgtggccaaagatgaagtacagaaaaatatgctagatggctacaggccatcaatgctttatatcgaagatcctttacaaccaggtaacgatgttggaaggagttcatatggggccatgcaagtgaagcaggcctttgattatgcctacgttgttttgagtcatgctgtatcaccaatagcaaagtactatcccaacaatgaaacagaaagcatactaggtagaataattagagtaacagatgaagttgccacatatagagattggatatcaaagcagtggggcttgaagaatagacctgagccttcatgcaatggtccagtgtcgtcctcttctgccacacagtccagctctagtgatgtagattccgatgcaacaccatgcaaaaccccgaaacagctgctttgccgtccgtccactgggaaccgagtagggtcgcaagatgtatccttggagtcctctcaggcagttgggaaaatgcaaagcacccaaaccactaacacatccaacagcaccaacaaatctcagcatggatcagcaaggctctttcgttcttccagcaaaggcttccaaggtacaactcaaacaagccatggttccttgatgacaaacaaacaacatcaaggcaaatccaataatcagtattaccatggcaaaaagaggaaacacaagagggacgcgcccctctcagacctctgtagatagtcagcgctgcgcggtggactgtcttctctgtgcaatgatctcatgctcaggacagttgcgcagggactcctgggagatattcaggagcctcacactgttcagacgttgacttagcaactgcgttttttcccagctcgccacagaatggatcatgaagactgacaactgcaaaaaaaacaaaacaaaacaaaaaaaaaagcaagcaaaaaagagggaaaaaaaaggctgcttatttgataagtcatatgctacaacagggtcattttaagatttaaagcttgaatgtaaaataaatatatttctcattggctttatgcagagttatagggaatagtattcagtgttggtagggtgatagaaacaaaaaacagtatcagaggatgaggtggggaaggaaaacaaaggtatctgataggaagtccagattccaaaggggaaagtgatctgtgcatgttttttttttaaatatttttgcatatatttaccattttattgtgtgtatatatagaagaccatataggagattgatatttgtaatagtggatttgttaataatactttttacataacattactgtttaaattgtaaacagattttttctcaggattagtttgaaaaataatctaaattgtcatcttaacatccatatatagggaagtgattagttctattactcaatttgtttttctcagcattgaaatgacttaatagaacccttgtgtcctgctgcaaaaatttttcctctctaaagaaaaggtttatggtggcaaatgatgtttattttattttgtaaaaaaaaaaaaatgtactatgtacttttgtgtaaacactgaaaaatctctggtcatctccgagaattaacttgcaactgttttctatagtgctgtcgtcttgggcaatgggcaattacatgactttgtgtttgcttcctttgcagtcttttttttttccccccatttcttcctaataggaaaaaaaaaaaaaaaaaggtcacccatgtctggtctcattcctgttgcagtgaaacttcgagttccacagactttgcatgctggcttctctaaccctgtgtgctgcgtgtgcctgtttctcatctcttattctttttaaaattcatgcttaactactgtgggagaataactgtaaacagctttaattaaatcatacttataaaaaactattttcttatattccactctatgcttttggtattgttgatctttacaaattaaatggtctttgataatggatctattttgtattgccttattaagaccaaatacttcttgtcatcccattctttatcctcttctttcatggaattgttatcgttaattaaaacttttttaaacattggcttgtttcaatcatactgtaaattttggttgtagtcagctttgagtgcaatgagatgtataattctgttatcattacctgttgagtttgaaactcagttgggaatatttaatataatagaatgtaagtgacatttctgaaaatgctttctttcagggtgaaagctcttatgtttagcatcaatgtgtatggctctgttaaatgcagccatttctgagacgagattcttttatatatatatacatataaagtactattggcttttaggagtttcttttatatacatttatgaaatactgaagaccaatcagaccattaatggacacttagtgtaactttttataaagaaaataatgctaaagtaagaccaaaactgatgtcatcactgaaattaacaattttcaatatgttcatattttaattcacaatggaaaaatgtgttccaaaactggaaactcatagtactcgtgtaaactgtggaagatttcaaatgtgatgttattttgacaatgttttaaattttagagtcacattttattctgatcagaatttttattgagatgttgagcttttgtttttgaaactagtttgtcataacattgtgcataatcacagtatttattttctaggacaattgtgaatgtgtagacttatgtttactgctaagggaacaattatttataaaataatattaaatccagtattagctgcctatttcagacacttaatacttgcagagatctatgttacatttaccacactgaagttttttttgttgttttttgtttgtttttaaagaatcaccctcattgttgaaagtaaatgtactcttagggtgcgaatattagtgttccaataagcatgtgattatattaaggtggtggtagcgggaagataattctgattccattgggaatcttaggttttcgtaaatttattgggaaaatagtttttcctgtactgctgaagtttctttttggtaaacagtatctttctaaaagaaaaaagcatgaaggagaaattgaggtgtgtatacatttcctcaaatgaccagcattgtattcgtgaatactgtgtatcttgcagtgaacagtgtggaagctgttcatttttcaatctgaagtaaaatactttcaagaactttt

SEQ ID NO: 3844 - protein, 284 aa, Homosapiens
MAVSFLQLHPREDACIPNTNYGVLLIEFFELYGRHFNYLKTGIRIKDGGSYVAKDEVQKNMLDGYRPSMLYIEDPLQPGNDVGRSSYGAMQVKQAFDYAYVVLSHAVSPIAKYYPNNETESILGRIIRVTDEVATYRDWISKQWGLKNRPEPSCNGPVSSSSATQSSSSDVDSDATPCKTPKQLLCRPSTGNRVGSQDVSLESSQAVGKMQSTQTTNTSNSTNKSQHGSARLFRSSSKGFQGTTQTSHGSLMTNKQHQGKSNNQYYHGKKRKHKRDAPLSDLCR

SEQ ID NO: 3845 - DNA, 3834 bp, Homosapiens
gacatcgacctagtggtgtttgggaagtgggagaacctacccctctggactctggaagaagctcttcggaaacacaaagtcgcagatgaggattcggtgaaagttttagacaaagcaactgtacctattattaaattaacagattcttttactgaagtgaaagttgatatcagctttaatgtacagaatggcgtgagagcagctgacctcatcaaagattttaccaagaaatatcctgtattgccatacttggttttagtattgaaacaattcctattgcagagggaccttaatgaagtatttacaggtggaattggttcttatagtctctttttaatggcagtcagtttccttcagttacatcccagggaagatgcttgcatccccaatacaaactatggtgttctcttaatagaattttttgaattatatggacgacacttcaattatttaaagactggcatccggataaaggatggtggttcatatgtggccaaagatgaagtacagaaaaatatgctagatggctacaggccatcaatgctttatatcgaagatcctttacaaccaggtaacgatgttggaaggagttcatatggggccatgcaagtgaagcaggcctttgattatgcctacgttgttttgagtcatgctgtatcaccaatagcaaagtactatcccaacaatgaaacagaaagcatactaggtagaataattagagtaacagatgaagttgccacatatagagattggatatcaaagcagtggggcttgaagaatagacctgagccttcatgcaatggaaatggtgttaccttgatagtagatactcagcagttagataaatgtaataataatctatctgaagaaaatgaagcccttggaaaatgtagaagtaaaacctcggaatctcttagtaaacactcttcaaactcttcatcaggtccagtgtcgtcctcttctgccacacagtccagctctagtgatgtagattccgatgcaacaccatgcaaaaccccgaaacagctgctttgccgtccgtccactgggaaccgagtagggtcgcaagatgtatccttggagtcctctcaggcagttgggaaaatgcaaagcacccaaaccactaacacatccaacagcaccaacaaatctcagcatggatcagcaaggctctttcgttcttccagcaaaggcttccaaggtacaactcaaacaagccatggttccttgatgacaaacaaacaacatcaaggcaaatccaataatcagtattaccatggcaaaaagaggaaacacaagagggacgcgcccctctcagacctctgtagatagtcagcgctgcgcggtggactgtcttctctgtgcaatgatctcatgctcaggacagttgcgcagggactcctgggagatattcaggagcctcacactgttcagacgttgacttagcaactgcgttttttcccagctcgccacagaatggatcatgaagactgacaactgcaaaaaaaacaaaacaaaacaaaaaaaaaagcaagcaaaaaagagggaaaaaaaaggctgcttatttgataagtcatatgctacaacagggtcattttaagatttaaagcttgaatgtaaaataaatatatttctcattggctttatgcagagttatagggaatagtattcagtgttggtagggtgatagaaacaaaaaacagtatcagaggatgaggtggggaaggaaaacaaaggtatctgataggaagtccagattccaaaggggaaagtgatctgtgcatgttttttttttaaatatttttgcatatatttaccattttattgtgtgtatatatagaagaccatataggagattgatatttgtaatagtggatttgttaataatactttttacataacattactgtttaaattgtaaacagattttttctcaggattagtttgaaaaataatctaaattgtcatcttaacatccatatatagggaagtgattagttctattactcaatttgtttttctcagcattgaaatgacttaatagaacccttgtgtcctgctgcaaaaatttttcctctctaaagaaaaggtttatggtggcaaatgatgtttattttattttgtaaaaaaaaaaaaatgtactatgtacttttgtgtaaacactgaaaaatctctggtcatctccgagaattaacttgcaactgttttctatagtgctgtcgtcttgggcaatgggcaattacatgactttgtgtttgcttcctttgcagtcttttttttttccccccatttcttcctaataggaaaaaaaaaaaaaaaaaggtcacccatgtctggtctcattcctgttgcagtgaaacttcgagttccacagactttgcatgctggcttctctaaccctgtgtgctgcgtgtgcctgtttctcatctcttattctttttaaaattcatgcttaactactgtgggagaataactgtaaacagctttaattaaatcatacttataaaaaactattttcttatattccactctatgcttttggtattgttgatctttacaaattaaatggtctttgataatggatctattttgtattgccttattaagaccaaatacttcttgtcatcccattctttatcctcttctttcatggaattgttatcgttaattaaaacttttttaaacattggcttgtttcaatcatactgtaaattttggttgtagtcagctttgagtgcaatgagatgtataattctgttatcattacctgttgagtttgaaactcagttgggaatatttaatataatagaatgtaagtgacatttctgaaaatgctttctttcagggtgaaagctcttatgtttagcatcaatgtgtatggctctgttaaatgcagccatttctgagacgagattcttttatatatatatacatataaagtactattggcttttaggagtttcttttatatacatttatgaaatactgaagaccaatcagaccattaatggacacttagtgtaactttttataaagaaaataatgctaaagtaagaccaaaactgatgtcatcactgaaattaacaattttcaatatgttcatattttaattcacaatggaaaaatgtgttccaaaactggaaactcatagtactcgtgtaaactgtggaagatttcaaatgtgatgttattttgacaatgttttaaattttagagtcacattttattctgatcagaatttttattgagatgttgagcttttgtttttgaaactagtttgtcataacattgtgcataatcacagtatttattttctaggacaattgtgaatgtgtagacttatgtttactgctaagggaacaattatttataaaataatattaaatccagtattagctgcctatttcagacacttaatacttgcagagatctatgttacatttaccacactgaagttttttttgttgttttttgtttgtttttaaagaatcaccctcattgttgaaagtaaatgtactcttagggtgcgaatattagtgttccaataagcatgtgattatattaaggtggtggtagcgggaagataattctgattccattgggaatcttaggttttcgtaaatttattgggaaaatagtttttcctgtactgctgaagtttctttttggtaaacagtatctttctaaaagaaaaaagcatgaaggagaaattgaggtgtgtatacatttcctcaaatgaccagcattgtattcgtgaatactgtgtatcttgcagtgaacagtgtggaagctgttcatttttcaatctgaagtaaaatactttcaagaactttt

SEQ ID NO: 3846 - protein, 331 aa, Homosapiens
MAVSFLQLHPREDACIPNTNYGVLLIEFFELYGRHFNYLKTGIRIKDGGSYVAKDEVQKNMLDGYRPSMLYIEDPLQPGNDVGRSSYGAMQVKQAFDYAYVVLSHAVSPIAKYYPNNETESILGRIIRVTDEVATYRDWISKQWGLKNRPEPSCNGNGVTLIVDTQQLDKCNNNLSEENEALGKCRSKTSESLSKHSSNSSSGPVSSSSATQSSSSDVDSDATPCKTPKQLLCRPSTGNRVGSQDVSLESSQAVGKMQSTQTTNTSNSTNKSQHGSARLFRSSSKGFQGTTQTSHGSLMTNKQHQGKSNNQYYHGKKRKHKRDAPLSDLCR

SEQ ID NO: 3847 - DNA, 4380 bp, Homosapiens
gacatcgacctagtggtgtttgggaagtgggagaacctacccctctggactctggaagaagctcttcggaaacacaaagtcgcagatgaggattcggtgaaagttttagacaaagcaactgtacctattattaaattaacagattcttttactgaagtgaaagttgatatcagctttaatgtacagaatggcgtgagagcagctgacctcatcaaagattttaccaagaaatatcctgtattgccatacttggttttagtattgaaacaattcctattgcagagggaccttaatgaagtatttacaggtggaattggttcttatagtctctttttaatggcagtcagtttccttcagttacatcccagggaagatgcttgcatccccaatacaaactatggtgttctcttaatagaattttttgaattatatggacgacacttcaattatttaaagactggcatccggataaaggatggtggttcatatgtggccaaagatgaagtacagaaaaatatgctagatggctacaggccatcaatgctttatatcgaagatcctttacaaccaggtaacgatgttggaaggagttcatatggggccatgcaagtgaagcaggcctttgattatgcctacgttgttttgagtcatgctgtatcaccaatagcaaagtactatcccaacaatgaaacagaaagcatactaggtagaataattagagtaacagatgaagttgccacatatagagattggatatcaaagcagtggggcttgaagaatagacctgagccttcatgcaatggaaatggtgttaccttgatagtagatactcagcagttagataaatgtaataataatctatctgaagaaaatgaagcccttggaaaatgtagaagtaaaacctcggaatctcttagtaaacactcttcaaactcttcatcaggtccagtgtcgtcctcttctgccacacagtccagctctagtgatgtagattccgatgcaacaccatgcaaaaccccgaaacagctgctttgccgtccgtccactgggaaccgagtagggtcgcaagatgtatccttggagtcctctcaggcagttgggaaaatgcaaagcacccaaaccactaacacatccaacagcaccaacaaatctcagcatggatcagcaaggctctttcgttcttccagcaaaggcttccaaggtacaactcaaacaagccatggttccttgatgacaaacaaacaacatcaaggcaaatccaataatcagtattaccatggcaaaaagaggaaacacaagagggacgcgcccctctcagacctctgtagatagtcagcgctgcgcggtggactgtcttctctgtgcaatgatctcatgctcaggacagttgcgcagggactcctgggagatattcaggagcctcacactgttcagacgttgacttagcaactgcgttttttcccagctcgccacagaatggatcatgaagactgacaactgcaaaaaaaacaaaacaaaacaaaaaaaaaagcaagcaaaaaagagggaaaaaaaaggctgcttatttgataagtcatatgctacaacagggtcattttaagatttaaagcttgaatgtaaaataaatatatttctcattggctttatgcagagttatagggaatagtattcagtgttggtagggtgatagaaacaaaaaacagtatcagaggatgaggtggggaaggaaaacaaaggtatctgataggaagtccagattccaaaggggaaagtgatctgtgcatgttttttttttaaatatttttgcatatatttaccattttattgtgtgtatatatagaagaccatataggagattgatatttgtaatagtggatttgttaataatactttttacataacattactgtttaaattgtaaacagattttttctcaggattagtttgaaaaataatctaaattgtcatcttaacatccatatatagggaagtgattagttctattactcaatttgtttttctcagcattgaaatgacttaatagaacccttgtgtcctgctgcaaaaatttttcctctctaaagaaaaggtttatggtggcaaatgatgtttattttattttgtaaaaaaaaaaaaatgtactatgtacttttgtgtaaacactgaaaaatctctggtcatctccgagaattaacttgcaactgttttctatagtgctgtcgtcttgggcaatgggcaattacatgactttgtgtttgcttcctttgcagtcttttttttttccccccatttcttcctaataggaaaaaaaaaaaaaaaaaggtcacccatgtctggtctcattcctgttgcagtgaaacttcgagttccacagactttgcatgctggcttctctaaccctgtgtgctgcgtgtgcctgtttctcatctcttattctttttaaaattcatgcttaactactgtgggagaataactgtaaacagctttaattaaatcatacttataaaaaactattttcttatattccactctatgcttttggtattgttgatctttacaaattaaatggtctttgataatggatctattttgtattgccttattaagaccaaatacttcttgtcatcccattctttatcctcttctttcatggaattgttatcgttaattaaaacttttttaaacattggcttgtttcaatcatactgtaaattttggttgtagtcagctttgagtgcaatgagatgtataattctgttatcattacctgttgagtttgaaactcagttgggaatatttaatataatagaatgtaagtgacatttctgaaaatgctttctttcagggtgaaagctcttatgtttagcatcaatgtgtatggctctgttaaatgcagccatttctgagacgagattcttttatatatatatacatataaagtactattggcttttaggagtttcttttatatacatttatgaaatactgaagaccaatcagaccattaatggacacttagtgtaactttttataaagaaaataatgctaaagtaagaccaaaactgatgtcatcactgaaattaacaattttcaatatgttcatattttaattcacaatggaaaaatgtgttccaaaactggaaactcatagtactcgtgtaaactgtggaagatttcaaatgtgatgttattttgacaatgttttaaattttagagtcacattttattctgatcagaatttttattgagatgttgagcttttgtttttgaaactagtttgtcataacattgtgcataatcacagtatttattttctaggacaattgtgaatgtgtagacttatgtttactgctaagggaacaattatttataaaataatattaaatccagtattagctgcctatttcagacacttaatacttgcagagatctatgttacatttaccacactgaagttttttttgttgttttttgtttgtttttaaagaatcaccctcattgttgaaagtaaatgtactcttagggtgcgaatattagtgttccaataagcatgtgattatattaaggtggtggtagcgggaagataattctgattccattgggaatcttaggttttcgtaaatttattgggaaaatagtttttcctgtactgctgaagtttctttttggtaaacagtatctttctaaaagaaaaaagcatgaaggagaaattgaggtgtgtatacatttcctcaaatgaccagcattgtattcgtgaatactgtgtatcttgcagtgaacagtgtggaagctgttcatttttcaatctgaagtaaaatactttcaagaacttttagtttgcctgctcatttgttttatacatttcatctatttgactcctatcttatttcttttttgagttttaatacttcctatattttgtgaatatatcagaaatgtgtcatttatatattagagtccattcatatccatgaatcataaccttcctttgctaatacttgttgaatgggattttacaaattctccctcactctggtgacatttctcaggcagtcatgtatgtgtacctggccattagaaatattaatatttaaagactgttttttagaggagctgatgggttggtgaggtgtcagcacaaaatcttactggttatgttttgatgataaaagtatatccattttttccctccagctttaaggtgactgtgaaggtgcctggttttgaatgtctttgtttggtttggagatgtcgcactcagttttcaaatctagcttggatctgtaggacctatgttttttacaagtaattgccctccagtcttcaacagttgattctgttttatttttatcctgttttgagtgtactttacctttactt

SEQ ID NO: 3848 - protein, 331 aa, Homosapiens; identical to SEQ ID NO: 3846

SEQ ID NO: 3849 - DNA, 4239 bp, Homosapiens
gacatcgacctagtggtgtttgggaagtgggagaacctacccctctggactctggaagaagctcttcggaaacacaaagtcgcagatgaggattcggtgaaagttttagacaaagcaactgtacctattattaaattaacagattcttttactgaagtgaaagttgatatcagctttaatgtacagaatggcgtgagagcagctgacctcatcaaagattttaccaagaaatatcctgtattgccatacttggttttagtattgaaacaattcctattgcagagggaccttaatgaagtatttacaggtggaattggttcttatagtctctttttaatggcagtcagtttccttcagttacatcccagggaagatgcttgcatccccaatacaaactatggtgttctcttaatagaattttttgaattatatggacgacacttcaattatttaaagactggcatccggataaaggatggtggttcatatgtggccaaagatgaagtacagaaaaatatgctagatggctacaggccatcaatgctttatatcgaagatcctttacaaccaggtaacgatgttggaaggagttcatatggggccatgcaagtgaagcaggcctttgattatgcctacgttgttttgagtcatgctgtatcaccaatagcaaagtactatcccaacaatgaaacagaaagcatactaggtagaataattagagtaacagatgaagttgccacatatagagattggatatcaaagcagtggggcttgaagaatagacctgagccttcatgcaatggtccagtgtcgtcctcttctgccacacagtccagctctagtgatgtagattccgatgcaacaccatgcaaaaccccgaaacagctgctttgccgtccgtccactgggaaccgagtagggtcgcaagatgtatccttggagtcctctcaggcagttgggaaaatgcaaagcacccaaaccactaacacatccaacagcaccaacaaatctcagcatggatcagcaaggctctttcgttcttccagcaaaggcttccaaggtacaactcaaacaagccatggttccttgatgacaaacaaacaacatcaaggcaaatccaataatcagtattaccatggcaaaaagaggaaacacaagagggacgcgcccctctcagacctctgtagatagtcagcgctgcgcggtggactgtcttctctgtgcaatgatctcatgctcaggacagttgcgcagggactcctgggagatattcaggagcctcacactgttcagacgttgacttagcaactgcgttttttcccagctcgccacagaatggatcatgaagactgacaactgcaaaaaaaacaaaacaaaacaaaaaaaaaagcaagcaaaaaagagggaaaaaaaaggctgcttatttgataagtcatatgctacaacagggtcattttaagatttaaagcttgaatgtaaaataaatatatttctcattggctttatgcagagttatagggaatagtattcagtgttggtagggtgatagaaacaaaaaacagtatcagaggatgaggtggggaaggaaaacaaaggtatctgataggaagtccagattccaaaggggaaagtgatctgtgcatgttttttttttaaatatttttgcatatatttaccattttattgtgtgtatatatagaagaccatataggagattgatatttgtaatagtggatttgttaataatactttttacataacattactgtttaaattgtaaacagattttttctcaggattagtttgaaaaataatctaaattgtcatcttaacatccatatatagggaagtgattagttctattactcaatttgtttttctcagcattgaaatgacttaatagaacccttgtgtcctgctgcaaaaatttttcctctctaaagaaaaggtttatggtggcaaatgatgtttattttattttgtaaaaaaaaaaaaatgtactatgtacttttgtgtaaacactgaaaaatctctggtcatctccgagaattaacttgcaactgttttctatagtgctgtcgtcttgggcaatgggcaattacatgactttgtgtttgcttcctttgcagtcttttttttttccccccatttcttcctaataggaaaaaaaaaaaaaaaaaggtcacccatgtctggtctcattcctgttgcagtgaaacttcgagttccacagactttgcatgctggcttctctaaccctgtgtgctgcgtgtgcctgtttctcatctcttattctttttaaaattcatgcttaactactgtgggagaataactgtaaacagctttaattaaatcatacttataaaaaactattttcttatattccactctatgcttttggtattgttgatctttacaaattaaatggtctttgataatggatctattttgtattgccttattaagaccaaatacttcttgtcatcccattctttatcctcttctttcatggaattgttatcgttaattaaaacttttttaaacattggcttgtttcaatcatactgtaaattttggttgtagtcagctttgagtgcaatgagatgtataattctgttatcattacctgttgagtttgaaactcagttgggaatatttaatataatagaatgtaagtgacatttctgaaaatgctttctttcagggtgaaagctcttatgtttagcatcaatgtgtatggctctgttaaatgcagccatttctgagacgagattcttttatatatatatacatataaagtactattggcttttaggagtttcttttatatacatttatgaaatactgaagaccaatcagaccattaatggacacttagtgtaactttttataaagaaaataatgctaaagtaagaccaaaactgatgtcatcactgaaattaacaattttcaatatgttcatattttaattcacaatggaaaaatgtgttccaaaactggaaactcatagtactcgtgtaaactgtggaagatttcaaatgtgatgttattttgacaatgttttaaattttagagtcacattttattctgatcagaatttttattgagatgttgagcttttgtttttgaaactagtttgtcataacattgtgcataatcacagtatttattttctaggacaattgtgaatgtgtagacttatgtttactgctaagggaacaattatttataaaataatattaaatccagtattagctgcctatttcagacacttaatacttgcagagatctatgttacatttaccacactgaagttttttttgttgttttttgtttgtttttaaagaatcaccctcattgttgaaagtaaatgtactcttagggtgcgaatattagtgttccaataagcatgtgattatattaaggtggtggtagcgggaagataattctgattccattgggaatcttaggttttcgtaaatttattgggaaaatagtttttcctgtactgctgaagtttctttttggtaaacagtatctttctaaaagaaaaaagcatgaaggagaaattgaggtgtgtatacatttcctcaaatgaccagcattgtattcgtgaatactgtgtatcttgcagtgaacagtgtggaagctgttcatttttcaatctgaagtaaaatactttcaagaacttttagtttgcctgctcatttgttttatacatttcatctatttgactcctatcttatttcttttttgagttttaatacttcctatattttgtgaatatatcagaaatgtgtcatttatatattagagtccattcatatccatgaatcataaccttcctttgctaatacttgttgaatgggattttacaaattctccctcactctggtgacatttctcaggcagtcatgtatgtgtacctggccattagaaatattaatatttaaagactgttttttagaggagctgatgggttggtgaggtgtcagcacaaaatcttactggttatgttttgatgataaaagtatatccattttttccctccagctttaaggtgactgtgaaggtgcctggttttgaatgtctttgtttggtttggagatgtcgcactcagttttcaaatctagcttggatctgtaggacctatgttttttacaagtaattgccctccagtcttcaacagttgattctgttttatttttatcctgttttgagtgtactttacctttactt

SEQ ID NO: 3850 - protein, 284 aa, Homosapiens; identical to SEQ ID NO: 3844

SEQ ID NO: 3851 - DNA, 455 bp, Homosapiens
cctattaggaagaaatggggggaaaaaaaaaagactgcaaaggaagcaaacacaaagtcatgtaattgcccattgcccaagacgacagcactatagaaaacagttgcaagttaattctcggagatgaccagagatttttcagtgtttacacaaaagtacatagtacatttttttttttttacaaaataaaataaacatcatttgccaccataaaccttttctttagagaggaaaaatttttgcagcaggacacaagggttctattaagtcatttcaatgctgagaaaaacaaattgagtaatagaactaatcacttccctatatatggatgttaagatgacaatttagattatttttcaaactaatcctgagaaaaaatctgtttacaatttaaacagtaatgttatgtaaaaagtattattaacaaatccactattacaaatatcaatttccta

SEQ ID NO: 3852 - protein, 46 aa, Homosapiens
TSFATINLFFREEKFLQQDTRVLLSHFNAEKNKLSNRTNHFPIYGC

SEQ ID NO: 3853 - DNA, 6278 bp, Homosapiens
gatgtgactcactctcattaggtagcgtggaaggagccttcggatgggtgagcctgggcgcgtctgaggaagggcaggcgggggccgggccacctccctgcagaccctggccggctgctggggccggggaggagagccagagctgaggaactgcgtgtggagtcagcccagtctggatgcacaggaggatgctggcggcacagtgagtgaggcctggtgccagagctgtgcggaccccttgttggccatggagcagcaggcccagaggccctctccccagccctgcttgcctgcctcggagaggacagaggcctaggcccacgggggagggtgttggcagacagatgccctccaggccctggggcctccttaacggccccttaacgacacgcgtgccaagggtggaggatgccagccaaggggcgctacttcctcaacgagggcgaggagggccctgaccaagatgcgctctacgagaagtaccagctcaccagccagcatgggccgctgctgctcacgctcctgctggtggccgccactgcctgcgtggccctcatcatcattgccttcagccagggggacccctccagacaccaggccattctgggcatggcgttcctggtgctggcggtgtttgcggccctctctgtgctgatgtacgtcgagtgtctcctgcggcgctggctcagggccttggcgctgctcacctgggcctgcttggtggcgctgggctatgtgctggtgttcgacgcatggacaaaggcggcctgtgcgtgggagcaggtgcccttcttcctgttcattgtcttcgtggtgtacacactactgcccttcagcatgcggggcgctgtcgccgttggggccgtctccactgcctcccacctcctggtgctcggttctttgatgggaggcttcacgacacccagtgtccgggtggggctgcagctgctggccaacgcagtcatcttcctgtgtgggaacctgacaggcgccttccacaagcaccaaatgcaggatgcatcccgggacctcttcacctacactgtgaagtgcatccagatccgccggaagctgcgcatcgagaagcgccagcaggagaacctgctgctgtcagtgcttccggcccacatctccatgggcatgaagctggccatcatcgaacggctcaaggagcatggtgaccgtcgctgcatgcctgacaacaacttccacagcctctacgtcaagaggcaccagaatgtcagcatcctctatgcggacatcgtgggcttcacgcagctggccagcgactgttctcccaaggagctggtggtggtgctgaatgagctctttggcaagttcgaccagatcgccaaggccaacgagtgcatgcgaatcaagatcctcggcgactgctactactgtgtatcgggcctgcccgtgtcgctgcctacccacgcccggaactgcgtgaagatggggctggacatgtgccaggccatcaagcaggtgcgggaggccacgggcgtggacatcaacatgcgtgtgggcatacactcggggaatgtgctgtgcggggtcatcgggctgcgcaagtggcagtatgacgtgtggtcccacgacgtgtccctggccaaccggatggaggcagccggagtacccggccgggtgcacatcacggaggccacgctaaagcacctggacaaggcgtacgaggtggaggatgggcacgggcagcagcgggacccctacctcaaggagatgaacatccgcacctacctggtcatcgacccccggagccagcagccacccccgcccagccaacacctccccaggcccaagggggacgcggccctgaagatgcgggcgtcagtgcgcatgacccggtacctcgagtcctggggggcggcacggccctttgcacatctcaaccaccgtgagagcgtgagcagtggtgagacccacgtccccaacgggcggaggcctaagagcgttccccagcgccaccgccggaccccagacagaagcatgtcccccaaggggcggtcggaggatgactcgtacgatgacgagatgctgtcagccattgaggggctcagctccacgaggccctgctgctccaagtccgatgacttctacacctttgggtccatcttcctggagaagggctttgagcgcgagtaccgcctggcacccatcccccgggcccgccacgactttgcctgcgccagcctgatcttcgtctgcatcctgctcgtccatgtcctgctcatgcccaggacggcggcactgggtgtgtccttcgggctggtggcctgtgtactggggctggtgctgggcctgtgctttgccaccaagttctcgaggtgctgcccagctcgggggacgctctgcactatctctgagagggtggagacacagcccctgctgaggctgaccctggccgtcctgaccatcggcagcctgctcactgtggccatcatcaacctgcccctgatgcctttccaagttccagagctgcctgttggcaatgagacaggcctactggccgcgagcagcaagacaagagccctgtgtgagcccctcccgtactacacctgcagctgtgtcctgggcttcatcgcctgctcggtcttcctgaggatgagcctggagccaaaggttgtgctgctgacagtggccctggtggcctacctggtgctcttcaacctctccccatgctggcagtgggactgctgcggccaaggcctgggcaacctcaccaagcccaacggcaccaccagtggcacccctagctgttcctggaaggacctgaagaccatgaccaatttctacctggtcctgttctacatcaccctgcttacactctccagacagattgactattactgccgcttggactgcctatggaagaagaagttcaagaaggagcacgaggagtttgagaccatggagaacgtgaaccgccttcttctggagaacgtcctgccagcccacgtggctgcccactttatcggtgacaagttaaacgaggactggtaccatcagtcctatgactgcgtctgtgtcatgtttgcctccgtgccggacttcaaagtgttctacacagagtgcgatgtcaacaaagaagggctggagtgcctacgcctgctcaatgagatcattgccgacttcgacgagctcctactgaagcccaagttcagcggcgtggagaagatcaagaccatcggcagcacgtacatggcagctgcagggctcagcgtcgcctcagggcacgagaaccaggagctggagcggcagcatgcccacattggtgtcatggtggagttcagcatcgccctgatgagtaagctggacggcatcaacaggcactccttcaactccttccgcctccgcgtcggcataaaccatgggcctgtgattgctggagtgattggggcccgaaaacctcagtatgacatctggggaaacactgtcaatgtggccagccgaatggaaagcactggagaacttgggaaaatccaggttaccgaggagacctgcaccatcctccagggcctcgggtactcttgtgaatgccgtggcctgatcaacgtcaaaggcaaaggcgagctgaggacttactttgtctgtacggacactgccaagtttcaggggctggggctgaactgagggctcctgctggattccgaaaaggccgggaagccagtctccttccctgaagcaagcccaggagaagactctccgccccacgccaatcccaaaggcatgcagatggctgtgcatgttggcttctttggacctgcactggaggatttctcagacacatgcaccagattctggctcgaagcagccactgagccataatgcgcaggggaggccagaagctctgtgcctggtctgtaacagtttccaggccagctggagaatgttcactggttcggggctgactttgagatctttgttccctgaggtgccaggcaggcaactttagcacatgatgaaaacagacttccacctcagtggcctgtgggcacgcacaagtgaggtctgtttttctagacaccaagggggagtaagctgagctgtctagcacggattggagactccctctccctggtgggcctggcaatgacagcatttctcacagaggcattctggtaaatgaagctgaaaggggtgttttacatctgtaaacggtttcaaacaggtagagagaaaaacaccacaattaacactgttactttttgccttgtctggcatgtttgttttaaatgaatacattaatggggtttttatccttttgaatgacttttcagacactagacataaatctcttccctccagtgtatgctctgcctttttaaccactgacatgtaaggaggactactgtctagcatcagcttatggggtcagctggctgtggggatagagtcctgaggaatgtggtcacagcaagaaggcggggagcagcagagccttgcctttgaatgaggcagcttgtgaggcaagcattctggagagaggtgctttgaaagtaaggtgcggcctttcacctcttccttgattactcacacatctttgcgttctcccctgccgtccttcaactgtatcttacttttcttaccagaaaggaatggagtctgtttagagacaacttggacaacctgtgagtgcatctcttctttcctttagtcttcacagctaactctggagagcttcaaaactagaaggatctactccgcatgggtgcatgcagaggctcctggatctgggaagcccgccccctcacaaatgctgagccgttcttgctctgaaactgcgtgagtcaaggcaaatgcaaaaagccaggttttggggatgtgtcttactgtgcttcaacttcccaaggaattgaaagtcaacctaactgtaacaacagggtgagaaatgaccaaactgcccgtgactttttctgaatggacttcataaccggaagacttaaccggtggcctcatcaccagagcatcgccaggatttctaatgcactcagtttccctacatagcagggattcttagctaggtgtccccatgaaccccgtaaagttctacacaaagtcttgcatacaggagcctttacaagatgattatacagggttgcagattgggtgactgaccagacttgttggggtcctgggatgagttgccccgggctgcaaattaagagtacagctaagtgcgggggtggcggtggagggaacgaaaattgaacctgtctgcctgtgctgtgtcgtgtggctttatcagcccgaggaagggcaggtgtattctaatttgcacaaaggtgctgggtagactagtggcagctctcatgtgctgcacataagtggaatcagtatgaatagaagaacttgctgtataaaggaatttcatggcaacaatgctggtaagggcaattagcctcgcttaagttgccttttttacacaccaaaactttttacatgaagggctggtttcacatgaatactatactgaaatctgtgctctcaagatctagcagtgaccagggctgcccggcgggggctctcctggcaagtcaggaaggtttctgttgctaatataacatagaaacacattagtgcactgggcctctctgaggtcagcatatttgtactcttggaatatttgtttttttcttcagtaacaacagaaaccccagttgggagtttaacaaataactgactaccactcactcatgcatttttatttccaattaaagcaaagcactgtgctgtgctcagataataatagtttgtaagtaaaagtttttagttttcagtgttcaggttatagaatataactgaccataaaaattacctgcaggtattttctttttatgaacttgtttttaaattaccaagtaattactggtgtcattttgttttatgacagacacacgtatctaacaaacaaacaaacagtgaccttctccatgggtcaaggacttccttacaatttctcctgagttaacttttgtgaaaataatacctaaggttttctggcttattgaggaaatttcctaacaaacaaacaaacaaacaaacagaagagaagatcattaaccactgtatactttgtgtatataataggtcagtgtaaagaaatatgatttgaggtggtgcatgcaagtaactagggtttattctatataatgaatatttatagatctgtaacatttgtttcaaaatgctgtttcatttttataaagtaccagtgtttagctgctttttatacattaaattagcaatttgaaaaactc

SEQ ID NO: 3854 - protein, 1080 aa, Homosapiens; identical to SEQ ID NO: 577

SEQ ID NO: 3855 - DNA, 2527 bp, Homosapiens
actctcattaggtagcgtggaaggagccttcggatggagctgaggaactgcgtgtggagtcagcccagtctggatgcacaggaggatgctggcggcacagtgagtgaggcctggtgccagagctgtgcggaccccttgttggccatggagcagcaggcccagaggccctctccccagccctgcttgcctgcctcggagaggacagaggcctaggcccacgggggagggtgttggcagacagatgccctccaggccctggggcctccttaacggccccttaacgacacgcgtgccaagggtggaggatgccagccaaggggcgctacttcctcaacgagggcgaggagggccctgaccaagatgcgctctacgagaagtaccagctcaccagccagcatgggccgctgctgctcacgctcctgctggtggccgccactgcctgcgtggccctcatcatcattgccttcagccagggggacccctccagacaccaggccattctgggcatggcgttcctggtgctggcggtgtttgcggccctctctgtgctgatgtacgtcgagtgtctcctgcggcgctggctcagggccttggcgctgctcacctgggcctgcttggtggcgctgggctatgtgctggtgttcgacgcatggacaaaggcggcctgtgcgtgggagcaggtgcccttcttcctgttcattgtcttcgtggtgtacacactactgcccttcagcatgcggggcgctgtcgccgttggggccgtctccactgcctcccacctcctggtgctcggttctttgatgggaggcttcacgacacccagtgtccgggtggggctgcagctgctggccaacgcagtcatcttcctgtgtgggaacctgacaggcgccttccacaagcaccaaatgcaggatgcatcccgggacctcttcacctacactgtgaagtgcatccagatccgccggaagctgcgcatcgagaagcgccagcaggagaacctgctgctgtcagtgcttccggcccacatctccatgggcatgaagctggccatcatcgaacggctcaaggagcatggtgaccgtcgctgcatgcctgacaacaacttccacagcctctacgtcaagaggcaccagaatgtcagcatcctctatgcggacatcgtgggcttcacgcagctggccagcgactgttctcccaaggagctggtggtggtgctgaatgagctctttggcaagttcgaccagatcgccaaggccaacgagtgcatgcgaatcaagatcctcggcgactgctactactgtgtatcgggcctgcccgtgtcgctgcctacccacgcccggaactgcgtgaagatggggctggacatgtgccaggccatcaagcaggtgcgggaggccacgggcgtggacatcaacatgcgtgtgggcatacactcggggaatgtgctgtgcggggtcatcgggctgcgcaagtggcagtatgacgtgtggtcccacgacgtgtccctggccaaccggatggaggcagccggagtacccggccgggtgcacatcacggaggccacgctaaagcacctggacaaggcgtacgaggtggaggatgggcacgggcagcagcgggacccctacctcaaggagatgaacatccgcacctacctggtcatcgacccccggagccagcagccacccccgcccagccaacacctccccaggcccaagggggacgcggccctgaagatgcgggcgtcagtgcgcatgacccggtacctcgagtcctggggggcggcacggccctttgcacatctcaaccaccgtgagagcgtgagcagtggtgagacccacgtccccaacgggcggaggcctaagagcgttccccagcgccaccgccggaccccagacagaagcatgtcccccaaggggcggtcggaggatgactcgtacgatgacgagatgctgtcagccattgaggggctcagctccacgaggccctgctgctccaagtccgatgacttctacacctttgggtccatcttcctggagaagggctttgagcgcgagtaccgcctggcacccatcccccgggcccgccacgactttgcctgcgccagcctgatcttcgtctgcatcctgctcgtccatgtcctgctcatgcccaggacggcggcactgggtgtgtccttcgggctggtggcctgtgtactggggctggtgctgggcctgtgctttgccaccaagttctcgaggtgctgcccagctcgggggacgctctgcactatctctgagagggtggagacacagcccctgctgaggctgaccctggccgtcctgaccatcggcagcctgctcactgtggccatcatcaacctgcccctgatgcctttccaagttccagagctgcctgttggcaatgagacaggcctactggccgcgagcagcaagacaagagccctgtgtgagcccctcccgcacctgcatactgttttttcccgtttaaatgagctcacttcataagaaataaaactacagtg

SEQ ID NO: 3856 - protein, 734 aa, Homosapiens
MPAKGRYFLNEGEEGPDQDALYEKYQLTSQHGPLLLTLLLVAATACVALIIIAFSQGDPSRHQAILGMAFLVLAVFAALSVLMYVECLLRRWLRALALLTWACLVALGYVLVFDAWTKAACAWEQVPFFLFIVFVVYTLLPFSMRGAVAVGAVSTASHLLVLGSLMGGFTTPSVRVGLQLLANAVIFLCGNLTGAFHKHQMQDASRDLFTYTVKCIQIRRKLRIEKRQQENLLLSVLPAHISMGMKLAIIERLKEHGDRRCMPDNNFHSLYVKRHQNVSILYADIVGFTQLASDCSPKELVVVLNELFGKFDQIAKANECMRIKILGDCYYCVSGLPVSLPTHARNCVKMGLDMCQAIKQVREATGVDINMRVGIHSGNVLCGVIGLRKWQYDVWSHDVSLANRMEAAGVPGRVHITEATLKHLDKAYEVEDGHGQQRDPYLKEMNIRTYLVIDPRSQQPPPPSQHLPRPKGDAALKMRASVRMTRYLESWGAARPFAHLNHRESVSSGETHVPNGRRPKSVPQRHRRTPDRSMSPKGRSEDDSYDDEMLSAIEGLSSTRPCCSKSDDFYTFGSIFLEKGFEREYRLAPIPRARHDFACASLIFVCILLVHVLLMPRTAALGVSFGLVACVLGLVLGLCFATKFSRCCPARGTLCTISERVETQPLLRLTLAVLTIGSLLTVAIINLPLMPFQVPELPVGNETGLLAASSKTRALCEPLPHLHTVFSRLNELTS

SEQ ID NO: 3857 - DNA, 2137 bp, Homosapiens
cacagaggaggccagggaagctctagaggcgttttttggccaagggagctgaggaactgcgtgtggagtcagcccagtctggatgcacaggaggatgctggcggcacagtgagtgaggcctggtgccagagctgtgcggaccccttgttggccatggagcagcaggcccagaggccctctccccagccctgcttgcctgcctcggagaggacagaggcctaggcccacgggggagggtgttggcagacagatgccctccaggccctggggcctccttaacggccccttaacgacacgcgtgccaagggtggaggatgccagccaaggggcgctacttcctcaacgagggcgaggagggccctgaccaagatgcgctctacgagaagtaccagctcaccagccagcatgggccgctgctgctcacgctcctgctggtggccgccactgcctgcgtggccctcatcatcattgccttcagccagggggacccctccagacaccaggccattctgggcatggcgttcctggtgctggcggtgtttgcggccctctctgtgctgatgtacgtcgagtgtctcctgcggcgctggctcagggccttggcgctgctcacctgggcctgcttggtggcgctgggctatgtgctggtgttcgacgcatggacaaaggcggcctgtgcgtgggagcaggtgcccttcttcctgttcattgtcttcgtggtgtacacactactgcccttcagcatgcggggcgctgtcgccgttggggccgtctccactgcctcccacctcctggtgctcggttctttgatgggaggcttcacgacacccagtgtccgggtggggctgcagctgctggccaacgcagtcatcttcctgtgtgggaacctgacaggcgccttccacaagcaccaaatgcaggatgcatcccgggacctcttcacctacactgtgaagtgcatccagatccgccggaagctgcgcatcgagaagcgccagcaggagaacctgctgctgtcagtgcttccggcccacatctccatgggcatgaagctggccatcatcgaacggctcaaggagcatggtgaccgtcgctgcatgcctgacaacaacttccacagcctctacgtcaagaggcaccagaatgtcagcatcctctatgcggacatcgtgggcttcacgcagctggccagcgactgttctcccaaggagctggtggtggtgctgaatgagctctttggcaagttcgaccagatcgccaaggccaacgagtgcatgcgaatcaagatcctcggcgactgctactactgtgtatcgggcctgcccgtgtcgctgcctacccacgcccggaactgcgtgaagatggggctggacatgtgccaggccatcaagcaggtgcgggaggccacgggcgtggacatcaacatgcgtgtgggcatacactcggggaatgtgctgtgcggggtcatcgggctgcgcaagtggcagtatgacgtgtggtcccacgacgtgtccctggccaaccggatggaggcagccggagtacccggccgggtgcacatcacggaggccacgctaaagcacctggacaaggcgccctgctgctccaagtccgatgacttctacacctttgggtccatcttcctggagaagggctttgagcgcgagtaccgcctggcacccatcccccgggcccgccacgactttgcctgcgccagcctgatcttcgtctgcatcctgctcgtccatgtcctgctcatgcccaggacggcggcactgggtgtgtccttcgggctggtggcctgtgtactggggctggtgctgggcctgtgctttgccaccaagttctcgaggtgctgcccagctcgggggacgctctgcactatctctgagagggtggagacacagcccctgctgaggctgaccctggccgtcctgaccatcggcagcctgctcactgtggccatcatcaacctgcccctgatgcctttccaagttccagagctgcctgttggcaatgagacaggcctactggccgcgagcagcaagacaagagccctgtgtgagcccctcccgcacctgcatactgttttttcccgtttaaatgagctcacttcataagaaataaaactacagtg

SEQ ID NO: 3858 - protein, 601 aa, Homosapiens
MPAKGRYFLNEGEEGPDQDALYEKYQLTSQHGPLLLTLLLVAATACVALIIIAFSQGDPSRHQAILGMAFLVLAVFAALSVLMYVECLLRRWLRALALLTWACLVALGYVLVFDAWTKAACAWEQVPFFLFIVFVVYTLLPFSMRGAVAVGAVSTASHLLVLGSLMGGFTTPSVRVGLQLLANAVIFLCGNLTGAFHKHQMQDASRDLFTYTVKCIQIRRKLRIEKRQQENLLLSVLPAHISMGMKLAIIERLKEHGDRRCMPDNNFHSLYVKRHQNVSILYADIVGFTQLASDCSPKELVVVLNELFGKFDQIAKANECMRIKILGDCYYCVSGLPVSLPTHARNCVKMGLDMCQAIKQVREATGVDINMRVGIHSGNVLCGVIGLRKWQYDVWSHDVSLANRMEAAGVPGRVHITEATLKHLDKAPCCSKSDDFYTFGSIFLEKGFEREYRLAPIPRARHDFACASLIFVCILLVHVLLMPRTAALGVSFGLVACVLGLVLGLCFATKFSRCCPARGTLCTISERVETQPLLRLTLAVLTIGSLLTVAIINLPLMPFQVPELPVGNETGLLAASSKTRALCEPLPHLHTVFSRLNELTS

SEQ ID NO: 3859 - DNA, 6184 bp, Homosapiens
cacagaggaggccagggaagctctagaggcgttttttggccaagggagctgaggaactgcgtgtggagtcagcccagtctggatgcacaggaggatgctggcggcacagtgagtgaggcctggtgccagagctgtgcggaccccttgttggccatggagcagcaggcccagaggccctctccccagccctgcttgcctgcctcggagaggacagaggcctaggcccacgggggagggtgttggcagacagatgccctccaggccctggggcctccttaacggccccttaacgacacgcgtgccaagggtggaggatgccagccaaggggcgctacttcctcaacgagggcgaggagggccctgaccaagatgcgctctacgagaagtaccagctcaccagccagcatgggccgctgctgctcacgctcctgctggtggccgccactgcctgcgtggccctcatcatcattgccttcagccagggggacccctccagacaccaggccattctgggcatggcgttcctggtgctggcggtgtttgcggccctctctgtgctgatgtacgtcgagtgtctcctgcggcgctggctcagggccttggcgctgctcacctgggcctgcttggtggcgctgggctatgtgctggtgttcgacgcatggacaaaggcggcctgtgcgtgggagcaggtgcccttcttcctgttcattgtcttcgtggtgtacacactactgcccttcagcatgcggggcgctgtcgccgttggggccgtctccactgcctcccacctcctggtgctcggttctttgatgggaggcttcacgacacccagtgtccgggtggggctgcagctgctggccaacgcagtcatcttcctgtgtgggaacctgacaggcgccttccacaagcaccaaatgcaggatgcatcccgggacctcttcacctacactgtgaagtgcatccagatccgccggaagctgcgcatcgagaagcgccagcaggagaacctgctgctgtcagtgcttccggcccacatctccatgggcatgaagctggccatcatcgaacggctcaaggagcatggtgaccgtcgctgcatgcctgacaacaacttccacagcctctacgtcaagaggcaccagaatgtcagcatcctctatgcggacatcgtgggcttcacgcagctggccagcgactgttctcccaaggagctggtggtggtgctgaatgagctctttggcaagttcgaccagatcgccaaggccaacgagtgcatgcgaatcaagatcctcggcgactgctactactgtgtatcgggcctgcccgtgtcgctgcctacccacgcccggaactgcgtgaagatggggctggacatgtgccaggccatcaagcaggtgcgggaggccacgggcgtggacatcaacatgcgtgtgggcatacactcggggaatgtgctgtgcggggtcatcgggctgcgcaagtggcagtatgacgtgtggtcccacgacgtgtccctggccaaccggatggaggcagccggagtacccggccgggtgcacatcacggaggccacgctaaagcacctggacaaggcgtacgaggtggaggatgggcacgggcagcagcgggacccctacctcaaggagatgaacatccgcacctacctggtcatcgacccccggagccagcagccacccccgcccagccaacacctccccaggcccaagggggacgcggccctgaagatgcgggcgtcagtgcgcatgacccggtacctcgagtcctggggggcggcacggccctttgcacatctcaaccaccgtgagagcgtgagcagtggtgagacccacgtccccaacgggcggaggcctaagagcgttccccagcgccaccgccggaccccagacagaagcatgtcccccaaggggcggtcggaggatgactcgtacgatgacgagatgctgtcagccattgaggggctcagctccacgaggccctgctgctccaagtccgatgacttctacacctttgggtccatcttcctggagaagggctttgagcgcgagtaccgcctggcacccatcccccgggcccgccacgactttgcctgcgccagcctgatcttcgtctgcatcctgctcgtccatgtcctgctcatgcccaggacggcggcactgggtgtgtccttcgggctggtggcctgtgtactggggctggtgctgggcctgtgctttgccaccaagttctcgaggtgctgcccagctcgggggacgctctgcactatctctgagagggtggagacacagcccctgctgaggctgaccctggccgtcctgaccatcggcagcctgctcactgtggccatcatcaacctgcccctgatgcctttccaagttccagagctgcctgttggcaatgagacaggcctactggccgcgagcagcaagacaagagccctgtgtgagcccctcccgtactacacctgcagctgtgtcctgggcttcatcgcctgctcggtcttcctgaggatgagcctggagccaaaggttgtgctgctgacagtggccctggtggcctacctggtgctcttcaacctctccccatgctggcagtgggactgctgcggccaaggcctgggcaacctcaccaagcccaacggcaccaccagtggcacccctagctgttcctggaaggacctgaagaccatgaccaatttctacctggtcctgttctacatcaccctgcttacactctccagacagattgactattactgccgcttggactgcctatggaagaagaagttcaagaaggagcacgaggagtttgagaccatggagaacgtgaaccgccttcttctggagaacgtcctgccagcccacgtggctgcccactttatcggtgacaagttaaacgaggactggtaccatcagtcctatgactgcgtctgtgtcatgtttgcctccgtgccggacttcaaagtgttctacacagagtgcgatgtcaacaaagaagggctggagtgcctacgcctgctcaatgagatcattgccgacttcgacgagctcctactgaagcccaagttcagcggcgtggagaagatcaagaccatcggcagcacgtacatggcagctgcagggctcagcgtcgcctcagggcacgagaaccaggagctggagcggcagcatgcccacattggtgtcatggtggagttcagcatcgccctgatgagtaagctggacggcatcaacaggcactccttcaactccttccgcctccgcgtcggcataaaccatgggcctgtgattgctggagtgattggggcccgaaaacctcagtatgacatctggggaaacactgtcaatgtggccagccgaatggaaagcactggagaacttgggaaaatccaggttaccgaggagacctgcaccatcctccagggcctcgggtactcttgtgaatgccgtggcctgatcaacgtcaaaggcaaaggcgagctgaggacttactttgtctgtacggacactgccaagtttcaggggctggggctgaactgagggctcctgctggattccgaaaaggccgggaagccagtctccttccctgaagcaagcccaggagaagactctccgccccacgccaatcccaaaggcatgcagatggctgtgcatgttggcttctttggacctgcactggaggatttctcagacacatgcaccagattctggctcgaagcagccactgagccataatgcgcaggggaggccagaagctctgtgcctggtctgtaacagtttccaggccagctggagaatgttcactggttcggggctgactttgagatctttgttccctgaggtgccaggcaggcaactttagcacatgatgaaaacagacttccacctcagtggcctgtgggcacgcacaagtgaggtctgtttttctagacaccaagggggagtaagctgagctgtctagcacggattggagactccctctccctggtgggcctggcaatgacagcatttctcacagaggcattctggtaaatgaagctgaaaggggtgttttacatctgtaaacggtttcaaacaggtagagagaaaaacaccacaattaacactgttactttttgccttgtctggcatgtttgttttaaatgaatacattaatggggtttttatccttttgaatgacttttcagacactagacataaatctcttccctccagtgtatgctctgcctttttaaccactgacatgtaaggaggactactgtctagcatcagcttatggggtcagctggctgtggggatagagtcctgaggaatgtggtcacagcaagaaggcggggagcagcagagccttgcctttgaatgaggcagcttgtgaggcaagcattctggagagaggtgctttgaaagtaaggtgcggcctttcacctcttccttgattactcacacatctttgcgttctcccctgccgtccttcaactgtatcttacttttcttaccagaaaggaatggagtctgtttagagacaacttggacaacctgtgagtgcatctcttctttcctttagtcttcacagctaactctggagagcttcaaaactagaaggatctactccgcatgggtgcatgcagaggctcctggatctgggaagcccgccccctcacaaatgctgagccgttcttgctctgaaactgcgtgagtcaaggcaaatgcaaaaagccaggttttggggatgtgtcttactgtgcttcaacttcccaaggaattgaaagtcaacctaactgtaacaacagggtgagaaatgaccaaactgcccgtgactttttctgaatggacttcataaccggaagacttaaccggtggcctcatcaccagagcatcgccaggatttctaatgcactcagtttccctacatagcagggattcttagctaggtgtccccatgaaccccgtaaagttctacacaaagtcttgcatacaggagcctttacaagatgattatacagggttgcagattgggtgactgaccagacttgttggggtcctgggatgagttgccccgggctgcaaattaagagtacagctaagtgcgggggtggcggtggagggaacgaaaattgaacctgtctgcctgtgctgtgtcgtgtggctttatcagcccgaggaagggcaggtgtattctaatttgcacaaaggtgctgggtagactagtggcagctctcatgtgctgcacataagtggaatcagtatgaatagaagaacttgctgtataaaggaatttcatggcaacaatgctggtaagggcaattagcctcgcttaagttgccttttttacacaccaaaactttttacatgaagggctggtttcacatgaatactatactgaaatctgtgctctcaagatctagcagtgaccagggctgcccggcgggggctctcctggcaagtcaggaaggtttctgttgctaatataacatagaaacacattagtgcactgggcctctctgaggtcagcatatttgtactcttggaatatttgtttttttcttcagtaacaacagaaaccccagttgggagtttaacaaataactgactaccactcactcatgcatttttatttccaattaaagcaaagcactgtgctgtgctcagataataatagtttgtaagtaaaagtttttagttttcagtgttcaggttatagaatataactgaccataaaaattacctgcaggtattttctttttatgaacttgtttttaaattaccaagtaattactggtgtcattttgttttatgacagacacacgtatctaacaaacaaacaaacagtgaccttctccatgggtcaaggacttccttacaatttctcctgagttaacttttgtgaaaataatacctaaggttttctggcttattgaggaaatttcctaacaaacaaacaaacaaacaaacagaagagaagatcattaaccactgtatactttgtgtatataataggtcagtgtaaagaaatatgatttgaggtggtgcatgcaagtaactagggtttattctatataatgaatatttatagatctgtaacatttgtttcaaaatgctgtttcatttttataaagtaccagtgtttagctgctttttatacattaaattagcaatttgaaaaactc

SEQ ID NO: 3860 - protein, 1080 aa, Homosapiens; identical to SEQ ID NO: 577

SEQ ID NO: 3861 - DNA, 6316 bp, Homosapiens
gtcagttgataaacactgttgcctgaacacccgctgtgtgcagagacctagcagataccctggttggggcagtgctaaggattctgccttctgggagctcatttcctgagcagaattccctcttggtacctggcctggcacctggtgcacagaaggcatgagtgcacatctgctgaagagctgaggaactgcgtgtggagtcagcccagtctggatgcacaggaggatgctggcggcacagtgagtgaggcctggtgccagagctgtgcggaccccttgttggccatggagcagcaggcccagaggccctctccccagccctgcttgcctgcctcggagaggacagaggcctaggcccacgggggagggtgttggcagacagatgccctccaggccctggggcctccttaacggccccttaacgacacgcgtgccaagggtggaggatgccagccaaggggcgctacttcctcaacgagggcgaggagggccctgaccaagatgcgctctacgagaagtaccagctcaccagccagcatgggccgctgctgctcacgctcctgctggtggccgccactgcctgcgtggccctcatcatcattgccttcagccagggggacccctccagacaccaggccattctgggcatggcgttcctggtgctggcggtgtttgcggccctctctgtgctgatgtacgtcgagtgtctcctgcggcgctggctcagggccttggcgctgctcacctgggcctgcttggtggcgctgggctatgtgctggtgttcgacgcatggacaaaggcggcctgtgcgtgggagcaggtgcccttcttcctgttcattgtcttcgtggtgtacacactactgcccttcagcatgcggggcgctgtcgccgttggggccgtctccactgcctcccacctcctggtgctcggttctttgatgggaggcttcacgacacccagtgtccgggtggggctgcagctgctggccaacgcagtcatcttcctgtgtgggaacctgacaggcgccttccacaagcaccaaatgcaggatgcatcccgggacctcttcacctacactgtgaagtgcatccagatccgccggaagctgcgcatcgagaagcgccagcaggagaacctgctgctgtcagtgcttccggcccacatctccatgggcatgaagctggccatcatcgaacggctcaaggagcatggtgaccgtcgctgcatgcctgacaacaacttccacagcctctacgtcaagaggcaccagaatgtcagcatcctctatgcggacatcgtgggcttcacgcagctggccagcgactgttctcccaaggagctggtggtggtgctgaatgagctctttggcaagttcgaccagatcgccaaggccaacgagtgcatgcgaatcaagatcctcggcgactgctactactgtgtatcgggcctgcccgtgtcgctgcctacccacgcccggaactgcgtgaagatggggctggacatgtgccaggccatcaagcaggtgcgggaggccacgggcgtggacatcaacatgcgtgtgggcatacactcggggaatgtgctgtgcggggtcatcgggctgcgcaagtggcagtatgacgtgtggtcccacgacgtgtccctggccaaccggatggaggcagccggagtacccggccgggtgcacatcacggaggccacgctaaagcacctggacaaggcgtacgaggtggaggatgggcacgggcagcagcgggacccctacctcaaggagatgaacatccgcacctacctggtcatcgacccccggagccagcagccacccccgcccagccaacacctccccaggcccaagggggacgcggccctgaagatgcgggcgtcagtgcgcatgacccggtacctcgagtcctggggggcggcacggccctttgcacatctcaaccaccgtgagagcgtgagcagtggtgagacccacgtccccaacgggcggaggcctaagagcgttccccagcgccaccgccggaccccagacagaagcatgtcccccaaggggcggtcggaggatgactcgtacgatgacgagatgctgtcagccattgaggggctcagctccacgaggccctgctgctccaagtccgatgacttctacacctttgggtccatcttcctggagaagggctttgagcgcgagtaccgcctggcacccatcccccgggcccgccacgactttgcctgcgccagcctgatcttcgtctgcatcctgctcgtccatgtcctgctcatgcccaggacggcggcactgggtgtgtccttcgggctggtggcctgtgtactggggctggtgctgggcctgtgctttgccaccaagttctcgaggtgctgcccagctcgggggacgctctgcactatctctgagagggtggagacacagcccctgctgaggctgaccctggccgtcctgaccatcggcagcctgctcactgtggccatcatcaacctgcccctgatgcctttccaagttccagagctgcctgttggcaatgagacaggcctactggccgcgagcagcaagacaagagccctgtgtgagcccctcccgtactacacctgcagctgtgtcctgggcttcatcgcctgctcggtcttcctgaggatgagcctggagccaaaggttgtgctgctgacagtggccctggtggcctacctggtgctcttcaacctctccccatgctggcagtgggactgctgcggccaaggcctgggcaacctcaccaagcccaacggcaccaccagtggcacccctagctgttcctggaaggacctgaagaccatgaccaatttctacctggtcctgttctacatcaccctgcttacactctccagacagattgactattactgccgcttggactgcctatggaagaagaagttcaagaaggagcacgaggagtttgagaccatggagaacgtgaaccgccttcttctggagaacgtcctgccagcccacgtggctgcccactttatcggtgacaagttaaacgaggactggtaccatcagtcctatgactgcgtctgtgtcatgtttgcctccgtgccggacttcaaagtgttctacacagagtgcgatgtcaacaaagaagggctggagtgcctacgcctgctcaatgagatcattgccgacttcgacgagctcctactgaagcccaagttcagcggcgtggagaagatcaagaccatcggcagcacgtacatggcagctgcagggctcagcgtcgcctcagggcacgagaaccaggagctggagcggcagcatgcccacattggtgtcatggtggagttcagcatcgccctgatgagtaagctggacggcatcaacaggcactccttcaactccttccgcctccgcgtcggcataaaccatgggcctgtgattgctggagtgattggggcccgaaaacctcagtatgacatctggggaaacactgtcaatgtggccagccgaatggaaagcactggagaacttgggaaaatccaggttaccgaggagacctgcaccatcctccagggcctcgggtactcttgtgaatgccgtggcctgatcaacgtcaaaggcaaaggcgagctgaggacttactttgtctgtacggacactgccaagtttcaggggctggggctgaactgagggctcctgctggattccgaaaaggccgggaagccagtctccttccctgaagcaagcccaggagaagactctccgccccacgccaatcccaaaggcatgcagatggctgtgcatgttggcttctttggacctgcactggaggatttctcagacacatgcaccagattctggctcgaagcagccactgagccataatgcgcaggggaggccagaagctctgtgcctggtctgtaacagtttccaggccagctggagaatgttcactggttcggggctgactttgagatctttgttccctgaggtgccaggcaggcaactttagcacatgatgaaaacagacttccacctcagtggcctgtgggcacgcacaagtgaggtctgtttttctagacaccaagggggagtaagctgagctgtctagcacggattggagactccctctccctggtgggcctggcaatgacagcatttctcacagaggcattctggtaaatgaagctgaaaggggtgttttacatctgtaaacggtttcaaacaggtagagagaaaaacaccacaattaacactgttactttttgccttgtctggcatgtttgttttaaatgaatacattaatggggtttttatccttttgaatgacttttcagacactagacataaatctcttccctccagtgtatgctctgcctttttaaccactgacatgtaaggaggactactgtctagcatcagcttatggggtcagctggctgtggggatagagtcctgaggaatgtggtcacagcaagaaggcggggagcagcagagccttgcctttgaatgaggcagcttgtgaggcaagcattctggagagaggtgctttgaaagtaaggtgcggcctttcacctcttccttgattactcacacatctttgcgttctcccctgccgtccttcaactgtatcttacttttcttaccagaaaggaatggagtctgtttagagacaacttggacaacctgtgagtgcatctcttctttcctttagtcttcacagctaactctggagagcttcaaaactagaaggatctactccgcatgggtgcatgcagaggctcctggatctgggaagcccgccccctcacaaatgctgagccgttcttgctctgaaactgcgtgagtcaaggcaaatgcaaaaagccaggttttggggatgtgtcttactgtgcttcaacttcccaaggaattgaaagtcaacctaactgtaacaacagggtgagaaatgaccaaactgcccgtgactttttctgaatggacttcataaccggaagacttaaccggtggcctcatcaccagagcatcgccaggatttctaatgcactcagtttccctacatagcagggattcttagctaggtgtccccatgaaccccgtaaagttctacacaaagtcttgcatacaggagcctttacaagatgattatacagggttgcagattgggtgactgaccagacttgttggggtcctgggatgagttgccccgggctgcaaattaagagtacagctaagtgcgggggtggcggtggagggaacgaaaattgaacctgtctgcctgtgctgtgtcgtgtggctttatcagcccgaggaagggcaggtgtattctaatttgcacaaaggtgctgggtagactagtggcagctctcatgtgctgcacataagtggaatcagtatgaatagaagaacttgctgtataaaggaatttcatggcaacaatgctggtaagggcaattagcctcgcttaagttgccttttttacacaccaaaactttttacatgaagggctggtttcacatgaatactatactgaaatctgtgctctcaagatctagcagtgaccagggctgcccggcgggggctctcctggcaagtcaggaaggtttctgttgctaatataacatagaaacacattagtgcactgggcctctctgaggtcagcatatttgtactcttggaatatttgtttttttcttcagtaacaacagaaaccccagttgggagtttaacaaataactgactaccactcactcatgcatttttatttccaattaaagcaaagcactgtgctgtgctcagataataatagtttgtaagtaaaagtttttagttttcagtgttcaggttatagaatataactgaccataaaaattacctgcaggtattttctttttatgaacttgtttttaaattaccaagtaattactggtgtcattttgttttatgacagacacacgtatctaacaaacaaacaaacagtgaccttctccatgggtcaaggacttccttacaatttctcctgagttaacttttgtgaaaataatacctaaggttttctggcttattgaggaaatttcctaacaaacaaacaaacaaacaaacagaagagaagatcattaaccactgtatactttgtgtatataataggtcagtgtaaagaaatatgatttgaggtggtgcatgcaagtaactagggtttattctatataatgaatatttatagatctgtaacatttgtttcaaaatgctgtttcatttttataaagtaccagtgtttagctgctttttatacattaaattagcaatttgaaaaactc

SEQ ID NO: 3862 - protein, 1080 aa, Homosapiens; identical to SEQ ID NO: 577

SEQ ID NO: 3863 - DNA, 5744 bp, Homosapiens
tctcgggctccggccgggtctcgcgcgccgtcttctcgagaggggcatcgcgccgcccggcgcgcgccgcccccctgcctcgcggcgcggggtctcgcgggcaccggggcccggtcggacatgggcaagaagcacaagaagcacaagtcggacaaacacctctacgaggagtatgtagagaagcccttgaagctggtcctcaaagtaggagggaacgaagtcaccgaactctccacgggcagctcggggcacgactccagcctcttcgaagacaaaaacgatcatgacaaacacaaggacagaaagcggaaaaagagaaagaaaggagagaagcagattccaggggaagaaaaggggagaaaacggagaagagttaaggaggataaaaagaagcgagatcgagaccgggtggagaatgaggcagaaaaagatctccagtgtcacgcccctgtgagattagacttgcctcctgagaagcctctcacaagctctttagccaaacaagaagaagtagaacagacaccccttcaagaagctttgaatcaactgatgagacaattgcagagaaaagatccaagtgctttcttttcatttcctgtgactgattttattgctcctggctactccatgatcattaaacacccaatggattttagtaccatgaaagaaaagatcaagaacaatgactatcagtccatagaagaactaaaggataacttcaaactaatgtgtactaatgccatgatttacaataaaccagagaccatttattataaagctgcaaagaagctgttgcactcaggaatgaaaattcttagccaggaaagaattcagagcctgaagcagagcatagacttcatggctgacttgcagaaaactcgaaagcagaaagatggaacagacacctcacagagtggggaggacggaggctgctggcagagagagagagaggactctggagatgccgaagcacacgccttcaagagtcccagcaaagaaaataaaaagaaagacaaagatatgcttgaagataagtttaaaagcaataatttagagagagagcaggagcagcttgaccgcatcgtgaaggaatctggaggaaagctgaccaggcggcttgtgaacagtcagtgcgaatttgaaagaagaaaaccagatggaacaacgacgttgggacttctccatcctgtggatcccattgtaggagagccaggctactgccctgtgagactgggaatgacaactggaagacttcagtctggagtgaatactttgcaggggttcaaagaggataaaaggaacaaagtcactccagtgttatatttgaattatgggccctacagttcttatgcaccgcattatgactccacatttgcaaatatcagcaaggatgattctgatttaatctattcaacctatggggaagactctgatcttccaagtgatttcagcatccatgagtttttggccacgtgccaagattatccgtatgtcatggcagatagtttactggatgttttaacaaaaggagggcattccaggaccctacaagagatggagatgtcattgcctgaagatgaaggccatactaggacacttgacacagcaaaagaaatggagattacagaagtagagccaccagggcgtttggactccagtactcaagacaggctcatagcgctgaaagcagtaacaaattttggcgttccagttgaagtttttgactctgaagaagctgaaatattccagaagaaacttgatgagaccaccagattgctcagggaactccaggaagcccagaatgaacgtttgagcaccagaccccctccgaacatgatctgtctcttgggtccctcatacagagaaatgcatcttgctgaacaagtgaccaataatcttaaagaacttgcacagcaagtaactccaggtgatatcgtaagcacgtatggagttcgaaaagcaatggggatttccattccttcccccgtcatggaaaacaactttgtggatttgacagaagacactgaagaacctaaaaagacggatgttgctgagtgtggacctggtggaagttgaggctgcctggtatttgattatatattatgtacatactttttcattcttaacttagaaatgcttttcagaagatattaaatatttgtaaattgtgtttttaattaaactttggaacagcgaatttggatgttccagaggttggacttgtattaggtaataaagctggacctgggactcgtgaggaaggaatgtgcttggggctgttgccatacctgtgcagcattctttcaaaatagtgccttccaatgcttcttccttatgtcccacagacaggatcatcactaagaagcgttcttaaaacggccccatccagtgagattttccgttatacgaacatacttgaaataattttagaatttactactgtggttctgcccctgcatacccagtgggaatgatgcccttgtatgggtaattaggcacctcccacccacccctgacaaaagcacactgggagttttatagcactgtcacatggctagtgttcttttttggttttttccgttttttaaagaaagaggagttacttagtactatagcaaagtaataagccaaataagataaactaagtcatccttgaatagatcagggaattaccagattaccaaaaggtgacatttctactttacttactgtttatctgaaatacaaaggtcaagtacccaaggagttgaactctaagtaggagaccacaagattcatggcccccttttatcagcaagctgagataaatggtgattttgctgaatcggtatagaacctgttatacacaagggaaaaaaatcaggatggagatagatagatagatagccttgttcagtgaacaaattaagtttgaaggcccttatacaatccttctataaatcacccaggcaggaagccatttgatttctattattttcctgactttgaaaattaattagtatttaggaagaacaaatagggtaaaggaaaattaattccctcaaaagacttaaaatcttatgctaaaagagtcaaattttcaagttgtttgagtctacttttaatctctagtgagttcatgaggaccacgaaaataaaataccttcagatatttgagtttttcaaattgctaatttaatgtataaaaagcagctaaacactggtactttataaaaatgaaacagcattttgaaacaaatgttacagatctataaatattcattatatagaataaaccctagttacttgcatgcaccacctcaaatcatatttctttacactgacctattatatacacaaagtatacagtggttaatgatcttctcttctgtttgtttgtttgtttgtttgttaggaaatttcctcaataagccagaaaaccttaggtattattttcacaaaagttaactcaggagaaattgtaaggaagtccttgacccatggagaaggtcactgtttgtttgtttgttagatacgtgtgtctgtcataaaacaaaatgacaccagtaattacttggtaatttaaaaacaagttcataaaaagaaaatacctgcaggtaatttttatggtcagttatattctataacctgaacactgaaaactaaaaacttttacttacaaactattattatctgagcacagcacagtgctttgctttaattggaaataaaaatgcatgagtgagtggtagtcagttatttgttaaactcccaactggggtttctgttgttactgaagaaaaaaacaaatattccaagagtacaaatatgctgacctcagagaggcccagtgcactaatgtgtttctatgttatattagcaacagaaaccttcctgacttgccaggagagcccccgccgggcagccctggtcactgctagatcttgagagcacagatttcagtatagtattcatgtgaaaccagcccttcatgtaaaaagttttggtgtgtaaaaaaggcaacttaagcgaggctaattgcccttaccagcattgttgccatgaaattcctttatacagcaagttcttctattcatactgattccacttatgtgcagcacatgagagctgccactagtctacccagcacctttgtgcaaattagaatacacctgcccttcctcgggctgataaagccacacgacacagcacaggcagacaggttcaattttcgttccctccaccgccacccccgcacttagctgtactcttaatttgcagcccggggcaactcatcccaggaccccaacaagtctggtcagtcacccaatctgcaaccctgtataatcatcttgtaaaggctcctgtatgcaagactttgtgtagaactttacggggttcatggggacacctagctaagaatccctgctatgtagggaaactgagtgcattagaaatcctggcgatgctctggtgatgaggccaccggttaagtcttccggttatgaagtccattcagaaaaagtcacgggcagtttggtcatttctcaccctgttgttacagttaggttgactttcaattccttgggaagttgaagcacagtaagacacatccccaaaacctggctttttgcatttgccttgactcacgcagtttcagagcaagaacggctcagcatttgtgagggggcgggcttcccagatccaggagcctctgcatgcacccatgcggagtagatccttctagttttgaagctctccagagttagctgtgaagactaaaggaaagaagagatgcactcacaggttgtccaagttgtctctaaacagactccattcctttctggtaagaaaagtaagatacagttgaaggacggcaggggagaacgcaaagatgtgtgagtaatcaaggaagaggtgaaaggccgcaccttactttcaaagcacctctctccagaatgcttgcctcacaagctgcctcattcaaaggcaaggctctgctgctccccgccttcttgctgtgaccacattcctcaggactctatccccacagccagctgaccccataagctgatgctagacagtagtcctccttacatgtcagtggttaaaaaggcagagcatacactggagggaagagatttatgtctagtgtctgaaaagtcattcaaaaggataaaaaccccattaatgtattcatttaaaacaaacatgccagacaaggcaaaaagtaacagtgttaattgtggtgtttttctctctacctgtttgaaaccgtttacagatgtaaaacacccctttcagcttcatttaccagaatgcctctgtgagaaatgctgtcattgccaggcccaccagggagagggagtctccaatccgtgctagacagctcagcttactcccccttggtgtctagaaaaacagacctcacttgtgcgtgcccacaggccactgaggtggaagtctgttttcatcatgtgctaaagttgcctgcctggcacctcagggaacaaagatctcaaagtcagccccgaaccagtgaacattctccagctggcctggaaactgttacagaccaggcacagagcttctggcctcccctgcgcattatggctcagtggctgcttcgagccagaatctggtgcatgtgtctgagaaatcctccagtgcaggtccaaagaagccaacatgcacagccatctgcatgcctttgggattggcgtggggcggagagtcttctcctgggcttgcttcagggaaggaga

SEQ ID NO: 3864 - protein, 651 aa, Homosapiens; identical to SEQ ID NO: 579

SEQ ID NO: 3865 - DNA, 670 bp, Homosapiens
caagttgtctctaaacagactccattcctttcttactttcaaagcacctctctccagaatgcttgcctcacaagctgcctcattcaaaggcaaggctctgctgctccccgccttcttgctgtgaccacattcctcaggactctatccccacagccagctgaccccataagctgatgctagacagtagtcctccttacatgtcagtggttaaaaaggcagagcatacacagaatgcctctgtgagaaatgctgtcattgccaggcccaccagggagagggagtctccaatccgtgctagacagctcagcttactcccccttggtgtctagaaaaacagacctcacttgtgcgtgcccacaggccactgaggtggaagtctgttttcatcatgtgctaaagttgcctgcctggcacctcagggaacaaagatctcaaagtcagccccgaaccagtgaacattctccagctggcctggaaactgttacagaccaggcacagagcttctggcctcccctgcgcattatggctcagtggctgcttcgagccagaatctggtgcatgtgtctgagaaatcctccagtgcaggtccaaagaagccaacatgcacagccatctgcatgcctttgggattggcgtggggcggagagtcttctcctgggcttgcttcagg

SEQ ID NO: 3866 - protein, 51 aa, Homosapiens
MLDSSPPYMSVVKKAEHTQNASVRNAVIARPTRERESPIRARQLSLLPLGV

SEQ ID NO: 3867 - DNA, 2201 bp, Homosapiens
gccgcacggcctgggcctggcgcggggggcgggcaccggggcccggtcggacatgggcaagaagcacaagaagcacaagtcggacaaacacctctacgaggagtatgtagagaagcccttgaagctggtcctcaaagtaggagggaacgaagtcaccgaactctccacgggcagctcggggcacgactccagcctcttcgaagacaaaaacgatcatgacaaacacaaggacagaaagcggaaaaagagaaagaaaggagagaagcagattccaggggaagaaaaggggagaaaacggagaagagttaaggaggataaaaagaagcgagatcgagaccgggtggagaatgaggcagaaaaagatctccagtgtcacgcccctgtgagattagacttgcctcctgagaagcctctcacaagctctttagccaaacaagaagaagtagaacagacaccccttcaagaagctttgaatcaactgatgagacaattgcagagaaaagatccaagtgctttcttttcatttcctgtgactgattttattgctcctggctactccatgatcattaaacacccaatggattttagtaccatgaaagaaaagatcaagaacaatgactatcagtccatagaagaactaaaggataacttcaaactaatgtgtactaatgccatgatttacaataaaccagagaccatttattataaagctgcaaagaagctgttgcactcaggaatgaaaattcttagccaggaaagaattcagagcctgaagcagagcatagacttcatggctgacttgcagaaaactcgaaagcagaaagatggaacagacacctcacagagtggggaggacggaggctgctggcagagagagagagaggactctggagatgccgaagcacacgccttcaagagtcccagcaaagaaaataaaaagaaagacaaagatatgcttgaagataagtttaaaagcaataatttagagagagagcaggagcagcttgaccgcatcgtgaaggaatctggaggaaagctgaccaggcggcttgtgaacagtcagtgcgaatttgaaagaagaaaaccagatggaacaacgacgttgggacttctccatcctgtggatcccattgtaggagagccaggctactgccctgtgagactgggaatgacaactggaagacttcagtctggagtgaatactttgcaggggttcaaagaggataaaaggaacaaagtcactccagtgttatatttgaattatgggccctacagttcttatgcaccgcattatgactccacatttgcaaatatcagcaaggatgattctgatttaatctattcaacctatggggaagactctgatcttccaagtgatttcagcatccatgagtttttggccacgtgccaagattatccgtatgtcatggcagatagtttactggatgttttaacaaaaggagggcattccaggaccctacaagagatggagatgtcattgcctgaagatgaaggccatactaggacacttgacacagcaaaagaaatggagattacagaagtagagccaccagggcgtttggactccagtactcaagacaggctcatagcgctgaaagcagtaacaaattttggcgttccagttgaagtttttgactctgaagaagctgaaatattccagaagaaacttgatgagaccaccagattgctcagggaactccaggaagcccagaatgaacgtttgagcaccagaccccctccgaacatgatctgtctcttgggtccctcatacagagaaatgcatcttgctgaacaagtgaccaataatcttaaagaacttgcacagcaagtaactccaggtgatatcgtaagcacgtatggagttcgaaaagcaatggggatttccattccttcccccgtcatggaaaacaactttgtggatttgacagaagacactgaagaacctaaaaagacggatgttgctgagtgtggacctggtggaagttgaggctgcctggtatttgattatatattatgtacatactttttcattcttaacttagaaatgcttttcagaagatattaaatatttgtaaattgtgtttttaattaaactttggaacagcgaatttggatgttccagaggttggacttgtattaggtaataaagctggacctgggactcgtgaggaaggaatgtg

SEQ ID NO: 3868 - protein, 651 aa, Homosapiens; identical to SEQ ID NO: 579

SEQ ID NO: 3869 - DNA, 2269 bp, Homosapiens
tctcgggctccggccgggtctcgcgcgccgtcttctcgagaggggcatcgcgccgcccggcgcgcgccgcccccctgcctcgcggcgcggggtctcgcgggcaccggggcccggtcggacatgggcaagaagcacaagaagcacaagtcggacaaacacctctacgaggagtatgtagagaagcccttgaagctggtcctcaaagtaggagggaacgaagtcaccgaactctccacgggcagctcggggcacgactccagcctcttcgaagacaaaaacgatcatgacaaacacaaggacagaaagcggaaaaagagaaagaaaggagagaagcagattccaggggaagaaaaggggagaaaacggagaagagttaaggaggataaaaagaagcgagatcgagaccgggtggagaatgaggcagaaaaagatctccagtgtcacgcccctgtgagattagacttgcctcctgagaagcctctcacaagctctttagccaaacaagaagaagtagaacagacaccccttcaagaagctttgaatcaactgatgagacaattgcagagaaaagatccaagtgctttcttttcatttcctgtgactgattttattgctcctggctactccatgatcattaaacacccaatggattttagtaccatgaaagaaaagatcaagaacaatgactatcagtccatagaagaactaaaggataacttcaaactaatgtgtactaatgccatgatttacaataaaccagagaccatttattataaagctgcaaagaagctgttgcactcaggaatgaaaattcttagccaggaaagaattcagagcctgaagcagagcatagacttcatggctgacttgcagaaaactcgaaagcagaaagatggaacagacacctcacagagtggggaggacggaggctgctggcagagagagagagaggactctggagatgccgaagcacacgccttcaagagtcccagcaaagaaaataaaaagaaagacaaagatatgcttgaagataagtttaaaagcaataatttagagagagagcaggagcagcttgaccgcatcgtgaaggaatctggaggaaagctgaccaggcggcttgtgaacagtcagtgcgaatttgaaagaagaaaaccagatggaacaacgacgttgggacttctccatcctgtggatcccattgtaggagagccaggctactgccctgtgagactgggaatgacaactggaagacttcagtctggagtgaatactttgcaggggttcaaagaggataaaaggaacaaagtcactccagtgttatatttgaattatgggccctacagttcttatgcaccgcattatgactccacatttgcaaatatcagcaaggatgattctgatttaatctattcaacctatggggaagactctgatcttccaagtgatttcagcatccatgagtttttggccacgtgccaagattatccgtatgtcatggcagatagtttactggatgttttaacaaaaggagggcattccaggaccctacaagagatggagatgtcattgcctgaagatgaaggccatactaggacacttgacacagcaaaagaaatggagattacagaagtagagccaccagggcgtttggactccagtactcaagacaggctcatagcgctgaaagcagtaacaaattttggcgttccagttgaagtttttgactctgaagaagctgaaatattccagaagaaacttgatgagaccaccagattgctcagggaactccaggaagcccagaatgaacgtttgagcaccagaccccctccgaacatgatctgtctcttgggtccctcatacagagaaatgcatcttgctgaacaagtgaccaataatcttaaagaacttgcacagcaagtaactccaggtgatatcgtaagcacgtatggagttcgaaaagcaatggggatttccattccttcccccgtcatggaaaacaactttgtggatttgacagaagacactgaagaacctaaaaagacggatgttgctgagtgtggacctggtggaagttgaggctgcctggtatttgattatatattatgtacatactttttcattcttaacttagaaatgcttttcagaagatattaaatatttgtaaattgtgtttttaattaaactttggaacagcgaatttggatgttccagaggttggacttgtattaggtaataaagctggacctgggactcgtgaggaaggaatgtg

SEQ ID NO: 3870 - protein, 651 aa, Homosapiens; identical to SEQ ID NO: 579

SEQ ID NO: 3871 - DNA, 1496 bp, Homosapiens
gtttatatacaggataacttcaaactaatgtgtactaatgccatgatttacaataaaccagagaccatttattataaagctgcaaagaagctgttgcactcaggaatgaaaattcttagccaggaaagaattcagagcctgaagcagagcatagacttcatggctgacttgcagaaaactcgaaagcagaaagatggaacagacacctcacagagtggggaggacggaggctgctggcagagagagagagaggactctggagatgccgaagcacacgccttcaagagtcccagcaaagaaaataaaaagaaagacaaagatatgcttgaagataagtttaaaagcaataatttagagagagagcaggagcagcttgaccgcatcgtgaaggaatctggaggaaagctgaccaggcggcttgtgaacagtcagtgcgaatttgaaagaagaaaaccagatggaacaacgacgttgggacttctccatcctgtggatcccattgtaggagagccaggctactgccctgtgagactgggaatgacaactggaagacttcagtctggagtgaatactttgcaggggttcaaagaggataaaaggaacaaagtcactccagtgttatatttgaattatgggccctacagttcttatgcaccgcattatgactccacatttgcaaatatcagcaaggatgattctgatttaatctattcaacctatggggaagactctgatcttccaagtgatttcagcatccatgagtttttggccacgtgccaagattatccgtatgtcatggcagatagtttactggatgttttaacaaaaggagggcattccaggaccctacaagagatggagatgtcattgcctgaagatgaaggccatactaggacacttgacacagcaaaagaaatggagattacagaagtagagccaccagggcgtttggactccagtactcaagacaggctcatagcgctgaaagcagtaacaaattttggcgttccagttgaagtttttgactctgaagaagctgaaatattccagaagaaacttgatgagaccaccagattgctcagggaactccaggaagcccagaatgaacgtttgagcaccagaccccctccgaacatgatctgtctcttgggtccctcatacagagaaatgcatcttgctgaacaagtgaccaataatcttaaagaacttgcacagcaagtaactccaggtgatatcgtaagcacgtatggagttcgaaaagcaatggggatttccattccttcccccgtcatggaaaacaactttgtggatttgacagaagacactgaagaacctaaaaagacggatgttgctgagtgtggacctggtggaagttgaggctgcctggtatttgattatatattatgtacatactttttcattcttaacttagaaatgcttttcagaagatattaaatatttgtaaattgtgtttttaattaaactttggaacagcg

SEQ ID NO: 3872 - protein, 449 aa, Homosapiens
MCTNAMIYNKPETIYYKAAKKLLHSGMKILSQERIQSLKQSIDFMADLQKTRKQKDGTDTSQSGEDGGCWQREREDSGDAEAHAFKSPSKENKKKDKDMLEDKFKSNNLEREQEQLDRIVKESGGKLTRRLVNSQCEFERRKPDGTTTLGLLHPVDPIVGEPGYCPVRLGMTTGRLQSGVNTLQGFKEDKRNKVTPVLYLNYGPYSSYAPHYDSTFANISKDDSDLIYSTYGEDSDLPSDFSIHEFLATCQDYPYVMADSLLDVLTKGGHSRTLQEMEMSLPEDEGHTRTLDTAKEMEITEVEPPGRLDSSTQDRLIALKAVTNFGVPVEVFDSEEAEIFQKKLDETTRLLRELQEAQNERLSTRPPPNMICLLGPSYREMHLAEQVTNNLKELAQQVTPGDIVSTYGVRKAMGISIPSPVMENNFVDLTEDTEEPKKTDVAECGPGGS

SEQ ID NO: 3873 - DNA, 2183 bp, Homosapiens
gggtctcgcgggccccgctcccgccctccgctcgcctggcccggaccggaagcggcgccgcacggcctgggcctggcgcggggggcgggcaccggggcccggtcggacatgggcaagaagcacaagaagcacaagtcggacaaacacctctacgaggagtatgtagagaagcccttgaagctggtcctcaaagtaggagggaacgaagtcaccgaactctccacgggcagctcggggcacgactccagcctcttcgaagacaaaaacgatcatgacaaacacaaggacagaaagcggaaaaagagaaagaaaggagagaagcagattccaggggaagaaaaggggagaaaacggagaagagttaaggaggataaaaagaagcgagatcgagaccgggtggagaatgaggcagaaaaagatctccagtgtcacgcccctgtgagattagacttgcctcctgagaagcctctcacaagctctttagccaaacaagaagaagtagaacagacaccccttcaagaagctttgaatcaactgatgagacaattgcagagaaaagatccaagtgctttcttttcatttcctgtgactgattttattgctcctggctactccatgatcattaaacacccaatggattttagtaccatgaaagaaaagatcaagaacaatgactatcagtccatagaagaactaaaggataacttcaaactaatgtgtactaatgccatgatttacaataaaccagagaccatttattataaagctgcaaagaagctgttgcactcaggaatgaaaattcttagccaggaaagaattcagagcctgaagcagagcatagacttcatggctgacttgcagaaaactcgaaagcagaaagatggaacagacacctcacagagtggggaggacggaggctgctggcagagagagagagaggactctggagatgccgaagcacacgccttcaagagtcccagcaaagaaaataaaaagaaagacaaagatatgcttgaagataagtttaaaagcaataatttagagagagagcaggagcagcttgaccgcatcgtgaaggaatctggaggaaagctgaccaggcggcttgtgaacagtcagtgcgaatttgaaagaagaaaaccagatggaacaacgacgttgggacttctccatcctgtggatcccattgtaggagagccaggctactgccctgtgagactgggaatgacaactggaagacttcagtctggagtgaatactttgcaggggttcaaagaggataaaaggaacaaagtcactccagtgttatatttgaattatgggccctacagttcttatgcaccgcattatgactccacatttgcaaatatcagcaaggatgattctgatttaatctattcaacctatggggaagactctgatcttccaagtgatttcagcatccatgagtttttggccacgtgccaagattatccgtatgtcatggcagatagtttactggatgttttaacaaaaggagggcattccaggaccctacaagagatggagatgtcattgcctgaagatgaaggccatactaggacacttgacacagcaaaagaaatggagattacagaagtagagccaccagggcgtttggactccagtactcaagacaggctcatagcgctgaaagcagtaacaaattttggcgttccagttgaagtttttgactctgaagaagctgaaatattccagaagaaacttgatgagaccaccagattgctcagggaactccaggaagcccagaatgaacgtttgagcaccagaccccctccgaacatgatctgtctcttgggtccctcatacagagaaatgcatcttgctgaacaagtgaccaataatcttaaagaacttgcacagcaagtaactccaggtgatatcgtaagcacgtatggagttcgaaaagcaatggggatttccattccttcccccgtcatggaaaacaactttgtggatttgacagaagacactgaagaacctaaaaagacggatgttgctgagtgtggacctggtggaagttgaggctgcctggtatttgattatatattatgtacatactttttcattcttaacttagaaatgcttttcagaagatattaaatatttgtaaattgtgtttttaattaaactttggaacagcg

SEQ ID NO: 3874 - protein, 651 aa, Homosapiens; identical to SEQ ID NO: 579

SEQ ID NO: 3875 - DNA, 2195 bp, Homosapiens
tctcgggctccggccgggtctcgcgcgccgtcttctcgagaggggcatcgcgccgcccggcgcgcgccgcccccctgcctcgcggcgcggggtctcgcgggcaccggggcccggtcggacatgggcaagaagcacaagaagcacaagtcggacaaacacctctacgaggagtatgtagagaagcccttgaagctggtcctcaaagtaggagggaacgaagtcaccgaactctccacgggcagctcggggcacgactccagcctcttcgaagacaaaaacgatcatgacaaacacaaggacagaaagcggaaaaagagaaagaaaggagagaagcagattccaggggaagaaaaggggagaaaacggagaagagttaaggaggataaaaagaagcgagatcgagaccgggtggagaatgaggcagaaaaagatctccagtgtcacgcccctgtgagattagacttgcctcctgagaagcctctcacaagctctttagccaaacaagaagaagtagaacagacaccccttcaagaagctttgaatcaactgatgagacaattgcagagaaaagatccaagtgctttcttttcatttcctgtgactgattttattgctcctggctactccatgatcattaaacacccaatggattttagtaccatgaaagaaaagatcaagaacaatgactatcagtccatagaagaactaaaggataacttcaaactaatgtgtactaatgccatgatttacaataaaccagagaccatttattataaagctgcaaagaagctgttgcactcaggaatgaaaattcttagccaggaaagaattcagagcctgaagcagagcatagacttcatggctgacttgcagaaaactcgaaagcagaaagatggaacagacacctcacagagtggggaggacggaggctgctggcagagagagagagaggactctggagatgccgaagcacacgccttcaagagtcccagcaaagaaaataaaaagaaagacaaagatatgcttgaagataagtttaaaagcaataatttagagagagagcaggagcagcttgaccgcatcgtgaaggaatctggaggaaagctgaccaggcggcttgtgaacagtcagtgcgaatttgaaagaagaaaaccagatggaacaacgacgttgggacttctccatcctgtggatcccattgtaggagagccaggctactgccctgtgagactgggaatgacaactggaagacttcagtctggagtgaatactttgcaggggttcaaagaggataaaaggaacaaagtcactccagtgttatatttgaattatgggccctacagttcttatgcaccgcattatgactccacatttgcaaatatcagcaaggatgattctgatttaatctattcaacctatggggaagactctgatcttccaagtgatttcagcatccatgagtttttggccacgtgccaagattatccgtatgtcatggcagatagtttactggatgttttaacaaaaggagggcattccaggaccctacaagagatggagatgtcattgcctgaagatgaaggccatactaggacacttgacacagcaaaagaaatggagattacagaagtagagccaccagggcgtttggactccagtactcaagacaggctcatagcgctgaaagcagtaacaaattttggcgttccagttgaagtttttgactctgaagaagctgaaatattccagaagaaacttgatgagaccaccagattgctcagggaactccaggaagcccagaatgaacgtttgagcaccagaccccctccgaacatgatctgtctcttgggtccctcatacagagaaatgcatcttgctgaacaagtgaccaataatcttaaagaacttgcacagcaagtaactccaggtgatatcgtaagcacgtatggagttcgaaaagcaatggggatttccattccttcccccgtcatggaaaacaactttgtggatttgacagaagacactgaagaacctaaaaagacggatgttgctgagtgtggacctggtggaagttgaggctgcctggtatttgattatatattatgtacatactttttcattcttaacttagaaatgcttttcagaagatattaaatatttgtaaattgtgtttttaattaaactttggaacagcg

SEQ ID NO: 3876 - protein, 651 aa, Homosapiens; identical to SEQ ID NO: 579

SEQ ID NO: 3877 - DNA, 1382 bp, Homosapiens
gccgcccggcgcgcgccgcccccctgcctcgcggcgcggggtctcgcgggccccgctcccgccctccgctcgcctggcccggaccggaagcggcgccgcacggcctgggcctggcgcggggggcgggcaccggggcccggtcggacatgggcaagaagcacaagaagcacaagtcggacaaacacctctacgaggagtatgtagagaagcccttgaagctggtcctcaaagtaggagggaacgaagtcaccgaactctccacgggcagctcggggcacgactccagcctcttcgaagacaaaaacgatcatgacaaacacaaggacagaaagcggaaaaagagaaagaaaggagagaagcagattccaggggaagaaaaggggagaaaacggagaagagttaaggaggataaaaagaagcgagatcgagaccgggtggagaatgaggcagaaaaagatctccagtgtcacgcccctgtgagattagacttgcctcctgagaagcctctcacaagctctttagccaaacaagaagaagtagaacagacaccccttcaagaagctttgaatcaactgatgagacaattgcagagaaaagatccaagtgctttcttttcatttcctgtgactgattttattgctcctggctactccatgatcattaaacacccaatggattttagtaccatgaaagaaaagatcaagaacaatgactatcagtccatagaagaactaaagaactgcctgagactgggtaatttatgaagaaaagagctttgattaactcacagttccacaggctgtacaggacacatggctggagagacccaaggaaacttacaatcgtactggaacatgaaggggaagcaagcacgtcttcacatggcagcaggagagagtgaagggggaagtgctacacactttcttttttttttttagatggtttacatttttttaatttttttttttttaatttaagttctagggtacatgtgcacaacgtgcaggttggttacatatatattcatgtgccatgttggtgcgctgaacccattaactcatcatttacattaggtatatctcctaatgctacccctcccccatgcccccaccccacaacaggccccggtgtgtgatgttccccaccctgtgtccaggtgttctcattgttcaattcccacctatgagggagaacgtgcggtgtttggttttctgtccttgccatagtttgctcagaaacagcttcatccatgtccctacaaaggacatgaactcatcctttttatggctgcatagtattccatggtgtatatgtgccacattttcttaatccagtctatcatcgttggacatttgggttggttccaagtctttgctattgtg

SEQ ID NO: 3878 - protein, 205 aa, Homosapiens
MGKKHKKHKSDKHLYEEYVEKPLKLVLKVGGNEVTELSTGSSGHDSSLFEDKNDHDKHKDRKRKKRKKGEKQIPGEEKGRKRRRVKEDKKKRDRDRVENEAEKDLQCHAPVRLDLPPEKPLTSSLAKQEEVEQTPLQEALNQLMRQLQRKDPSAFFSFPVTDFIAPGYSMIIKHPMDFSTMKEKIKNNDYQSIEELKNCLRLGNL

SEQ ID NO: 3879 - DNA, 259 bp, Homosapiens
gacaaacacctctacgaggagccccgattttaatcgacgcgctttcctttcttttcttttctttttttaagagtatgtagagaagcccttgaagctggtcctcaaagtaggagggaacgaagtcaccgaactctccacgggcagctcggggcacgactccagcctcttcgaagacaaaaacgatcatgacaaacacaaggacagaaagcggaaaaagagaaagaaaggagagaagcagattccaggggaagaaaagggg

SEQ ID NO: 3880 - protein, 62 aa, Homosapiens
EYVEKPLKLVLKVGGNEVTELSTGSSGHDSSLFEDKNDHDKHKDRKRKKRKKGEKQIPGEEK

SEQ ID NO: 3881 - DNA, 478 bp, Homosapiens
ctgtaagcatctgtgaccccaggactcaagtcagctctgtctcactcactcaagagctgttgggctgttgggggagaagtctgggcacagcttaactggggcctctgcttctgggactctcacagggctgtgatcaggatgtcagccagggctgaggtctcatctgaatgttccactgaggaaggatccactttgaagctcacacagttgctggcaggattcaatccttcaaggctgttggactgatagcctcagttgtagccggatgtcaactggggcccagcctcaggtctttgtcacatgggcttctccagcatggcagctctacgagggtgaggagggggccggggtgcgggcggcgggccctcggcggctctgccgggcttccgctctttcccagtggctccggggcggcccggggcccttccttcccacggcaggcccaggccggcgaagggggcgcgtcctgccggaggcc

SEQ ID NO: 3882 - protein, 70 aa, Homosapiens
MSTGAQPQVFVTWASPAWQLYEGEEGAGVRAAGPRRLCRASALSQWLRGGPGPFLPTAGPGRRRGRVLPE

SEQ ID NO: 3883 - DNA, 425 bp, Homosapiens
tatgaaagagactgagcccctatgagtgagggtgatgtcaacacaacagcaggcacccttggtaaccaagtcagcttccatattgatcaggactcttttgattgcaagaaaccaaactcggatctttataaaagcaaaggtaattgactcagtcagaagcacatacagcacgagagttgtaggcatggctacacttaagccatccctttatctggctttcattagagcctcggccgcgcctcttttgtgggagagacttgagggagccgaggcagtttcccagccgctgtgatgttgctaaagattaaaaaggagctttgaagctgcaccagttctctctgtgccccctcggtacaggacctcagaaagacccaagccatctggcaaacctgacataaagacaaaataaagtgattgaaacagtc

SEQ ID NO: 3884 - protein, 85 aa, Homosapiens
MSTQQQAPLVTKSASILIRTLLIARNQTRIFIKAKVIDSVRSTYSTRVVGMATLKPSLYLAFIRASAAPLLWERLEGAEAVSQPL

SEQ ID NO: 3885 - DNA, 517 bp, Homosapiens
cccaccctcagactcacttgccggtgaccaagtctggctcacaacatcagacatttctttcctttaggaggatttagattttagaggtcctaattcagtctggactctggtttcatacaatagaatctggcagtggtaaacttaaccatatggggaatggatcagaagagtatgaagtaacccagcaaaaggctggcatcttgcaaaggtggatggagccaagactcttctgagatttcataagtggctttgctgcctgaaacaaagaatagccaaatgaagggatgagcagttttccagcaatgatttgtccaagtaaaatcatggtaccatccaacattgcgagacatctgcagggtgagagctacagcaacgcctctgacaaatggaatgctgaacttgagacatgatttatgcaactatttctcacctctttattccacattccaatcttaggataacatttaaaatcttaatgttgttttcaggaatagccaataaaataaatcggctctgc

SEQ ID NO: 3886 - protein, 41 aa, Homosapiens
MSSFPAMICPSKIMVPSNIARHLQGESYSNASDKWNAELET

SEQ ID NO: 3887 - DNA, 2586 bp, Homosapiens
gccaatgggcgcgcggggaggcgcgggccgcggcggcgggctgggggctcggcgctcccgggcgtcagtcgggccgcggcgacggcggcaggagcgcgtcccggcgccgcctcgggctccgctcggctcgggggctgcttcgggaggaggagagccaagggaggcgccaggcccgcgggccgggcgcatggcttagggacgctcccggccgccgcagccccagcatggggaaacttcactccaagccggccgccgtgtgcaagcgcagggagagcccggaaggtgacagcttcgccgtgagcgctgcctgggctcggaagggcatcgaggagtggatcgggagacagcgctgcccgggcggtgtctcgggaccccgacagctgcggttggcgggcaccataggccgaagcacccgggagctcgtgggcgacgtgttgagagacacgctcagcgaggaagaggaggacgactttcggctggaagtggccctgcctcctgagaagactgacgggctgggcagcggagatgagaagaagatggagagagtgagcgaaccctgcccaggctccaagaagcagctgaagtttgaagagctccagtgcgacgtgtccatggaggaggacagccggcaggagtggaccttcaccctgtatgactttgacaacaacggcaaggtcacccgagaggacatcaccagcttgctgcacaccatctatgaggtggtggactcctctgtcaaccactccccaacatccagcaagatgctgcgggtaaagctcaccgtggcccccgatggcagccagagcaagaggagcgtccttgtcaatcaggctgacctgcagagcgcaaggccccgagcagagaccaagcccactgaggacctgcggagctgggagaagaagcagcgagccccgctcaggttccagggtgacagccgcctggagcagtctggctgctaccaccattgcgtagatgagaacatcgagaggagaaaccactacttagatctcgccgggatagaaaactacacgtcccaatttgggcctggctccccttccgtggcccagaagtcagaactgcccccccgcacctccaatcccactcgatctcgctcccatgagccggaagccatccacatcccacaccgaaagccccaaggcgtggacccggcctccttccacttccttgacaccccaatcgccaaggtctcagagctccagcaacggctccggggcacccaggacgggagcaagcactttgtgaggtcccccaaggcccagggcaagagtgtgggtgtgggccacgtggccagaggggcaagaaacaagccccctctgggacccgccatccctgcggtgtccccctccgcccacctggctgccagcccggccctcctcccctccctagcccccctcgggcacaagaagcacaagcaccgagccaaggagagccagcagggctgccggggcctgcaggcaccactggcctcaggtggccctgtcctggggcgggagcacctgcgggagctgcccgccttggtggtgtatgagagccaggccgggcagccggtccagagacatgagcaccaccaccaccatgaacatcaccaccattaccaccacttctaccagacatagagcccctccccagggccccaccctgccatatgaaggaccccacccccgacaccacaaggcattattattctattaattattgttattatgatgattattgttattaataattattgttactccactaatatttagctagcctacatgtagaagatctatggaaacacagaactaaacttttatttatatgttgtggggactgcataactagcccaggaaatgactctggttttgagtggcctgtaatgggcagaggctccctcggggctcgggatctgcagcatctatgtggatcagcccacacccttcccagagccagggagcccttagcctcaactctgccccaccccagcctcttccaggagagcacccttacttggcccggcttccagagaccctcgaaatctccgagaagataaacagctgctacctcttagtattattctgattttattttgcccttaactgattgttatatgctacaagggatttcagtggactgcagagtgcgaacgtcttgctgttgtgtttttatgtcccaacctagaaaccttagctgtcttttctggagttgtctttcatgcttttccagtgggatcaagcccttttccccaagagtcccatctcttctgccatgcacgacatgaaaatccacttctcttccttctccttcttctctctctactttacagtgatacacacacgtatttaaggactatccctgagaccatccttctcattttggaaactgctagggagggaaccaaccacttaaacaagcgtggttttccaagatccaggcaattgtgtgctgttggttgtggtggaggatgtggcacatatatacgtacctacacggttctctaacagagctttctgtatctatagatagatgccatctgtccatttctatgtatctttctataaatatacactctcaggtatcttt

SEQ ID NO: 3888 - protein, 470 aa, Homosapiens; identical to SEQ ID NO: 581

SEQ ID NO: 3889 - DNA, 1828 bp, Homosapiens
ccaatgggcgcgcggggaggcgcgggccgcggcggcgggctgggggctcggcgctcccgggcgtcagtcgggccgcggcgacggcggcaggagcgcgtcccggcgccgcctcgggctccgctcggctcgggggctgcttcgggaggaggagagccaagggaggcgccaggcccgcgggccgggcgcatggcttagggacgctcccggccgccgcagccccagcatggggaaacttcactccaagccggccgccgtgtgcaagcgcagggagagcccggaaggtgacagcttcgccgtgagcgctgcctgggctcggaagggcatcgaggagtggatcgggagacagcgctgcccgggcggtgtctcgggaccccgacagctgcggttggcgggcaccataggccgaagcacccgggagctcgtgggcgacgtgttgagagacacgctcagcgaggaagaggaggacgactttcggctggaagtggccctgcctcctgagaagactgacgggctgggcagcggagatgagaagaagatggagagagtgagcgaaccctgcccaggctccaagaagcagctgaagtttgaagagctccagtgcgacgtgtccatggaggaggacagccggcaggagtggaccttcaccctgtatgactttgacaacaacggcaaggtcacccgagaggacatcaccagcttgctgcacaccatctatgaggtggtggactcctctgtcaaccactccccaacatccagcaagatgctgcgggtaaagctcaccgtggcccccgatggcagccagagcaagaggagcgtccttgtcaatcaggctgacctgcagagcgcaaggccccgagcagagaccaagcccactgaggacctgcggagctgggagaagaagcagcgagccccgctcaggttccagggtgacagccgcctggagcagtctggctgctaccaccattgcgtagatgagaacatcgagaggagaaaccactacttagatctcgccgggatagaaaactacacgtcccaatttgggcctggctccccttccgtggcccagaagtcagaactgcccccccgcacctccaatcccactcgatctcgctcccatgagccggaagccatccacatcccacaccgaaagccccaaggcgtggacccggcctccttccacttccttgacaccccaatcgccaaggtctcagagctccagcaacggctccggggcacccaggacgggagcaagcactttgtgaggtcccccaaggcccagggcaagagtgtgggtgtgggccacgtggccagaggggcaagaaacaagccccctctgggacccgccatccctgcggtgtccccctccgcccacctggctgccagcccggccctcctcccctccctagcccccctcgggcacaagaagcacaagcaccgagccaaggagagccagcagggctgccggggcctgcaggcaccactggcctcaggtggccctgtcctggggcgggagcacctgcgggagctgcccgccttggtggtgtatgagagccaggccgggcagccggtccagagacatgagcaccaccaccaccatgaacatcaccaccattaccaccacttctaccagacatagagcccctccccagggccccaccctgccatatgaaggaccccacccccgacaccacaaggcattattattctattaattattgttattatgatgattattgttattaataattattgttactccactaatatttagctagcctacatgtagaagatctatggaaacacagaactaaacttttatttatatgtt

SEQ ID NO: 3890 - protein, 470 aa, Homosapiens; identical to SEQ ID NO: 581

SEQ ID NO: 3891 - DNA, 2071 bp, Homosapiens
ccaatgggcgcgcggggaggcgcgggccgcggcggcgggctgggggctcggcgctcccgggcgtcagtcgggccgcggcgacggcggcaggagcgcgtcccggcgccgcctcgggctccgctcggctcgggggctgcttcgggaggaggagagccaagggaggcgccaggcccgcgggccgggcgcatggcttagggacgctcccggccgccgcagccccagcatggggaaacttcactccaagccggccgccgtgtgcaagcgcagggagagcccggaaggtgacagcttcgccgtgagcgctgcctgggctcggaagggcatcgaggagtggatcgggagacagcgctgcccgggcggtgtctcgggaccccgacagctgcggttggcgggcaccataggccgaagcacccgggagctcgtgggcgacgtgttgagagacacgctcagcgaggaagaggaggacgactttcggctggaagtggccctgcctcctgagaagactgacgggctgggcagcggagatgagaagaagatggagagagtgagcgaaccctgcccaggctccaagaagcagctgaagtttgaagagctccagtgcgacgtgtccatggaggaggacagccggcaggagtggaccttcaccctgtatgactttgacaacaacggcaaggtcacccgagaggacatcaccagcttgctgcacaccatctatgaggtggtggactcctctgtcaaccactccccaacatccagcaagatgctgcgggtaaagctcaccgtggcccccgatggcagccagagcaagaggagcgtccttgtcaatcaggctgacctgcagagcgcaaggccccgagcagagaccaagcccactgaggacctgcggagctgggagaagaagcagcgagccccgctcaggttccagggtgacagccgcctggagcagtctggctgctaccaccattgcgtagatgagaacatcgagaggagaaaccactacttagatctcgccgggatagaaaactacacgtcccaatttgggcctggctccccttccgtggcccagaagtcagaactgcccccccgcacctccaatcccactcgatctcgctcccatgagccggaagccatccacatcccacaccgaaagccccaaggcgtggacccggcctccttccacttccttgacaccccaatcgccaaggtctcagagctccagcaacggctccggggcacccaggacgggagcaagcactttgtgaggtcccccaaggcccagggcaagagtgtgggtgtgggccacgtggccagaggggcaagaaacaagccccctctgggacccgccatccctgcggtgtccccctccgcccacctggctgccagcccggccctcctcccctccctagcccccctcgggcacaagaagcacaagcaccgagccaaggagagccagcagggctgccggggcctgcaggcaccactggcctcaggtggccctgtcctggggcgggagcacctgcgggagctgcccgccttggtggtgtatgagagccaggccgggcagccggtccagagacatgagcaccaccaccaccatgaacatcaccaccattaccaccacttctaccagacatagagcccctccccagggccccaccctgccatatgaaggaccccacccccgacaccacaaggcattattattctattaattattgttattatgatgattattgttattaataattattgttactccactaatatttagctagcctacatgtagaagatctatggaaacacagaactaaacttttatttatatgttgtggggactgcataactagcccaggaaatgactctggttttgagtggcctgtaatgggcagaggctccctcggggctcgggatctgcagcatctatgtggatcagcccacacccttcccagagccagggagcccttagcctcaactctgccccaccccagcctcttccaggagagcacccttacttggcccggcttccagagaccctcgaaatctccgagaagataaacagctgctacctctt

SEQ ID NO: 3892 - protein, 470 aa, Homosapiens; identical to SEQ ID NO: 581

SEQ ID NO: 3893 - DNA, 508 bp, Homosapiens
attccacctgaaatcacctggaggatgcctggagtgctgttccacaccctgggctccccctgaagttctgactccttatccctacctctgcagacacactggctgggccatctggggccaaggttggtgaaaacccaggcgtctgggtccccagcagcaagaacaactcccaaggagacagaggccggccccctgcataacaactttgatggctgcggcccaccctccaaccacctgacacatgtcatgccaacggctctgagcctcacatcttcaaaaactggatgccaaggagacccaccaaaaacatgcgggtaacatttgttatggctttgaagataaaagtcaattgaagtaagccctcgctgtatttcaagttttccctctagcatggagcaagctgcctggcagtttagaaaaaaaagaaaagaaaaagaaaaaggagggactgcaaataaatgtcattctgcaggaatactttgtaaaaataaacaggctgaaaaaaccc

SEQ ID NO: 3894 - protein, 38 aa, Homosapiens
MEQAAWQFRKKRKEKEKGGTANKCHSAGILCKNKQAEK

SEQ ID NO: 3895 - DNA, 446 bp, Homosapiens
gttatggtagggaaaaatgctagcctgggagctgggtggtctgcctcagtttcctcatctgtacaaaaagaggaagcatggcaagagggtatctccaaagactttactgctacaatagagcatgactccacaggctcaggagagggccaattcagccaggccccaggctccgttcctcctctgctgtcttcaggccacccagaagggccactgcccacttgcaaacctgggcaacaaagtgagactccatctcaacaacaacaacaacaaaaaaaaggcttaatgctaatggccacaaactcataatggcagtaaaggagcaaacggcattgccaggtggtgtggggcccagaccatgcccccacatggcctgaggcttgggtcctggctctgtcacctacaggttgtgtgatgctgggcaaactaataaacttctttgtacctta

SEQ ID NO: 3896 - protein, 100 aa, Homosapiens
MVGKNASLGAGWSASVSSSVQKEEAWQEGISKDFTATIEHDSTGSGEGQFSQAPGSVPPLLSSGHPEGPLPTCKPGQQSETPSQQQQQQKKGLMLMATNS

SEQ ID NO: 3897 - DNA, 2469 bp, Homosapiens
actattaaagcctctccggtatctgacacaagtcagaatttccactgttccagctgagcttttatgaggagcagacttgagagaaactgccaagattttctggagtacacagggcacacggccagctgaacacccgcttcccccactcgctgctgctgggaagagagcaatggactccgaataccttccagccgaaagtcgtcctcctcttcctcgctgagcgtgtctctcaacacgtcgcccacgagctcctacaagaagacagagcagaggcattgagcaggggttgggggagcccagtgctgggacgttaaaagcagtgccatgaggaccctgggctgattcttctgattggaattcaggtcaactgaggcagatcctattgcacctgaaaagttaagtgccaaggtgggtccctcctgcccttaacataaacccacacgcatcagcacaacattcaggccaccacaggctatggctccactgggtcttccatcatgcctcccacatttcaccaacacacatgccttccggaaaccagcctgattccttgcacacaccctgcctgttccccaccagtgagttaaggatatctgggatctcatcccaaccaacctgaccaggagatgtcaagttagcgaggggagtgttgctggtccacaggctgggaaatttctaggatgtcaacaaaggccccatctgtctgacccaccctagcaggataactccaaatatggaagaagctagaccataccttgtcaaactgtcttctgtatttattggtattctgccagaagagttctatgatcaaagaagattcttttaaacaaagttaaacaagatctcttacagcaggacttatcaggacttttcctatggttctaaacactgaatctccaagtgctggcatattttgcattctccaaacttatttagaccatggagcttcgtttttcaaaagtatcacatgatacgcgtgtcccaagaaacccactttaggaaatactcctgttatgggaggacagacaagggtttgggggatgatgatgctatggtagcggttctcaaaacacaaaatgacaagcaataaaaaagcccaaactcagcagctgtcaccaacttctctttgtgaaaataaaagagaaaaaaaacaaaaacaaaaacaaaacccaaccctctccttaggggaaaaaaaattctacacctcagatgatgcttaaaaaaaaaccagtcctcttcttgatgaacaaaagaaaaaacacggctttgtattgctgatctcatcaactggacacagctggaggtaagcctcttgcttttttttgttttttgttttaaagacaaacagctaacattttgtggctgttctctttcttctttcaaatctttctagggcattacacactctttcttaaaagctgttaaaatgtggccattcagactccggtgtcccatttacttcaaaaccaggctactttattcctcgagtcaggatggcttcctctcctcctccaccaattattataatcatcgaacatatcctgggcttgtaaactggctgtttgtgttaacagagcccgagttgacaggggagctgggagacgatgacaggaaagggatgcacacaggtggcatcattagatggctgggacgccccagcagccaattgaagcccatctttcatgcagaagagagacgggtgccaccgccccctgaaaggctggtaggcagagcttccccgagggaacaggcaacagtcttcaagagaatctgcgcacctcttcatgctgaggtcttctgcagagcggggctctgcgcctgccaccctgactgcactgcagccgggtgacagcatcaatgagacgtctgagtactcgtgtctttttactggcacacttggaagagtttaaagactccagacatcgccaccaacaaggcagccgtgtgggaccctatgacaatgaccgcatgtgctcaaggcaccccagtcaccacctaatgacagcttcagcactccctgctcggagaaccaagctctctgacacactcagaaagcagagttctggcaagttctggcataggcctctcaccactcaacagtaccctgctctggagaacactggaaagctccccggagccatggttcatggacgcactgtactgtgccaatgctcaactttgcaaaaattcatctccccagccaggcgcagtggctcacgcctgtaatcctagcacttcgggaggccgaggcaggtggatcacgaggtcaggcaacctggccaacataatgaaaccccatctctgctaaaaatacaaaaaattagccaggcgtagtggcaggtgactgtaatcccaactacttggggggctgaggcagaagaatcgcttgaaactgggaggtggaggctgtggtgagctgagattgcgccactgcactccagcccaggtgacagtgtgagactctgtctc

SEQ ID NO: 3898 - protein, 140 aa, Homosapiens
MWPFRLRCPIYFKTRLLYSSSQDGFLSSSTNYYNHRTYPGLVNWLFVLTEPELTGELGDDDRKGMHTGGIIRWLGRPSSQLKPIFHAEERRVPPPPERLVGRASPREQATVFKRICAPLHAEVFCRAGLCACHPDCTAAG

SEQ ID NO: 3899 - DNA, 1742 bp, Homosapiens
ttcctttgtctttgaagacccacagaccaccaggcacccctgcaggcatccctccccaggccaaacctcccctgcccgggctctggctgccctcctgggccagttctgtcttggccaaagtgctccctgtccactcaaggtctggggagggcagaggacaggtggccgccccttggcctggcctctaggcccaggcttccactacccagtcagtgttgccacagataggggaccagccccgcccatctctctgcatccaggagctccagtgcgacgtgtccatggaggaggacagccggcaggagtggaccttcaccctgtatgactttgacaacaacggcaaggtcacccgagaggacatcaccagcttgctgcacaccatctatgaggtggtggactcctctgtcaaccactccccaacatccagcaagatgctgcgggtaaagctcaccgtggcccccgatggcagccagagcaagaggagcgtccttgtcaatcaggctgacctgcagagcgcaaggccccgagcagagaccaagcccactgaggacctgcggagctgggagaagaagcagcgagccccgctcaggttccagggtgacagccgcctggagcagtctggctgctaccaccattgcgtagatgagaacatcgagaggagaaaccactacttagatctcgccgggatagaaaactacacgtcccaatttgggcctggctccccttccgtggcccagaagtcagaactgcccccccgcacctccaatcccactcgatctcgctcccatgagccggaagccatccacatcccacaccgaaagccccaaggcgtggacccggcctccttccacttccttgacaccccaatcgccaaggtctcagagctccagcaacggctccggggcacccaggacgggagcaagcactttgtgaggtcccccaaggcccagggcaagagtgtgggtgtgggccacgtggccagaggggcaagaaacaagccccctctgggacccgccatccctgcggtgtccccctccgcccacctggctgccagcccggccctcctcccctccctagcccccctcgggcacaagaagcacaagcaccgagccaaggagagccagcagggctgccggggcctgcaggcaccactggcctcaggtggccctgtcctggggcgggagcacctgcgggagctgcccgccttggtggtgtatgagagccaggccgggcagccggtccagagacatgagcaccaccaccaccatgaacatcaccaccattaccaccacttctaccagacatagagcccctccccagggccccaccctgccatatgaaggaccccacccccgacaccacaaggcattattattctattaattattgttattatgatgattattgttattaataattattgttactccactaatatttagctagcctacatgtagaagatctatggaaacacagaactaaacttttatttatatgttgtggggactgcataactagcccaggaaatgactctggttttgagtggcctgtaatgggcagaggctccctcggggctcgggatctgcagcatctatgtggatcagcccacacccttcccagagccagggagcccttagcctcaactctgccccaccccagcctcttccaggagagcacccttacttggcccggcttccagagaccctcgaaatctccgagaagataaacagctgctacctctt

SEQ ID NO: 3900 - protein, 341 aa, Homosapiens
MEEDSRQEWTFTLYDFDNNGKVTREDITSLLHTIYEVVDSSVNHSPTSSKMLRVKLTVAPDGSQSKRSVLVNQADLQSARPRAETKPTEDLRSWEKKQRAPLRFQGDSRLEQSGCYHHCVDENIERRNHYLDLAGIENYTSQFGPGSPSVAQKSELPPRTSNPTRSRSHEPEAIHIPHRKPQGVDPASFHFLDTPIAKVSELQQRLRGTQDGSKHFVRSPKAQGKSVGVGHVARGARNKPPLGPAIPAVSPSAHLAASPALLPSLAPLGHKKHKHRAKESQQGCRGLQAPLASGGPVLGREHLRELPALVVYESQAGQPVQRHEHHHHHEHHHHYHHFYQT

SEQ ID NO: 3901 - DNA, 2256 bp, Homosapiens
ttcctttgtctttgaagacccacagaccaccaggcacccctgcaggcatccctccccaggccaaacctcccctgcccgggctctggctgccctcctgggccagttctgtcttggccaaagtgctccctgtccactcaaggtctggggagggcagaggacaggtggccgccccttggcctggcctctaggcccaggcttccactacccagtcagtgttgccacagataggggaccagccccgcccatctctctgcatccaggagctccagtgcgacgtgtccatggaggaggacagccggcaggagtggaccttcaccctgtatgactttgacaacaacggcaaggtcacccgagaggacatcaccagcttgctgcacaccatctatgaggtggtggactcctctgtcaaccactccccaacatccagcaagatgctgcgggtaaagctcaccgtggcccccgatggcagccagagcaagaggagcgtccttgtcaatcaggctgacctgcagagcgcaaggccccgagcagagaccaagcccactgaggacctgcggagctgggagaagaagcagcgagccccgctcaggttccagggtgacagccgcctggagcagtctggctgctaccaccattgcgtagatgagaacatcgagaggagaaaccactacttagatctcgccgggatagaaaactacacgtcccaatttgggcctggctccccttccgtggcccagaagtcagaactgcccccccgcacctccaatcccactcgatctcgctcccatgagccggaagccatccacatcccacaccgaaagccccaaggcgtggacccggcctccttccacttccttgacaccccaatcgccaaggtctcagagctccagcaacggctccggggcacccaggacgggagcaagcactttgtgaggtcccccaaggcccagggcaagagtgtgggtgtgggccacgtggccagaggggcaagaaacaagccccctctgggacccgccatccctgcggtgtccccctccgcccacctggctgccagcccggccctcctcccctccctagcccccctcgggcacaagaagcacaagcaccgagccaaggagagccagcagggctgccggggcctgcaggcaccactggcctcaggtggccctgtcctggggcgggagcacctgcgggagctgcccgccttggtggtgtatgagagccaggccgggcagccggtccagagacatgagcaccaccaccaccatgaacatcaccaccattaccaccacttctaccagacatagagcccctccccagggccccaccctgccatatgaaggaccccacccccgacaccacaaggcattattattctattaattattgttattatgatgattattgttattaataattattgttactccactaatatttagctagcctacatgtagaagatctatggaaacacagaactaaacttttatttatatgttgtggggactgcataactagcccaggaaatgactctggttttgagtggcctgtaatgggcagaggctccctcggggctcgggatctgcagcatctatgtggatcagcccacacccttcccagagccagggagcccttagcctcaactctgccccaccccagcctcttccaggagagcacccttacttggcccggcttccagagaccctcgaaatctccgagaagataaacagctgctacctcttagtattattctgattttattttgcccttaactgattgttatatgctacaagggatttcagtggactgcagagtgcgaacgtcttgctgttgtgtttttatgtcccaacctagaaaccttagctgtcttttctggagttgtctttcatgcttttccagtgggatcaagcccttttccccaagagtcccatctcttctgccatgcacgacatgaaaatccacttctcttccttctccttcttctctctctactttacagtgatacacacacgtatttaaggactatccctgagaccatccttctcattttggaaactgctagggagggaaccaaccacttaaacaagcgtggttttccaagatccaggcaattgtgtgctgttggttgtggtggaggatgtggcacatatatacgtacctacacggttctctaacagagctttctgtatctatagatagatgccatctgtccatttctatgtatctttctataaatatacactctcaggtatcttt

SEQ ID NO: 3902 - protein, 341 aa, Homosapiens; identical to SEQ ID NO: 3900

SEQ ID NO: 3903 - DNA, 2130 bp, Homosapiens
acgtgaccccatctgggatgtcatgattggtccagctatgggtaccagatcgaagcccagccaagcagaatcctgccttgggctttacactaacggaaggtcctttttcttatggttaggggacccagaaggccagcagccagggttccctgacaaaagcatgtagttgagtacaagttatcaatccgagggacaagagggagggacaagaaccagtctcagctgcattcacatcctggaccctgtcatctcaaagccagttccctccctgccttccaacttggtttcattcactttggattgagttgcgttctcactgaacagaaacccacaacccaaaacaagggcagcccatggccgtgattaagctctgcaccagtggcgaagggatcgagtgggagaccagaattccagctccgccctctgtgcggcctcaagggagttatgaacttctgagccttagacatgcttcctgagctgccaccaagctgcctcatggggctgtcctaaggattaatgtattaatccaatcccaggcacatcagtcattaataaaattaagaatacggtgacaactaagcccactacctttggaagtaactccttactaactacattaaacccaaactcgaggctctggaaaagagaatgccagctgggagacaaaacggcagaaaggaaggtttctccaggctctggccagacaaaatccttctctgcagaggatgctgctccagggtcccaactctggccacagtccccttttcccaccaagtttctgtaccccagcagttctctccaaaatccatcagaccccaaaacccgagaatggacctctgatgaaagcatctgagagccgtccagccccaaaaggagacaagcagggtcacatctgggttccagaagcatccagggaagcaaaccactgatttatacacaccagaaaagatacctgagagtgtatatttatagaaagatacatagaaatggacagatggcatctatctatagatacagaaagctctgttagagaaccgtgtaggtacgtatatatgtgccacatcctccaccacaaccaacagcacacaattgcctggatcttggaaaaccacgcttgtttaagtggttggttccctccctagcagtttccaaaatgagaaggatggtctcagggatagtccttaaatacgtgtgtgtatcactgtaaagtagagagagaagaaggagaaggaagagaagtggattttcatgtcgtgcatggcagaagagatgggactcttggggaaaagggcttgatcccactggaaaagcatgaaagacaactccagaaaagacagctaaggtttctaggttgggacataaaaacacaacagcaagacgttcgcactctgcagtccactgaaatcccttgtagcatataacaatcagttaagggcaaaataaaatcagaataatactaagaggtagcagctgtttatcttctcggagatttcgagggtctctggaagccgggccaagtaagggtgctctcctggaagaggctggggtggggcagagttgaggctaagggctccctggctctgggaagggtgtgggctgatccacatagatgctgcagatcccgagccccgagggagcctctgcccattacaggccactcaaaaccagagtcatttcctgggctagttatgcagtccccacaacatataaataaaagtttagttctgtgtttccatagatcttctacatgtaggctagctaaatattagtggagtaacaataattattaataacaataatcatcataataacaataattaatagaataataatgccttgtggtgtcgggggtggggtccttcatatggcagggtggggccctggggaggggctctatgtctggtagaagtggtggtaatggtggtgatgttcatggtggtggtggtgctcatgtctctggaccggctgcccggcctggctctcatacaccaccaaggcgggcagctcccgcaggtgctcccgccccaggacagggccacctgaggccagtggtgcctgcaggccccggcagccctgctggctctccttggctcggtgcttgtgcttcttgtgcccgaggggggctaggga

SEQ ID NO: 3904 - protein, 63 aa, Homosapiens
MPAGRQNGRKEGFSRLWPDKILLCRGCCSRVPTLATVPFSHQVSVPQQFSPKSIRPQNPRMDL

SEQ ID NO: 3905 - DNA, 425 bp, Homosapiens
ttctatagccactcactcctgggccccactgtgaacccagaaatgccacaccatggaagccacacactctgctgtctccttctgtcctcattcctgtccttctcacagtcagtccctcttggctcttcctagagtccctttcattccctcatttccacttcctgccgctgtactgtcacctgtggcctggatttgcactcttggtccaacaccctcaactccaacacctctgtctttctgccccatccactagacaaaagctgactctggaaaacattaggcactcagaatcaagggttctggggtcagatggataattgccatcatcctcaccaagttgccactggactttcttgcccctaaatccatgggctttgtttgcaactttctgataatttataattatttcaaaataaaaaaatttt

SEQ ID NO: 3906 - protein, 66 aa, Homosapiens
MEATHSAVSFCPHSCPSHSQSLLALPRVPFIPSFPLPAAVLSPVAWICTLGPTPSTPTPLSFCPIH

SEQ ID NO: 3907 - DNA, 6012 bp, Homosapiens
agccactgttatgcaaagttcaagggcctctctcacacttagctgggggaggagtgaatacagcctttctgaagaaagaaaaattaagtaatagcaaaatcattaagtgtttatgattcataaatacagtttttgtcaactaaaaaaataaaatatgtagaagtcaaaaaagtgtctatgattcagaaatgccaccgttagaagttgccataagagtgcacacaaaaaggacatatgggtcaaagtgtttgcagcagtgttgtcccaaataaggacattttgcaacattgtggggtggttaaaataactatagaatatgcattagaatacaatgaaaccattaaacataatgtggaagaatattgtatattatagggaaatgctcataatatatagtgacaatttaaaaagcagattacaaaacaatatgccaagacatgatttctgcccaagtctgccctgatgggtgagctaaccaaggttgctgcactgtgagggcataggggctgcccctcagcccccaccccagccactgggctcctcaggaaaggacacgtgagtgtttactgcacatcctacagatgaggagctcacaaggaccctggatgggggagtcctctgaggttgctggagctgctgcagccatcttgtcactgccaggggagagctctctctgagagcgaaggcacagtggaggaaagcagaactaagaagagacagagaaagcgaaagtgggagagagagagagatatgaggtgacaagtgtgggtccttggatcctgcttggtgtaaagctagcctgctcctggactttacagataataaattccttcctcatcagattaacctgggtttttgtggcttgtaaccaaaagggtctgcacggcccacacacaggctcccagctcatttcctttgcaatgagtggtaactggaggcgggcggtgcatggacctgccttgcaaggcttctctgttagtggtgcctggagcccactctctcagctggcacagccagtgtgacacatcagtccgggtgtgtcctggacctaccccctttctgggtgcaaaccagaactgaggatgccgagggtggtgggggggtagtttcctgcctcagggctgtgctcctgctacctctttgcctaaaattctcccctctctgtgctcccagggccagctcctttgtatgctctgtgattctttgaacagcgccccctctgagaagccttccctgaccacctggctgaggacatcattctgtcccagcttccatttgctttgggagtggcctcctgacacttcacttccgtgaggcagggaccagttctgtcctggtcactgctgtatccccagctctagataaggcctgagacatcgtaggagtgccagggatctttggttactgagaaaacgagcagctagatcaaggttcccaacaccaacacgctggggacatgttgggagtcaacttagccctaccagcaggtggaactagttttgctgctccaaaacagagttctagctatggggacagccactagagagcagagctaagtccatgctatgctgaggggccacagtctgccctgaactgtgcctcccagcctggagctagtgagggggccgagcctgggagctgacagatgagggctcggcgtggggacttttggaggggagggcattttcttgatcttaccatgggggcaacagctagatgggtagggggggacccactcaaggacatactgcggcttcaggcttcgaccagcccagaacgctcgctccatctgagggtcttgatatcagggtgtggcgtcaggagccggagcctacgggttgaaagccaagagtgggcaatcaaagctgaaaccaggcccacgacttaggagctggagagcacacagggctgaacactcgagttggtgaccaggaaaccagggagcaaagtctccagggtgcttgggcaagaccccagatggtctgcagcaacgcacgggcaacacgggatgatcagcgctacgtggtgagaaacttacctccttttgcaggacaacattttccagtccttctgagtaaatcaaagagaagtctcagcttggtgattgcaggtctctaatgcttatttctctgtctctgtctctctctcttttaacaaaagtctaccagcggcctcaggctcagggcctgtctcaggtaaaagcgggttagggtgtaataacagtgatcggtttcattgtgtttatttttgtagctactttctaattatagcaagtgattctgagtttccatttaggatagtaataggaagtttctttttcaagtaaatgtgcataagtaaaaggagactgctcaaaggaaaacagctggtgattgatagaacaggctgtggcattgttgggccccagagggaagggctgtgtgagcatgcaggaaattctgggaaggcagctaaatgcagttgctgcatgggggccaggaagcatttggagacgtggctgggcacagcttggcttttgagcccaagagaggcctgctggggatgtgttgggagccaacctacccctaccagcaggtggaactggttttgccactccaaaacagagttccagctatggggacagccactagagagcagagctaagggcattctaggccaaggggtcacagtccaccctgaactgtgcctcccagcctgaagccagaaagctcagggaggctagcggccctgcccaggcctcagcactgaccctgcacccctaggcccagctggatgacccctaagagcttcctggaatttggatgcagggttattctgtgtgtgctgcctctcagagcatgtcactttgacgtggacatctcgggtctggttctggtgctgtccctgtctcgccacgtgaccctggataagtcatctctccaggccttgatttccccatctgtaaacagaggtgagtgaaatgatctttaaaggcgtgtcagtccattttgcattgctataaaggaatacctgaggttgggtagcttataaagaaaagagggttatttggctcacagttgtgcaggttgtacagaagcatggcaccagcattgcttcttgtgaagcttcaggaagcttccacttatggtggaaggggaagggggagttcgtgacttacatggcaagagagggagcaagagccatgtcaggctcttctaaacaaccagctctcatgtaaactaacagagtgagaactcattcattaccacggggagggcaccaagccatccatgagggacctgcccccatgagccaaacatctcccaccaggccacaccttcaacactgggagtcacattcagcatgagatttggaggtgaccaccatgcatccaaaccatatcaaggacccatttcggtgaggggaccaggaacatatcccttcccctctcctccacatcctttaatgtggagttcagcaaggaaagtagggcttgggtcaaattaaagcctggtcttaatttcctggtccagttattagctgtgtaaccctgggcaagtcacttaaccccctcaggttacaatgttacaaatgatcacattttcctcaactgaaaaatgggataggaacatgtcccaagcagagctggagtgacggtgctatcaatggcccggcagtgcctggtcacacagtaggcctggggagccctgacttttaccgcacagggagctgcttgcagagcttgttttcaattgtgggcttggcagggaactgccggcatcccaggggacagggtctcatgaggatgcctaatcccagctcaaagtggagaccccaggactccatcacagccagtgggggggagtggctgctgcagcagggagggcttcattggaatgaacccctttaagctccagtccaaatgcccagagtggttttgcaggtatggttgtgaggctggcatggtagtcccatctgcagtcccctgggatgaggcacctgtatggtagagggcccgggtggagagaagagaaggatggggatgaacccaggaccacagatggcccagttccatggatgattttcattgaggtgccttcaagtcagttcaacactgggcttctcaacctttgaggtatgcaggtaagagtcacctgcggcagtgggggatgctcttgttaaagtgcagactccgattaagcaggtctagggtggggcctgaaattctgtgttcctaacaaggctccatcctgggtatggaggtcaggtaccccctcacctctcctgtggacccagcttttgaggggtcaggagaagaatgttcagtcccagctgccaccactctaaagtcccctagaaacaaggactaatacaggtggcgtgggagagggcccaggcaaacagggaggtggggtaccccggtggggctgcagtgggccctgcggaaagcttgctggaggtgggggcctaaggaattcaaggacttgttccaggaacccaaggaacgagtgggctctaactgctgcagcatatgggagatgccaggaggagctggctgtggcaggccatcccagtccatcagacaacttgtagtggatgaagatgcagtgtccatggccagaagaaactcccgtggatgctcaggccaaggctgccagaagcacgaggaggggcagcattgagtgtcatcgggaaaaggcaaagtgatggtcctgaagctgccccatgtggccagtccctttttgggaagcctgaataaatccatttcctgtgcactgtgtgggaagccaacccctcttcagagcacctctgaactcaacaggatcctacacttcttataggcctggcttgatgctgacatccttcagccccagggaagacctaaagatctccaggtcttgaggcacctggaacacctccacctgagaccactttaacatgatttctctgcttgagggattttggaccatgctgtgtgtattcagccctaaaacatgggcgagtgcccgcttgcagttcaaattctcagaggaagttccctgtactccacccagtgccaagtttagtttgtgcaaatttccttaatgtcccctcctgtacaacaggcttatttggtgttaaccctcatatcgggggtctaactctttgcttttccagcttttgtgctggaatatcccattaaactgtccatgttgggtattttttctttgttagtaaacatttgttgcatattgttgatagcattttagatttgaagaaataactgacaaaatcaatatcatctgtttcatcattacaaatagactcatagctctttaatttttccatttaacactttaattttccataggcctagattttcaagaagtccaatatctctcacttgaagtgtcttttccctggagtagattgggagatttgagggatatctgtccaaagatgagacagtctgtttctagtttcccatccagcctgatggggcgtctacagtttttaccacaaggtgtcgctgttgaacagattctggtgcagtctagtgcatagctgtccacttctagagtgatcacttgctgggccaagttcctctccttaagtggtgtctcacattaaggttcccaaattacagactcattaattcaccctaataagctcatccaggcagtttaggtcttcaggggcttccagcctccaacacacattgggccaaaaccagcctgtaccaccagctccaagccctgtgttgaatctaggtcattggtccagatgccccttcattctgggcctgtggtgtcctttccagacagcagacctcagttaagggcatcccagtccatcagagaagttccaggatcacagaccctcaaaaggggcagtgttgaggattcagtctgttttctgcccagaggccccattaagtatgttgtatcacctcctccccaggctgtttctacataacccagggaagccattcagggaacagctgccttatgaatgaaaatccacccctagacaatgtgctatgccatcccagcc

SEQ ID NO: 3908 - protein, 44 aa, Homosapiens
MVLKLPHVASPFLGSLNKSISCALCGKPTPLQSTSELNRILHFL

SEQ ID NO: 3909 - DNA, 3304 bp, Homosapiens
gggcgatcagaagcaggtcacacagcctgtttcctgttttcaaacggggaacttagaaagtggcagcccctcggcttgtcgccggagctgagaaccaagagctcgaaggggccatatgacactcctcccggacccctggacacacacagccctggagactggagccttggagcatggcaagtccagagcaccctgggagccctggctgcatgggacccataacccagtgcacggcaaggacccagcaggaagcaccagccactggccccgacctcccgcacccaggacctgacgggcacttagacacacacagtggcctgagctccaactccagcatgaccacgcgggagcttcagcagtactggcagaaccagaaatgccgctggaagcacgtcaaactgctctttgagatcgcttcagctcgcatcgaggagagaaaagtctctaagtttgtgatggggaaatcaaggcctggagagatgacttatccagggtcacgtggcgagacagggacagcaccagaaccagacccgagatgtccacgtcaaagtgacatgctctgagaggcagcacacacagaataaccctgcatccaaattccaggaagctcttaggggtcatccagctgggcctaggggtgcagggtcagtgctgaggcctgggcagggccgctagcctccctgagctttctggcttcaggctgggaggcacagttcagggtggactgtgaccccttggcctagaatgcccttagctctgctctctagtggctgtccccatagctggaactctgttttggagtggcaaaaccagttccacctgctggtaggggtaggttggctcccaacacatccccagcaggcctctcttgggctcaaaagccaagctgtgcccagccacgtctccaaatgcttcctggcccccatgcagcaactgcatttagctgccttcccagaatttcctgcatgctcacacagcccttccctctggggcccaacaatgccacagcctgttctatcaatcaccagctgttttcctttgagcagtctccttttacttatgcacatttacttgaaaaagaaacttcctattactatcctaaatggaaactcagaatcacttgctataattagaaagtagctacaaaaataaacacaatgaaaccgatcactgttattacaccctaacccgcttttacctgagacaggccctgagcctgaggccgctggtagacttttgttaaaagagagagagacagagacagagaaataagcattagagacctgcaatcaccaagctgagacttctctttgatttactcagaaggactggaaaatgttgtcctgcaaaaggaggtaagtttctcaccacgtagcgctgatcatcccgtgttgcccgtgcgttgctgcagaccatctggggtcttgcccaagcaccctggagactttgctccctggtttcctggtcaccaactcgagtgttcagccctgtgtgctctccagctcctaagtcgtgggcctggtttcagctttgattgcccactcttggctttcaacccgtaggctccggctcctgacgccacaccctgatatcaagaccctcagatggagcgagcgttctgggctggtcgaagcctgaagccgcagtatgtccttgagtgggtccccccctacccatctagctgttgcccccatggtaagatcaagaaaatgccctcccctccaaaagtccccacgccgagccctcatctgtcagctcccaggctcggccccctcactagctccaggctgggaggcacagttcagggcagactgtggcccctcagcatagcatggacttagctctgctctctagtggctgtccccatagctagaactctgttttggagcagcaaaactagttccacctgctggtagggctaagttgactcccaacatgtccccagcgtgttggtgttgggaaccttgatctagctgctcgttttctcagtaaccaaagatccctggcactcctacgatgtctcaggccttatctagagctggggatacagcagtgaccaggacagaactggtccctgcctcacggaagtgaagtgtcaggaggccactcccaaagcaaatggaagctgggacagaatgatgtcctcagccaggtggtcagggaaggcttctcagagggggcgctgttcaaagaatcacagagcatacaaaggagctggccctgggagcacagagaggggagaattttaggcaaagaggtagcaggagcacagccctgaggcaggaaactacccccccaccaccctcggcatcctcagttctggtttgcacccagaaagggggtaggtccaggacacacccggactgatgtgtcacactggctgtgccagctgagagagtgggctccaggcaccactaacagagaagccttgcaaggcaggtccatgcaccgcccgcctccagttaccactcattgcaaaggaaatgagctgggagcctgtgtgtgggccgtgcagacccttttggttacaagccacaaaaacccaggttaatctgatgaggaaggaatttattatctgtaaagtccaggagcaggctagctttacaccaagcaggatccaaggacccacacttgtcacctcatatctctctctctctcccactttcgctttctctgtctcttcttagttctgctttcctccactgtgccttcgctctcagagagagctctcccctggcagtgacaagatggctgcagcagctccagcaacctcagaggactcccccatccagggtccttgtgagctcctcatctgtaggatgtgcagtaaacactcacgtgtcctttcctgaggagcccagtggctggggtgggggctgaggggcagcccctatgccctcacagtgcagcaaccttggttagctcacccatcagggcagacttgggcagaaatcatgtcttggcatattgttttgtaatctgctttttaaattgtcactatatattatgagcatttccctataatatacaatattcttccacattatgtttaatggtttcattgtattctaatgcatattctatagttattttaaccaccccacaatgttgcaaaatgtccttatttgggacaacactgctgcaaacactttgacccatatgtcctttttgtgtgcactcttatggcaacttctaacggtggcatttctgaatcatagacacttttttgacttctacatattttatttttttagttgacaaaaactgtatttatgaatcataaacacttaatgattttgctatt

SEQ ID NO: 3910 - protein, 129 aa, Homosapiens
MASPEHPGSPGCMGPITQCTARTQQEAPATGPDLPHPGPDGHLDTHSGLSSNSSMTTRELQQYWQNQKCRWKHVKLLFEIASARIEERKVSKFVMGKSRPGEMTYPGSRGETGTAPEPDPRCPRQSDML

SEQ ID NO: 3911 - DNA, 2053 bp, Homosapiens
gggcgatcagaagcaggtcacacagcctgtttcctgttttcaaacggggaacttagaaagtggcagcccctcggcttgtcgccggagctgagaaccaagagctcgaaggggccatatgacactcctcccggacccctggacacacacagccctggagactggagccttggagcatggcaagtccagagcaccctgggagccctggctgcatgggacccataacccagtgcacggcaaggacccagcaggaagcaccagccactggccccgacctcccgcacccaggacctgacgggcacttagacacacacagtggcctgagctccaactccagcatgaccacgcgggagcttcagcagtactggcagaaccagaaatgccgctggaagcacgtcaaactgctctttgagatcgcttcagctcgcatcgaggagagaaaagtctctaagtttgtgatggggaaatcaaggcctggagagatgacttatccagggtcacgtggcgagacagggacagcaccagaaccagacccgagatgtccacgtcaaagtgacatgctctgagaggcagcacacacagaataaccctgcatccaaattccaggaagctcttaggggtcatccagctgggcctaggggtgcagggtcagtgctgaggcctgggcagggccgctagcctccctgagctttctggcttcaggctgggaggcacagttcagggtggactgtgaccccttggcctagaatgcccttagctctgctctctagtggctgtccccatagctggaactctgttttggagtggcaaaaccagttccacctgctggtaggggtaggttggctcccaacacatccccagcaggcctctcttgggctcaaaagccaagctgtgcccagccacgtctccaaatgcttcctggcccccatgcagcaactgcatttagctgccttcccagaatttcctgcatgctcacacagcccttccctctggggcccaacaatgccacagcctgttctatcaatcaccagctgttttcctttgagcagtctccttttacttatgcacatttacttgaaaaagaaacttcctattactatcctaaatggaaactcagaatcacttgctataattagaaagtagctacaaaaataaacacaatgaaaccgatcactgttattacaccctaacccgcttttacctgagacaggccctgagcctgaggccgctggtagacttttgttaaaagagagagagacagagacagagaaataagcattagagacctgcaatcaccaagctgagacttctctttgatttactcagaaggactggaaaatgttgtcctgcaaaaggaggtaagtttctcaccacgtagcgctgatcatcccgtgttgcccgtgcgttgctgcagaccatctggggtcttgcccaagcaccctggagactttgctccctggtttcctggtcaccaactcgagtgttcagccctgtgtgctctccagctcctaagtcgtgggcctggtttcagctttgattgcccactcttggctttcaacccgtaggctccggctcctgacgccacaccctgatatcaagaccctcagatggagcgagcgttctgggctggtcgaagcctgaagccgcagtatgtccttgagtgggtccccccctacccatctagctgttgcccccatgttctgctttcctccactgtgccttcgctctcagagagagctctcccctggcagtgacaagatggctgcagcagctccagcaacctcagaggactcccccatccagggtccttgtgagctcctcatctgtaggatgtgcagtaaacactcacgtgtcctttcctgaggagcccagtggctggggtgggggctgaggggcagcccctatgccctcacagtgcagcaaccttggttagctcacccatcagggcagacttgggcagaaatcatgtcttggcatattgttttgtaatctgctttttaaattgtcactatatattatgagcatttccctataatatacaatattcttccacatt

SEQ ID NO: 3912 - protein, 129 aa, Homosapiens; identical to SEQ ID NO: 3910

SEQ ID NO: 3913 - DNA, 1934 bp, Homosapiens
gggcgatcagaagcaggtcacacagcctgtttcctgttttcaaacggggaacttagaaagtggcagcccctcggcttgtcgccggagctgagaaccaagagctcgaaggggccatatgacactcctcccggacccctggacacacacagccctggagactggagccttggagcatggcaagtccagagcaccctgggagccctggctgcatgggacccataacccagtgcacggcaaggacccagcaggaagcaccagccactggccccgacctcccgcacccaggacctgacgggcacttagacacacacagtggcctgagctccaactccagcatgaccacgcgggagcttcagcagtactggcagaaccagaaatgccgctggaagcacgtcaaactgctctttgagatcgcttcagctcgcatcgaggagagaaaagtctctaagtttgtggctccggctcctgacgccacaccctgatatcaagaccctcagatggagcgagcgttctgggctggtcgaagcctgaagccgcagtatgtccttgagtgggtccccccctacccatctagctgttgcccccatggtaagatcaagaaaatgccctcccctccaaaagtccccacgccgagccctcatctgtcagctcccaggctcggccccctcactagctccaggctgggaggcacagttcagggcagactgtggcccctcagcatagcatggacttagctctgctctctagtggctgtccccatagctagaactctgttttggagcagcaaaactagttccacctgctggtagggctaagttgactcccaacatgtccccagcgtgttggtgttgggaaccttgatctagctgctcgttttctcagtaaccaaagatccctggcactcctacgatgtctcaggccttatctagagctggggatacagcagtgaccaggacagaactggtccctgcctcacggaagtgaagtgtcaggaggccactcccaaagcaaatggaagctgggacagaatgatgtcctcagccaggtggtcagggaaggcttctcagagggggcgctgttcaaagaatcacagagcatacaaaggagctggccctgggagcacagagaggggagaattttaggcaaagaggtagcaggagcacagccctgaggcaggaaactacccccccaccaccctcggcatcctcagttctggtttgcacccagaaagggggtaggtccaggacacacccggactgatgtgtcacactggctgtgccagctgagagagtgggctccaggcaccactaacagagaagccttgcaaggcaggtccatgcaccgcccgcctccagttaccactcattgcaaaggaaatgagctgggagcctgtgtgtgggccgtgcagacccttttggttacaagccacaaaaacccaggttaatctgatgaggaaggaatttattatctgtaaagtccaggagcaggctagctttacaccaagcaggatccaaggacccacacttgtcacctcatatctctctctctctcccactttcgctttctctgtctcttcttagttctgctttcctccactgtgccttcgctctcagagagagctctcccctggcagtgacaagatggctgcagcagctccagcaacctcagaggactcccccatccagggtccttgtgagctcctcatctgtaggatgtgcagtaaacactcacgtgtcctttcctgaggagcccagtggctggggtgggggctgaggggcagcccctatgccctcacagtgcagcaaccttggttagctcacccatcagggcagacttgggcagaaatcatgtcttggcatattgttttgtaatctgctttttaaattgtcactatatattatgagcatttccctataatatacaatattcttcca

SEQ ID NO: 3914 - protein, 102 aa, Homosapiens
MASPEHPGSPGCMGPITQCTARTQQEAPATGPDLPHPGPDGHLDTHSGLSSNSSMTTRELQQYWQNQKCRWKHVKLLFEIASARIEERKVSKFVAPAPDATP

SEQ ID NO: 3915 - DNA, 1108 bp, Homosapiens
ggcattctaggccaaggggtcacagtccaccctgaactgtgcctcccagcctgaagccagaaagctcagggaggctagcggccctgcccaggcctcagcactgaccctgcacccctaggcccagctggatgacccctaagagcttcctggaatttggatgcagggttattctgtgtgtgctgcctctcagagcatgtcactttgacgtggacatctcgggtctggttctggtgctgtccctgtctcgccacgtgaccctggataagtcatctctccaggccttgatttccccatctgtaaacagaggaacccaaggaacgagtgggctctaactgctgcagcatatgggagatgccaggaggagctggctgtggcaggccatcccagtccatcagacaacttgtagtggatgaagatgcagtgtccatggccagaagaaactcccgtggatgctcaggccaaggctgccagaagcacgaggaggggcagcattgagtgtcatcgggaaaaggcaaagtgatggtcctgaagctgccccatgtggccagtccctttttgggaagcctgaataaatccatttcctgtgcactgtgtgggaagccaacccctcttcagagcacctctgaactcaacaggatcctacacttcttataggcctggcttgatgctgacatccttcagccccagggaagacctaaagatctccaggtcttgaggcacctggaacacctccacctgagaccactttaacatgatttctctgcttgagggattttggaccatgctgtgtgtattcagccctaaaacatgggcgagtgcccgcttgcagttcaaattctcagaggaagttccctgtactccacccagtgccaagtttagtttgtgcaaatttccttaatgtcccctcctgtacaacaggcttatttggtgttaaccctcatatcgggggtctaactctttgcttttccagcttttgtgctggaatatcccattaaactgtccatgttgggtattttttctttgttagtaaacatttgttgcatattgttgatagcattttagatttgaagaaataactgacaaaatcaatatcatctgtttcatcatt

SEQ ID NO: 3916 - protein, 67 aa, Homosapiens [sequence omitted]

SEQ ID NO: 3917 - DNA, 1291 bp, Homosapiens
ttgggaagcctgaataaatccatttcctgtgcactgtgtgggaagccaacccctcttcagagcacctctgaactcaacaggatcctacacttcttataggcctggcttgatgctgacatccttcagccccagggaagacctaaagatctccaggtcttgaggcacctggaacacctccacctgagaccactttaacatgatttctctgcttgagggattttggaccatgctgtgtgtattcagccctaaaacatgggcgagtgcccgcttgcagttcaaattctcagaggaagttccctgtactccacccagtgccaagtttagtttgtgcaaatttccttaatgtcccctcctgtacaacaggcttatttggtgttaaccctcatatcgggggtctaactctttgcttttccagcttttgtgctggaatatcccattaaactgtccatgttgggtattttttctttgttagtaaacatttgttgcatattgttgatagcattttagatttgaagaaataactgacaaaatcaatatcatctgtttcatcattacaaatagactcatagctctttaatttttccatttaacactttaattttccataggcctagattttcaagaagtccaatatctctcacttgaagtgtcttttccctggagtagattgggagatttgagggatatctgtccaaagatgagacagtctgtttctagtttcccatccagcctgatggggcgtctacagtttttaccacaaggtgtcgctgttgaacagattctggtgcagtctagtgcatagctgtccacttctagagtgatcacttgctgggccaagttcctctccttaagtggtgtctcacattaaggttcccaaattacagactcattaattcaccctaataagctcatccaggcagtttaggtcttcaggggcttccagcctccaacacacattgggccaaaaccagcctgtaccaccagctccaagccctgtgttgaatctaggtcattggtccagatgccccttcattctgggcctgtggtgtcctttccagacagcagacctcagttaagggcatcccagtccatcagagaagttccaggatcacagaccctcaaaaggggcagtgttgaggattcagtctgttttctgcccagaggccccattaagtatgttgtatcacctcctccccaggctgtttctacataacccagggaagccattcagggaacagctgccttatgaatgaaaatccacccctagacaatgtgctatgccatcccagcc

SEQ ID NO: 3918 - protein, 63 aa, Homosapiens
MPLHSGPVVSFPDSRPQLRASQSIREVPGSQTLKRGSVEDSVCFLPRGPIKYVVSPPPQAVST

SEQ ID NO: 3919 - DNA, 456 bp, Homosapiens
gaccccttggaagcctctgcttgtgtcccacgtcctcttgatgccagggccacttcatctccaaaacacaaaaccaatgcctggatgagcttattagggtgaattaatgagtctgtaatttgggaaccttaatgtgagacaccacttaaggagaggaacttggcccagcaagtgatcactctagaagtggacagctatgcactagactgcaccagaatctgttcaacagcgacaccttgtggtaaaaactgtagacgccccatcaggctggatgggaaactagaaacagactgtctcatctttggacagatatccctcaaatctcccaatctactccagggaaaagacacttcaagtgagagatattggacttcttgaaaatctaggcctatggaaaattaaagtgttaaatggaaaaattaaagagctatgagtctatttgtaatgatgaaacag

SEQ ID NO: 3920 - protein, 81 aa, Homosapiens
CETPLKERNLAQQVITLEVDSYALDCTRICSTATPCGKNCRRPIRLDGKLETDCLIFGQISLKSPNLLQGKDTSSERYWTS

SEQ ID NO: 3921 - DNA, 1783 bp, Homosapiens
gggcgatcagaagcaggtcacacagcctgtttcctgttttcaaacggggaacttagaaagtggcagcccctcggcttgtcgccggagctgagaaccaagagctcgaaggggccatatgacactcctcccggacccctggacacacacagccctggagactggagccttggagcatggcaagtccagagcaccctgggagccctggctgcatgggacccataacccagtgcacggcaaggacccagcaggaagcaccagccactggccccgacctcccgcacccaggacctgacgggcacttagacacacacagtggcctgagctccaactccagcatgaccacgcgggagcttcagcagtactggcagaaccagaaatgccgctggaagcacgtcaaactgctctttgagatcgcttcagctcgcatcgaggagagaaaagtctctaagtttgtggtgtaccaaatcatcgtcatccagactgggagctttgacaacaacaaggccgtcctggaacggcgctattccgacttcgcgaagctccagaaagcgctgctgaagacgttcagggaggagatcgaagacgtggagtttcccaggaagcacctgactgggaacttcgctgaggagatgatctgtgagcgtcggcgcgccctgcaggagtacctgggcctgctctacgccatccgctgcgtgcgccgctcccgggagttcctggacttcctcacgcggccggagctgcgcgaggctttcggctgcctgcgggccggccagtacccgcgcgccctggagctgctgctgcgcgtgctgccgctgcaggagaagctcaccgcccactgccctgcggccgccgtcccggccctgtgcgccgtgctgctgtgccaccgcgacctcgaccgccccgccgaggccttcgcggccggagagagggccctgcagcgcctgcaggcccgggagggccatcgctactatgcgcctctgctggacgccatggtccgcctggcctacgcgctgggcaaggacttcgtgactctgcaggagaggctggaggagagccagctccggaggcccacgccccgaggcatcaccctgaaggagctcactgtgcgagaatacctgcactgagccggcctgggaccccgcagggacgctggagatttggggtcaccatggctcacagtgggctgtttggggttctttttttttatttttccttttcttttttgttatttgagacagtcttgctctgtcacccagactgaagtgcagtggctcaattatgtctcactgcagcctcaaactcctgggcacaagcaatcctcccacctcagcctcccaagtagctgggattacaggtgcacaccaccacaccaggctaatttttaattttttagtagagacagggtctctctgttgcccaggctggtctctaacttctgaccttaaatgatcttcctgcctcagcttcccaaaacactggggttacaagtgtgagccaccacccctggcctggggttcatttttaatgggaaaagccactgggggctctaactcgctgggtgactttggacaagcccctcctctggtcctcaatttctccatctgtattggacagaggtgctcctgggaccccttggaagcctctgcttgtgtcccacgtcctcttgatgccagggccacttcatctccaaaacacaaaaccaactgccaaaaccgtccagagcagtgtccaccccaccagtgtctttgtgggaagctggagaagaagtttacctcacacattc

SEQ ID NO: 3922 - protein, 316 aa, Homosapiens; identical to SEQ ID NO: 583

SEQ ID NO: 3923 - DNA, 637 bp, Homosapiens
ggagtgggccttggagtcggcgcgcaggcggctcgcgcaaggaagtgatcctttctctacatgggcctcaccttggggaggacaatggtgtctttgaagttgtagtaactgaagtagagatcaaaaggcaatgcagatagactgacagatttcgcctgaagaggggaagcccgaccaggttgtgaaatgtgctcgcaggaggcttttcaggcacagaggagccagctggtcgagctgctggtctcagggtccctggaaggcttcgagagtgtcctggactggctgctgtcctgggaggtcctctcctgggaggactacgagggcttccacctcctgggccagcctctctcccacttggccaggcgccttctggacaccgtctggaataagggtacttgggcctgtcagaagctcatcgcggctgcccaagaagcccaggccgacagccagtcccccaagctgcatggctgctgggacccccactcgctccacccagcccgagacctgcagagtcaccggccagccattgtcaggaggctccacagccatgtggagaacatgctggacctggcatgggagcggggtttcgtcagccagtatgaatgtgatgaaatcaggttgccgatcttcacaccgt

SEQ ID NO: 3924 - protein, 149 aa, Homosapiens
MCSQEAFQAQRSQLVELLVSGSLEGFESVLDWLLSWEVLSWEDYEGFHLLGQPLSHLARRLLDTVWNKGTWACQKLIAAAQEAQADSQSPKLHGCWDPHSLHPARDLQSHRPAIVRRLHSHVENMLDLAWERGFVSQYECDEIRLPIFT

SEQ ID NO: 3925 - DNA, 496 bp, Homosapiens
ggagtgggccttggagtcggcgcgcaggcggctcgcggttgtgaaatgtgctcgcaggaggcttttcaggcacagaggagccagctggtcgagctgctggtctcagggtccctggaaggcttcgagagtgtcctggactggctgctgtcctgggaggtcctctcctgggaggactacgagggcttccacctcctgggccagcctctctcccacttggccaggcgccttctggacaccgtctggaataagggtacttgggcctgtcagaagctcatcgcggctgcccaagaagcccaggccgacagccagtcccccaagctgcatggctgctgggacccccactcgctccacccagcccgagacctgcagagtcaccggccagccattgtcaggaggctccacagccatgtggagaacatgctggacctggcatgggagcggggtttcgtcagccagtatgaatgtgatgaaatcaggttgccgatcttcacaccgt

SEQ ID NO: 3926 - protein, 149 aa, Homosapiens; identical to SEQ ID NO: 3924

SEQ ID NO: 3927 - DNA, 4484 bp, Homosapiens
gtagacagatccaggctcaccagtcctgtgccactgggcttttggcgttctgcacaaggcctacccgcagatgccatgcctgctcccccagcctaatgggctttgatgggggaagagggtggttcagcctctcacgatgaggaggaaagagcaagtgtcctcctcggacattctccgggttgtgaaatgtgctcgcaggaggcttttcaggcacagaggagccagctggtcgagctgctggtctcagggtccctggaaggcttcgagagtgtcctggactggctgctgtcctgggaggtcctctcctgggaggactacgagggcttccacctcctgggccagcctctctcccacttggccaggcgccttctggacaccgtctggaataagggtacttgggcctgtcagaagctcatcgcggctgcccaagaagcccaggccgacagccagtcccccaagctgcatggctgctgggacccccactcgctccacccagcccgagacctgcagagtcaccggccagccattgtcaggaggctccacagccatgtggagaacatgctggacctggcatgggagcggggtttcgtcagccagtatgaatgtgatgaaatcaggttgccgatcttcacaccgtcccagagggcaagaaggctgcttgatcttgccacggtgaaagcgaatggattggctgccttccttctacaacatgttcaggaattaccagtcccattggccctgcctttggaagctgccacatgcaagaagtatatggccaagctgaggaccacggtgtctgctcagtctcgcttcctcagtacctatgatggagcagagacgctctgcctggaggacatatacacagagaatgtcctggaggtctgggcagatgtgggcatggctggacccccgcagaagagcccagccaccctgggcctggaggagctcttcagcacccctggccacctcaatgacgatgcggacactgtgctggtggtgggtgaggcgggcagtggcaagagcacgctcctgcagcggctgcacttgctgtgggctgcagggcaagacttccaggaatttctctttgtcttcccattcagctgccggcagctgcagtgcatggccaaaccactctctgtgcggactctactctttgagcactgctgttggcctgatgttggtcaagaagacatcttccagttactccttgaccaccctgaccgtgtcctgttaacctttgatggctttgacgagttcaagttcaggttcacggatcgtgaacgccactgctccccgaccgaccccacctctgtccagaccctgctcttcaaccttctgcagggcaacctgctgaagaatgcccgcaaggtggtgaccagccgtccggccgctgtgtcggcgttcctcaggaagtacatccgcaccgagttcaacctcaagggcttctctgaacagggcatcgagctgtacctgaggaagcgccatcatgagcccggggtggcggaccgcctcatccgcctgctccaagagacctcagccctgcacggtttgtgccacctgcctgtcttctcatggatggtgtccaaatgccaccaggaactgttgctgcaggagggggggtccccaaagaccactacagatatgtacctgctgattctgcagcattttctgctgcatgccacccccccagactcagcttcccaaggtctgggacccagtcttcttcggggccgcctccccaccctcctgcacctgggcagactggctctgtggggcctgggcatgtgctgctacgtgttctcagcccagcagctccaggcagcacaggtcagccctgatgacatttctcttggcttcctggtgcgtgccaaaggtgtcgtgccagggagtacggcgcccctggaattccttcacatcactttccagtgcttctttgccgcgttctacctggcactcagtgctgatgtgccaccagctttgctcagacacctcttcaattgtggcaggccaggcaactcaccaatggccaggctcctgcccacgatgtgcatccaggcctcggagggaaaggacagcagcgtggcagctttgctgcagaaggccgagccgcacaaccttcagatcacagcagccttcctggcagggctgttgtcccgggagcactggggcctgctggctgagtgccagacatctgagaaggccctgctccggcgccaggcctgtgcccgctggtgtctggcccgcagcctccgcaagcacttccactccatcccgccagctgcaccgggtgaggccaagagcgtgcatgccatgcccgggttcatctggctcatccggagcctgtacgagatgcaggaggagcggctggctcggaaggctgcacgtggcctgaatgttgggcacctcaagttgacattttgcagtgtgggccccactgagtgtgctgccctggcctttgtgctgcagcacctccggcggcccgtggccctgcagctggactacaactctgtgggtgacattggcgtggagcagctgctgccttgccttggtgtctgcaaggctctgtatttgcgcgataacaatatctcagaccgaggcatctgcaagctcattgaatgtgctcttcactgcgagcaattgcagaagttagctctattcaacaacaaattgactgacggctgtgcacactccatggctaagctccttgcatgcaggcagaacttcttggcattgaggctggggaataactacatcactgccgcgggagcccaagtgctggccgaggggctccgaggcaacacctccttgcagttcctgggattctggggcaacagagtgggtgacgagggggcccaggccctggctgaagccttgggtgatcaccagagcttgaggtggctcagcctggtggggaacaacattggcagtgtgggtgcccaagccttggcactgatgctggcaaagaacgtcatgctagaagaactctgcctggaggagaaccatctccaggatgaaggtgtatgttctctcgcagaaggactgaagaaaaattcaagtttgaaaatcctgaagttgtccaataactgcatcacctacctaggggcagaagccctcctgcaggcccttgaaaggaatgacaccatcctggaagtctggctccgagggaacactttctctctagaggaggttgacaagctcggctgcagggacaccagactcttgctttgaagtctccgggaggatgttcgtctcagtttgtttgtgagcaggctgtgagtttgggccccagaggctgggtgacatgtgttggcagcctcttcaaaatgagccctgtcctgcctaaggctgaacttgttttctgggaacaccataggtcacctttattctggcagaggagggagcatcagtgccctccaggatagacttttcccaagcctacttttgccattgacttcttcccaagattcaatcccaggatgtacaaggacagcccctcctccatagtatgggactggcctctgctgatcctcccaggcttccgtgtgggtcagtggggcccatggatgtgcttgttaactgagtgccttttggtggagaggcccggcctctcacaaaagaccccttaccactgctctgatgaagaggagtacacagaacacataattcaggaagcagctttccccatgtctcgactcatccatccaggccattccccgtctctggttcctcccctcctcctggactcctgcacacgctccttcctctgaggctgaaattcagaatattagtgacctcagctttgatatttcacttacagcacccccaaccctggcacccagggtgggaagggctacaccttagcctgccctcctttccggtgtttaagacatttttggaaggggacacgtgacagccgtttgttccccaagacattctaggtttgcaagaaaaatatgaccacactccagctgggatcacatgtggacttttatttccagtgaaatcagttactcttcagttaagcctttggaaacagctcgactttaaaaagctccaaatgcagctttaaaaaattaatctgggccagaatttcaaacggcctcactaggcttctggttgatgcctgtgaactgaactctgacaacagacttctgaaatagacccacaagaggcagttccatttcatttgtgccagaatgctttaggatgtacagttatggattgaaagtttacaggaaaaaaaattaggccgttccttcaaagcaaatgtcttcctggattattcaaaatgatgtatgttgaagcctttgtaaattgtcagatgctgtgcaaatgttattattttaaacattatgatgtgtgaaaactggttaatatttataggtcactttgttttactgtcttaagtttatactcttatagacaacatggccgtgaactttatgctgtaaataatcagaggggaataaactgttgagtcaaaa

SEQ ID NO: 3928 - protein, 1040 aa, Homosapiens; identical to SEQ ID NO: 585

SEQ ID NO: 3929 - DNA, 878 bp, Homosapiens
tagacagatccaggctcaccagtcctgtgccactgggcttttggcgttctgcacaaggcctacccgcagatgccatgcctgctcccccagcctaatgggctttgatgggggaagagggtggttcagcctctcacgatgaggaggaaagagcaagtgtcctcctcggacattctccgggttgtgaaatgtgctcgcaggaggcttttcaggcacagaggagccagctggtcgagctgctggtctcagggtccctggaaggcttcgagagtgtcctggactggctgctgtcctgggaggtcctctcctgggaggactacgagggcttccacctcctgggccagcctctctcccacttggccaggcgccttctggacaccgtctggaataagggtacttgggcctgtcagaagctcatcgcggctgcccaagaagcccaggccgacagccagtcccccaagctgcatggctgctgggacccccactcgctccacccagcccgagacctgcagagtcaccggccagccattgtcaggaggctccacagccatgtggagaacatgctggacctggcatgggagcggggtttcgtcagccagtatgaatgtgatgaaatcaggttgccgatcttcacaccgtcccagaggctgccacatgcaagaagtatatggccaagctgaggaccacggtgtctgctcagtctcgcttcctcagtacctatgatggagcagagacgctctgcctggaggacatatacacagagaatgtcctggaggtctgggcagatgtgggcatggctggacccccgcagaagagcccagccaccctgggcctggaggagctcttcagcacccctggccacctcaatgacgatgcggaca

SEQ ID NO: 3930 - protein, 194 aa, Homosapiens
MRRKEQVSSSDILRVVKCARRRLFRHRGASWSSCWSQGPWKASRVSWTGCCPGRSSPGRTTRASTSWASLSPTWPGAFWTPSGIRVLGPVRSSSRLPKKPRPTASPPSCMAAGTPTRSTQPETCRVTGQPLSGGSTAMWRTCWTWHGSGVSSASMNVMKSGCRSSHRPRGCHMQEVYGQAEDHGVCSVSLPQYL

SEQ ID NO: 3931 - DNA, 1707 bp, Homosapiens
tagacagatccaggctcaccagtcctgtgccactgggcttttggcgttctgcacaaggcctacccgcagatgccatgcctgctcccccagcctaatgggctttgatgggggaagagggtggttcagcctctcacgatgaggaggaaagagcaagtgtcctcctcggacattctccgggtaagaggagcaggcattgtcccgtcccagcttgatcctcagccttctttcatccttggccgcgacatgctcccaggcctggggtcagatggggagtgctgactctgtttctgggctgttttctggggagaatgggtcggcgggtttttttccccaggacctgggcagggtcaatggtgggggccgctgtcgcatccttggctggtgtttccacagctgagaaccactccagggccaagcccagagcttattctacccttttttgtcctctcttcccctgtcctcggccaccccaccctcttggctcctctgcttagatgtgggcacaaggaggagaactccttggcctgagagaactaccttagatcctggcttccagtggcctctgcaggggggtacaccctctctcccaagcagccagacacacaagtaacctcattgcctcagtttccccatctgaccagcacagggccccctgtgccccagcagcgttctgagagattggagctttctccttttgcttaccttggctaccgtatgaggacggatacagagtgttccccccacccccagcccaggggatatttgattcatgaacattccctcagtgtctttgtgggggacaatgctgtgccaggctcagggatgccaggacgagtaagacccaggctcccacgtggcccaggcagggagagagacacataaacaaccatcaggaaagaggttgtgaaatgtgctcgcaggaggcttttcaggcacagaggagccagctggtcgagctgctggtctcagggtccctggaaggcttcgagagtgtcctggactggctgctgtcctgggaggtcctctcctgggaggactacgagggcttccacctcctgggccagcctctctcccacttggccaggcgccttctggacaccgtctggaataagggtacttgggcctgtcagaagctcatcgcggctgcccaagaagcccaggccgacagccagtcccccaagctgcatggctgctgggacccccactcgctccacccagcccgagacctgcagagtcaccggccagccattgtcaggaggctccacagccatgtggagaacatgctggacctggcatgggagcggggtttcgtcagccagtatgaatgtgatgaaatcaggttgccgatcttcacaccgtcccagagggcaagaaggctgcttgatcttgccacggtgaaagcgaatggattggctgccttccttctacaacatgttcaggaattaccagtcccattggccctgcctttggaagctgccacatgcaagaagtatatggccaagctgaggaccacggtgtctgctcagtctcgcttcctcagtacctatgatggagcagagacgctctgcctggaggacatatacacagagaatgtcctggaggtctgggcagatgtgggcatggctggacccccgcagaagagcccagccaccctgggcctggaggagctcttcagcacccctggccacctcaatgacgatgcggaca

SEQ ID NO: 3932 - protein, 265 aa, Homosapiens
MCSQEAFQAQRSQLVELLVSGSLEGFESVLDWLLSWEVLSWEDYEGFHLLGQPLSHLARRLLDTVWNKGTWACQKLIAAAQEAQADSQSPKLHGCWDPHSLHPARDLQSHRPAIVRRLHSHVENMLDLAWERGFVSQYECDEIRLPIFTPSQRARRLLDLATVKANGLAAFLLQHVQELPVPLALPLEAATCKKYMAKLRTTVSAQSRFLSTYDGAETLCLEDIYTENVLEVWADVGMAGPPQKSPATLGLEELFSTPGHLNDDA

SEQ ID NO: 3933 - DNA, 1059 bp, Homosapiens
gggcatgtgctgctacgtgttctcagcccagcagctccaggcagcacaggtcagccctgatgacatttctcttggcttcctggtgcgtgccaaaggtgtcgtgccagggagtacggcgcccctggaattccttcacatcactttccagtgcttctttgccgcgttctacctggcactcagtgctgatgtgccaccagctttgctcagacacctcttcaattgtggcaggccaggcaactcaccaatggccaggctcctgcccacgatgtgcatccaggcctcggagggaaaggacagcagcgtggcagctttgctgcagaaggccgagccgcacaaccttcagatcacagcagccttcctggcagggctgttgtcccgggagcactggggcctgctggctgagtgccagacatctgagaaggccctgctccggcgccaggcctgtgcccgctggtgtctggcccgcagcctccgcaagcacttccactccatcccgccagctgcaccgggtgaggccaagagcgtgcatgccatgcccgggttcatctggctcatccggagcctgtacgagatgcaggaggagcggctggctcggaaggctgcacgtggcctgaatgttgggcacctcaagttgacattttgcagtgtgggccccactgagtgtgctgccctggcctttgtgctgcagcacctccggcggcccgtggccctgcagctggactacaactctgtgggtgacattggcgtggagcagctgctgccttgccttggtgtctgcaaggctctgtagtgagtgttactgggcattgctgttcaggctggggaataactacatcactgccgcgggagcccaagtgctggccgaggggctccgaggcaacacctccttgcagttcctgggattctggggcaacagagtgggtgacgagggggcccaggccctggctgaagccttgggtgatcaccagagcttgaggtggctcagcctggtggggaacaacattggcagtgtgggtgcccaagccttggcactgatgctggcaaagaacgtcatgctag

SEQ ID NO: 3934 - protein, 261 aa, Homosapiens [sequence omitted]

SEQ ID NO: 3935 - DNA, 975 bp, Homosapiens
gggcatgtgctgctacgtgttctcagcccagcagctccaggcagcacaggtcagccctgatgacatttctcttggcttcctggtgcgtgccaaaggtgtcgtgccagggagtacggcgcccctggaattccttcacatcactttccagtgcttctttgccgcgttctacctggcactcagtgctgatgtgccaccagctttgctcagacacctcttcaattgtggcaggccaggcaactcaccaatggccaggctcctgcccacgatgtgcatccaggcctcggagggaaaggacagcagcgtggcagctttgctgcagaaggccgagccgcacaaccttcagatcacagcagccttcctggcagggctgttgtcccgggagcactggggcctgctggctgagtgccagacatctgagaaggccctgctccggcgccaggcctgtgcccgctggtgtctggcccgcagcctccgcaagcacttccactccatcccgccagctgcaccgggtgaggccaagagcgtgcatgccatgcccgggttcatctggctcatccggagcctgtacgagatgcaggaggagcggctggctcggaaggctgcacgtggcctgaatgttgggcacctcaagttgacattttgcagtgtgggccccactgagtgtgctgccctggcctttgtgctgcagcacctccggcggcccgtggccctgcagctggactacaactctgtgggtgacattggcgtggagcagctgctgccttgccttggtgtctgcaaggctctgtagtgagtgttactgggcattgctgttcagattctggggcaacagagtgggtgacgagggggcccaggccctggctgaagccttgggtgatcaccagagcttgaggtggctcagcctggtggggaacaacattggcagtgtgggtgcccaagccttggcactgatgctggcaaagaacgtcatgctag

SEQ ID NO: 3936 - protein, 261 aa, Homosapiens [sequence omitted]

SEQ ID NO: 3937 - DNA, 1211 bp, Homosapiens
gggcatgtgctgctacgtgttctcagcccagcagctccaggcagcacaggtcagccctgatgacatttctcttggcttcctggtgcgtgccaaaggtgtcgtgccagggagtacggcgcccctggaattccttcacatcactttccagtgcttctttgccgcgttctacctggcactcagtgctgatgtgccaccagctttgctcagacacctcttcaattgtggcaggccaggcaactcaccaatggccaggctcctgcccacgatgtgcatccaggcctcggagggaaaggacagcagcgtggcagctttgctgcagaaggccgagccgcacaaccttcagatcacagcagccttcctggcagggctgttgtcccgggagcactggggcctgctggctgagtgccagacatctgagaaggccctgctccggcgccaggcctgtgcccgctggtgtctggcccgcagcctccgcaagcacttccactccatcccgccagctgcaccgggtgaggccaagagcgtgcatgccatgcccgggttcatctggctcatccggagcctgtacgagatgcaggaggagcggctggctcggaaggctgcacgtggcctgaatgttgggcacctcaagttgacattttgcagtgtgggccccactgagtgtgctgccctggcctttgtgctgcagcacctccggcggcccgtggccctgcagctggactacaactctgtgggtgacattggcgtggagcagctgctgccttgccttggtgtctgcaaggctctgtagtgagtgttactgggcattgctgttcaggtatgggggagcaccatcaaggctaagtgtgggagcaccgagctgggctctagaagtctgggcccagcttcgcctctgccaccctgctttgcaacactgcccagatcccttcccttctgggccttaatttcaatatgtgatgatgacagccacactttattgactggcctatgtgctgggtctggtgctatgctttccggaatgacctcatctaatctctacaaccaccctggcggattctggggcaacagagtgggtgacgagggggcccaggccctggctgaagccttgggtgatcaccagagcttgaggtggctcagcctggtggggaacaacattggcagtgtgggtgcccaagccttggcactgatgctggcaaagaacgtcatgctag

SEQ ID NO: 3938 - protein, 67 aa, Homosapiens
MLSGMTSSNLYNHPGGFWGNRVGDEGAQALAEALGDHQSLRWLSLVGNNIGSVGAQALALMLAKNVM

SEQ ID NO: 3939 - DNA, 1115 bp, Homosapiens
gggcatgtgctgctacgtgttctcagcccagcagctccaggcagcacaggtcagccctgatgacatttctcttggcttcctggtgcgtgccaaaggtgtcgtgccagggagtacggcgcccctggaattccttcacatcactttccagtgcttctttgccgcgttctacctggcactcagtgctgatgtgccaccagctttgctcagacacctcttcaattgtggcaggccaggcaactcaccaatggccaggctcctgcccacgatgtgcatccaggcctcggagggaaaggacagcagcgtggcagctttgctgcagaaggccgagccgcacaaccttcagatcacagcagccttcctggcagggctgttgtcccgggagcactggggcctgctggctgagtgccagacatctgagaaggccctgctccggcgccaggcctgtgcccgctggtgtctggcccgcagcctccgcaagcacttccactccatcccgccagctgcaccgggtgaggccaagagcgtgcatgccatgcccgggttcatctggctcatccggagcctgtacgagatgcaggaggagcggctggctcggaaggctgcacgtggcctgaatgttgggcacctcaagttgacattttgcagtgtgggccccactgagtgtgctgccctggcctttgtgctgcagcacctccggcggcccgtggccctgcagctggactacaactctgtgggtgacattggcgtggagcagctgctgccttgccttggtgtctgcaaggctctgtatttgcgcgataacaatatctcagaccgaggcatctgcaagctcattgaatgtgctcttcactgcgagcaattgcagaagttagctctattcaacaacaaattgactgacggctgtgcacactccatggctaagctccttgcatgcaggcagaacttcttggcattgagattctggggcaacagagtgggtgacgagggggcccaggccctggctgaagccttgggtgatcaccagagcttgaggtggctcagcctggtggggaacaacattggcagtgtgggtgcccaagccttggcactgatgctggcaaagaacgtcatgctag

SEQ ID NO: 3940 - protein, 369 aa, Homosapiens
MCCYVFSAQQLQAAQVSPDDISLGFLVRAKGVVPGSTAPLEFLHITFQCFFAAFYLALSADVPPALLRHLFNCGRPGNSPMARLLPTMCIQASEGKDSSVAALLQKAEPHNLQITAAFLAGLLSREHWGLLAECQTSEKALLRRQACARWCLARSLRKHFHSIPPAAPGEAKSVHAMPGFIWLIRSLYEMQEERLARKAARGLNVGHLKLTFCSVGPTECAALAFVLQHLRRPVALQLDYNSVGDIGVEQLLPCLGVCKALYLRDNNISDRGICKLIECALHCEQLQKLALFNNKLTDGCAHSMAKLLACRQNFLALRFWGNRVGDEGAQALAEALGDHQSLRWLSLVGNNIGSVGAQALALMLAKNVM

SEQ ID NO: 3941 - DNA, 1115 bp, Homosapiens
gggcatgtgctgctacgtgttctcagcccagcagctccaggcagcacaggtcagccctgatgacatttctcttggcttcctggtgcgtgccaaaggtgtcgtgccagggagtacggcgcccctggaattccttcacatcactttccagtgcttctttgccgcgttctacctggcactcagtgctgatgtgccaccagctttgctcagacacctcttcaattgtggcaggccaggcaactcaccaatggccaggctcctgcccacgatgtgcatccaggcctcggagggaaaggacagcagcgtggcagctttgctgcagaaggccgagccgcacaaccttcagatcacagcagccttcctggcagggctgttgtcccgggagcactggggcctgctggctgagtgccagacatctgagaaggccctgctccggcgccaggcctgtgcccgctggtgtctggcccgcagcctccgcaagcacttccactccatcccgccagctgcaccgggtgaggccaagagcgtgcatgccatgcccgggttcatctggctcatccggagcctgtacgagatgcaggaggagcggctggctcggaaggctgcacgtggcctgaatgttgggcacctcaagttgacattttgcagtgtgggccccactgagtgtgctgccctggcctttgtgctgcagcacctccggcggcccgtggccctgcagctggactacaactctgtgggtgacattggcgtggagcagctgctgccttgccttggtgtctgcaaggctctgtatttgcgcgataacaatatctcagaccgaggcatctgcaagctcattgaatgtgctcttcactgcgagcaattgcagaagttagcgctggggaataactacatcactgccgcgggagcccaagtgctggccgaggggctccgaggcaacacctccttgcagttcctgggattctggggcaacagagtgggtgacgagggggcccaggccctggctgaagccttgggtgatcaccagagcttgaggtggctcagcctggtggggaacaacattggcagtgtgggtgcccaagccttggcactgatgctggcaaagaacgtcatgctag

SEQ ID NO: 3942 - protein, 369 aa, Homosapiens
MCCYVFSAQQLQAAQVSPDDISLGFLVRAKGVVPGSTAPLEFLHITFQCFFAAFYLALSADVPPALLRHLFNCGRPGNSPMARLLPTMCIQASEGKDSSVAALLQKAEPHNLQITAAFLAGLLSREHWGLLAECQTSEKALLRRQACARWCLARSLRKHFHSIPPAAPGEAKSVHAMPGFIWLIRSLYEMQEERLARKAARGLNVGHLKLTFCSVGPTECAALAFVLQHLRRPVALQLDYNSVGDIGVEQLLPCLGVCKALYLRDNNISDRGICKLIECALHCEQLQKLALGNNYITAAGAQVLAEGLRGNTSLQFLGFWGNRVGDEGAQALAEALGDHQSLRWLSLVGNNIGSVGAQALALMLAKNVM

SEQ ID NO: 3943 - DNA, 384 bp, Homosapiens
agagacggggaatggcctggatggatgagtcgagacatggggaaagctgcttcctgaattatgtgttctgtgtactcctcttcatcagagcagtggtaaggggtcttttgtgagaggccgggcctctccaccaaaaggcactcagttaacaagcacatccatgggccccactgacccacacggaagcctgggaggatcagcagaggccagtcccatactatggaggaggggctgtccttgtacatcctgggattgaatcttgggaagaagtcaatggtgacctatggtgttcccagaaaacaagttcagccttaggcaggacagggctcattttgaagaggctgccaacacatgtcacccagcctctggggcccaaactcacag

SEQ ID NO: 3944 - protein, 31 aa, Homosapiens
MEEGLSLYILGLNLGKKSMVTYGVPRKQVQP

SEQ ID NO: 3945 - DNA, 556 bp, Homosapiens
atgaaggttgaaataggattccaggatgccgcaacaccgttctcatctacatctggattctccaacaaagctgggaaaaaaacgatccaagggaagccaatcaaagagcctggattgccagtcttccctgctgcgatctccgcctgcgattctccaggggaaatgtcctttatgaccttacagctcacctggaaccctccacctagggcccgaggcagcacatcctctcgtgcccgggcacttccaggcattgccctgagtactgggcacttcacacactgggctggaccactcaccggagtgaataaggaggcttgaagctgtcctggtacaacaatggaatgaagcgctagtctcagctcagccacttggaatatgactccaactctcacatttctgtggggtgtattcatttcagctttttgtttggtgctatggggagggaagggccctcagactggcatcctttttcttccaggatgatgatgaatattatgaaagtctgaggctgtttttaaaattctgctctaatacgttgtttttctgtgcataagaa

SEQ ID NO: 3946 - protein, 105 aa, Homosapiens
MKVEIGFQDAATPFSSTSGFSNKAGKKTIQGKPIKEPGLPVFPAAISACDSPGEMSFMTLQLTWNPPPRARGSTSSRARALPGIALSTGHFTHWAGPLTGVNKEA

SEQ ID NO: 3947 - DNA, 6044 bp, Homosapiens
gggggcgggcccaggtagcaggtttggctgcgcgggggccgcgcgtcggagtttccccctttctagggtgaggatggttctacacagccacccggagttccttagttgaaaggtgcgccctgctgtgacagaatgtggtaattgtaatctttaacattttcatgtaaaacatatttcctgatcatctttccattgtcttcatggaaaattgataaatatttgtgccttccaactctcgtcttggttgaatgacttcatcttaatacaacatggacaccacgttgctgaaaacatgctttgggactgccactgaatttatcttttgcggttttatgacaaagttattagtagtttcccttttttgaattagtattttgaagttaatatcacaatgagttcaggcttatggagccaagaaaaagtcacttcaccctactgggaagagcggattttttacttgcttcttcaagaatgcagcgttacagacaaacaaacacaaaagctccttaaagtaccgaagggaagtataggacagtatattcaagatcgttctgtggggcattcaaggattccttctgcaaaaggcaagaaaaatcagattggattaaaaattctagagcaacctcatgcagttctctttgttgatgaaaaggatgttgtagagataaatgaaaagttcacagagttacttttggcaattaccaattgtgaggagaggttcagcctgtttaaaaacagaaacagactaagtaaaggcctccaaatagacgtgggctgtcctgtgaaagtacagctgagatctggggaagaaaaatttcctggagttgtacgcttcagaggacccctgttagcagagaggacagtctccggaatattctttggagttgaattgctggaagaaggtcgtggtcaaggtttcactgacggggtgtaccaagggaaacagctttttcagtgtgatgaagattgtggcgtgtttgttgcattggacaagctagaactcatagaagatgatgacactgcattggaaagtgattacgcaggtcctggggacacaatgcaggtcgaacttcctcctttggaaataaactccagagtttctttgaaggttggagaaacaatagaatctggaacagttatattctgtgatgttttgccaggaaaagaaagcttaggatattttgttggtgtggacatggataaccctattggcaactgggatggaagatttgatggagtgcagctttgtagttttgcgtgtgttgaaagtacaattctattgcacatcaatgatatcatcccagagagtgtgacgcaggaaaggaggcctcccaaacttgcctttatgtcaagaggtgttggggacaaaggttcatccagtcataataaaccaaaggctacaggatctacctcagaccctggaaatagaaacagatctgaattattttataccttaaatgggtcttctgttgactcacaaccacaatccaaatcaaaaaatacatggtacattgatgaagttgcagaagaccctgcaaaatctcttacagagatatctacagactttgaccgttcttcaccaccactccagcctcctcctgtgaactcactgaccaccgagaacagattccactctttaccattcagtctcaccaagatgcccaataccaatggaagtattggccacagtccactttctctgtcagcccagtctgtaatggaagagctaaacactgcacccgtccaagagagtccacccttggccatgcctcctgggaactcacatggtctagaagtgggctcattggctgaagttaaggagaaccctcctttctatggggtaatccgttggatcggtcagccaccaggactgaatgaagtgctcgctggactggaactggaagatgagtgtgcaggctgtacggatggaaccttcagaggcactcggtatttcacctgtgccctgaagaaggcgctgtttgtgaaactgaagagctgcaggcctgactctaggtttgcatcattgcagccggtttccaatcagattgagcgctgtaactctttagcatttggaggctacttaagtgaagtagtagaagaaaatactccaccaaaaatggaaaaagaaggcttggagataatgattgggaagaagaaaggcatccagggtcattacaattcttgttacttagactcaaccttattctgcttatttgcttttagttctgttctggacactgtgttacttagacccaaagaaaagaacgatgtagaatattatagtgaaacccaagagctactgaggacagaaattgttaatcctctgagaatatatggatatgtgtgtgccacaaaaattatgaaactgaggaaaatacttgaaaaggtggaggctgcatcaggatttacctctgaagaaaaagatcctgaggaattcttgaatattctgtttcatcatattttaagggtagaacctttgctaaaaataagatcagcaggtcaaaaggtacaagattgttacttctatcaaatttttatggaaaaaaatgagaaagttggcgttcccacaattcagcagttgttagaatggtcttttatcaacagtaacctgaaatttgcagaggcaccatcatgtctgattattcagatgcctcgatttggaaaagactttaaactatttaaaaaaatttttccttctctggaattaaatataacagatttacttgaagacactcccagacagtgccggatatgtggagggcttgcaatgtatgagtgtagagaatgctacgacgatccggacatctcagctggaaaaatcaagcagttttgtaaaacctgcaacactcaagtccaccttcatccgaagaggctgaatcataaatataacccagtgtcacttcccaaagacttacccgactgggactggagacacggctgcatcccttgccagaatatggagttatttgctgttctctgcatagaaacaagccactatgttgcttttgtgaagtatgggaaggacgattctgcctggctcttctttgacagcatggccgatcgggatggtggtcagaatggcttcaacattcctcaagtcaccccatgcccagaagtaggagagtacttgaagatgtctctggaagacctgcattccttggactccaggagaatccaaggctgtgcacgaagactgctttgtgatgcatatatgtgcatgtaccagagtccaacaatgagtttgtacaaataactggggtcatcgggaaaggcaaagaaactgaaggcagagtcctaacgttgcatcttattcgagctggcagttctgttcacgtccattgccggcaatggatgtctttgtggtgatgatccttcagaaaaggatgcctctgtttaaaaacaaattgcttttgtgtccctgaagtatttaataagaagcattttgcactctagaaagtatgtttgtgttggttttttaagaagtctaaatgaagttattaatacctgaagctttaagttaagtgcattgatcatatgatatttttggaagcatacaattttaattgtggaagtttaaagcctcttttagtccattgagaatgtaaataaatgtgtcttctttatggaccaaggatatgaaatcatttttcttttgtagctaacggttgccttgaggaagaaataatttggttttattaagagtctactctcaatccagttattagagatgtactgagtttgatttgttaatcctttctatatactgctgatcttgcatgtctacaatctgctcagtttttctgtgtttctgcaatagtggtcagaaaaatacttaaattcccttaatggtgttgttttctatttgttctggttttgagataaatgagtgattctgtccccaaatgtccatttttgaagtgattttcctggaggattagggtatttagcagttgaagctcttcattcatagtagttactgtcagctaacaggttttttaaggcttttaactattaatattttatggaatggggcaaagtaaattgatgaaagaattggagtgataatagtcctttacaaacatacagtccataagaaaatgaatttggcatatagaattattacaatttcctgggagagatggatatttaaacctctattattttagacaagactgtctagaacttaagtttgatctgtcagccagtactcccattaaattcagtgtagtttcacttgatagaatcagatatgttatcgaaatgttagcagcagcttcatcctccttctgattaaagtaagtagaaatgggatgttttgtttaataacagccatagtgtgtgtttagaccacagcggatgttgtagaccaggaccatagatgatacatgtcagtgctgtggaatgtgcattctctgagtgttgttttgtggtatcattgtctttcctgaatgactttctaactgtgcagaaaggcagaaaagtcatcatatgtatatgtcatatgactttataaaatatttaatgtgacaaaaagtggaaagaatctttacaaaccctgcaattacttttttaaaggcacttttactctttggttttatcattccattttgctaatatttactagctttataaattacagtaaggtacaaaaactcatcttgtaatattttcatttttgaagtgaaaaagtacatatattttgcacaaggttttatactgctaagtgcttggttggggtggtgagatgatgattagatcaggggtgaggctgagagactctgggtttagggctagccctgcctccatctcccttgggtaaaatgaagggtgtggggtaaaagatgcataaggccttttctagctctgacagcctagaagtccaatcaccctgtaataaatatgtgttgaatgaagaaatgggtgaatgagcttgtcaatgtgattttaaaaaattgactacctggaggaatgattaggaatctaaatgaagccagccctcggtatctgcaggtttctcatccatggattcaaccaactgcaaatggaaaatacgattttttttaaaaaaaggatggttacatccgtattgaacatgtacagacttttttcttgtcattattctctgaacaatacaagaactctttatgtagcatttacatttattaggtattataagtaatctagagattatttaattaaaatatacaggaggatgtgtgtcagttatatgcaaattctgtaccattttgtatcagggaattgagcatcttcagatgttggtatctgcagggatcctggaaccaaacccctgcagatactaagggctgacgatctaggtaagactggatttaacagttggaaaaaaaaaaaaaaaaggagagagaagacagttcctttcctgtagaaattaaaacaaaatacaaattgaggaagctctgctacccaggctgtcatggtagagaacttgaagaagacctgtttggatggacacctggtttcaaaagtcaggtgtggagactgttaaatgggagggcctcatccataaatgatttctggcaacgtcttcttcaggtggagcttgacgtctttttaatgttacttggggagggagtgctcattaagggatgccagggccagctctggtggttcctggggaggctgcgtccttccctgcttctgcatgtcatgaggcagcaggaaggtttcccctgcacctgtctgtcctggctccctctgggtagccccctactgttctgtgcttcagcacagcctggtttgtcaagaggcacatagttggggctgggctgcatggcacaggggcttatgtgcctgctggttatttaattttcagccttaagttttctttaatattttcctgttggctatttaaaggttttggttatcttttattccttatctacaatcaagatgacaatgtaattgaattatcttatttataacacggttcgtgattcatgattcatgattacaagtagaaaatatgtcatgttcctcacctccaaataaatatgtgtgtgtctgtg

SEQ ID NO: 3948 - protein, 953 aa, Homosapiens
MSSGLWSQEKVTSPYWEERIFYLLLQECSVTDKQTQKLLKVPKGSIGQYIQDRSVGHSRIPSAKGKKNQIGLKILEQPHAVLFVDEKDVVEINEKFTELLLAITNCEERFSLFKNRNRLSKGLQIDVGCPVKVQLRSGEEKFPGVVRFRGPLLAERTVSGIFFGVELLEEGRGQGFTDGVYQGKQLFQCDEDCGVFVALDKLELIEDDDTALESDYAGPGDTMQVELPPLEINSRVSLKVGETIESGTVIFCDVLPGKESLGYFVGVDMDNPIGNWDGRFDGVQLCSFACVESTILLHINDIIPESVTQERRPPKLAFMSRGVGDKGSSSHNKPKATGSTSDPGNRNRSELFYTLNGSSVDSQPQSKSKNTWYIDEVAEDPAKSLTEISTDFDRSSPPLQPPPVNSLTTENRFHSLPFSLTKMPNTNGSIGHSPLSLSAQSVMEELNTAPVQESPPLAMPPGNSHGLEVGSLAEVKENPPFYGVIRWIGQPPGLNEVLAGLELEDECAGCTDGTFRGTRYFTCALKKALFVKLKSCRPDSRFASLQPVSNQIERCNSLAFGGYLSEVVEENTPPKMEKEGLEIMIGKKKGIQGHYNSCYLDSTLFCLFAFSSVLDTVLLRPKEKNDVEYYSETQELLRTEIVNPLRIYGYVCATKIMKLRKILEKVEAASGFTSEEKDPEEFLNILFHHILRVEPLLKIRSAGQKVQDCYFYQIFMEKNEKVGVPTIQQLLEWSFINSNLKFAEAPSCLIIQMPRFGKDFKLFKKIFPSLELNITDLLEDTPRQCRICGGLAMYECRECYDDPDISAGKIKQFCKTCNTQVHLHPKRLNHKYNPVSLPKDLPDWDWRHGCIPCQNMELFAVLCIETSHYVAFVKYGKDDSAWLFFDSMADRDGGQNGFNIPQVTPCPEVGEYLKMSLEDLHSLDSRRIQGCARRLLCDAYMCMYQSPTMSLYK

SEQ ID NO: 3949 - DNA, 8192 bp, Homosapiens
gggggcgggcccaggtagcaggtttggctgcgcgggggccgcgcgtcggagtttccccctttctagggtgaggatggttctacacagccacccggagttccttagttgaaaggtgcgccctgctgtgacagaatgtggtaattgtaatctttaacattttcatgtaaaacatatttcctgatcatctttccattgtcttcatggaaaattgataaatatttgtgccttccaactctcgtcttggttgaatgacttcatcttaatacaacatggacaccacgttgctgaaaacatgctttgggactgccactgaatttatcttttgcggttttatgacaaagttattagtagtttcccttttttgaattagtattttgaagttaatatcacaatgagttcaggcttatggagccaagaaaaagtcacttcaccctactgggaagagcggattttttacttgcttcttcaagaatgcagcgttacagacaaacaaacacaaaagctccttaaagtaccgaagggaagtataggacagtatattcaagatcgttctgtggggcattcaaggattccttctgcaaaaggcaagaaaaatcagattggattaaaaattctagagcaacctcatgcagttctctttgttgatgaaaaggatgttgtagagataaatgaaaagttcacagagttacttttggcaattaccaattgtgaggagaggttcagcctgtttaaaaacagaaacagactaagtaaaggcctccaaatagacgtgggctgtcctgtgaaagtacagctgagatctggggaagaaaaatttcctggagttgtacgcttcagaggacccctgttagcagagaggacagtctccggaatattctttggagttgaattgctggaagaaggtcgtggtcaaggtttcactgacggggtgtaccaagggaaacagctttttcagtgtgatgaagattgtggcgtgtttgttgcattggacaagctagaactcatagaagatgatgacactgcattggaaagtgattacgcaggtcctggggacacaatgcaggtcgaacttcctcctttggaaataaactccagagtttctttgaaggttggagaaacaatagaatctggaacagttatattctgtgatgttttgccaggaaaagaaagcttaggatattttgttggtgtggacatggataaccctattggcaactgggatggaagatttgatggagtgcagctttgtagttttgcgtgtgttgaaagtacaattctattgcacatcaatgatatcatcccagagagtgtgacgcaggaaaggaggcctcccaaacttgcctttatgtcaagaggtgttggggacaaaggttcatccagtcataataaaccaaaggctacaggatctacctcagaccctggaaatagaaacagatctgaattattttataccttaaatgggtcttctgttgactcacaaccacaatccaaatcaaaaaatacatggtacattgatgaagttgcagaagaccctgcaaaatctcttacagagatatctacagactttgaccgttcttcaccaccactccagcctcctcctgtgaactcactgaccaccgagaacagattccactctttaccattcagtctcaccaagatgcccaataccaatggaagtattggccacagtccactttctctgtcagcccagtctgtaatggaagagctaaacactgcacccgtccaagagagtccacccttggccatgcctcctgggaactcacatggtctagaagtgggctcattggctgaagttaaggagaaccctcctttctatggggtaatccgttggatcggtcagccaccaggactgaatgaagtgctcgctggactggaactggaagatgagtgtgcaggctgtacggatggaaccttcagaggcactcggtatttcacctgtgccctgaagaaggcgctgtttgtgaaactgaagagctgcaggcctgactctaggtttgcatcattgcagccggtttccaatcagattgagcgctgtaactctttagcatttggaggctacttaagtgaagtagtagaagaaaatactccaccaaaaatggaaaaagaaggcttggagataatgattgggaagaagaaaggcatccagggtcattacaattcttgttacttagactcaaccttattctgcttatttgcttttagttctgttctggacactgtgttacttagacccaaagaaaagaacgatgtagaatattatagtgaaacccaagagctactgaggacagaaattgttaatcctctgagaatatatggatatgtgtgtgccacaaaaattatgaaactgaggaaaatacttgaaaaggtggaggctgcatcaggatttacctctgaagaaaaagatcctgaggaattcttgaatattctgtttcatcatattttaagggtagaacctttgctaaaaataagatcagcaggtcaaaaggtacaagattgttacttctatcaaatttttatggaaaaaaatgagaaagttggcgttcccacaattcagcagttgttagaatggtcttttatcaacagtaacctgaaatttgcagaggcaccatcatgtctgattattcagatgcctcgatttggaaaagactttaaactatttaaaaaaatttttccttctctggaattaaatataacagatttacttgaagacactcccagacagtgccggatatgtggagggcttgcaatgtatgagtgtagagaatgctacgacgatccggacatctcagctggaaaaatcaagcagttttgtaaaacctgcaacactcaagtccaccttcatccgaagaggctgaatcataaatataacccagtgtcacttcccaaagacttacccgactgggactggagacacggctgcatcccttgccagaatatggagttatttgctgttctctgcatagaaacaagccactatgttgcttttgtgaagtatgggaaggacgattctgcctggctcttctttgacagcatggccgatcgggatggtggtcagaatggcttcaacattcctcaagtcaccccatgcccagaagtaggagagtacttgaagatgtctctggaagacctgcattccttggactccaggagaatccaaggctgtgcacgaagactgctttgtgatgcatatatgtgcatgtaccagagtccaacaatgagtttgtacaaataactggggtcatcgggaaaggcaaagaaactgaaggcagagtcctaacgttgcatcttattcgagctggcagttctgttcacgtccattgccggcaatggatgtctttgtggtgatgatccttcagaaaaggatgcctctgtttaaaaacaaattgcttttgtgtccctgaagtatttaataagaagcattttgcactctagaaagtatgtttgtgttggttttttaagaagtctaaatgaagttattaatacctgaagctttaagttaagtgcattgatcatatgatatttttggaagcatacaattttaattgtggaagtttaaagcctcttttagtccattgagaatgtaaataaatgtgtcttctttatggaccaaggatatgaaatcatttttcttttgtagctaacggttgccttgaggaagaaataatttggttttattaagagtctactctcaatccagttattagagatgtactgagtttgatttgttaatcctttctatatactgctgatcttgcatgtctacaatctgctcagtttttctgtgtttctgcaatagtggtcagaaaaatacttaaattcccttaatggtgttgttttctatttgttctggttttgagataaatgagtgattctgtccccaaatgtccatttttgaagtgattttcctggaggattagggtatttagcagttgaagctcttcattcatagtagttactgtcagctaacaggttttttaaggcttttaactattaatattttatggaatggggcaaagtaaattgatgaaagaattggagtgataatagtcctttacaaacatacagtccataagaaaatgaatttggcatatagaattattacaatttcctgggagagatggatatttaaacctctattattttagacaagactgtctagaacttaagtttgatctgtcagccagtactcccattaaattcagtgtagtttcacttgatagaatcagatatgttatcgaaatgttagcagcagcttcatcctccttctgattaaagtaagtagaaatgggatgttttgtttaataacagccatagtgtgtgtttagaccacagcggatgttgtagaccaggaccatagatgatacatgtcagtgctgtggaatgtgcattctctgagtgttgttttgtggtatcattgtctttcctgaatgactttctaactgtgcagaaaggcagaaaagtcatcatatgtatatgtcatatgactttataaaatatttaatgtgacaaaaagtggaaagaatctttacaaaccctgcaattacttttttaaaggcacttttactctttggttttatcattccattttgctaatatttactagctttataaattacagtaaggtacaaaaactcatcttgtaatattttcatttttgaagtgaaaaagtacatatattttgcacaaggttttatactgctaagtgcttggttggggtggtgagatgatgattagatcaggggtgaggctgagagactctgggtttagggctagccctgcctccatctcccttgggtaaaatgaagggtgtggggtaaaagatgcataaggccttttctagctctgacagcctagaagtccaatcaccctgtaataaatatgtgttgaatgaagaaatgggtgaatgagcttgtcaatgtgattttaaaaaattgactacctggaggaatgattaggaatctaaatgaagccagccctcggtatctgcaggtttctcatccatggattcaaccaactgcaaatggaaaatacgattttttttaaaaaaaggatggttacatccgtattgaacatgtacagacttttttcttgtcattattctctgaacaatacaagaactctttatgtagcatttacatttattaggtattataagtaatctagagattatttaattaaaatatacaggaggatgtgtgtcagttatatgcaaattctgtaccattttgtatcagggaattgagcatcttcagatgttggtatctgcagggatcctggaaccaaacccctgcagatactaagggctgacgatctaggtaagactggatttaacagttggaaaaaaaaaaaaaaaaggagagagaagacagttcctttcctgtagaaattaaaacaaaatacaaattgaggaagctctgctacccaggctgtcatggtagagaacttgaagaagacctgtttggatggacacctggtttcaaaagtcaggtgtggagactgttaaatgggagggcctcatccataaatgatttctggcaacgtcttcttcaggtggagcttgacgtctttttaatgttacttggggagggagtgctcattaagggatgccagggccagctctggtggttcctggggaggctgcgtccttccctgcttctgcatgtcatgaggcagcaggaaggtttcccctgcacctgtctgtcctggctccctctgggtagccccctactgttctgtgcttcagcacagcctggtttgtcaagaggcacatagttggggctgggctgcatggcacaggggcttatgtgcctgctggttatttaattttcagccttaagttttctttaatattttcctgttggctatttaaaggttttggttatcttttattccttatctacaatcaagatgacaatgtaattgaattatcttatttataacacggttcgtgattcatgattcatgattacaagtagaaaatatgtcatgttcctcacctccaaataaatatgtgtgtgtctgtgtgtgtgtatatatgtatgtggcggagagggagagagtggggaaggagagcagtgttatcatacatagagaggctaaatgtgtcccatccctcactgtcagctttataaaggagtttgactccatccacagaagaatgttttataagactaggaaaacacgttgaaaactaggataaacagcaacaaaaatcaactaaatatgttgttactgttgctaaggattttctccttagaataatttaggatttttaaaaatttctgtttgccaaatgctgtagataaatggccagattcttcctatccctaggattcctttattattttttttcacagattttgagaacaagggggagagatagtatggaagattaagattccattaatcttatagaactgtgttgtcacccaaattcctgcttgtttgaacatggcatcttcatagattcaggattcactaccctctatagctggatcttgaaaattatctggccagataattttgcatctgcttggatgattgtagactgagatgtgagtggaggataaagtattagacttttgctgagtaactgccaaccaagaagtatttatcggacacttactaggtgcctaggattgtatcagagggaatatgaaatgtgtccctgccctacctagttttaacgacagaatatctattaaaggctacttagctgaagggtaagggtgacaggtctaggggaagctttgggaggtggtgtgctgtgacagaaaaagtggcagagtagggacgagagacctgcattctagccctgtttctgtcacttgctctgtacacttagacaacagcttgacctcttgagctttagtttcctcctctgcataatgagagggttagactactgaattgtatgggaaaaaaatacaaattcctgggtcctaggccatgcctgctgaatccgactgttcaggaagaggcctaggaaatctgtgagggaatccccaggggaatctcgtgaccagccaggtgtgaaatctgctaactggaagatctcaaagcttccttcactttttgtgattttgtggtcatgtaacgttactgtattattctacgtaaatgtgggtacttggatgtttatcatactgtttctctgtgtttacatactaatttgtgtaagaaatgcattttagtctgtgtacctcaacctgctgtttgtttcctagaggtgttagtagtctttaaatacaagtaagacttaagaggatatttgatgttatttacctggatattttcttccccttttatttatttagaggaaattgagattctaggagccaaaaaaatgaaaacaaaattctaaggcaaagttaaagaaaaaaattacattatttcttaccatttgctactttataatgaaaatttaaaaattatatgggaagatttttctctgggataacaaatccttgtcataaagtaagaggtctttttaaagtaggtaggctataaggcctgtaatttaaaataatactcctttctctagggtttggtgcaattctccattaatgaagataacatttgaattccccaaagcaggtgaggagtcggggaggagaaagcgatgttaaaatgaaaactcactgcaaaagaggaggcagaggaagaaggaatgtaaaccccttaaagcagatgtgtgtggggccttatgaagaccaggattctgcgggtgtcaggggattgcccctcttgacagagactagggttttagactgaggcttcctgcagggtgttcgcattgcccttctccgttccccttcagacctttctggggagaagaggtgggaggaggggagaaagactgttcatcttattctgaatcctggagcagctgaaggttttctcttgagtcaggatgcagtggtaatgcattaaccagcaagtgtggccaaggataatgaaaaagtgggaaaggaaggtcctcctcctccctgattgtagcatccagcagtctctgtagccaggttactcaagaaccacatttgatttcctggccctttgccttggcagtgatggcatttttatttcactgtgttttaaagtcttcatttatttttataacatgggttagggagaagggccacaaatggagggattgtcctttcaagcaccac

SEQ ID NO: 3950 - protein, 953 aa, Homosapiens; identical to SEQ ID NO: 3948

SEQ ID NO: 3951 - DNA, 3519 bp, Homosapiens
ggtgtggggagccggggccggcccgggacgcgggctggggagccggggcgaggggcgacgccccgccgcccgagtttccccctttctagggtgaggatggttctacacagccacccggagttccttagttgaaaggtgcgccctgctgtgacagcatggacaccacgttgctgaaaacatgctttgggactgccactgaatttatcttttgcggttttatgacaaagttattagtagtttcccttttttgaattagtattttgaagttaatatcacaatgagttcaggcttatggagccaagaaaaagtcacttcaccctactgggaagagcggattttttacttgcttcttcaagaatgcagcgttacagacaaacaaacacaaaagctccttaaagtaccgaagggaagtataggacagtatattcaagatcgttctgtggggcattcaaggattccttctgcaaaaggcaagaaaaatcagattggattaaaaattctagagcaacctcatgcagttctctttgttgatgaaaaggatgttgtagagataaatgaaaagttcacagagttacttttggcaattaccaattgtgaggagaggttcagcctgtttaaaaacagaaacagactaagtaaaggcctccaaatagacgtgggctgtcctgtgaaagtacagctgagatctggggaagaaaaatttcctggagttgtacgcttcagaggacccctgttagcagagaggacagtctccggaatattctttggagttgaattgctggaagaaggtcgtggtcaaggtttcactgacggggtgtaccaagggaaacagctttttcagtgtgatgaagattgtggcgtgtttgttgcattggacaagctagaactcatagaagatgatgacactgcattggaaagtgattacgcaggtcctggggacacaatgcaggtcgaacttcctcctttggaaataaactccagagtttctttgaaggttggagaaacaatagaatctggaacagttatattctgtgatgttttgccaggaaaagaaagcttaggatattttgttggtgtggacatggataaccctattggcaactgggatggaagatttgatggagtgcagctttgtagttttgcgtgtgttgaaagtacaattctattgcacatcaatgatatcatcccagagagtgtgacgcaggaaaggaggcctcccaaacttgcctttatgtcaagaggtgttggggacaaaggttcatccagtcataataaaccaaaggctacaggatctacctcagaccctggaaatagaaacagatctgaattattttataccttaaatgggtcttctgttgactcacaaccacaatccaaatcaaaaaatacatggtacattgatgaagttgcagaagaccctgcaaaatctcttacagagatatctacagactttgaccgttcttcaccaccactccagcctcctcctgtgaactcactgaccaccgagaacagattccactctttaccattcagtctcaccaagatgcccaataccaatggaagtattggccacagtccactttctctgtcagcccagtctgtaatggaagagctaaacactgcacccgtccaagagagtccacccttggccatgcctcctgggaactcacatggtctagaagtgggctcattggctgaagttaaggagaaccctcctttctatggggtaatccgttggatcggtcagccaccaggactgaatgaagtgctcgctggactggaactggaagatgagtgtgcaggctgtacggatggaaccttcagaggcactcggtatttcacctgtgccctgaagaaggcgctgtttgtgaaactgaagagctgcaggcctgactctaggtttgcatcattgcagccggtttccaatcagattgagcgctgtaactctttagcatttggaggctacttaagtgaagtagtagaagaaaatactccaccaaaaatggaaaaagaaggcttggagataatgattgggaagaagaaaggcatccagggtcattacaattcttgttacttagactcaaccttattctgcttatttgcttttagttctgttctggacactgtgttacttagacccaaagaaaagaacgatgtagaatattatagtgaaacccaagagctactgaggacagaaattgttaatcctctgagaatatatggatatgtgtgtgccacaaaaattatgaaactgaggaaaatacttgaaaaggtggaggctgcatcaggatttacctctgaagaaaaagatcctgaggaattcttgaatattctgtttcatcatattttaagggtagaacctttgctaaaaataagatcagcaggtcaaaaggtacaagattgttacttctatcaaatttttatggaaaaaaatgagaaagttggcgttcccacaattcagcagttgttagaatggtcttttatcaacagtaacctgaaatttgcagaggcaccatcatgtctgattattcagatgcctcgatttggaaaagactttaaactatttaaaaaaatttttccttctctggaattaaatataacagatttacttgaagacactcccagacagtgccggatatgtggagggcttgcaatgtatgagtgtagagaatgctacgacgatccggacatctcagctggaaaaatcaagcagttttgtaaaacctgcaacactcaagtccaccttcatccgaagaggctgaatcataaatataacccagtgtcacttcccaaagacttacccgactgggactggagacacggctgcatcccttgccagaatatggagttatttgctgttctctgcatagaaacaagccactatgttgcttttgtgaagtatgggaaggacgattctgcctggctcttctttgacagcatggccgatcgggatggtggtcagaatggcttcaacattcctcaagtcaccccatgcccagaagtaggagagtacttgaagatgtctctggaagacctgcattccttggactccaggagaatccaaggctgtgcacgaagactgctttgtgatgcatatatgtgcatgtaccagagtccaacaatgagtttgtacaaataactggggtcatcgggaaaggcaaagaaactgaaggcagagtcctaacgttgcatcttattcgagctggcagttctgttcacgtccattgccggcaatggatgtctttgtggtgatgatccttcagaaaaggatgcctctgtttaaaaacaaattgcttttgtgtccctgaagtatttaataagaagcattttgcactctagaaagtatgtttgtgttggttttttaagaagtctaaatgaagttattaatacctgaagctttaagttaagtgcattgatcatatgatatttttggaagcatacaattttaattgtggaagtttaaagcctcttttagtccattgagaatgtaaataaatgtgtcttctttatggaccaagg

SEQ ID NO: 3952 - protein, 953 aa, Homosapiens; identical to SEQ ID NO: 3948

SEQ ID NO: 3953 - DNA, 428 bp, Homosapiens
agcgtaaaaaataccaaactaacaaaccaaccttcttgatgataaataactcatttacaatgtgatttagatctttcccttcatattgtgttgagtcagtttttactgcttggggtacctaagactttaactatttaactactatgcacatcccagtgaaagtagactgttggtgttatattcacttctacagtggggagaaatgtatgttagcatatttttattgcaatactggtattttgagtacataaaataaatatatatatataatggagtgtgtatatatgtgagagagtgtgtgacagggtcttgctttttcacccaggctgaagtaggaggatcacttgagcctggaaggtcttggccacagtgaactgtgattgtgccactgcagtccagcatgggcaacaagagtgagaccctgtctc

SEQ ID NO: 3954 - protein, 35 aa, Homosapiens
MHIPVKVDCWCYIHFYSGEKCMLAYFYCNTGILST

SEQ ID NO: 3955 - DNA, 357 bp, Homosapiens
catttagattcctaatcattcctccaggtaccaggacccctgtgaagatacccatggttcaatcatcaggacctacagatccttccatgttaaggacaacaccaataatactgagaaagcaaacggcagattggcagtgttaaaggataacaacgtgccaacagaatattaagaaagaaaacttctttgcaaaagttgatagagagactacaaatatcagtcaaattacaaacagacaacagaggacagcatttggaaacgacttcccgaggcaagcactattcagtgccccacttccctctccccatgcccctttgcaaagatctattacattaataaatttctttaaatgctaaa

SEQ ID NO: 3956 - protein, 54 aa, Homosapiens
IPNHSSRYQDPCEDTHGSIIRTYRSFHVKDNTNNTEKANGRLAVLKDNNVPTEY

SEQ ID NO: 3957 - DNA, 786 bp, Homosapiens
cataaggagctttgacaaggacccactgtctggccccatcttcagagattccaataggtctggggtgtgcacaggcactggcgtctttaaaatctccctgtgtgaattcaacatgcaaccaggattgaatggagaactgctgctcgaagtttgataatgaggtgataatgaggaagaacatgcctcagcaagtcagaaaaaggggcttaggggagggccagtggctcctccttcggccaggccagctttcttctgacaaggacttgttttcacaactgtccagatccgcagatgggcacaagatgatggaatgaagcagcgggggacaacttctggctggagtggcttggaggctggagcagctgagctttaacaagcatcagaggtcagaattacttggctagatcaagaagccacacagcatcataatgccgctggcacatctcccagaacagggtaccaggacccctgtgaagatacccatggttcaatcatcaggacctacagatccttccatgttaaggacaacaccaataatactgagaaagcaaacggcagattggcagtgttaaaggataacaacgtgccaacagaatattaagaaagaaaacttctttgcaaaagttgatagagagactacaaatatcagtcaaattacaaacagacaacagaggacagcatttggaaacgacttcccgaggcaagcactattcagtgccccacttccctctccccatgcccctttgcaaagatctattacattaataaatttctttaaatgctaaa

SEQ ID NO: 3958 - protein, 61 aa, Homosapiens
MENCCSKFDNEVIMRKNMPQQVRKRGLGEGQWLLLRPGQLSSDKDLFSQLSRSADGHKMME

SEQ ID NO: 3959 - DNA, 1141 bp, Homosapiens
ggattgtatcagagggaatatgaaatgtgtccctgccctacctagttttaacgacagaatatctattaaaggctacttagctgaagggtaagggtgacaggtctaggggaagctttgggaggtggtgtgctgtgacagaaaaagtggcagagtagggacgagagacctgcattctagccctgtttctgtcacttgctctgtacacttagacaacagcttgacctcttgagctttagtttcctcctctgcataatgagagggttagactactgaattgtatgggaaaaaaatacaaattcctgggtcctaggccatgcctgctgaatccgactgttcaggaagaggcctaggaaatctgtgagggaatccccaggggaatctcgtgaccagccaggtgtgaaatctgctaactggaagatctcaaagcttccttcactttttgtgattttgtggtcatgtaacgttactgtattattctacgtaaatgtgggtacttggatgtttatcatactgtttctctgtgtttacatactaatttgtgtaagaaatgcattttagtctgtgtacctcaacctgctgtttgtttcctagaggtgttagtagtctttaaatacaagtaagacttaagaggatatttgatgttatttacctggatattttcttccccttttatttatttagaggaaattgagattctaggagccaaaaaaatgaaaacaaaattctaaggcaaagttaaagaaaaaaattacattatttcttaccatttgctactttataatgaaaatttaaaaattatatgggaagatttttctctgggataacaaatccttgtcataaagtaagaggtctttttaaagtaggtaggctataaggcctgtaatttaaaataatactcctttctctagggtttggtgcaattctccattaatgaagataacatttgaattccccaaagcagaacatcctatatttatgagaacattctttaagaagaccaccacatagaataccccttcctatcagctcgctctgatttagccttaattttgttaaattttttagagatgaatgaagtgctgctgtggaaagaaatgtacatatactatttctgtatcattaaaattacatttttatggtt

SEQ ID NO: 3960 - protein, 52 aa, Homosapiens
RYCIILRKCGYLDVYHTVSLCLHTNLCKKCILVCVPQPAVCFLEVLVVFKYK

SEQ ID NO: 3961 - DNA, 348 bp, Homosapiens
ggcaccgtctacaaacggggtttaaaatgagctagcgccatctactgggcgaatgccgtaaggtcggttgtgaggtcccggaatctgcaaaggaatgaatgaattacaaatctgtggctttatggggggaatgtcgagaatcgggcacacgctgaagtgtgagaaccactgccattatggagaagaggcttcccgccccctcacctgccactctagaaatccagagaagagattccacttggattaagacttgcataagtggggagttgagtccagtctctttcccccactgcaataccctgttgcggtgacatgtaataataataaaaagacttgcatgaactcctt

SEQ ID NO: 3962 - protein, 50 aa, Homosapiens
MNELQICGFMGGMSRIGHTLKCENHCHYGEEASRPLTCHSRNPEKRFHLD

SEQ ID NO: 3963 - DNA, 982 bp, Homosapiens
caggggaggaaaggtcttgagggagcagcacgcttgcctgatgggtgcccaaagccaggggcaggtggaggtgagagaaggacaagctctgcaaacgttgcggaagcgctctgtccatggagaaggcacaggacttccatgtggggagcagcttactcctgctgagaactttggggagacagagtggagcagccatctcagacctgagcggctaaggagctgggtccccctctgtcgcactgtgcagagctgctggactttgcagtaagcagccttcaggtctaaaggctccacattgtaaggaagcccagtcacatggacagaccatatgggtccagttggctgccccagccaaggtttcagccaacagccaagattacccacagccacgtgtatgaatgagccttcaaatgagtccagcacccagcagaataatgccccctcccgtctcacaaagatttccatgccctaattcctggaacctgtgaatctgctacatcacatggcaagcagagctggcagatggaatttagggtgtggagcttgaggtggggagggcagcctggattacacaggtgggccctatctaagcacatgagcccttatacaagcaaagaacatttcctcagctgccagacagctggcaaacagaattggaggggcagagagatgtaatcagaaagggcagaagagacttaaaaggaagagaggctcgacctgctgtggctacctttgaaaatggaggaatggggctccaagccaagggatgcaggctgcctcttcattggagtactgccagcaagaaaacagcccagcaattgcaaggaaattaattttcccaacagtctgaatgagcaagaaaatggactctcccctgccacgccctgagttcagccttgtgagactctaagcagatacccactcaagcccacaggacgtccaacccataacaattgtaagataataaactgggatagtttta

SEQ ID NO: 3964 - protein, 75 aa, Homosapiens
MGAQSQGQVEVREGQALQTLRKRSVHGEGTGLPCGEQLTPAENFGETEWSSHLRPERLRSWVPLCRTVQSCWTLQ

SEQ ID NO: 3965 - DNA, 412 bp, Homosapiens
gaggcatcagtctgaaatctccagtacaggtaggtggcaggcatggtgcatgttagctgaaatcactctttacctgagaggccacacacgcacagcggcactgaataaattagagaaaatagacgtgcttctcggaaagggtagtgggaagcctctgtgctcccggcgctgttgtaagtgcattctttcctcaggttccatgaaagcatgtcccgtggggcccatcctgaagccaacgggctgggtccagtgaggggcagaagaggtcaggagggaggtgggaaagctagcagagcccttcctggctgcacaccccaagatctgggcctcacaagcatctgggcactcgttcagggcgccccactcagaatgttcatagtgccccaaggtagagaagccctgctctcaggag

SEQ ID NO: 3966 - protein, 67 aa, Homosapiens
MSRGAHPEANGLGPVRGRRGQEGGGKASRALPGCTPQDLGLTSIWALVQGAPLRMFIVPQGREALLS

SEQ ID NO: 3967 - DNA, 1129 bp, Homosapiens
cagtgcccactttgttcatctctgctcactgggggagccaggacacggatccaggttttctgactccaggtaggcacccaaatcaagactcagatttcctcatctcagaagttgtccacttcttctccgacctccacggtaactcggaaccacaccgtggagttatccctgtgtcctctttctcggaagttccacatccaacccctcagcaggtctcagcggcactctcaccacctcctctgctctgttcctgtttctcttggatggtcgaatgtttcctaaggagtgtctgctgcttcacgcttgccccctggagtggcatctaaaaggataccctacaactaacaggcatgatgccatcaagacatcttgagcctggctacctcccgtggcctgtattttgtccacaggaaactcgcgcagtctcactacagcaaattgaggtggtatggggtgcctgctgctgcctctctcttcacctttccacagagggctgccccagcctgactcccacttccagagtttctccagccaggagaatcctgaaatctctgtaaataagcaatccaggagccagagaatcatgggatctcatataaacaaatcatcaaggaaaaacacagccagagtctccatttggtaaacctccgtgactggggatccccggccacccagaaagcagtattgcctgccatgcatgtcatcactgatttttactgctgcagcagactccgtcagacctgcctgctgcttcagcgaattgttcagtgcacaccaccagctacctgctgtaagcattcacactcctctacctgcctggcagcatttctcagctgaacacaggccaggccagaagtgccagggatttaatgcccttagaagtagctctctaccaatgacaaatggagctggtggatacattctcagcttcctcccctctcaggtggaacagccctgagatgtgctctatgcaatctcccacaagtccccagcaggctcaagctcccattgtccaaccctggtaacctgctcattgacacccctgtcttgccttcccttcctggcctcactttctcactctcttactgttgcctcctgagatcgcatccaaaataaatgacctgcaccc

SEQ ID NO: 3968 - protein, 68 aa, Homosapiens
MMPSRHLEPGYLPWPVFCPQETRAVSLQQIEVVWGACCCLSLHLSTEGCPSLTPTSRVSPARRILKSL

SEQ ID NO: 3969 - DNA, 1174 bp, Homosapiens
cagtgcccactttgttcatctctgctcactgggggagccaggacacggatccaggttttctgactccaggtctcaggcttgctccatagcgccacctgctggtgacggcaatcggtaggcacccaaatcaagactcagatttcctcatctcagaagttgtccacttcttctccgacctccacggtaactcggaaccacaccgtggagttatccctgtgtcctctttctcggaagttccacatccaacccctcagcaggtctcagcggcactctcaccacctcctctgctctgttcctgtttctcttggatggtcgaatgtttcctaaggagtgtctgctgcttcacgcttgccccctggagtggcatctaaaaggataccctacaactaacaggcatgatgccatcaagacatcttgagcctggctacctcccgtggcctgtattttgtccacaggaaactcgcgcagtctcactacagcaaattgaggtggtatggggtgcctgctgctgcctctctcttcacctttccacagagggctgccccagcctgactcccacttccagagtttctccagccaggagaatcctgaaatctctgtaaataagcaatccaggagccagagaatcatgggatctcatataaacaaatcatcaaggaaaaacacagccagagtctccatttggtaaacctccgtgactggggatccccggccacccagaaagcagtattgcctgccatgcatgtcatcactgatttttactgctgcagcagactccgtcagacctgcctgctgcttcagcgaattgttcagtgcacaccaccagctacctgctgtaagcattcacactcctctacctgcctggcagcatttctcagctgaacacaggccaggccagaagtgccagggatttaatgcccttagaagtagctctctaccaatgacaaatggagctggtggatacattctcagcttcctcccctctcaggtggaacagccctgagatgtgctctatgcaatctcccacaagtccccagcaggctcaagctcccattgtccaaccctggtaacctgctcattgacacccctgtcttgccttcccttcctggcctcactttctcactctcttactgttgcctcctgagatcgcatccaaaataaatgacctgcaccc

SEQ ID NO: 3970 - protein, 68 aa, Homosapiens; identical to SEQ ID NO: 3968

SEQ ID NO: 3971 - DNA, 434 bp, Homosapiens
ctaaattgttacaaatgggacagtatatgtgccattccagatacctaatcacagctcaatcgatgctggtgtctttttcctttttccttctgcagaaaacatgctttacataggatctctgaacttaaagaatgggaagaagaaaaatcatgtttccagcttgggctgctgtttcatctgttggacttgcttgatccctgaatggaaaggaatgctatgcacactttttggatacaggaagtgagattcagaggggttaaacagctttcctaaagccacacagcgagagagtcgatctgaactgaagattgtttgacatcaaagctcatttctttccctaaatgtcagcattctttcctgacttattaatttgatttctgtcctcccctcatggaagttaattaaaggaatgcgagaaccttttagaaaatctc

SEQ ID NO: 3972 - protein, 47 aa, Homosapiens
MLYIGSLNLKNGKKKNHVSSLGCCFICWTCLIPEWKGMLCTLFGYRK

SEQ ID NO: 3973 - DNA, 400 bp, Homosapiens
cgtggctcaaatcctccaactgcaggactgccggccctgggactcatgaataatggaagtgcagtaaccactccttacagcccagacgactttccaggagcaggctgtaccccgaaagtaaacaaggaacaaggggcaaggagacagagagagatggggaaatgatccctgaatggaaaggaatgctatgcacactttttggatacaggaagtgagattcagaggggttaaacagctttcctaaagccacacagcgagagagtcgatctgaactgaagattgtttgacatcaaagctcatttctttccctaaatgtcagcattctttcctgacttattaatttgatttctgtcctcccctcatggaagttaattaaaggaatgcgagaaccttttagaaa

SEQ ID NO: 3974 - protein, 39 aa, Homosapiens
MNNGSAVTTPYSPDDFPGAGCTPKVNKEQGARRQREMGK

SEQ ID NO: 3975 - DNA, 313 bp, Homosapiens
ctgtttggggctcagtcttagcttaggaaactgtttgccagtttcacccatcctctgccatggatgctaggaggactgatttctgtaggctgcatctcagatttccatgtcacttcattcccagtttggttcagccagtgggagatccttgaaggtgtctgagttggggccattccaccgcaacctgcccctgctggactcatctgtggttgcactcatcatgaaagcaaagtctttctgtctctcggccttcctttcctcccttgcaagaagtcaaacctgacagaggtcggcaggcgggtggatgagtgag

SEQ ID NO: 3976 - protein, 58 aa, Homosapiens
MSLHSQFGSASGRSLKVSELGPFHRNLPLLDSSVVALIMKAKSFCLSAFLSSLARSQT

SEQ ID NO: 3977 - DNA, 5122 bp, Homosapiens
ttgagccagcatgtcgcggaggaagcaagcgaagcctcaacatttccaatccgaccccgaagtggcctcgctcccccggcgagatggagacacagaaaagggtcaaccgagtcgccctactaagagcaaggatgcccacgtctgtggccggtgctgtgccgagttctttgaattatcagatcttctgctccacaagaagaactgtactaaaaatcaattagttttaatcgtaaatgaaaatccagcctccccacccgaaaccttctcccccagcccccctcctgataatcctgatgaacaaatgaatgacacagttaacaaaacagatcaagtggactgcagcgacctttcagaacacaacggacttgacagggaagagtccatggaggtggaggccccggttgctaacaaaagcggcagcggcacttccagcggcagccacagcagtaccgccccaagcagcagcagcagcagcagcagcagcagcggcggcggcggcagctcctccacaggtacctcagcgatcacaacctctctacctcaactcggggacctgacaacactgggcaacttctccgtaatcaacagcaacgtcatcatcgagaacctccagagcaccaaggtggcggtggcccagttctcccaggaagcgaggtgcggcggggcctctgggggcaagctggccgtcccagccctcatggaacaactcctagctctgcagcagcagcagatccaccagctgcaattgatcgaacagattcgtcaccaaatattgctgttggcttctcagaatgcagacttgccaacatcttctagtccttctcaaggtactttacgaacatctgccaaccccttgtccacgctaagttcccatttatctcagcagctggcagcagcagctggattggcacagagcctcgccagccaatctgccagcattagtggtgtgaaacagctacccccaatccagctacctcagagcagttctggcaacaccatcattccatccaacagcggctcttctcccaatatgaacatattggcagcggcagttaccaccccgtcctctgaaaaagtggcttcaagtgctggggcctcccatgtcagcaacccagcggtctcatcatcgtcctcaccagcttttgcaataagcagtttattaagtcctgcgtctaatccacttctacctcagcaagcctccgctaactcggttttccccagccctttgcccaacatcggaacaactgcagaggatttaaactccttgtctgccttggcccagcaaagaaaaagcaagccaccaaatgtcactgcctttgaagcgaaaagtacttccgatgaggcattcttcaaacacaagtgcaggttctgcgcgaaggtctttgggagtgacagtgccttgcagatccacttgcgttcccataccggagagaggccattcaagtgcaacatctgcgggaacaggttctccaccaaggggaatctgaaagtccactttcagcgccacaaagagaaataccctcatatccagatgaacccctatcctgtgcctgagcatttggacaatatccccacgagtactggcatcccatatggcatgtccatccctccagagaagccagtcaccagctggctagacaccaaaccagtcctgcctactctgaccacttcagtcggcctgccgttgcccccaaccctcccaagcctcatacccttcatcaagacggaagagccagcccccatccccatcagccattctgccaccagccccccaggctcagtcaaaagtgactccgggggccctgagtcagccacaagaaacctaggtgggctcccagaggaagccgaagggtccactctgccaccctctggtggcaaaagcgaagagagtggcatggtcaccaactcagtcccgacggcgagcagtagcgtcctgagctccccagcggcagactgcggccccgcgggcagtgccaccaccttcaccaaccctttgttgccgctcatgtccgagcagttcaaggccaagtttccttttgggggactcctggactcagctcaggcatcagagacgtccaagcttcagcaactggtagaaaacattgacaagaaggccactgaccccaatgagtgcatcatctgccaccgggttctcagctgccagagcgccttgaaaatgcactacaggacacacactggggagaggccctttaagtgtaagatctgtggccgggctttcaccacgaaagggaatcttaaaacccactacagtgtccatcgtgctatgcccccgctcagagtccagcattcctgccccatctgccagaagaagttcacgaacgctgtggtcctgcagcagcacatccgaatgcatatgggaggccagatccccaacaccccagtccccgacagctactctgagtccatggagtctgacacaggttcctttgatgagaaaaattttgatgacctagacaacttctctgatgaaaacatggaagactgtcctgagggcagcatccctgatacacctaagtctgcagacgcctcccaagacagcttatcctcttcgcctttgcccctcgagatgtcgagcatcgctgctttggaaaatcagatgaagatgatcaatgctggcctggcagagcagctacaggccagcctgaagtcagtggagaatgggtccatcgagggggatgtcctgaccaatgattcatcctcagtgggtggtgacatggaaagccaaagtgctggcagcccagccatctcagagtctacctcttccatgcaggctctgtccccgtccaacagcacgcaggagttccacaagtcacccagcattgaggagaaaccacagagagcggtcccaagcgagtttgccaatggtttgtctcccaccccagtgaatggtggggctttggatttgacatctagtcacgcagagaaaatcatcaaagaagattctttggggatcctcttcccttttagagaccggggtaaatttaaaaacactgcttgtgacatttgtggcaaaacatttgcttgtcagagtgccttggacattcactatagaagtcataccaaagagagaccatttatttgcacagtttgcaatcgtggcttttccacaaagggtaatttgaagcagcacatgttgacacatcagatgcgagatctgccatcccagctctttgagcccagttccaaccttggccccaatcagaactcagcggtgattcccgccaactcgttgtcatctctcatcaagacagaggtcaacggcttcgtgcatgtttctcctcaggacagtaaggacacccccaccagtcacgtcccgtctgggcctctgtcttcctctgccacatccccagttctgctccctgctctgcccaggagaactcccaagcagcactactgcaacacatgtggcaaaaccttctcctcatcgagtgccctgcagattcacgagagaactcacactggagagaaaccctttgcttgcactatttgtggaagagctttcacgactaaaggcaatcttaaggtacacatgggcactcacatgtggaatagcacccctgcacgacggggtcggcggctctctgtggatggccccatgacatttctaggaggcaatcccgtcaagttcccagaaatgttccagaaggatttggcggcaagatcaggaagtggggatccttccagcttctggaatcagtatgcagcagcgctctccaacgggctggcgatgaaggccaacgagatctccgtcattcagaacggtggcatccctccaattcctggaagcctcggcagtgggaacagctcacctgttagtgggctgacgggaaacctggagaggctccagaactcagagcccaatgctcccctggccggcctggagaaaatggcaagcagtgagaacggaaccaacttccgcttcacccgcttcgtggaggacagcaaggagatcgtcacgagttaaagcagctcgggctggagacatagcattcattcctgttcagaatgcgacctatggtggcctcctactccttgccccccaccccgccccgccccttccttctgttccccagatctatgaactacaacattatgaagacattcttttgtaccttgttcaactttagagttctaagaaagcttatttattagcgatataaccttgctttgcaaacagaatgcaagcgttaactttggtcttctgtattttggactaaatactaattgactagagtgctgtaaacttgctgtaacatttatggcaattgcaagttgccctgctaggcagttgtaatctggcattaacttattttctatatccagtttaatatgaatctggtgttgatgcaatgcctcagtgatgcattagatctctaataaagtctgtatatacatgtacactttgatcctgctggaaaattttatcagcaaacacattgtctaatctttcaaaacagatttaaggaaaggactgaaagtacagactgaacagtgtggttctttgaaaggtttggttttttaatttttattctaaaattcaacctttttttttgtcgatttaaccatttccattttgaactgctatttgtattgtgctttttacttgagtcgtcttcaatgttaataagtttctgtacagtaataagcacgcagaattctttagagaaaaagaaaacaagcgttgttttggtagttgaaactgagacgtaacattttgccttgtaggtatattcacgatagaaaatgtgtgctggaatttcacaatgctgctaagtatagcatcttgaacaaccttcagtggagaaaatgtagatgctcttgtatatacaataagaaatatcactttcattcaaatgtacatatgttccttacaagagcaaatgcttcttcttgatcaagagagcaggtatagtgtttgtttattttgtcttaggtatggaagaaaaaaattggactgttacatgcactttcttggaaagttgaaaggaaagggggggtccaatttctttaacatttaatacttactaacaacagagatactgtaattttactcaagtaatcaaatacattttttttgcaacagataaaacaaaatactgtg

SEQ ID NO: 3978 - protein, 1324 aa, Homosapiens
MSRRKQAKPQHFQSDPEVASLPRRDGDTEKGQPSRPTKSKDAHVCGRCCAEFFELSDLLLHKKNCTKNQLVLIVNENPASPPETFSPSPPPDNPDEQMNDTVNKTDQVDCSDLSEHNGLDREESMEVEAPVANKSGSGTSSGSHSSTAPSSSSSSSSSSGGGGSSSTGTSAITTSLPQLGDLTTLGNFSVINSNVIIENLQSTKVAVAQFSQEARCGGASGGKLAVPALMEQLLALQQQQIHQLQLIEQIRHQILLLASQNADLPTSSSPSQGTLRTSANPLSTLSSHLSQQLAAAAGLAQSLASQSASISGVKQLPPIQLPQSSSGNTIIPSNSGSSPNMNILAAAVTTPSSEKVASSAGASHVSNPAVSSSSSPAFAISSLLSPASNPLLPQQASANSVFPSPLPNIGTTAEDLNSLSALAQQRKSKPPNVTAFEAKSTSDEAFFKHKCRFCAKVFGSDSALQIHLRSHTGERPFKCNICGNRFSTKGNLKVHFQRHKEKYPHIQMNPYPVPEHLDNIPTSTGIPYGMSIPPEKPVTSWLDTKPVLPTLTTSVGLPLPPTLPSLIPFIKTEEPAPIPISHSATSPPGSVKSDSGGPESATRNLGGLPEEAEGSTLPPSGGKSEESGMVTNSVPTASSSVLSSPAADCGPAGSATTFTNPLLPLMSEQFKAKFPFGGLLDSAQASETSKLQQLVENIDKKATDPNECIICHRVLSCQSALKMHYRTHTGERPFKCKICGRAFTTKGNLKTHYSVHRAMPPLRVQHSCPICQKKFTNAVVLQQHIRMHMGGQIPNTPVPDSYSESMESDTGSFDEKNFDDLDNFSDENMEDCPEGSIPDTPKSADASQDSLSSSPLPLEMSSIAALENQMKMINAGLAEQLQASLKSVENGSIEGDVLTNDSSSVGGDMESQSAGSPAISESTSSMQALSPSNSTQEFHKSPSIEEKPQRAVPSEFANGLSPTPVNGGALDLTSSHAEKIIKEDSLGILFPFRDRGKFKNTACDICGKTFACQSALDIHYRSHTKERPFICTVCNRGFSTKGNLKQHMLTHQMRDLPSQLFEPSSNLGPNQNSAVIPANSLSSLIKTEVNGFVHVSPQDSKDTPTSHVPSGPLSSSATSPVLLPALPRRTPKQHYCNTCGKTFSSSSALQIHERTHTGEKPFACTICGRAFTTKGNLKVHMGTHMWNSTPARRGRRLSVDGPMTFLGGNPVKFPEMFQKDLAARSGSGDPSSFWNQYAAALSNGLAMKANEISVIQNGGIPPIPGSLGSGNSSPVSGLTGNLERLQNSEPNAPLAGLEKMASSENGTNFRFTRFVEDSKEIVTS

SEQ ID NO: 3979 - DNA, 407 bp, Homosapiens
gggagggggcgggcgggccggcgggcggggggagccgccgccgccgccgccgctcgatttccgtaattttgagaagatttttttttagtaattttttattctgccccagctgatgtttgagccagcatgtcgcggaggaagcaagcgaagcctcaacatttccaatccgaccccgaagtggcctcgctcccccggcgagatgccttcgtagatgaccacacaccatttgtacaacagaagttggtgttccccatgctgggcaaacaatgggaagccatcctgtctttgaataggatgttagcttggagttagagatttttctgtttaatttacaaatggatcttagtgagaagacatctgagcaaccaatggaaacaaacatgaaataaagggatttttataataaa

SEQ ID NO: 3980 - protein, 61 aa, Homosapiens
MSRRKQAKPQHFQSDPEVASLPRRDAFVDDHTPFVQQKLVFPMLGKQWEAILSLNRMLAWS

SEQ ID NO: 3981 - DNA, 487 bp, Homosapiens
tttctcctcgaaggccgagactttttttttttaaatgtagaaaaccagtacaaatttacaaaacacactatataatgctctcttatctctagtttgcttttttgtgtacaaactgttaacctgaacagttttccggtgcaaaaggtctcaccagaaactttaggaaagatgagtgtgactgcgggaagcagaagaaactaagctgagaaaacccggaaaaatactcggcgcagctgctgcggccttgggtcatctcacctccatctaccccgcgtgctcgctttcgcttggggtggaaagcggggttcaggggctcttttcagcggactgagaaatcgcagaggccgtggggaccccaagtcaggattcccctttcccgacatcaggggtaaagggagcgggggtcccttcgcttcactgtgccccagctctaccgagaggcaggcctctgggaaacgagccggggacctgggggcccgggcggccg

SEQ ID NO: 3982 - protein, 94 aa, Homosapiens
AEKTRKNTRRSCCGLGSSHLHLPRVLAFAWGGKRGSGALFSGLRNRRGRGDPKSGFPFPDIRGKGSGGPFASLCPSSTERQASGKRAGDLGARA

SEQ ID NO: 3983 - DNA, 1679 bp, Homosapiens
gcagtgcgcaggcgtgagcggtcgggccccgacgcgcgcgggtctcgtttggagcgggagtgagttcctgagcgagtggacccggcagcgggcgataggggggccaggtgcctccacagtcagccatggcagcgctgcgctacgcggggctggacgacacggacagtgaggacgagctgcctccgggctgggaggagagaaccaccaaggacggctgggtttactacgccaatcacaccgaggagaagactcagtgggaacatccaaaaactggaaaaagaaaacgagtggcaggagatttgccatacggatgggaacaagaaactgatgagaacggacaagtgttttttgttgaccatataaataaaagaaccacctacttggacccaagactggcgtttactgtggatgataatccgaccaagccaaccacccggcaaagatacgacggcagcaccactgccatggaaattctccagggccgggatttcactggcaaagtggttgtggtcactggagctaattcaggaataggaaaagccagctgccatgttgggaggatactcaagcatacccgtgtagaagaactgagcctcctgccaacagccatcaacagggagctgccaccaccgtgtactgtgctgctgtcccagaactggagggtctgggagggatgtacttcaacaactgctgccgctgcatgccctcaccagaagctcagagcgaagagacggcccggaccctgtgggcgctcagcgagaggctgatccaagaacggcttggcagccagtccggctaagtggagctcagagcggatgggcacacacacccgccctgtgtgtgtcccctcacgcaagtgccagggctgggccccttccaaatgtccctccaacacagatccgcaagagtaaaggaaataagagcagtcacaacagagtgaaaaatcttaagtaccaatgggaagcagggaattcctggggtaaagtatcacttttctggggctgggctaggcataggtctctttgctttctggtggtggcctgtttgaaagtaaaaacctgcttggtgtgtaggttccgtatctccctggagaagcaccagcaattctctttcttttactgttatagaatagcctgaggtcccctcgtcccatccagctaccaccacggccaccactgcagccgggggctggccttctcctacttagggaagaaaaagcaagtgttcactgctccttgctgcattgatccaggagataattgtttcattcatcctgaccaagactgagccagcttagcaactgctggggagacaaatctcagaaccttgtcccagccagtgaggatgacagtgacacccagagggagtagaatacgcagaactaccaggtggcaaagtacttgtcatagactcctttgctaatgctatgcaaaaaattctttagagattataacaaatttttcaaatcattccttagataccttgaaaggcaggaagggaagcgtatatacttaagaatacacaggatattttggggggcagagaataaaacgttagttaatccctttgtctgtcaatcacagtctcagttctcttgctttcacattgtacttaaacctcctgctgtgcctcgcatcctatgcttaataaaagaacatgcttgaatatcatcacctgaa

SEQ ID NO: 3984 - protein, 213 aa, Homosapiens
MAALRYAGLDDTDSEDELPPGWEERTTKDGWVYYANHTEEKTQWEHPKTGKRKRVAGDLPYGWEQETDENGQVFFVDHINKRTTYLDPRLAFTVDDNPTKPTTRQRYDGSTTAMEILQGRDFTGKVVVVTGANSGIGKASCHVGRILKHTRVEELSLLPTAINRELPPPCTVLLSQNWRVWEGCTSTTAAAACPHQKLRAKRRPGPCGRSARG

SEQ ID NO: 3985 - DNA, 677 bp, Homosapiens
gccagaccccttttcagctgggtgctccctggaagatggatcttgccttgtggatgtttttctaccgtgacagaagatagaaaggatgaaatagaaagagtgcaattccaagagagaagaccactggttttgtttgatctagtccctgttgagtccctgtgcaccttcagaaccacatctagcaatagaaggcgctgcacggggaattctggaatgaataaaaacgcttggcagtaccgcatggcgagccagtacccgtgaatgctacttcctccaaagagaattcctgggataacagagaatccattcatggctgccaggaggacttggatatttctcattttccattggccctggagtggaggaacagagccgaaaagtacgtggggggcaggcaaagctgcggtcagaggcagaccctgttggtgttggccgtgtcaaccagctttgctggtttctattatagccctggtgtggcaaaggacactgtgtgactgtgagctcaggtcagcattgcgatcccttcaggcctctggcttgcaggttcctgttcaaccctcttaaatatgcttttgaagcccgtacgttcggtccacgccaactcctgtttatactggtgcgaagtgatgcctgctcagattctgggcgtttcacgggaaggtattaaatgtgttttg

SEQ ID NO: 3986 - protein, 100 aa, Homosapiens
MLLPPKRIPGITENPFMAARRTWIFLIFHWPWSGGTEPKSTWGAGKAAVRGRPCWCWPCQPALLVSIIALVWQRTLCDCELRSALRSLQASGLQVPVQPS

SEQ ID NO: 3987 - DNA, 472 bp, Homosapiens
agaaaaatactggagccacagactttatctgaatgtctgaaatgacctctcttcacattatgggcagcctgaaggccatcggctcccaagttttatgtcctagagctttcaccagtgccaggaaatggaaacttccagttctaaaaaaaatctggggaggggacctttttttcccctgagcttgtgggaaggtgcttaaccacacactaaccttgataaaaatggcacctcccaaggtagccacaagaggagcaggtaggaacagagtttcctggagaagaaggggtcagggatgggtgccaaaaaccaaccccacaggcctgcatgtttacagtttagaccatctctgtgaattgcatccttatgttctgtattttaaaaggccattttcagctcctacttagcttccactcagaaataccattcacatcaggtctctgtgcatgcatgtggttttttaatccacacattg

SEQ ID NO: 3988 - protein, 60 aa, Homosapiens
MAPPKVATRGAGRNRVSWRRRGQGWVPKTNPTGLHVYSLDHLCELHPYVLYFKRPFSAPT

SEQ ID NO: 3989 - DNA, 398 bp, Homosapiens
agtatgctcatgggaacccagctggaaagtgctgtggaaggacaaatggagaaaagtctccagaaattggcctcgtttgaaaggacctcatgcaaagagagatctttggagacatttcagaaaggtttttattcaaacatattcgcagcttgtatgacagtggaatgttttgaaatgagcttgattctgtttacccatccttcttaatccaacaactctgctggtctctctgctgacacaagatcgttcgcaggttatagaaggatttaacacgtcagccaatgcaggaagtagtcctctgaaatacatgtccacagaacacgccgtgctttccagaagacgcaacagacagaaactttccaaagggaattacctgggatcatttctcatcctctctc

SEQ ID NO: 3990 - protein, 67 aa, Homosapiens
MLMGTQLESAVEGQMEKSLQKLASFERTSCKERSLETFQKGFYSNIFAACMTVECFEMSLILFTHPS

SEQ ID NO: 3991 - DNA, 1186 bp, Homosapiens
gtaccccaagctggtttgggtttataccagtttgaaccgagggaccttcagctgaggaacatgtgctctgtgtgctggaagctcctggaggccccagggttatctctgctcacttagcaacagggagctgccaccaccgtgtactgtgctgctgtcccagaactggagggtctgggagggatgtacttcaacaactgctgccgctgcatgccctcaccagaagctcagagcgaagagacggcccggaccctgtgggcgctcagcgagaggctgatccaagaacggcttggcagccagtccggctaagtggagctcagagcggatgggcacacacacccgccctgtgtgtgtcccctcacgcaagtgccagggctgggccccttccaaatgtccctccaacacagatccgcaagagtaaaggaaataagagcagtcacaacagagtgaaaaatcttaagtaccaatgggaagcagggaattcctggggtaaagtatcacttttctggggctgggctaggcataggtctctttgctttctggtggtggcctgtttgaaagtaaaaacctgcttggtgtgtaggttccgtatctccctggagaagcaccagcaattctctttcttttactgttatagaatagcctgaggtcccctcgtcccatccagctaccaccacggccaccactgcagccgggggctggccttctcctacttagggaagaaaaagcaagtgttcactgctccttgctgcattgatccaggagataattgtttcattcatcctgaccaagactgagccagcttagcaactgctggggagacaaatctcagaaccttgtcccagccagtgaggatgacagtgacacccagagggagtagaatacgcagaactaccaggtggcaaagtacttgtcatagactcctttgctaatgctatgcaaaaaattctttagagattataacaaatttttcaaatcattccttagataccttgaaaggcaggaagggaagcgtatatacttaagaatacacaggatattttggggggcagagaataaaacgttagttaatccctttgtctgtcaatcacagtctcagttctcttgctttcacattgtacttaaacctcctgctgtgcctcgcatcctatgcttaataaaagaacatgcttgaatatcatcacctgaa

SEQ ID NO: 3992 - protein, 80 aa, Homosapiens
MLCKKFFRDYNKFFKSFLRYLERQEGKRIYLRIHRIFWGAENKTLVNPFVCQSQSQFSCFHIVLKPPAVPRILCLIKEHA

SEQ ID NO: 3993 - DNA, 2370 bp, Homosapiens
catgcagcttttaaatgacaggcacgtgctcacaggcttctgttcagagagaacctgtgagctgtcctgtggcctttcctgtttacggtgcagccatcccaaatatgatgcccccaaatccgagtctggctagaaggaagtgtcatacaaaggccatgccattctccctgacaaaagacatgagtttcttgcaagagcactaagaagttttaagaggtggactcgaagagaggagaatgaattggaaagccagcaagaatgtggctcttactcctctgtgaaatatttgcaggaacgagcctggagaccagcaggttcaggatggaaagctggaaagaattctttcctaaaacttaagttttagagaaaaataggcagccagtcccaaccacccaaaggcgtccaaagccatgtttgttctgggaaggccaaggcatgggaggatgttaacttgggctatcagcaggattgaagggcagggtgaccttggtacgctctcagggcctgtgtttccaagtcgacaaactgttctgagcttttccatgaaacgagtgaagcccttttcatacctccttcgtgttccagaattcttgccatcgatgttccaaaggatctgtgatagatttatgtctagccttaaatgggacgagttgtaacattcagaattattttatctttctgagacctgctattattgtgagaccctagacatgctttgctggggttagggtgagggtactcctaacgagggaaggaaaaagaaacggcttcaaggcaatccatgtgggtcattacatgcacacttgttccatcttccatttgtgcctgcccaaagcgttctagaactgaccggacctgagaggctgtctcattagaactaagagaaggtattgttgatgatgtcttatatccatggaagaattccctgggcattccctctgatgctgcctgggatacctacattgctcaaagtacagtttctttatgaatagggatgaaacatcgcattggggtatctattcttccatggttggtttgaaatagccaagcagaagtgccatagaaatttgccaacaaaataagcatctaactgatagtgtcgtccttctacatggaacaaatctgatggcatgtcactgaaattttccaactgggccaccttgatgcccgtgctaaaggactgctgggtgtttataagatataaaagaagatatttagtgtgtgtttatttgaaacattttacatttttactctacttctttaacctctgttatggttatagctagctcgtgtactgcgtataaatgtatgcatctgtattcgccatctacaccaaaataaacctttgaaattattgccaggcagaattaatgagctcagttctaacagcgcaaagaatatcttcatactacaggtaaaacaaacagcttctcccttcccttcttctgcacagaatggctctacgaagtctgcctgcaaaattacgtcttttagaaaaccaagtagctggctgttttgtgagcagggaggatttcaggacgaaccacaaacaagctgtttgtttagattttaaggttgacagttcatttacacgtatgccccataagtattctataacatagtcctgaaaaagcactgaagaaaaaaaaaaaaaaaaacacaaggtctccgctggggccacatcatgggaaggaattaactcttaactctgccttccagaaacaaattaagaggatgtactttgcaataattcagatctcacaggtaggcccccaatgtccagccccgctatttcaaatcgggcatgtctgagttaggtgtgtggatttccatacagagctcactggaacagaccatttctcaggttccaagacgctggccttgttaatatttcatttagaacatactgtggagagtgtctcatttatattacttccataattaatggtgatagcttaggcactgcctttacacagagagatctcttcacagtggtcgatgggtaatgagaaacaatagatatttcattcaccagcagcgtgttgctagttagtaggaaatgatcgtgtgtgctgttgctttaattgcccgggtaaataattctgcctcggtgttagtgagcattttaaagcacttgatgccaatagactagaaacaaacaaaaattaaccttgattatgcaacaccttagcatagaaagttacaaaggtatgtcttttttaaagtttgcatttatgcatgctgctattctaggcaatttcaggtacttttataatatgaaggcatgtacttgaactcgtttgttaacagaggggaaaaaactctctcaaactctttaaagctgaatagaaattaaagatttcttcctag

SEQ ID NO: 3994 - protein, 38 aa, Homosapiens
MQHLSIESYKGMSFLKFAFMHAAILGNFRYFYNMKACT

SEQ ID NO: 3995 - DNA, 1251 bp, Homosapiens
cgtttttccaggatagtcacattatactttttacagtcatgtgctttcagcccagtaccctttgctatgccaagatccagctgaaactgaaccaggtgggggaggcctgctaatgcccaggcagtcgaaatgacgccatctcatcactccttttcttaaaatttttttttgtctttcttcttggatttccagcaacagggagctgccaccaccgtgtactgtgctgctgtcccagaactggagggtctgggagggatgtacttcaacaactgctgccgctgcatgccctcaccagaagctcagagcgaagagacggcccggaccctgtgggcgctcagcgagaggctgatccaagaacggcttggcagccagtccggctaagtggagctcagagcggatgggcacacacacccgccctgtgtgtgtcccctcacgcaagtgccagggctgggccccttccaaatgtccctccaacacagatccgcaagagtaaaggaaataagagcagtcacaacagagtgaaaaatcttaagtaccaatgggaagcagggaattcctggggtaaagtatcacttttctggggctgggctaggcataggtctctttgctttctggtggtggcctgtttgaaagtaaaaacctgcttggtgtgtaggttccgtatctccctggagaagcaccagcaattctctttcttttactgttatagaatagcctgaggtcccctcgtcccatccagctaccaccacggccaccactgcagccgggggctggccttctcctacttagggaagaaaaagcaagtgttcactgctccttgctgcattgatccaggagataattgtttcattcatcctgaccaagactgagccagcttagcaactgctggggagacaaatctcagaaccttgtcccagccagtgaggatgacagtgacacccagagggagtagaatacgcagaactaccaggtggcaaagtacttgtcatagactcctttgctaatgctatgcaaaaaattctttagagattataacaaatttttcaaatcattccttagataccttgaaaggcaggaagggaagcgtatatacttaagaatacacaggatattttggggggcagagaataaaacgttagttaatccctttgtctgtcaatcacagtctcagttctcttgctttcacattgtacttaaacctcctgctgtgcctcgcatcctatgcttaataaaagaacatgcttgaatatc

SEQ ID NO: 3996 - protein, 80 aa, Homosapiens; identical to SEQ ID NO: 3992

SEQ ID NO: 3997 - DNA, 1140 bp, Homosapiens
cgtttttccaggatagtcacattatactttttacagtcatgtgctttcagcccagtaccctttgctatgccaagatccagctgaaactgaaccaggtgggggaggcctgctaatgcccaggcagtcgaaatgacgccatctcatcactccttttcttaaaatttttttttgtctttcttcttggatttccagcaacagggagctgccaccaccgtgtactgtgctgctgtcccagaactggagggtctgggagggatgtacttcaacaactgctgccgctgcatgccctcaccagaagctcagagcgaagagacggcccggaccctgtgggcgctcagcgagaggctgatccaagaacggcttggcagccagtccggctaagtggagctcagagcggatgggcacacacacccgccctgtgtgtgtcccctcacgcaagtgccagggctgggccccttccaaatgtccctccaacacagatccgcaagagtaaaggaaataagagcagtcacaacagagtgaaaaatcttaagtaccaatgggaagcagggaattcctggggtaaagtactttcttttactgttatagaatagcctgaggtcccctcgtcccatccagctaccaccacggccaccactgcagccgggggctggccttctcctacttagggaagaaaaagcaagtgttcactgctccttgctgcattgatccaggagataattgtttcattcatcctgaccaagactgagccagcttagcaactgctggggagacaaatctcagaaccttgtcccagccagtgaggatgacagtgacacccagagggagtagaatacgcagaactaccaggtggcaaagtacttgtcatagactcctttgctaatgctatgcaaaaaattctttagagattataacaaatttttcaaatcattccttagataccttgaaaggcaggaagggaagcgtatatacttaagaatacacaggatattttggggggcagagaataaaacgttagttaatccctttgtctgtcaatcacagtctcagttctcttgctttcacattgtacttaaacctcctgctgtgcctcgcatcctatgcttaataaaagaacatgcttgaatatcatcacctgaa

SEQ ID NO: 3998 - protein, 80 aa, Homosapiens; identical to SEQ ID NO: 3992

SEQ ID NO: 3999 - DNA, 663 bp, Homosapiens
tccagcaacagggagctgccaccaccgtgtactgtgctgctgtcccagaactggagggtctgggagggatgtacttcaacaactgctgccgctgcatgccctcaccagaagctcagagcgaagagacggcccggaccctgtgggcgctcagcgagaggctgatccaagaacggcttggcagccagtccggctaagtggagctcagagcggatgggcacacacacccgccctgtgtgtgtcccctcacgcaagtgccagggctgggccccttccaaatgtccctccaacacagatccgcaagagtaaaggaaataagagcagtcacaacagagtgaaaaatcttaatgacacccagagggagtagaatacgcagaactaccaggtggcaaagtacttgtcatagactcctttgctaatgctatgcaaaaaattctttagagattataacaaatttttcaaatcattccttagataccttgaaaggcaggaagggaagcgtatatacttaagaatacacaggatattttggggggcagagaataaaacgttagttaatccctttgtctgtcaatcacagtctcagttctcttgctttcacattgtacttaaacctcctgctgtgcctcgcatcctatgcttaataaaagaacatgcttgaatatc

SEQ ID NO: 4000 - protein, 80 aa, Homosapiens; identical to SEQ ID NO: 3992

SEQ ID NO: 4001 - DNA, 333 bp, Homosapiens
cggacaacggaaaggcagctctatctgaaggtgaaactgctctagctaacagggaaagctctttaaaagaccatcaaagagacaccctgcacaatgcctgctttccggaggagcctcgcgcccacaaggccatcccccaaatccaaaatatgctggcatgctaatcgcgtgagacaacttggcccacggacagccacaaagcacaaaaacaaaacacaaactcactcagagaagaaacaagaatcgtgttttcctggcatctacgagaagcgctttattagaagcgctttatttttcctctagatttcttttctaaaaaatgaaaaacaaaaa

SEQ ID NO: 4002 - protein, 69 aa, Homosapiens
MPAFRRSLAPTRPSPKSKICWHANRVRQLGPRTATKHKNKTQTHSEKKQESCFPGIYEKRFIRSALFFL

SEQ ID NO: 4003 - DNA, 703 bp, Homosapiens
ctggacccctgccagggaaggggtcctcagacttgaggttgccagctcagatgtggggctgctgatactaggtgactggactgatgttctgttctagatgaaactccttgaggggaccatttgaaaaggcttgatgtgctgcccaaagcccccttcagagctgacttctccacccccagctgccgtgagccttggctgctgacagctcatagctgagtccctcccgtgaagtcaccttctgctgaagggtacatcctctcccaaggcgaagctggtccgttacatttgtaagcagaggcagtgcaagctgagcgtggctcccggtgagaggaccccagagctcaacagctacccccgcttcagcgactggctgtacactttcaacgtgaggccggaggtggtgcaggagatcccccgagacctcacgctggatgccctgctggagatgaatgaggccaaggtgaaggagacgctgcggcgctgtggggccagcggggatgagtgtggccgtctgcagtatgccctcacctgcctgcggaaggtgacaggcctgggaggggagcacaaggaggactccagttggagttcattggatgcgcggcgggaaagtggctcagggccttccacggacaccctctcagcagccagcctgccctggcccccagggagctcccagctgggcagagcaggcaacagcgcccag

SEQ ID NO: 4004 - protein, 85 aa, Homosapiens
MNEAKVKETLRRCGASGDECGRLQYALTCLRKVTGLGGEHKEDSSWSSLDARRESGSGPSTDTLSAASLPWPPGSSQLGRAGNSA

SEQ ID NO: 4005 - DNA, 3478 bp, Homosapiens
ctggacccctgccagggaaggggtcctcagacttgaggttgccagctcagatgtggggctgctgatactaggtgactggactgatgttctgttctagatgaaactccttgaggggaccatttgaaaaggcttgatgtgctgcccaaagcccccttcagagctgacttctccacccccagctgccgtgagccttggctgctgacagctcatagctgagtccctcccgtgaagtcaccttctgctgaagggtacatcctctcccaaggcgaagctggtccgttacatttgtaagcagaggcagtgcaagctgagcgtggctcccggtgagaggaccccagagctcaacagctacccccgcttcagcgactggctgtacactttcaacgtgaggccggaggtggtgcagcccacacaagatgtgatcagctatccattgttactgagagatgggagttttaaatttttcaacaccaagcaagtacagaagtgttagaaagcaagcaaaggccctcctcttccacttcgcggggataacaccttgttaacaggagatcccccgagacctcacgctggatgccctgctggagatgaatgaggccaaggtgaaggagacgctgcggcgctgtggggccagcggggatgagtgtggccgtctgcagtatgccctcacctgcctgcggaaggtgacaggcctgggaggggagcacaaggaggactccagttggagttcattggatgcgcggcgggaaagtggctcagggccttccacggacaccctctcagcagccagcctgccctggcccccagggagctcccagctgggcagagcaggcaacagcgcccagggcccacgctccatctccgtgtcagctctgcccgcctcagactcccccacccccagcttcagtgagggcctctcagacacctgtattcccctgcacgccagcggccggctgaccccccgtgccctgcacagcttcatcaccccgcccaccacaccccagctgcgacggcacaccaagctgaagccaccacggacgccccccccacccagccgcaaggtcttccagctgctgcccagcttccccacactcacccggagcaagtcccatgagtctcagctggggaaccgcattgatgacgtctcctcgatgagctccatgtgttctcaggggcagtggctgccccctggggaggctcaggatctctcgcatggatccccacagatggtacggagggatatcgggctgtcggtgacgcacaggttctccaccaagtcctggctgtcgcaggtctgccacgtgtgccagaagagcatgatatttggagtgaagtgcaagcattgcaggttgaagtgtcacaacaaatgtaccaaagaagcccctgcctgtagaatatccttcctgccactaactcggcttcggaggacagaatctgtcccctcggacatcaacaacccggtggacagagcagccgaaccccattttggaaccctccccaaagcactgacaaagaaggctcttgctcggagctgtgagatgctggtgccgttctcaggggtctcctctgtgctgtggctggggagccatggccacaggcatcctgaagccgggatcatgccaggcccatctcccatgaccgtgggcaaagcccttggcttccctgggcccttctcccctgagctctgcagtggggccatggagcaccctccggccatgaatcacctggactccagcagcaacccttcctccaccacctcctccacaccctcctcaccggcgcccttcccgacatcatccaacccatccagcgccaccacgccccccaacccctcacctggccagcgggacagcaggttcaacttcccagctgcctacttcattcatcatagacagcagtttatctttccagtgccatctgctggccattgctggaaatgcctccttattgcagaaagtttaaaggaaaacgctttcaacatttcagcctttgcacacgcagccccgctccctgaagctgccgacggtacccggctcgatgaccagccgaaagcagatgtgttggaagctcacgaagcggaggctgaggagccagaggctggcaagtcagaggcagaagacgatgaggacgaggtggacgacttgccgagctctcgccggccctggcggggccccatctctcgcaaggccagccagaccagcgtgtacctgcaggagtgggacatccccttcgagcaggtagagctgggcgagcccatcgggcagggccgctggggccgggtgcaccgcggccgctggcatggcgaggtggccattcgcctgctggagatggacggccacaaccaggaccacctgaagctcttcaagaaagaggtgatgaactaccggcagacgcggcatgagaacgtggtgctcttcatgggggcctgcatgaacccgccccacctggccattatcaccagcttctgcaaggggcggacgttgcactcgtttgtgagggaccccaagacgtctctggacatcaacaagacgaggcaaatcgctcaggagatcatcaagggcatgggatatcttcatgccaagggcatcgtacacaaagatctcaaatctaagaacgtcttctatgacaacggcaaggtggtcatcacagacttcgggctgtttgggatctcaggcgtggtccgagagggacggcgtgagaaccagctaaagctgtcccacgactggctgtgctatctggcccctgagattgtacgcgagatgacccccgggaaggacgaggatcagctgccattctccaaagctgctgatgtctatgcatttgggactgtttggtatgagctgcaagcaagagactggcccttgaagaaccaggctgcagaggcatccatctggcagattggaagcggggaaggaatgaagcgtgtcctgacttctgtcagcttggggaaggaagtcagtgagatcctgtcggcctgctgggctttcgacctgcaggagagacccagcttcagcctgctgatggacatgctggagaaacttcccaagctgaaccggcggctctcccaccctggacacttctggaagtcagctgacattaacagcagcaaagttgtaccccggtttgaaaggtttggcttgggcgtcctggagtccagtaatccaaagatgtagccagccatatggtttttcgctgctgatctctttctttttaaaatgtgtttctgaaacatcccaacaaccaccacgacaaaaaaacactgcctgcccagcgctgcaaaccaggagcacacgtcctagattcagactgttggccataaaccccactcgggagatggagctgcacctgctatttcttaaaatgacaccaccaacaaccaaacctgtcatgacagacagcaaatgtttacacgtatatttctcctgagtgaacctgatgttttacaataggtaataataaaaacagtctgtgcagatgc

SEQ ID NO: 4006 - protein, 861 aa, Homosapiens
MNEAKVKETLRRCGASGDECGRLQYALTCLRKVTGLGGEHKEDSSWSSLDARRESGSGPSTDTLSAASLPWPPGSSQLGRAGNSAQGPRSISVSALPASDSPTPSFSEGLSDTCIPLHASGRLTPRALHSFITPPTTPQLRRHTKLKPPRTPPPPSRKVFQLLPSFPTLTRSKSHESQLGNRIDDVSSMSSMCSQGQWLPPGEAQDLSHGSPQMVRRDIGLSVTHRFSTKSWLSQVCHVCQKSMIFGVKCKHCRLKCHNKCTKEAPACRISFLPLTRLRRTESVPSDINNPVDRAAEPHFGTLPKALTKKALARSCEMLVPFSGVSSVLWLGSHGHRHPEAGIMPGPSPMTVGKALGFPGPFSPELCSGAMEHPPAMNHLDSSSNPSSTTSSTPSSPAPFPTSSNPSSATTPPNPSPGQRDSRFNFPAAYFIHHRQQFIFPVPSAGHCWKCLLIAESLKENAFNISAFAHAAPLPEAADGTRLDDQPKADVLEAHEAEAEEPEAGKSEAEDDEDEVDDLPSSRRPWRGPISRKASQTSVYLQEWDIPFEQVELGEPIGQGRWGRVHRGRWHGEVAIRLLEMDGHNQDHLKLFKKEVMNYRQTRHENVVLFMGACMNPPHLAIITSFCKGRTLHSFVRDPKTSLDINKTRQIAQEIIKGMGYLHAKGIVHKDLKSKNVFYDNGKVVITDFGLFGISGVVREGRRENQLKLSHDWLCYLAPEIVREMTPGKDEDQLPFSKAADVYAFGTVWYELQARDWPLKNQAAEASIWQIGSGEGMKRVLTSVSLGKEVSEILSACWAFDLQERPSFSLLMDMLEKLPKLNRRLSHPGHFWKSADINSSKVVPRFERFGLGVLESSNPKM

SEQ ID NO: 4007 - DNA, 3661 bp, Homosapiens
ctggacccctgccagggaaggggtcctcagacttgaggttgccagctcagatgtggggctgctgatactaggtgactggactgatgttctgttctagatgaaactccttgaggggaccatttgaaaaggcttgatgtgctgcccaaagcccccttcagagctgacttctccacccccagctgccgtgagccttggctgctgacagctcatagctgagtccctcccgtgaagtcaccttctgctgaagggtacatcctctcccaaggcgaagctggtccgttacatttgtaagcagaggcagtgcaagctgagcgtggctcccggtgagaggaccccagagctcaacagctacccccgcttcagcgactggctgtacactttcaacgtgaggccggaggtggtgcagcccacacaagatgtgatcagctatccattgttactgagagatgggagttttaaatttttcaacaccaagcaagtacagaagtgttagaaagcaagcaaaggccctcctcttccacttcgcggggataacaccttgttaacaggagatcccccgagacctcacgctggatgccctgctggagatgaatgaggccaaggtgaaggagacgctgcggcgctgtggggccagcggggatgagtgtggccgtctgcagtatgccctcacctgcctgcggaaggtgacaggcctgggaggggagcacaaggaggactccagttggagttcattggatgcgcggcgggaaagtggctcagggccttccacggacaccctctcagcagccagcctgccctggcccccagggagctcccagctgggcagagcaggcaacagcgcccagggcccacgctccatctccgtgtcagctctgcccgcctcagactcccccacccccagcttcagtgagggcctctcagacacctgtattcccctgcacgccagcggccggctgaccccccgtgccctgcacagcttcatcaccccgcccaccacaccccagctgcgacggcacaccaagctgaagccaccacggacgccccccccacccagccgcaaggtcttccagctgctgcccagcttccccacactcacccggagcaagtcccatgagtctcagctggggaaccgcattgatgacgtctcctcgatgagctccatgtgttctcaggggcagtggctgccccctggggaggctcaggatctctcgcatggatccccacagatggtacggagggatatcgggctgtcggtgacgcacaggttctccaccaagtcctggctgtcgcaggtctgccacgtgtgccagaagagcatgatatttggagtgaagtgcaagcattgcaggttgaagtgtcacaacaaatgtaccaaagaagcccctgcctgtagaatatccttcctgccactaactcggcttcggaggacagaatctgtcccctcggacatcaacaacccggtggacagagcagccgaaccccattttggaaccctccccaaagcactgacaaagaaggctcttgctcggagctgtgagatgctggtgccgttctcaggggtctcctctgtgctgtggctggggagccatggccacaggcatcctgaagccgggatcatgccaggcccatctcccatgaccgtgggcaaagcccttggcttccctgggcccttctcccctgagctctgcagtggggccatggagcaccctccggccatgaatcacctggactccagcagcaacccttcctccaccacctcctccacaccctcctcaccggcgcccttcccgacatcatccaacccatccagcgccaccacgccccccaacccctcacctggccagcgggacagcaggttcaacttcccagctgcctacttcattcatcatagacagcagtttatctttccagtgccatctgctggccattgctggaaatgcctccttattgcagaaagtttaaaggaaaacgctttcaacatttcagcctttgcacacgcagccccgctccctgaagctgccgacggtacccggctcgatgaccagccgaaagcagatgtgttggaagctcacgaagcggaggctgaggagccagaggctggcaagtcagaggcagaagacgatgaggacgaggtggacgacttgccgagctctcgccggccctggcggggccccatctctcgcaaggccagccagaccagcgtgtacctgcaggagtgggacatccccttcgagcaggtagagctgggcgagcccatcgggcagggccgctggggccgggtgcaccgcggccgctggcatggcgaggtggccattcgcctgctggagatggacggccacaaccaggaccacctgaagctcttcaagaaagaggtgatgaactaccggcagacgcggcatgagaacgtggtgctcttcatgggggcctgcatgaacccgccccacctggccattatcaccagcttctgcaaggggcggacgttgcactcgtttgtgagggaccccaagacgtctctggacatcaacaagacgaggcaaatcgctcaggagatcatcaagggcatgggatatcttcatgccaagggcatcgtacacaaagatctcaaatctaagaacgtcttctatgacaacggcaaggtggtcatcacagacttcgggctgtttgggatctcaggcgtggtccgagagggacggcgtgagaaccagctaaagctgtcccacgactggctgtgctatctggcccctgagattgtacgcgagatgacccccgggaaggacgaggatcagctgccattctccaaagctgctgatgtctatgcatttgggactgtttggtatgagctgcaagcaagagactggcccttgaagaaccaggctgcagaggcatccatctggcagattggaagcggggaaggaatgaagcgtgtcctgacttctgtcagcttggggaaggaagtcagtgagatcctgtcggcctgctgggctttcgacctgcaggagagacccagcttcagcctgctgatggacatgctggagaaacttcccaagctgaaccggcggctctcccaccctggacacttctggaagtcagctgacattaacagcagcaaagttgtaccccggtttgaaaggtttggcttgggcgtcctggagtccagtaatccaaagatgtagccagccatatggtttttcgctgctgatctctttctttttaaaatgtgtttctgaaacatcccaacaaccaccacgacaaaaaaacactgcctgcccagcgctgcaaaccaggagcacacgtcctagattcagactgttggccataaaccccactcgggagatggagctgcacctgctatttcttaaaatgacaccaccaacaaccaaacctgtcatgacagacagcaaatgtttacacgtatatttctcctgagtgaacctgatgttttacaataggtaataataaaaacagtctgtgcagatgcactggcactgacggccaggatggcggaaatggccatcccctctgaggaccttgtaggcggtgagggacccatgctgggccagaaggaagacaaacatggtaattgcagctgttcttggggtagggcggggagcccagaaggtctgatctggcctctgctttttggcccaagactccatcaggg

SEQ ID NO: 4008 - protein, 861 aa, Homosapiens; identical to SEQ ID NO: 4006

SEQ ID NO: 4009 - DNA, 693 bp, Homosapiens
gacccctgccagggaaggggtcctcagacttgaggttgccagctcagatgtggggctgctgatactaggtgactggactgatgttctgttctagatgaaactccttgaggggaccatttgaaaaggcttgatgtgctgcccaaagcccccttcagagctgacttctccacccccagctgccgtgagccttggctgctgacagctcatagctgagtccctcccgtgaagtcaccttctgctgaagggtacatcctctcccaaggcgaagctggtccgttacatttgtaagcagaggcagtgcaagctgagcgtggctcccggtgagaggaccccagagctcaacagctacccccgcttcagcgactggctgtacactttcaacgtgaggccggaggtggtgcaggaggggagcacaaggaggactccagttggagttcattggatgcgcggcgggaaagtggctcagggccttccacggacaccctctcagcagccagcctgccctggcccccagggagctcccagctgggcagagcaggcaacagcgcccagggcccacgctccatctccgtgtcagctctgcccgcctcagactcccccacccccagcttcagtgagggcctctcagacacctgtattcccctgcacgccagcggccggctgaccccccgtgccctgcacagcttcatcacc

SEQ ID NO: 4010 - protein, 73 aa, Homosapiens
MRGGKVAQGLPRTPSQQPACPGPQGAPSWAEQATAPRAHAPSPCQLCPPQTPPPPASVRASQTPVFPCTPAAG

SEQ ID NO: 4011 - DNA, 750 bp, Homosapiens
gcctggaaaacacaactgaaagaaaacacagcagaaatgtcatctgtgaatgggctgatctgagtgggaaggctataggcgctgacccacgaatgcaactctcagccgagctgtccctgccggatttcaaacagctgaagaagggctgggagaacatcaaggcttggactaaaacaattatggcccatgaaaggagagagaaggtgaaagggagcgtcagccccctcctgagtaaccaagtcctagggaaggagatcaccagcatgctgctggagcagctctacttcctgcagagcactccttccacccctccccccggaggaggagcccaaataccacgccacggcccaagaatcatttgctgtttcaaatagagaactgtgcgatgatgagaaagagttcatacgttttccaacacgtgagaggacctctcaacctgaaccctcgtgttcagctgtcagaataacagccaataaaaactacatgagcaaaatctctcaggaaggtgctttaaaaaagatgcacgaggactgaacatgatcaacaaatgtccatcttacaattgcaactgatacaaatgaatgaggtgcattgtggccaaaatccagcagacagagcgagagtgtgagatggcagaggaggaacacaggataaaaatgaagttctcaataaagagaagatgtattgggaaaaaaaactacaaacttttaccaaggaatggcctgcttcctcatttaaccggccctttcc

SEQ ID NO: 4012 - protein, 93 aa, Homosapiens
MQLSAELSLPDFKQLKKGWENIKAWTKTIMAHERREKVKGSVSPLLSNQVLGKEITSMLLEQLYFLQSTPSTPPPGGGAQIPRHGPRIICCFK

SEQ ID NO: 4013 - DNA, 2527 bp, Homosapiens
agtggcaagcgctgcctgagcagttctagctgggagaggtgggtgctgcagagtctgggattccagggtgaaagccacaggttcccctgaataagctcttactgctggtggttcctgaactgaagatgcaggcggatctggagatcccccgagacctcacgctggatgccctgctggagatgaatgaggccaaggtgaaggagacgctgcggcgctgtggggccagcggggatgagtgtggccgtctgcagtatgccctcacctgcctgcggaaggtgacaggcctgggtacgtggggcctgccaccctctcccttgcctggcctggtgcccttggggctgtggccttcactatggtgggtgatggagcggggcaagcgtggcccagggtttctggggcagcctggaaaggccagggttggatgttcacagcctcctgagaagctctcccagggtcctcagggctctggatcctggtgggtctggccaggccgaatctgaggggtttcagccatggttagaaatcccaggcctgtctgctgggctgggctggcctggcatggtttcctctctgttgagggctctgtgtaccctctgccagcttcccacattccagcccccagccctctccccgtcttctcctgtccccattgctggctgggttctgtgctcagaaggcacatgctgatgtgggcctgagccaagggtgattagggaaactctatggctctttagctgggagtgtgtacgtggctgtcccaggcaaagtgtgtaatcctggccttgccacgaggtccttgggaattattcacaggctttctaaatcttgcgtcggaaacagcttcaaatgcctgacttaatggtcccactaccacatagataaggcattaaaataagcctcatgaatggaatcaggcctggtttttaattatctgaggcccctgtcttatctccgtctgcctgaggcttaaggaaggcaccaaggtttatattctgcctggttttttcttcccagagaggatcgggcttaatttcctctctgccctcattgtatcaagtcctctgaacacggcacagtgtagaaagttgcactcaattcagaaaatcttgacctgccaggtctcccggcagatgctgaaaataaacacaacagaagtgtggctggtgttcttgttctcacatattacaggagactgagctcagagagggaaagggcttgggtaagggcacacagcagttggtggctgagccagaatttgaaccttgggccctgatggcgattggtttgtccccatgcttgccacccaagctgagatctttggggtaatttgtcagcccttctttgcttcctccttatgcctggattttaaagaattgtggaagagtcagcttttaagtggtagtgacctatttgtgtcatgcaggctgctgtctacctgtcctagatgccaagagagggagatcactaatttatgcacctactgtgtgccaggcgtgtgacacacatattgtggccacatcgttgtaagaggtagtgttgagctcgctttgtagctgaggcctctctgaccactggaggcgttggatgagtcatctggggccccacacctggcatggagcagagctgggctttgaactcaggtttcttgttcagagggtgctttttccagcaggccttagaggaggcccctgaagaagaagcattttctgggtttcttctctctcatttagtctcagcttgtggtgcctctgcatccccagcagagtcctagccccatcacagtccaggacaccggcctttcgtctgcccagtgctggctgcacttcacgggcacctgctgggatccgctgggtaccagtgatcccattagattgtgcatcacagcatcttcattgcatccccatggggcttggtgagagcagtctagtcagagtacaggtgggctatggaatgaaaccacctgggccctgcctgggcccagcactctgctcggccacttagaacctgtgggaccttggtgagttacttcacctcactctgcctcagtttcctcatctgtaaaatggcagtgataacgacacctctctcagggttgttgtgaaaaggaaatgagttaacgtaaagtccttagatcagagcctggcatgtattagatgttcttttcagtgtgaggcctatgaggtgatagaaagtgttgaagtcatttcctttgcaatctctggtctaaagaaaggtgagtgaacagctgggcatggtggcccaggcctgtaatcccagcatttgggaggctgaggcaggctgattgcttgagttcaggagttcaagccccccctgggcaacatggcaaaaccctgtttctacaaaaaatacaaaaattagccaagagtggttgtgtgtgcctgtaatcccagctactcaggaagctgaggtgggagcatggcttgaacctgggagataggggttgcagtgagccaagatcataccactgcactccagccttggtaacagagccagatgctgtctcacc

SEQ ID NO: 4014 - protein, 124 aa, Homosapiens
MQADLEIPRDLTLDALLEMNEAKVKETLRRCGASGDECGRLQYALTCLRKVTGLGTWGLPPSPLPGLVPLGLWPSLWWVMERGKRGPGFLGQPGKARVGCSQPPEKLSQGPQGSGSWWVWPGRI

SEQ ID NO: 4015 - DNA, 880 bp, Homosapiens
ctcaccgcctctctgcctgtccctctgtccccttaggagatcccccgagacctcacgctggatgccctgctggagatgaatgaggccaaggtgaaggagacgctgcggcgctgtggggccagcggggatgagtgtggccgtctgcagtatgccctcacctgcctgcggaaggtgacaggcctgggaggggagcacaaggaggactccagttggagttcattggatgcgcggcgggaaagtggctcagggccttccacggacaccctctcagcagccagcctgccctggcccccagggagctcccagctgggcagagcaggcaacagcgcccagggcccacgctccatctccgtgtcagctctgcccgcctcagactcccccacccccagcttcagtgagggcctctcagacacctgtattcccctgcacgccagcggccggctgaccccccgtgccctgcacagcttcatcaccccgcccaccacaccccagctgcgacggcacaccaagctgaagccaccacggacgccccccccacccagccgcaaggtcttccagctgctgcccagcttccccacactcacccggagcaagtcccatgagtctcagctggggaaccgcattgatgacgtctcctcgatgaggtttggtaagagagattcatttccatcccctctaccacctgggagtcgtgtgtgcgttgctgtccccatcgggggtggacctctttgacccacctcttagcccgttcagcctctccatagtccagaagcagaggtgctggtgaccacctcaggaaatagccctaagacaggtggccttaaagtgactggctggcttcagcccagctggtggctgctctctgagaatcagagacctt

SEQ ID NO: 4016 - protein, 218 aa, Homosapiens
MNEAKVKETLRRCGASGDECGRLQYALTCLRKVTGLGGEHKEDSSWSSLDARRESGSGPSTDTLSAASLPWPPGSSQLGRAGNSAQGPRSISVSALPASDSPTPSFSEGLSDTCIPLHASGRLTPRALHSFITPPTTPQLRRHTKLKPPRTPPPPSRKVFQLLPSFPTLTRSKSHESQLGNRIDDVSSMRFGKRDSFPSPLPPGSRVCVAVPIGGGPL

SEQ ID NO: 4017 - DNA, 2505 bp, Homosapiens
ctagataatgtgtgcgcatgagtgagcggcctttataaaccaggtaaaggttggtagttgaagccttcccttaagaaacagtgcagcctcacaccaggtgttgaacatctctggcccctagccatctcccctgtgaattccttccagccctgaccatctgtgactccacgtcttggtccacaggaggggagcacaaggaggactccagttggagttcattggatgcgcggcgggaaagtggctcagggccttccacggacaccctctcagcagccagcctgccctggcccccagggagctcccagctgggcagagcaggcaacagcgcccagggcccacgctccatctccgtgtcagctctgcccgcctcagactcccccacccccagcttcagtgagggcctctcagacacctgtattcccctgcacgccagcggccggctgaccccccgtgccctgcacagcttcatcaccccgcccaccacaccccagctgcgacggcacaccaagctgaagccaccacggacgccccccccacccagccgcaaggtcttccagctgctgcccagcttccccacactcacccggagcaagtcccatgagtctcagctggggaaccgcattgatgacgtctcctcgatgaggtgaatctctcgcatggatccccacagatggtacggagggatatcgggctgtcggtgacgcacaggttctccaccaagtcctggctgtcgcaggtctgccacgtgtgccagaagagcatgatatttggagtgaagtgcaagcattgcaggttgaagtgtcacaacaaatgtaccaaagaagcccctgcctgtagaatatccttcctgccactaactcggcttcggaggacagaatctgtcccctcggacatcaacaacccggtggacagagcagccgaaccccattttggaaccctccccaaagcactgacaaagaaggagcaccctccggccatgaatcacctggactccagcagcaacccttcctccaccacctcctccacaccctcctcaccggcgcccttcccgacatcatccaacccatccagcgccaccacgccccccaacccctcacctggccagcgggacagcaggttcaacttcccagctgcctacttcattcatcatagacagcagtttatctttccagacatttcagcctttgcacacgcagccccgctccctgaagctgccgacggtacccggctcgatgaccagccgaaagcagatgtgttggaagctcacgaagcggaggctgaggagccagaggctggcaagtcagaggcagaagacgatgaggacgaggtggacgacttgccgagctctcgccggccctggcggggccccatctctcgcaaggccagccagaccagcgtgtacctgcaggagtgggacatccccttcgagcaggtagagctgggcgagcccatcgggcagggccgctggggccgggtgcaccgcggccgctggcatggcgaggtggccattcgcctgctggagatggacggccacaaccaggaccacctgaagctcttcaagaaagaggtgatgaactaccggcagacgcggcatgagaacgtggtgctcttcatgggggcctgcatgaacccgccccacctggccattatcaccagcttctgcaaggggcggacgttgcactcgtttgtgagggaccccaagacgtctctggacatcaacaagacgaggcaaatcgctcaggagatcatcaagggcatgggatatcttcatgccaagggcatcgtacacaaagatctcaaatctaagaacgtcttctatgacaacggcaaggtggtcatcacagacttcgggctgtttgggatctcaggcgtggtccgagagggacggcgtgagaaccagctaaagctgtcccacgactggctgtgctatctggcccctgagattgtacgcgagatgacccccgggaaggacgaggatcagctgccattctccaaagctgctgatgtctatgcatttgggactgtttggtatgagctgcaagcaagagactggcccttgaagaaccaggctgcagaggcatccatctggcagattggaagcggggaaggaatgaagcgtgtcctgacttctgtcagcttggggaaggaagtcagtgagatcctgtcggcctgctgggctttcgacctgcaggagagacccagcttcagcctgctgatggacatgctggagaaacttcccaagctgaaccggcggctctcccaccctggacacttctggaagtcagctgagttgtaggcctggctgccttgcatgcaccaggggctttcttcctcctaatcaacaactcagcaccgtgacttctgctaaaatgcaaaatgagatgcgggcactaacccaggggatgccacctctgctgctccagtcgtctctctcgaggctacttcttttgctttgttttaaaaactggccctctgccctctccacgtggcctgcatatgcccaag

SEQ ID NO: 4018 - protein, 541 aa, Homosapiens [sequence omitted]

SEQ ID NO: 4019 - DNA, 492 bp, Homosapiens
ccacccagccgcaaggtcttccagctgctgcccagcttccccacactcacccggagcaagtcccatgagtctcagctggggaaccgcattgatgacgtctcctcgatgaggtgaatctctcgcatggatccccacagatggtacggagggatatcgggctgtcggtgacgcacagacgtaaatgtgaagccagttggagtttgtgctatgcagcagtgttagccaggatctcatcagcgtgcaaacctagcatcttctgtggccacaagccacacacttgctttttttgaatgtgatgtaaaatttgtacagtaaagtttttatattttctatcaactacatttgtcttccagacatgctattaatttaaattaaaatggttagtattaacaaacatgctgtatcgggtttttttgccactggcaagaacatgccctctgtgctaagccaggcctgggtgtctggagtttgtgaataaagttataccaaggt

SEQ ID NO: 4020 - protein, 50 aa, Homosapiens
MVRRDIGLSVTHRRKCEASWSLCYAAVLARISSACKPSIFCGHKPHTCFF

SEQ ID NO: 4021 - DNA, 2327 bp, Homosapiens
tttcccaagtgcagggtcagtgttctgggtctgggtgtgttttctaagctgtgtgtgggtgttctgccggccctggggcagacctgtgccaggcaggcctctttgctgcctgctgaaaggcctgtgtccttgtcccggcttcctggtctccaggcgtgagaaccagctaaagctgtcccacgactggctgtgctatctggcccctgagattgtacgcgagatgacccccgggaaggacgaggatcagctgccattctccaaagctgctgatgtctatgcatttgggactgtttggtatgagctgcaagcaagagactggcccttgaagaaccaggctgcagaggcatccatctggcagattggaagcggggaaggaatgaagcgtgtcctgacttctgtcagcttggggaaggaagtcagtgagatcctgtcggcctgctgggctttcgacctgcaggagagacccagcttcagcctgctgatggacatgctggagaaacttcccaagctgaaccggcggctctcccaccctggacacttctggaagtcagctgagttgtaggcctggctgccttgcatgcaccaggggctttcttcctcctaatcaacaactcagcaccgtgacttctgctaaaatgcaaaatgagatgcgggcactaacccaggggatgccacctctgctgctccagtcgtctctctcgaggctacttcttttgctttgttttaaaaactggccctctgccctctccacgtggcctgcatatgcccaagtaactgctctcagaggatcccactaactgagctccctccaaggcagtctgggcagcttctaactaccttcctggacatgactgattgctcccgtgttcttctgagggctggtcttgtttttgtttgggtggctctgtctcactgctaacaccttagtgagatgccttccaccctcctgagcacaccagcctcccactgggtgtgtgcctagtgcggggcgggcggaggttgggagggtgttggcttggcttttaacctgtggggattttgtccaacaaggagtggaatgatttcagagctgccctgaggctggcaccctggtcacaggaaccctctgcgctggctcctgtctcagtcccctctgtagagttagatcagaagacacagaaagttctgtggccatgaaagataccagcttggaagggttgtgtcttcagtggcaccctcagaaaaattgtcttaaagcaaagaggtacctggctccagacaatttttctgatgaaaacaaagtctctgccccgtccccaccctgccaccctggcaaagttacttcctttacagctgcccagtgtaccatagaccagaccccaggtcagcatttgtcaagagcatggctgctgagtcccctgtggcagtcaatgcactgtttaccaaatgcaggtttctgttctccctccccagcaagacctgctgaacccagatctctggaatggggccctaggaatttgcatttcaacctgcttcccaggtggccctgatgcaccccagtattagagtttattgctaaaaggaacatgccctgtcactcctggtatcctgggagtcatgtttctcttctctctcagttctacttggagcaagagctttcctgggctgcaaatgagaaaacaattcctaggaacccacagcagtactgagcatgctgggagcttgggacttggagatgaatgagccaccgttgctgctccaagtaggactacttggagtgtagctgaggccttggacgcagtatgaccaggggcagctctgccagggctgttggccaatcagtcattttcatttcttgttggaggccaggtcctctgctgaactcatttcctagctagtgttaccctaattctgatgaagatcaatggggctataattcttgtttttgttcctctttgcagcattaacagcagcaaagttgtaccccggtttgaaaggtttggcttgggcgtcctggagtccagtaatccaaagatgtagccagccatatggtttttcgctgctgatctctttctttttaaaatgtgtttctgaaacatcccaacaaccaccacgacaaaaaaacactgcctgcccagcgctgcaaaccaggagcacacgtcctagattcagactgttggccataaaccccactcgggagatggagctgcacctgctatttcttaaaatgacaccaccaacaaccaaacctgtcatgacagacagcaaatgtttacacgtatatttctcctgagtgaacctgatgttttacaataggtaataataaaaacagtctgtgcagatgcact

SEQ ID NO: 4022 - protein, 113 aa, Homosapiens
MTPGKDEDQLPFSKAADVYAFGTVWYELQARDWPLKNQAAEASIWQIGSGEGMKRVLTSVSLGKEVSEILSACWAFDLQERPSFSLLMDMLEKLPKLNRRLSHPGHFWKSAEL

SEQ ID NO: 4023 - DNA, 2904 bp, Homosapiens
ataaaccccactcgggagatggagctgcacctgctatttcttaaaatgacaccaccaacaaccaaacctgtcatgacagacagcaaatgtttacacgtatatttctcctgagtgaacctgatgttttacaataggtaataataaaaacagtctgtgcagatgcactggcactgacggccaggatggcggaaatggccatcccctctgaggaccttgtaggcggtgagggacccatgctgggccagaaggaagacaaacatggtaattgcagctgttcttggggtagggcggggagcccagaaggtctgatctggcctctgctttttggcccaagactccatcagggaaatctatctagggctctccccttgtcctttcaaagggatactgccccttcctcgtcttgcagaggaaaccctggctaggaactgagctagtttatggagtctggaattcctggagagcttgggttcaccttctcacccctgtaatccaggctgctcctgctggaaaagtagaaacagaatccaaaaaaggtctggactcacccggtggttcccagccagggtttctgctgcaaggtgaggaaacatccatggcttgtacagatgtgagtctttgatgaagcccccaggcaggcaccaaggtgatgggactcagggccttggcttttagatacatcccagtccctgactgacatctgaccatgagggctggatgggtgggaacaaggaggagtagatggcaaaagtacctgagcccacttcccagccacagggtgaccctggcactgtaaaaaccctttgtcagtcatgccagaaggttctagaactgcccacctcttccatttcagtcctgctgaaaccccttagcctatttccgactcctctgtccatgctctgagttcagctgggcagtgtgtgggctatcacccctttcatttagacctacctagctggcccccatctgcagagccttccttagcaccattaggccttctacttgtgtccatttgaagcaggaggggctggatttggaaaagtctttgaagtgagagcaccacgcttgtcttcgttagaaactcttaactgcagaaaaaagttccagatggcaagggagcccttaagtggagattaggttgcattagactccaaaaccagaaaggaaaaagggtgatgggagtggagacgtgattggattcaggcccagaacctgtgaccatgctctgagctcagacttggggagggaggggtgtggctcccaccccttccagttaagacctgcctagcagagccccagtctccagccccttccctagcaccagagtctggtcaaaatgccacagaaaatgagctgctctgccagcaagctgtggagctgcctcctctccaggcctggcatcccttggtcagcccctcctgggagggcacagccgtattacagtgccagtgtgcctggccatcagcatcttcacccttcccagtctgtgtggggaggctgtaaaccccgtggattcagctccgtgtggagtttctgtgctatggtgggactgctcattttgccccatcatccctttggcctcccacacacctgccccttcccagggatcacgtgtgtctccagcctttcacctttctattgcaatggtggcctttgtccaggcaagagcaggcctgatggatgtactggtgagccccacagttggatgtcagctcagccgtccaactgggaggaacagtaggctcagttcctccctgacccctgacaccaggccgcagtgggcatgcacaggcccacagaaagtcagtctgggttttgcttttctcgtgagcatcacagttaaagaagcgctcattgagcaactacagtgcacttggtcttctgcaagtgctgggcacctagagataggaacagtcatggtccctgctcttaaggaactgatgacctggtggggccctgttgtcttcaaggaacccagaagccactgggccccaaaggtggaactgaaggactgggggcagctggctctcagcctgccacctctgcactgcctgcctttaaagaaccccaccccaccccatgatggccccctctgttccccttgtatttcagtgactgtgaattgaggttaggaaggcacacctgcccttctgtgtgctctctccacacgaaggatgacagatactgtgaattcagccctcacggccaactgtgaaggggatggagaaggctgggagggctcggggagagctcttaggggctgcggaagtccccacgggggtctgagagtggagcccaagctttggccctccaggcatccccagtttccagcctcacctctgaagccctgctgcctttaaccaccagagccgcagccccctgggtttctgtctaactcgaagtcttgaatcctagctagtttggggttgtgagcagtgtgtagcaaagttgatctctccatgtcaccaaatcaaaacaccctctgtcatcctacggcatttcctcttgaggtcacagagaggaatggcaagccctggaaacctgtgttattctgtgttgatttggtgtggggggagggtggagacgtaaatgtgaagccagttggagtttgtgctatgcagcagtgttagccaggatctcatcagcgtgcaaacctagcatcttctgtggccacaagccacacacttgctttttttgaatgtgatgtaaaatttgtacagtaaagtttttatattttctatcaactacatttgtcttccagacatgctattaatttaaattaaaatggttagtattaacaaacatgctgtatcgggtttttttgccactggcaagaacatgccctctgtgctaagccaggcctgggtgtctggagtttgtgaataaagttataccaaggtgttc

SEQ ID NO: 4024 - protein, 160 aa, Homosapiens [sequence omitted]

SEQ ID NO: 4025 - DNA, 484 bp, Homosapiens
tgcagagccttccttagcaccattaggccttctacttgtgtccatttgaagcaggaggggctggatttggaaaagtctttgaagtgagagcaccacgcttgtcttcgttagaaactcttaactgcagaaaaaagttccagatggcaagggagcccttaaggtggagacgtaaatgtgaagccagttggagtttgtgctatgcagcagtgttagccaggatctcatcagcgtgcaaacctagcatcttctgtggccacaagccacacacttgctttttttgaatgtgatgtaaaatttgtacagtaaagtttttatattttctatcaactacatttgtcttccagacatgctattaatttaaattaaaatggttagtattaacaaacatgctgtatcgggtttttttgccactggcaagaacatgccctctgtgctaagccaggcctgggtgtctggagtttgtgaataaagttataccaaggtg

SEQ ID NO: 4026 - protein, 46 aa, Homosapiens
MAREPLRWRRKCEASWSLCYAAVLARISSACKPSIFCGHKPHTCFF

SEQ ID NO: 4027 - DNA, 3018 bp, Homosapiens
tgtttgttaaattatatgtagggacagggtcttccaacctttcccgagctggtctcaagctcctgggctgaagtgatcctcctgcctcagcctctcaaagtgctggtattataggcataagccaccacgccctgcccatttttctaagttggattattttacactccagtctgctgtgaatgagagttccagttgttgcgtatcgcaatcaatttgtgattgcctacaaatgatgtgccgtgatgaaattgtccctggtgtccgagaggatcgcaaagaatttcccttcctttctctcctttctgctccccttgtactgtctactccttaaactggtacttgatccaggaacataatggggatggacagtgcagatggcacacatggcctcagtctattggagcatctcaaaggaattagtctgcaaattctagtgcatctaggtggagcacaggaaggaagagaggtgcagactcacgtatggccctggggcacctgccatcctctcgcacccgtacagcccttacctgccagcacttaccctacccagcttgagttctgggccttctcaccagcacatcgctgggacctggtcgacttcaggtaagtttatttcatggctccctcccccacgacctgcacatgccatatgttccttcccagccccatgtcacttgaaatgttctatcatgtccaagacttctctcctcatcctaaagtgcagaaaataaggatggagaagagaaggagaagagaatcaagagagattcattgagagggaggatcagaagctcctgggcaccccatactgtagaataaaaatattcattatggtgtttttcttgcaaaatattcccctctacataattatgtttttacatgaataatataaatttaaacaggagaaatactttttgaagagtctgagaatcttcataaagttcaggcggccacgaattagctgtgtgacctggggcatgccccttagactctgagcctcagcttctctgtatgtaaaatgggttgaagccgcccttccccacaagcaccctgtgcacaggcaatgcccagccccattattttctggactccgtggccaagcatgcttaggacacacagccacatacttctgggcagtgtcatctggcaacttgctgtcatgtcagtgtggtcaagcattgtagacctctatgaaccaaatatgcttcaggcttgggttgagcacaggagagggaggagggaaaggtcactggggctgggagtgcctacttccctctgtgagtgtcaccccagtccacccagtaccatacctttctctctctggacccacttccttttgctgccggctcctccccattgaataacagccaagttgctttggtttctatttctttgttaagtcgttccctctacaaaggacttcctagtgggtgtgaaaggcagcggtggccacagaggcggcggagagatggccttcagcggttcccaggctccctacctgagtccagctgtccccttttctgggactattcaaggaggtctccaggacggacttcagatcactgtcaatgggaccgttctcagctccagtggaaccaggtttgctgtgaactttcagactggcttcagtggaaatgacattgccttccacttcaaccctcggtttgaagatggagggtacgtggtgtgcaacacgaggcagaacggaagctgggggcccgaggagaggaagacacacatgcctttccagaaggggatgccctttgacctctgcttcctggtgcagagctcagatttcaaggtgatggtgaacgggatcctcttcgtgcagtacttccaccgcgtgcccttccaccgtgtggacaccatctccgtcaatggctctgtgcagctgtcctacatcagcttccagcctcccggcgtgtggcctgccaacccggctcccattacccagacagtcatccacacagtgcagagcgcccctggacagatgttctctactcccgccatcccacctatgatgtacccccaccccgcctatccgatgcctttcatcaccaccattctgggagggctgtacccatccaagtccatcctcctgtcaggcactgtcctgcccagtgctcagaggttccacatcaacctgtgctctgggaaccacatcgccttccacctgaacccccgttttgatgagaatgctgtggtccgcaacacccagatcgacaactcctgggggtctgaggagcgaagtctgccccgaaaaatgcccttcgtccgtggccagagcttctcagtgtggatcttgtgtgaagctcactgcctcaaggtggccgtggatggtcagcacctgtttgaatactaccatcgcctgaggaacctgcccaccatcaacagactggaagtggggggcgacatccagctgacccatgtgcagacataggcggcttcctggccctggggccgggggctggggtgtggggcagtctgggtcctctcatcatccccacttcccaggcccagcctttccaaccctgcctgggatctgggctttaatgcagaggccatgtccttgtctggtcctgcttctggctacagccaccctggaacggagaaggcagctgacggggattgccttcctcagccgcagcagcacctggggctccagctgctggaatcctaccatcccaggaggcaggcacagccagggagaggggaggagtgggcagtgaagatgaagccccatgctcagtcccctcccatcccccacgcagctccaccccagtcccaagccaccagctgtctgctcctggtgggaggtggcctcctcagcccctcctctctgacctttaacctcactctcaccttgcaccgtgcaccaacccttcacccctcctggaaagcaggcctgatggcttcccactggcctccaccacctgaccagagtgttctcttcagaggactggctcctttcccagtgtccttaaaataaagaaatgaaaatgcttgttggcacattca

SEQ ID NO: 4028 - protein, 323 aa, Homosapiens
MAFSGSQAPYLSPAVPFSGTIQGGLQDGLQITVNGTVLSSSGTRFAVNFQTGFSGNDIAFHFNPRFEDGGYVVCNTRQNGSWGPEERKTHMPFQKGMPFDLCFLVQSSDFKVMVNGILFVQYFHRVPFHRVDTISVNGSVQLSYISFQPPGVWPANPAPITQTVIHTVQSAPGQMFSTPAIPPMMYPHPAYPMPFITTILGGLYPSKSILLSGTVLPSAQRFHINLCSGNHIAFHLNPRFDENAVVRNTQIDNSWGSEERSLPRKMPFVRGQSFSVWILCEAHCLKVAVDGQHLFEYYHRLRNLPTINRLEVGGDIQLTHVQT

SEQ ID NO: 4029 - DNA, 1505 bp, Homosapiens
tccccattgaataacagccaagttgctttggtttctatttctttgttaagtcgttccctctacaaaggacttcctagtgggtgtgaaaggcagcggtggccacagaggcggcggagagatggccttcagcggttcccaggctccctacctgagtccagctgtccccttttctgggactattcaaggaggtctccaggacggacttcagatcactgtcaatgggaccgttctcagctccagtggaaccaggtttgctgtgaactttcagactggcttcagtggaaatgacattgccttccacttcaaccctcggtttgaagatggagggtacgtggtgtgcaacacgaggcagaacggaagctgggggcccgaggagaggaagacacacatgcctttccagaaggggatgccctttgacctctgcttcctggtgcagagctcagatttcaaggtgatggtgaacgggatcctcttcgtgcagtacttccaccgcgtgcccttccaccgtgtggacaccatctccgtcaatggctctgtgcagctgtcctacatcagcttccagcctcccggcgtgtggcctgccaacccggctcccattacccagacagtcatccacacagtgcagagcgcccctggacagatgttctctactcccgccatcccacctatgatgtacccccaccccgcctatccgatgcctttcatcaccaccattctgggagggctgtacccatccaagtccatcctcctgtcaggcactgtcctgcccagtgctcagaggtgtggatcttgtgtgaagctcactgcctcaaggtggccgtggatggtcagcacctgtttgaatactaccatcgcctgaggaacctgcccaccatcaacagactggaagtggggggcgacatccagctgacccatgtgcagacataggcggcttcctggccctggggccgggggctggggtgtggggcagtctgggtcctctcatcatccccacttcccaggcccagcctttccaaccctgcctgggatctgggctttaatgcagaggccatgtccttgtctggtcctgcttctggctacagccaccctggaacggagaaggcagctgacggggattgccttcctcagccgcagcagcacctggggctccagctgctggaatcctaccatcccaggaggcaggcacagccagggagaggggaggagtgggcagtgaagatgaagccccatgctcagtcccctcccatcccccacgcagctccaccccagtcccaagccaccagctgtctgctcctggtgggaggtggcctcctcagcccctcctctctgacctttaacctcactctcaccttgcaccgtgcaccaacccttcacccctcctggaaagcaggcctgatggcttcccactggcctccaccacctgaccagagtgttctcttcagaggactggctcctttcccagtgtccttaaaataaagaaatgaaaatgcttgttggcacattca

SEQ ID NO: 4030 - protein, 246 aa, Homosapiens
MAFSGSQAPYLSPAVPFSGTIQGGLQDGLQITVNGTVLSSSGTRFAVNFQTGFSGNDIAFHFNPRFEDGGYVVCNTRQNGSWGPEERKTHMPFQKGMPFDLCFLVQSSDFKVMVNGILFVQYFHRVPFHRVDTISVNGSVQLSYISFQPPGVWPANPAPITQTVIHTVQSAPGQMFSTPAIPPMMYPHPAYPMPFITTILGGLYPSKSILLSGTVLPSAQRCGSCVKLTASRWPWMVSTCLNTTIA

SEQ ID NO: 4031 - DNA, 1728 bp, Homosapiens
atttctttgttaagtcgttccctctacaaaggacttcctagtgggtgtgaaaggcagcggtggccacagaggcggcggagagatggccttcagcggttcccaggctccctacctgagtccagctgtccccttttctgggactattcaaggaggtctccaggacggacttcagatcactgtcaatgggaccgttctcagctccagtggaaccaggtttgctgtgaactttcagactggcttcagtggaaatgacattgccttccacttcaaccctcggtttgaagatggagggtacgtggtgtgcaacacgaggcagaacggaagctgggggcccgaggagaggaagacacacatgcctttccagaaggggatgccctttgacctctgcttcctggtgcagagctcagatttcaaggtgatggtgaacgggatcctcttcgtgcagtacttccaccgcgtgcccttccaccgtgtggacaccatctccgtcaatggctctgtgcagctgtcctacatcagcttccagaacccccgcacagtccctgttcagcctgccttctccacggtgccgttctcccagcctgtctgtttcccacccaggcccagggggcgcagacaaaaacctcccggcgtgtggcctgccaacccggctcccattacccagacagtcatccacacagtgcagagcgcccctggacagatgttctctactcccgccatcccacctatgatgtacccccaccccgcctatccgatgcctttcatcaccaccattctgggagggctgtacccatccaagtccatcctcctgtcaggcactgtcctgcccagtgctcagaggttccacatcaacctgtgctctgggaaccacatcgccttccacctgaacccccgttttgatgagaatgctgtggtccgcaacacccagatcgacaactcctgggggtctgaggagcgaagtctgccccgaaaaatgcccttcgtccgtggccagagcttctcagtgtggatcttgtgtgaagctcactgcctcaaggtggccgtggatggtcagcacctgtttgaatactaccatcgcctgaggaacctgcccaccatcaacagactggaagtggggggcgacatccagctgacccatgtgcagacataggcggcttcctggccctggggccgggggctggggtgtggggcagtctgggtcctctcatcatccccacttcccaggcccagcctttccaaccctgcctgggatctgggctttaatgcagaggccatgtccttgtctggtcctgcttctggctacagccaccctggaacggagaaggcagctgacggggattgccttcctcagccgcagcagcacctggggctccagctgctggaatcctaccatcccaggaggcaggcacagccagggagaggggaggagtgggcagtgaagatgaagccccatgctcagtcccctcccatcccccacgcagctccaccccagtcccaagccaccagctgtctgctcctggtgggaggtggcctcctcagcccctcctctctgacctttaacctcactctcaccttgcaccgtgcaccaacccttcacccctcctggaaagcaggcctgatggcttcccactggcctccaccacctgaccagagtgttctcttcagaggactggctcctttcccagtgtccttaaaataaagaaatgaaaatgcttgttggcacattca

SEQ ID NO: 4032 - protein, 355 aa, Homosapiens; identical to SEQ ID NO: 601

SEQ ID NO: 4033 - DNA, 472 bp, Homosapiens
tttctttgttaagtcgttccctctacaaaggacttcctagtgggtgtgaaaggcagcggtggccacagaggcggcggagagatggccttcagcggttcccaggctccctacctgagtccagctgtccccttttctgggactattcaaggaggtctccaggacggacttcagatcactgtcaatgggaccgttctcagctccagtggaaccaggtttgctgtgaactttcagactggcttcagtggaaatgacattgccttccacttcaaccctcggtttgaagatggagggtacgtggtgtgcaacacgaggcagaacggaagctgggggcccgaggagaggaagacacacatgcctttccagaaggggatgccctttgacctctgcttcctggtgcagagctcagatttcaaggtgcacctgctgcttcttttactctgaaaataagaactagaggagtcatcacgttgct

SEQ ID NO: 4034 - protein, 119 aa, Homosapiens
MAFSGSQAPYLSPAVPFSGTIQGGLQDGLQITVNGTVLSSSGTRFAVNFQTGFSGNDIAFHFNPRFEDGGYVVCNTRQNGSWGPEERKTHMPFQKGMPFDLCFLVQSSDFKVHLLLLLL

SEQ ID NO: 4035 - DNA, 1432 bp, Homosapiens
tttctttgttaagtcgttccctctacaaaggacttcctagtgggtgtgaaaggcagcggtggccacagaggcggcggagagatggccttcagcggttcccaggctccctacctgagtccagctgtccccttttctgggactattcaaggaggtctccaggacggacttcagatcactgtcaatgggaccgttctcagctccagtggaaccaggtttgctgtgaactttcagactggcttcagtggaaatgacattgccttccacttcaaccctcggtttgaagatggagggtacgtggtgtgcaacacgaggcagaacggaagctgggggcccgaggagaggaagacacacatgcctttccagaaggggatgccctttgacctctgcttcctggtgcagagctcagatttcaaggtgatggtgaacgggatcctcttcgtgcagtacttccaccgcgtgcccttccaccgtgtggacaccatctccgtcaatggctctgtgcagctgtcctacatcagcttccagacccagacagtcatccacacagtgcagagcgcccctggacagatgttctctactcccgccatcccacctatgatgtacccccaccccgcctatccgatgcctttcatcaccaccattctgggagggctgtacccatccaagtccatcctcctgtcaggcactgtcctgcccagtgctcagaggtgtggatcttgtgtgaagctcactgcctcaaggtggccgtggatggtcagcacctgtttgaatactaccatcgcctgaggaacctgcccaccatcaacagactggaagtggggggcgacatccagctgacccatgtgcagacataggcggcttcctggccctggggccgggggctggggtgtggggcagtctgggtcctctcatcatccccacttcccaggcccagcctttccaaccctgcctgggatctgggctttaatgcagaggccatgtccttgtctggtcctgcttctggctacagccaccctggaacggagaaggcagctgacggggattgccttcctcagccgcagcagcacctggggctccagctgctggaatcctaccatcccaggaggcaggcacagccagggagaggggaggagtgggcagtgaagatgaagccccatgctcagtcccctcccatcccccacgcagctccaccccagtcccaagccaccagctgtctgctcctggtgggaggtggcctcctcagcccctcctctctgacctttaacctcactctcaccttgcaccgtgcaccaacccttcacccctcctggaaagcaggcctgatggcttcccactggcctccaccacctgaccagagtgttctcttcagaggactggctcctttcccagtgtccttaaaataaagaaatgaaaatgcttgttggcacattca

SEQ ID NO: 4036 - protein, 234 aa, Homosapiens
MAFSGSQAPYLSPAVPFSGTIQGGLQDGLQITVNGTVLSSSGTRFAVNFQTGFSGNDIAFHFNPRFEDGGYVVCNTRQNGSWGPEERKTHMPFQKGMPFDLCFLVQSSDFKVMVNGILFVQYFHRVPFHRVDTISVNGSVQLSYISFQTQTVIHTVQSAPGQMFSTPAIPPMMYPHPAYPMPFITTILGGLYPSKSILLSGTVLPSAQRCGSCVKLTASRWPWMVSTCLNTTIA

SEQ ID NO: 4037 - DNA, 1553 bp, Homosapiens
gttaagtcgttccctctacaaaggacttcctagtgggtgtgaaaggcagcggtggccacagaggcggcggagagatggccttcagcggttcccaggctccctacctgagtccagctgtccccttttctgggactattcaaggaggtctccaggacggacttcagatcactgtcaatgggaccgttctcagctccagtggaaccagatggagggtacgtggtgtgcaacacgaggcagaacggaagctgggggcccgaggagaggaagacacacatgcctttccagaaggggatgccctttgacctctgcttcctggtgcagagctcagatttcaaggtgatggtgaacgggatcctcttcgtgcagtacttccaccgcgtgcccttccaccgtgtggacaccatctccgtcaatggctctgtgcagctgtcctacatcagcttccagcctcccggcgtgtggcctgccaacccggctcccattacccagacagtcatccacacagtgcagagcgcccctggacagatgttctctactcccgccatcccacctatgatgtacccccaccccgcctatccgatgcctttcatcaccaccattctgggagggctgtacccatccaagtccatcctcctgtcaggcactgtcctgcccagtgctcagaggttccacatcaacctgtgctctgggaaccacatcgccttccacctgaacccccgttttgatgagaatgctgtggtccgcaacacccagatcgacaactcctgggggtctgaggagcgaagtctgccccgaaaaatgcccttcgtccgtggccagagcttctcagtgtggatcttgtgtgaagctcactgcctcaaggtggccgtggatggtcagcacctgtttgaatactaccatcgcctgaggaacctgcccaccatcaacagactggaagtggggggcgacatccagctgacccatgtgcagacataggcggcttcctggccctggggccgggggctggggtgtggggcagtctgggtcctctcatcatccccacttcccaggcccagcctttccaaccctgcctgggatctgggctttaatgcagaggccatgtccttgtctggtcctgcttctggctacagccaccctggaacggagaaggcagctgacggggattgccttcctcagccgcagcagcacctggggctccagctgctggaatcctaccatcccaggaggcaggcacagccagggagaggggaggagtgggcagtgaagatgaagccccatgctcagtcccctcccatcccccacgcagctccaccccagtcccaagccaccagctgtctgctcctggtgggaggtggcctcctcagcccctcctctctgacctttaacctcactctcaccttgcaccgtgcaccaacccttcacccctcctggaaagcaggcctgatggcttcccactggcctccaccacctgaccagagtgttctcttcagaggactggctcctttcccagtgtccttaaaataaagaaatgaaaatgcttgttggcacattca

SEQ ID NO: 4038 - protein, 266 aa, Homosapiens
MGPFSAPVEPDGGYVVCNTRQNGSWGPEERKTHMPFQKGMPFDLCFLVQSSDFKVMVNGILFVQYFHRVPFHRVDTISVNGSVQLSYISFQPPGVWPANPAPITQTVIHTVQSAPGQMFSTPAIPPMMYPHPAYPMPFITTILGGLYPSKSILLSGTVLPSAQRFHINLCSGNHIAFHLNPRFDENAVVRNTQIDNSWGSEERSLPRKMPFVRGQSFSVWILCEAHCLKVAVDGQHLFEYYHRLRNLPTINRLEVGGDIQLTHVQT

SEQ ID NO: 4039 - DNA, 2729 bp, Homosapiens
cccagccagcaggccactcagggcctacaggccgcatcttgcccacccaagagttccctgtctctgtccgctgggcacccagagctggggacctgggggtcaccctggattcttcactccctcttctttacgtctctccaaggcacgaacgtgtctccctcctgaagccaccgatgtggtccaggcctctgggattcctcaccatgacgacaggggtccagttccccaccccctacacccaaccactgccacagtgaccttcttataagcaaatgtgatcacaccctctccctgcttaaaaatcttcacagcccccagcccttcaaataaagcccaaattctccagcagggtatatgaattcctccccagtctgccccaatccacgtccctgcctcacccccaacccacgaagctcacgcagcctctgcagctcactcaaggccctcttgggccaccatgcttttgcatatgctgtccctggtcccggaagcaccctctgccagcctgcctcgagcacatgcctaattgcccttccatgctctgcctaagtgccgctcctctgggagtcctccccgcctggaatattgttggacgctcccctggtgtccccacagagtctgtatgtatctgtgccatgccagttcacagcaccccattgtaactgtatttgcgtgtctgtccccgttactccacccccatgtccctatgcccatgaggccccagagggccaggactgtggcttgttcatttgcactgtgcctggcactcagtagggactcagtgaatgaatgtggaatgtggttcacacagccagggagaatgggataccagccagggcaagaacagtctactgggtggggcaggatccaggacaaggaggtgagcagcccttcctccggccactcaagtagtggggactgggaggaggggcgctttgtctacgcagtcttcttatggctcatcaccgtacagacagggcacctgcctcctgccacgctgacttcaggactggtcgagccccagggaacatttgcagggcagcccaactttggccctggccctggcgctggccctggctctggggaggatagaaagtgtgctggatacagtcagacagaactggctgccactttggatttgatcccttccaccttggcaagcttgggcaagttgcttaatctttctgagcctcgttgcctcactagggacacaggagctgaggctgcttcccttgttggaaagcactgaagcccaggaatcgacccacaataggccttcaacaaataccacttctcaccttatgggtgaaatatggcactggaagtaatgctcttcgctgtgggagctacagaaagcaatgaggtctctatcaaacccagtctcctctctctcgagaggaaccagtggggataccctaccccccaaccccaaagccctgtacacctgggggtaaaaatctgggtgccacgggctcaggaaggcttgcttgggagcaagagggaggtgggtgtgtccggggaggcatttctgagcacaagagcctccctggagttttgccaccatctcctcccattctgtggtgcccgcgataaccaccattctgactctcctcacccctccagcctcccggcgtgtggcctgccaacccggctcccattacccagacagtcatccacacagtgcagagcgcccctggacagatgttctctactcccgccatcccacctatgatgtacccccaccccgcctatccgatgcctttcatcaccaccattctgggagggctgtacccatccaagtccatcctcctgtcaggcactgtcctgcccagtgctcagaggttccacatcaacctgtgctctgggaaccacatcgccttccacctgaacccccgttttgatgagaatgctgtggtccgcaacacccagatcgacaactcctgggggtctgaggagcgaagtctgccccgaaaaatgcccttcgtccgtggccagagcttctcagtgtggatcttgtgtgaagctcactgcctcaaggtggccgtggatggtcagcacctgtttgaatactaccatcgcctgaggaacctgcccaccatcaacagactggaagtggggggcgacatccagctgacccatgtgcagacataggcggcttcctggccctggggccgggggctggggtgtggggcagtctgggtcctctcatcatccccacttcccaggcccagcctttccaaccctgcctgggatctgggctttaatgcagaggccatgtccttgtctggtcctgcttctggctacagccaccctggaacggagaaggcagctgacggggattgccttcctcagccgcagcagcacctggggctccagctgctggaatcctaccatcccaggaggcaggcacagccagggagaggggaggagtgggcagtgaagatgaagccccatgctcagtcccctcccatcccccacgcagctccaccccagtcccaagccaccagctgtctgctcctggtgggaggtggcctcctcagcccctcctctctgacctttaacctcactctcaccttgcaccgtgcaccaacccttcacccctcctggaaagcaggcctgatggcttcccactggcctccaccacctgaccagagtgttctcttcagaggactggctcctttcccagtgtccttaaaataaagaaatgaaaatgcttgttggcacattca

SEQ ID NO: 4040 - protein, 149 aa, Homosapiens [sequence omitted]

SEQ ID NO: 4041 - DNA, 3391 bp, Homosapiens
cccagccagcaggccactcagggcctacaggccgcatcttgcccacccaagagttccctgtctctgtccgctgggcacccagagctggggacctgggggtcaccctggattcttcactccctcttctttacgtctctccaaggcacgaacgtgtctccctcctgaagccaccgatgtggtccaggcctctgggattcctcaccatgacgacaggggtccagttccccaccccctacacccaaccactgccacagtgaccttcttataagcaaatgtgatcacaccctctccctgcttaaaaatcttcacagcccccagcccttcaaataaagcccaaattctccagcagggtatatgaattcctccccagtctgccccaatccacgtccctgcctcacccccaacccacgaagctcacgcagcctctgcagctcactcaaggccctcttgggccaccatgcttttgcatatgctgtccctggtcccggaagcaccctctgccagcctgcctcgagcacatgcctaattgcccttccatgctctgcctaagtgccgctcctctgggagtcctccccgcctggaatattgttggacgctcccctggtgtccccacagagtctgtatgtatctgtgccatgccagttcacagcaccccattgtaactgtatttgcgtgtctgtccccgttactccacccccatgtccctatgcccatgaggccccagagggccaggactgtggcttgttcatttgcactgtgcctggcactcagtagggactcagtgaatgaatgtggaatgtggttcacacagccagggagaatgggataccagccagggcaagaacagtctactgggtggggcaggatccaggacaaggaggtgagcagcccttcctccggccactcaagtagtggggactgggaggaggggcgctttgtctacgcagtcttcttatggctcatcaccgtacagacagggcacctgcctcctgccacgctgacttcaggactggtcgagccccagggaacatttgcagggcagcccaactttggccctggccctggcgctggccctggctctggggaggatagaaagtgtgctggatacagtcagacagaactggctgccactttggatttgatcccttccaccttggcaagcttgggcaagttgcttaatctttctgagcctcgttgcctcactagggacacaggagctgaggctgcttcccttgttggaaagcactgaagcccaggaatcgacccacaataggccttcaacaaataccacttctcaccttatgggtgaaatatggcactggaagtaatgctcttcgctgtgggagctacagaaagcaatgaggtctctatcaaacccagtctcctctctctcgagaggaaccagtggggataccctaccccccaaccccaaagccctgtacacctgggggtaaaaatctgggtgccacgggctcaggaaggcttgcttgggagcaagagggaggtgggtgtgtccggggaggcatttctgagcacaagagcctccctggagttttgccaccatctcctcccattctgtggtgcccgcgataaccaccattctgactctcctcacccctccagcctcccggcgtgtggcctgccaacccggctcccattgtaagtctcttgctttctttttggatcgtcctcattttggcttttctgggctcatggaggaggcagggccaggcattgggcctctcccattgggagtggggagggcacagaccagacccttgaccatctgcccggcctggtgaggttgggggttggatgtgggggttggatgaaacaacctgagttgccaccccgtgggcagccacggaagaccatgccccacattcacttctgtcacctgcaaagggaggctaggctgagagacgtttccccgagaggaaagatgggccagagccaccagcgtccccatctgtcttctccagggttctaacctttgcccctcgctcatccccttgagagaagagacacctgggcccaccctctgtggggtctgtggggccattgggcttgttacgccccctggagggtgcctgccgtgtggcgccctctggtgggagctggtggttttcacacgtgagagcctgggtgagacctggtttctttcttccagacccagacagtcatccacacagtgcagagcgcccctggacagatgttctctactcccgccatcccacctatgatgtacccccaccccgcctatccgatgcctttcatcaccaccattctgggagggctgtacccatccaagtccatcctcctgtcaggcactgtcctgcccagtgctcagaggtaagccaagggctccagtgacctctgggaagagagagcccttcaaggtcagtccagccattcccctggcttcaggaaggctactgatgatggggaggaaatgggactcagaattcggtggataaaggttcaggtgggctgcccaccccaggttccacatcaacctgtgctctgggaaccacatcgccttccacctgaacccccgttttgatgagaatgctgtggtccgcaacacccagatcgacaactcctgggggtctgaggagcgaagtctgccccgaaaaatgcccttcgtccgtggccagagcttctcagtgtggatcttgtgtgaagctcactgcctcaaggtggccgtggatggtcagcacctgtttgaatactaccatcgcctgaggaacctgcccaccatcaacagactggaagtggggggcgacatccagctgacccatgtgcagacataggcggcttcctggccctggggccgggggctggggtgtggggcagtctgggtcctctcatcatccccacttcccaggcccagcctttccaaccctgcctgggatctgggctttaatgcagaggccatgtccttgtctggtcctgcttctggctacagccaccctggaacggagaaggcagctgacggggattgccttcctcagccgcagcagcacctggggctccagctgctggaatcctaccatcccaggaggcaggcacagccagggagaggggaggagtgggcagtgaagatgaagccccatgctcagtcccctcccatcccccacgcagctccaccccagtcccaagccaccagctgtctgctcctggtgggaggtggcctcctcagcccctcctctctgacctttaacctcactctcaccttgcaccgtgcaccaacccttcacccctcctggaaagcaggcctgatggcttcccactggcctccaccacctgaccagagtgttctcttcagaggactggctcctttcccagtgtccttaaaataaagaaatgaaaatgcttgttggcacattca

SEQ ID NO: 4042 - protein, 60 aa, Homosapiens
MRMLWSATPRSTTPGGLRSEVCPEKCPSSVARASQCGSCVKLTASRWPWMVSTCLNTTIA

SEQ ID NO: 4043 - DNA, 890 bp, Homosapiens
aggttccacatcaacctgtgctctgggaaccacatcgccttccacctgaacccccgttttgatgagaatgctgtggtccgcaacacccagatcgacaactcctgggggtctgaggagcgaagtctgccccgaaaaatgcccttcgtccgtggccagagcttctcagtgtggatcttgtgtgaagctcactgcctcaaggtggccgtggatggtcagcacctgtttgaatactaccatcgcctgaggaacctgcccaccatcaacagactggaagtggggggcgacatccagctgacccatgtgcagacataggcggcttcctggccctggggccgggggctggggtgtggggcagtctgggtcctctcatcatccccacttcccaggcccagcctttccaaccctgcctgggatctgggctttaatgcagaggccatgtccttgtctggtcctgcttctggctacagccaccctggaacggagaaggcagctgacggggattgccttcctcagccgcagcagcacctggggctccagctgctggaatcctaccatcccaggaggcaggcacagccagggagaggggaggagtgggcagtgaagatgaagccccatgctcagtcccctcccatcccccacgcagctccaccccagtcccaagccaccagctgtctgctcctggtgggaggtggcctcctcagcccctcctctctgacctttaacctcactctcaccttgcaccgtgcaccaacccttcacccctcctggaaagcaggcctgatggcttcccactggcctccaccacctgaccagagtgttctcttcagaggactggctcctttcccagtgtccttaaaataaagaaatgaaaatgcttgttggcacattca

SEQ ID NO: 4044 - protein, 60 aa, Homosapiens; identical to SEQ ID NO: 4042

SEQ ID NO: 4045 - DNA, 503 bp, Homosapiens
cttcctggccctggggccgggggctggggtgtggggcagtctgggtcctctcatcatccccacttcccaggcccagcctttccaaccctgcctgggatctgggctttaatgcagaggccatgtccttgtctggtcctgcttctggctacagccaccctggaacggagaaggcagctgacggggattgccttcctcagccgcagcagcacctggggctccagctgctggaatcctaccattcccatcccccacgcagctccaccccagtcccaagccaccagctgtctgctcctggtgggaggtggcctcctcagcccctcctctctgacctttaacctcactctcaccttgcaccgtgcaccaacccttcacccctcctggaaagcaggcctgatggcttcccactggcctccaccacctgaccagagtgttctcttcagaggactggctcctttcccagtgtccttaaaataaagaaatgaaaatgcttgttggcacattca

SEQ ID NO: 4046 - protein, 121 aa, Homosapiens
MQRPCPCLVLLLATATLERRRQLTGIAFLSRSSTWGSSCWNPTIPIPHAAPPQSQATSCLLLVGGGLLSPSSLTFNLTLTLHRAPTLHPSWKAGLMASHWPPPPDQSVLFRGLAPFPVSLK

SEQ ID NO: 4047 - DNA, 411 bp, Homosapiens
agaaactgaagaaatccctcttcatgctgaaagagctcaccaacaaattcaggcagcctgtgaaacgtttgatgtccgaagccaacagcacattcagatccccaagctctacacctccaatgtgacctggggcttgcaccacttcaggctcgtgcaggactcacagcctttggacctcagctaagggacctgcttctctgtagcacatggggcttgtttgtgttggggtctgagccctgagctcatggtcaaggagaaccccaggtccttctgaacagagacagctggcctcggggcctccctctcactgcatgcaagagcctgttagggcacaagactcaaggcgctgagggaggctgtttcaggagggagccgcagaaggatggtggagagagaaggggacagcatccg

SEQ ID NO: 4048 - protein, 33 aa, Homosapiens
MLKELTNKFRQPVKRLMSEANSTFRSPSSTPPM

SEQ ID NO: 4049 - DNA, 4210 bp, Homosapiens
ataactttgtagcgagtcgaaaactgaggctccggccgcagagaactcagcctcattcctgctttaaaatctctcggccacctttgatgaggggactgggcagttctagacagtcccgaagttctcaaggcacaggtctcttcctggtttgactgtccttaccccggggaggcagtgcagccagctgcaagccccacagtgaagaacatctgagctcaaatccagataagtgacataagtgacctgctttgtaaagccatagagatggcctgtccttggaaatttctgttcaagaccaaattccaccagtatgcaatgaatggggaaaaagacatcaacaacaatgtggagaaagccccctgtgccacctccagtccagtgacacaggatgaccttcagtatcacaacctcagcaagcagcagaatgagtccccgcagcccctcgtggagacgggaaagaagtctccagaatctctggtcaagctggatgcaaccccattgtcctccccacggcatgtgaggatcaaaaactggggcagcgggatgactttccaagacacacttcaccataaggccaaagggattttaacttgcaggtccaaatcttgcctggggtccattatgactcccaaaagtttgaccagaggacccagggacaagcctacccctccagatgagcttctacctcaagctatcgaatttgtcaaccaatattacggctccttcaaagaggcaaaaatagaggaacatctggccagggtggaagcggtaacaaaggagatagaaacaacaggaacctaccaactgacgggagatgagctcatcttcgccaccaagcaggcctggcgcaatgccccacgctgcattgggaggatccagtggtccaacctgcaggtcttcgatgcccgcagctgttccactgcccgggaaatgtttgaacacatctgcagacacgtgcgttactccaccaacaatggcaacatcaggtcggccatcaccgtgttcccccagcggagtgatggcaagcacgacttccgggtgtggaatgctcagctcatccgctatgctggctaccagatgccagatggcagcatcagaggggaccctgccaacgtggaattcactcagctgtgcatcgacctgggctggaagcccaagtacggccgcttcgatgtggtccccctggtcctgcaggccaatggccgtgaccctgagctcttcgaaatcccacctgaccttgtgcttgaggtggccatggaacatcccaaatacgagtggtttcgggaactggagctaaagtggtacgccctgcctgcagtggccaacatgctgcttgaggtgggcggcctggagttcccagggtgccccttcaatggctggtacatgggcacagagatcggagtccgggacttctgtgacgtccagcgctacaacatcctggaggaagtgggcaggagaatgggcctggaaacgcacaagctggcctcgctctggaaagaccaggctgtcgttgagatcaacattgctgtgctccatagtttccagaagcagaatgtgaccatcatggaccaccactcggctgcagaatccttcatgaagtacatgcagaatgaataccggtcccgtgggggctgcccggcagactggatttggctggtccctcccatgtctgggagcatcacccccgtgtttcaccaggagatgctgaactacgtcctgtcccctttctactactatcaggtagaggcctggaaaacccatgtctggcaggacgagaagcggagacccaagagaagagagattccattgaaagtcttggtcaaagctgtgctctttgcctgtatgctgatgcgcaagacaatggcgtcccgagtcagagtcaccatcctctttgcgacagagacaggaaaatcagaggcgctggcctgggacctgggggccttattcagctgtgccttcaaccccaaggttgtctgcatggataagtacaggctgagctgcctggaggaggaacggctgctgttggtggtgaccagtacgtttggcaatggagactgccctggcaatggagagaaactgaagaaatcgctcttcatgctgaaagagctcaacaacaaattcaggtacgctgtgtttggcctcggctccagcatgtaccctcggttctgcgcctttgctcatgacattgatcagaagctgtcccacctgggggcctctcagctcaccccgatgggagaaggggatgagctcagtgggcaggaggacgccttccgcagctgggccgtgcaaaccttcaaggcagcctgtgagacgtttgatgtccgaggcaaacagcacattcagatccccaagctctacacctccaatgtgacctgggacccgcaccactacaggctcgtgcaggactcacagcctttggacctcagcaaagccctcagcagcatgcatgccaagaacgtgttcaccatgaggctcaaatctcggcagaatctacaaagtccgacatccagccgtgccaccatcctggtggaactctcctgtgaggatggccaaggcctgaactacctgccgggggagcaccttggggtttgcccaggcaaccagccggccctggtccaaggtatcctggagcgagtggtggatggccccacaccccaccagacagtgcgcctggaggccctggatgagagtggcagctactgggtcagtgacaagaggctgcccccctgctcactcagccaggccctcacctacttcctggacatcaccacacccccaacccagctgctgctccaaaagctggcccaggtggccacagaagagcctgagagacagaggctggaggccctgtgccagccctcagagtacagcaagtggaagttcaccaacagccccacattcctggaggtgctagaggagttcccgtccctgcgggtgtctgctggcttcctgctttcccagctccccattctgaagcccaggttctactccatcagctcctcccgggatcacacgcccacagagatccacctgactgtggccgtggtcacctaccacacccgagatggccagggtcccctgcaccacggcgtctgcagcacatggctcaacagcctgaagccccaagacccagtgccctgctttgtgcggaatgccagcggcttccacctccccgaggatccctcccatccttgcatcctcatcgggcctggcacaggcatcgcgcccttccgcagtttctggcagcaacggctccatgactcccagcacaagggagtgcggggaggccgcatgaccttggtgtttgggtgccgccgcccagatgaggaccacatctaccaggaggagatgctggagatggcccagaagggggtgctgcatgcggtgcacacagcctattcccgcctgcctggcaagcccaaggtctatgttcaggacatcctgcggcagcagctggccagcgaggtgctccgtgtgctccacaaggagccaggccacctctatgtttgcggggatgtgcgcatggcccgggacgtggcccacaccctgaagcagctggtggctgccaagctgaaattgaatgaggagcaggtcgaggactatttctttcagctcaagagccagaagcgctatcacgaagatatctttggtgctgtatttccttacgaggcgaagaaggacagggtggcggtgcagcccagcagcctggagatgtcagcgctctgagggcctacaggaggggttaaagctgccggcacagaacttaaggatggagccagctctgcattatctgaggtcacagggcctggggagatggaggaaagtgatatcccccagcctcaagtcttatttcctcaacgttgctccccatcaagccctttacttgacctcctaacaagtagcaccctggattgatcggagcctcctctctcaaactggggcctccctggtcccttggagacaaaatcttaaatgccaggcctggcaagtgggtgaaagatggaacttgctgctgagtgcaccacttcaagtgaccaccaggaggtgctatcgcaccactgtgtatttaactgccttgtgtacagttatttatgcctctgtatttaaaaaactaacacccagtctgttccccatggccacttgggtcttccctgtatgattccttgatggagatatttacatgaattgcattttactttaatcacactgt

SEQ ID NO: 4050 - protein, 1153 aa, Homosapiens; identical to SEQ ID NO: 603

SEQ ID NO: 4051 - DNA, 4131 bp, Homosapiens
ataactttgtagcgagtcgaaaactgaggctccggccgcagagaactcagcctcattcctgctttaaaatctctcggccacctttgatgaggggactgggcagttctagacagtcccgaagttctcaaggcacaggtctcttcctggtttgactgtccttaccccggggaggcagtgcagccagctgcaagccccacagtgaagaacatctgagctcaaatccagataagtgacataagtgacctgctttgtaaagccatagagatggcctgtccttggaaatttctgttcaagaccaaattccaccagtatgcaatgaatggggaaaaagacatcaacaacaatgtggagaaagccccctgtgccacctccagtccagtgacacaggatgaccttcagtatcacaacctcagcaagcagcagaatgagtccccgcagcccctcgtggagacgggaaagaagtctccagaatctctggtcaagctggatgcaaccccattgtcctccccacggcatgtgaggatcaaaaactggggcagcgggatgactttccaagacacacttcaccataaggccaaagggattttaacttgcaggtccaaatcttgcctggggtccattatgactcccaaaagtttgaccagaggacccagggacaagcctacccctccagatgagcttctacctcaagctatcgaatttgtcaaccaatattacggctccttcaaagaggcaaaaatagaggaacatctggccagggtggaagcggtaacaaaggagatagaaacaacaggaacctaccaactgacgggagatgagctcatcttcgccaccaagcaggcctggcgcaatgccccacgctgcattgggaggatccagtggtccaacctgcaggtcttcgatgcccgcagctgttccactgcccgggaaatgtttgaacacatctgcagacacgtgcgttactccaccaacaatggcaacatcaggtcggccatcaccgtgttcccccagcggagtgatggcaagcacgacttccgggtgtggaatgctcagctgtgcatcgacctgggctggaagcccaagtacggccgcttcgatgtggtccccctggtcctgcaggccaatggccgtgaccctgagctcttcgaaatcccacctgaccttgtgcttgaggtggccatggaacatcccaaatacgagtggtttcgggaactggagctaaagtggtacgccctgcctgcagtggccaacatgctgcttgaggtgggcggcctggagttcccagggtgccccttcaatggctggtacatgggcacagagatcggagtccgggacttctgtgacgtccagcgctacaacatcctggaggaagtgggcaggagaatgggcctggaaacgcacaagctggcctcgctctggaaagaccaggctgtcgttgagatcaacattgctgtgctccatagtttccagaagcagaatgtgaccatcatggaccaccactcggctgcagaatccttcatgaagtacatgcagaatgaataccggtcccgtgggggctgcccggcagactggatttggctggtccctcccatgtctgggagcatcacccccgtgtttcaccaggagatgctgaactacgtcctgtcccctttctactactatcaggtagaggcctggaaaacccatgtctggcaggacgagaagcggagacccaagagaagagagattccattgaaagtcttggtcaaagctgtgctctttgcctgtatgctgatgcgcaagacaatggcgtcccgagtcagagtcaccatcctctttgcgacagagacaggaaaatcagaggcgctggcctgggacctgggggccttattcagctgtgccttcaaccccaaggttgtctgcatggataagtacaggctgagctgcctggaggaggaacggctgctgttggtggtgaccagtacgtttggcaatggagactgccctggcaatggagagaaactgaagaaatcgctcttcatgctgaaagagctcaacaacaaattcaggtacgctgtgtttggcctcggctccagcatgtaccctcggttctgcgcctttgctcatgacattgatcagaagctgtcccacctgggggcctctcagctcaccccgatgggagaaggggatgagctcagtgggcaggaggacgccttccgcagctgggccgtgcaaaccttcaaggcagcctgtgagacgtttgatgtccgaggcaaacagcacattcagatccccaagctctacacctccaatgtgacctgggacccgcaccactacaggctcgtgcaggactcacagcctttggacctcagcaaagccctcagcagcatgcatgccaagaacgtgttcaccatgaggctcaaatctcggcagaatctacaaagtccgacatccagccgtgccaccatcctggtggaactctcctgtgaggatggccaaggcctgaactacctgccgggggagcaccttggggtttgcccaggcaaccagccggccctggtccaaggtatcctggagcgagtggtggatggccccacaccccaccagacagtgcgcctggaggccctggatgagagtggcagctactgggtcagtgacaagaggctgcccccctgctcactcagccaggccctcacctacttcctggacatcaccacacccccaacccagctgctgctccaaaagctggcccaggtggccacagaagagcctgagagacagaggctggaggccctgtgccagccctcagagtacagcaagtggaagttcaccaacagccccacattcctggaggtgctagaggagttcccgtccctgcgggtgtctgctggcttcctgctttcccagctccccattctgaagcccaggttctactccatcagctcctcccgggatcacacgcccacagagatccacctgactgtggccgtggtcacctaccacacccgagatggccagggtcccctgcaccacggcgtctgcagcacatggctcaacagcctgaagccccaagacccagtgccctgctttgtgcggaatgccagcggcttccacctccccgaggatccctcccatccttgcatcctcatcgggcctggcacaggcatcgcgcccttccgcagtttctggcagcaacggctccatgactcccagcacaagggagtgcggggaggccgcatgaccttggtgtttgggtgccgccgcccagatgaggaccacatctaccaggaggagatgctggagatggcccagaagggggtgctgcatgcggtgcacacagcctattcccgcctgcctggcaagcccaaggtctatgttcaggacatcctgcggcagcagctggccagcgaggtgctccgtgtgctccacaaggagccaggccacctctatgtttgcggggatgtgcgcatggcccgggacgtggcccacaccctgaagcagctggtggctgccaagctgaaattgaatgaggagcaggtcgaggactatttctttcagctcaagagccagaagcgctatcacgaagatatctttggtgctgtatttccttacgaggcgaagaaggacagggtggcggtgcagcccagcagcctggagatgtcagcgctctgagggcctacaggaggggttaaagctgccggcacagaacttaaggatggagccagctctgcattatctgaggtcacagggcctggggagatggaggaaagtgatatcccccagcctcaagtcttatttcctcaacgttgctccccatcaagccctttacttgacctcctaacaagtagcaccctggattgatcggagcctcctctctcaaactggggcctccctggtcccttggagacaaaatcttaaatgccaggcctggcaagtgggtgaaagatggaacttgctgctgagtgcaccacttcaagtgaccaccaggaggtgctatcgcaccactgtgtatttaactgccttgtgtacagttatttatgcctctgtatttaaaaaactaacacccagtctgttccccatggccacttgggtcttccctgtatgattccttgatggagatatttacatgaattgcattttactttaatcaca

SEQ ID NO: 4052 - protein, 1128 aa, Homosapiens
MACPWKFLFKTKFHQYAMNGEKDINNNVEKAPCATSSPVTQDDLQYHNLSKQQNESPQPLVETGKKSPESLVKLDATPLSSPRHVRIKNWGSGMTFQDTLHHKAKGILTCRSKSCLGSIMTPKSLTRGPRDKPTPPDELLPQAIEFVNQYYGSFKEAKIEEHLARVEAVTKEIETTGTYQLTGDELIFATKQAWRNAPRCIGRIQWSNLQVFDARSCSTAREMFEHICRHVRYSTNNGNIRSAITVFPQRSDGKHDFRVWNAQLCIDLGWKPKYGRFDVVPLVLQANGRDPELFEIPPDLVLEVAMEHPKYEWFRELELKWYALPAVANMLLEVGGLEFPGCPFNGWYMGTEIGVRDFCDVQRYNILEEVGRRMGLETHKLASLWKDQAVVEINIAVLHSFQKQNVTIMDHHSAAESFMKYMQNEYRSRGGCPADWIWLVPPMSGSITPVFHQEMLNYVLSPFYYYQVEAWKTHVWQDEKRRPKRREIPLKVLVKAVLFACMLMRKTMASRVRVTILFATETGKSEALAWDLGALFSCAFNPKVVCMDKYRLSCLEEERLLLVVTSTFGNGDCPGNGEKLKKSLFMLKELNNKFRYAVFGLGSSMYPRFCAFAHDIDQKLSHLGASQLTPMGEGDELSGQEDAFRSWAVQTFKAACETFDVRGKQHIQIPKLYTSNVTWDPHHYRLVQDSQPLDLSKALSSMHAKNVFTMRLKSRQNLQSPTSSRATILVELSCEDGQGLNYLPGEHLGVCPGNQPALVQGILERVVDGPTPHQTVRLEALDESGSYWVSDKRLPPCSLSQALTYFLDITTPPTQLLLQKLAQVATEEPERQRLEALCQPSEYSKWKFTNSPTFLEVLEEFPSLRVSAGFLLSQLPILKPRFYSISSSRDHTPTEIHLTVAVVTYHTRDGQGPLHHGVCSTWLNSLKPQDPVPCFVRNASGFHLPEDPSHPCILIGPGTGIAPFRSFWQQRLHDSQHKGVRGGRMTLVFGCRRPDEDHIYQEEMLEMAQKGVLHAVHTAYSRLPGKPKVYVQDILRQQLASEVLRVLHKEPGHLYVCGDVRMARDVAHTLKQLVAAKLKLNEEQVEDYFFQLKSQKRYHEDIFGAVFPYEAKKDRVAVQPSSLEMSAL

SEQ ID NO: 4053 - DNA, 2266 bp, Homosapiens
agacactgtgctgggtgctggcaggacgagagtggtgaactaaaccaagtccttcctgtggagctcactgtctatggactgattcttccttcgtgtcctcatcatctgctcagtccagggatgcagtagacgctagttgctacctgaggggacatctgctctgggactcagagaatgataaagagatctccagaataaatgaatcactttcagagaaaagtaaaagaacaaaaacacaaaaataaaaaacacacaaaagaagcaaaaaaatactacattctccccaaatttcacatcgtaagtggctggaagtgcaaacataaaggatgctagcaacatggccgcggcaagaggagcctctggagcaaggtcagcttctcccctgatttctggctttcagccaacaaggccaatggctcttccaaaccagctgctgctgctgagctccagaagaggggcctctcaacttccagaggccaggaaggctcaccctcggagctctcagttttgttttttatactgcaagacagagagattcgaagtggaggagggaagccaacaggggcaggaggactctggagaaatctcaggcctccatcatctggacctcacctgcctcctgcaggggcttcttggaggtggtgaaacccaagcaggaggcactgggcagccaaatctctagttcatgcctggactccctttcttctttagtgaaaaaggaagctgacagggctggggagggaggatagtgataactcactctggagagtgagttagaaggacagggaggtatggtcacactccaactctctaggtccttctaataccagcatctaagggccaagacgccagtctacattcctgactcactcccttcctccaccaaaacatactgaatgtttcctccataattctgccccagtgtgaataccccccagagacagggagtcccccgccaggacagcttccctctctgcggcatcacagtgccaccgccggctctggcactatagctttccctccttcttcctgctgccccctctcagctcgatcagcactgttgggcagaaatttgcctttaaggatgaagagtgagagcccctccccacttgcagaatataaatgcaaccagaagggatttgtcttcacctttcagcttctggaggagggaagcagctggctggtggcctcctccacagggaccattctcaactgtggggcaggagtggcctctagtggtcatggggatcacagccatcatcaccccagctcgcaggcagagcccaggggccaagcacctactttgttcatgatccagtcagcatcttcaatggctcttttaataatctgctggattctctcagggttgtcttcatctgaatgaacccgaaaactctgcaagtttaagcataaagaaagatgactaggcaaaattcccaggacaggcagcttcagagcaccaatcacaggccagggacactgctgggcactttatacccagcagctctcttcatcctccatagactgttatgattatcccacacagagatgaggaaacagaggctcacttgctgctgaacaatagcatttgaatcctagtctatgtgactgcaaagcatgtactcctgccaccaaggtaggtgcaaaaagactggcccccaagttactgccaaatcaagctaggcccaaaggctatcaggcagtagagtccaaggggaaacttccatctctcttcctcagaagacgctgctttccccagggtgagatctctgcataggctttacagcagggaggaagaagtaggacttctctcggcccagtgctaggagagctacacagggaagggaggggaggtagtagatagagtggcctcaggaaatccacccaggcccagtgcagagcatgggatactgtttgcttttgaccagatattcatccttgagaagcaacctaagattcaggttttgcttttcaaaaagaactggcaccaggcatggtggctcatgcctgtaatcacagcactttgggaggccgaggcgggcagatcacctcaggtcgggagctggagaccagcctgaccaacatgataaaccccatctctactaaaaatacaaagttagtcgggcgtggtggcacatgcctgtaatcccagctactcgggaggctaagggaggagaatcgcttgaacccaggaggcagaggttgtggtgagctgagattaagccattgcactccagcctgggcaacaagagtgaaactccatctc

SEQ ID NO: 4054 - protein, 114 aa, Homosapiens [sequence omitted]

SEQ ID NO: 4055 - DNA, 2038 bp, Homosapiens
agctgtcactcccccctcccatctactcccattctcccagccctaggcaaccaccaatgtacttctgtctctgtacttttgcctattctggatgtttcgtataaatggaatcatacattaagtagccccttgtgactgggtttgttcacttagcgtaatgttttctgggttcacctgccataggttcttgacttcaggacagtttcctgctggctttagtttcctctggtaacttgggaatcaattgacatctatggaacttctgttatggttcaggtactataaactgtggaggagtgactaataaccgtatatatatttttcttactaatttcccttcatttcacaggtgttgaactaatacagtatagtttcttgttcttcagaagcttacagtcagcaaggaacagaaagccaaataaagtaggaaagggctcaggcctgtaggcattctcccctctgtggcttggtgccctcgccagaccatggctgatgtcagagctggtttcctagtgattgcccctcagggtcttcctgcttttctaccctaccctgccggtgagggacacctactcatgcaccacttgaagttgagttccagaaagaagacgccagggatgaggctggacagagggtctcacggatggccccgctgccaggagcagaactggttcggaggccactgcagctctaccgatacttgctgcgctgttgccagcagctgccgaccaagggcatccagcagcattacaagcatgctgtcaggcagagttttcgggttcattcagatgaagacaaccctgagagaatccagcagattattaaaagagccattgaagatgctgactggatcatgaacaaatataaaaaacaaaactgagagctccgagggtgagccttcctggcctctggaagttgagaggcccctcttctggagctcagcagcagcagctggtttggaagagccattggccttgttggctgaaagccagaaatcaggggagaagctgaccttgctccagaggctcctcttgccgcggccatgttgctagcatcctttatgtttgcacttccagccacttacgatgtgaaatttggggagaatgtagtatttttttgcttcttttgtgtgttttttatttttgtgtttttgttcttttacttttctctgaaagtgattcatttattctggagatctctttatcattctctgagtcccagagcagatgtcccctcaggtagcaacctgtacagaagaaagcacgtgggttttagaaccagacagatctggatttgaatcccagatgcaataagatgaaggtgaagtgcctcacacaggatgtggcacatgacagtgcctgaagggctcccttcaaggaagccgtcctgccccgccccctcctctgctcctgcagcgccctgcacagctctgctccccgcatgcaccgcatcgggtctcagttttttgtttgcgagcttgccctgtccctgcttgtagcccctgagccctcacagttgtcacacacccagcagtctgccaaggagctgcttttcctgactactgtctctccatgcctagggaagtcaaagccctgggccttgccttcagggagttgacagtgtccttgaagtggtgaagtgcccaccacatgaaccaaggagagacgccaaagcagctgccatggactctggcctgtccaagcctctgtgcacctgcagtctctttccactggcacttccctgctttgctaccatcgtggaagaatggaagggagggggagaaggtgggtgggctcagggagaacggccagagtggccagaagatgcagagagaagccccactgggatctgagtattccccaagggcactcagccacagggatgaactagtgtttgtttgtatccttgcagttatgtgacttaaagtgactcagagatatctatgtatgcgagtgtactccgctggcaatgaagtaaatatatcaatttgtggaagctcgtgtgtcttctcaactgataaaccatacgttccctaagc

SEQ ID NO: 4056 - protein, 123 aa, Homosapiens
MADVRAGFLVIAPQGLPAFLPYPAGEGHLLMHHLKLSSRKKTPGMRLDRGSHGWPRCQEQNWFGGHCSSTDTCCAVASSCRPRASSSITSMLSGRVFGFIQMKTTLRESSRLLKEPLKMLTGS

SEQ ID NO: 4057 - DNA, 2239 bp, Homosapiens
gtcgccgcggcggcgtccggggctggcgttcccctggaggctgggacagagggtctcacggatggccccgctgccaggagcagaactggttcggaggccactgcagctctaccgatacttgctgcgctgttgccagcagctgccgaccaagggcatccagcagcattacaagcatgctgtcaggcagagttttcgggttcattcagatgaagacaaccctgagagaatccagcagattattaaaagagccattgaagatgctgactggatcatgaacaaagtaggtgcttggcccctgggctctgcctgcgagctggggtgatgatggctgtgatccccatgaccactagaggccactcctgccccacagttgagaatggtccctgtggaggaggccaccagccagctgcttccctcctccagaagctgaaaggtgaagacaaatcccttctggttgcatttatattctgcaagtggggaggggctctcactcttcatccttaaaggcaaatttctgcccaacagtgctgatcgagctgagagggggcagcaggaagaaggagggaaagctatagtgccagagccggcggtggcactgtgatgccgcagagagggaagctgtcctggcgggggactccctgtctctggggggtattcacactggggcagaattatggaggaaacattcagtatgttttggtggaggaagggagtgagtcaggaatgtagactggcgtcttggcccttagatgctggtattagaaggacctagagagttggagtgtgaccatacctccctgtccttctaactcactctccagagtgagttatcactatcctccctccccagccctgtcagcttcctttttcactaaagaagaaagggagtccaggcatgaactagagatttggctgcccagtgcctcctgcttgggtttcaccacctccaagaagcccctgcaggaggcaggtgaggtccagatgatggaggcctgagatttctccagagtcctcctgcccctgttggcttccctcctccacttcgaatctctctgtcttgcagtataaaaaacaaaactgagagctccgagggtgagccttcctggcctctggaagttgagaggcccctcttctggagctcagcagcagcagctggtttggaagagccattggccttgttggctgaaagccagaaatcaggggagaagctgaccttgctccagaggctcctcttgccgcggccatgttgctagcatcctttatgtttgcacttccagccacttacgatgtgaaatttggggagaatgtagtatttttttgcttcttttgtgtgttttttatttttgtgtttttgttcttttacttttctctgaaagtgattcatttattctggagatctctttatcattctctgagtcccagagcagatgtcccctcaggtagcaacctgtacagaagaaagcacgtgggttttagaaccagacagatctggatttgaatcccagatgcaataagatgaaggtgaagtgcctcacacaggatgtggcacatgacagtgcctgaagggctcccttcaaggaagccgtcctgccccgccccctcctctgctcctgcagcgccctgcacagctctgctccccgcatgcaccgcatcgggtctcagttttttgtttgcgagcttgccctgtccctgcttgtagcccctgagccctcacagttgtcacacacccagcagtctgccaaggagctgcttttcctgactactgtctctccatgcctagggaagtcaaagccctgggccttgccttcagggagttgacagtgtccttgaagtggtgaagtgcccaccacatgaaccaaggagagacgccaaagcagctgccatggactctggcctgtccaagcctctgtgcacctgcagtctctttccactggcacttccctgctttgctaccatcgtggaagaatggaagggagggggagaaggtgggtgggctcagggagaacggccagagtggccagaagatgcagagagaagccccactgggatctgagtattccccaagggcactcagccacagggatgaactagtgtttgtttgtatccttgcagttatgtgacttaaagtgactcagagatatctatgtatgcgagtgtactccgctggcaatgaagtaaatatatcaatttgtggaagctcgtgtgtcttctcaactgataaaccatacgttccctaagc

SEQ ID NO: 4058 - protein, 86 aa, Homosapiens
MAPLPGAELVRRPLQLYRYLLRCCQQLPTKGIQQHYKHAVRQSFRVHSDEDNPERIQQIIKRAIEDADWIMNKVGAWPLGSACELG

SEQ ID NO: 4059 - DNA, 1543 bp, Homosapiens
agtccccggggcgcaggcgcactcgtcgccgcggcggcgtccggggctggcgttcccctggaggctgggacagagggtctcacggatggccccgctgccaggagcagaactggttcggaggccactgcagctctaccgatacttgctgcgctgttgccagcagctgccgaccaagggcatccagcagcattacaagcatgctgtcaggcagagttttcgggttcattcagatgaagacaaccctgagagaatccagcagattattaaaagagccattgaagatgctgactggatcatgaacaaattgagaatggtccctgtggaggaggccaccagccagctgcttccctcctccagaagctgaaagtataaaaaacaaaactgagagctccgagggtgagccttcctggcctctggaagttgagaggcccctcttctggagctcagcagcagcagctggtttggaagagccattggccttgttggctgaaagccagaaatcaggggagaagctgaccttgctccagaggctcctcttgccgcggccatgttgctagcatcctttatgtttgcacttccagccacttacgatgtgaaatttggggagaatgtagtatttttttgcttcttttgtgtgttttttatttttgtgtttttgttcttttacttttctctgaaagtgattcatttattctggagatctctttatcattctctgagtcccagagcagatgtcccctcaggtagcaacctgtacagaagaaagcacgtgggttttagaaccagacagatctggatttgaatcccagatgcaataagatgaaggtgaagtgcctcacacaggatgtggcacatgacagtgcctgaagggctcccttcaaggaagccgtcctgccccgccccctcctctgctcctgcagcgccctgcacagctctgctccccgcatgcaccgcatcgggtctcagttttttgtttgcgagcttgccctgtccctgcttgtagcccctgagccctcacagttgtcacacacccagcagtctgccaaggagctgcttttcctgactactgtctctccatgcctagggaagtcaaagccctgggccttgccttcagggagttgacagtgtccttgaagtggtgaagtgcccaccacatgaaccaaggagagacgccaaagcagctgccatggactctggcctgtccaagcctctgtgcacctgcagtctctttccactggcacttccctgctttgctaccatcgtggaagaatggaagggagggggagaaggtgggtgggctcagggagaacggccagagtggccagaagatgcagagagaagccccactgggatctgagtattccccaagggcactcagccacagggatgaactagtgtttgtttgtatccttgcagttatgtgacttaaagtgactcagagatatctatgtatgcgagtgtactccgctggcaatgaagtaaatatatcaatttgtggaagctcgtgtgtcttctcaactgataaaccatacgttccctaagc

SEQ ID NO: 4060 - protein, 92 aa, Homosapiens
MAPLPGAELVRRPLQLYRYLLRCCQQLPTKGIQQHYKHAVRQSFRVHSDEDNPERIQQIIKRAIEDADWIMNKLRMVPVEEATSQLLPSSRS

SEQ ID NO: 4061 - DNA, 1620 bp, Homosapiens
atgtccatgcgcaccaagctgcagaacaagcagcttgtgattgaggacctatgcagggccaagttcaagttacttggctgccagaagatccgcatctcaaagaagtggtgctttaccaaattcaaggggcggtgccgctcagtccccggggcgcaggcgcactcgtcgccgcggcggcgtccggggctggcgttcccctggaggctgggacagagggtctcacggatggccccgctgccaggagcagaactggttcggaggccactgcagctctaccgatacttgctgcgctgttgccagcagctgccgaccaagggcatccagcagcattacaagcatgctgtcaggcagagttttcgggttcattcagatgaagacaaccctgagagaatccagcagattattaaaagagccattgaagatgctgactggatcatgaacaaatataaaaaacaaaactgagagctccgagggtgagccttcctggcctctggaagttgagaggcccctcttctggagctcagcagcagcagctggtttggaagagccattggccttgttggctgaaagccagaaatcaggggagaagctgaccttgctccagaggctcctcttgccgcggccatgttgctagcatcctttatgtttgcacttccagccacttacgatgtgaaatttggggagaatgtagtatttttttgcttcttttgtgtgttttttatttttgtgtttttgttcttttacttttctctgaaagtgattcatttattctggagatctctttatcattctctgagtcccagagcagatgtcccctcaggtagcaacctgtacagaagaaagcacgtgggttttagaaccagacagatctggatttgaatcccagatgcaataagatgaaggtgaagtgcctcacacaggatgtggcacatgacagtgcctgaagggctcccttcaaggaagccgtcctgccccgccccctcctctgctcctgcagcgccctgcacagctctgctccccgcatgcaccgcatcgggtctcagttttttgtttgcgagcttgccctgtccctgcttgtagcccctgagccctcacagttgtcacacacccagcagtctgccaaggagctgcttttcctgactactgtctctccatgcctagggaagtcaaagccctgggccttgccttcagggagttgacagtgtccttgaagtggtgaagtgcccaccacatgaaccaaggagagacgccaaagcagctgccatggactctggcctgtccaagcctctgtgcacctgcagtctctttccactggcacttccctgctttgctaccatcgtggaagaatggaagggagggggagaaggtgggtgggctcagggagaacggccagagtggccagaagatgcagagagaagccccactgggatctgagtattccccaagggcactcagccacagggatgaactagtgtttgtttgtatccttgcagttatgtgacttaaagtgactcagagatatctatgtatgcgagtgtactccgctggcaatgaagtaaatatatcaatttgtggaagctcgtgtgtcttctcaactgataaaccatacgttccctaagc

SEQ ID NO: 4062 - protein, 153 aa, Homosapiens
MSMRTKLQNKQLVIEDLCRAKFKLLGCQKIRISKKWCFTKFKGRCRSVPGAQAHSSPRRRPGLAFPWRLGQRVSRMAPLPGAELVRRPLQLYRYLLRCCQQLPTKGIQQHYKHAVRQSFRVHSDEDNPERIQQIIKRAIEDADWIMNKYKKQN

SEQ ID NO: 4063 - DNA, 794 bp, Homosapiens
ctctgaaagtgattcatttattctggagatctctttatcattctctgagtcccagagcagatgtcccctcaggtagcaacctgtacagaagaaagcacgtgggttttagaaccagacagatctggatttgaatcccagatgcaataagatgaaggtgaagtgcctcacacaggatgtggcacatgacagtgcctgaagggctcccttcaaggaagccgtcctgccccgccccctcctctgctcctgcagcgccctgcacagctctgctccccgcatgcaccgcatcgggtctcagttttttgtttgcgagcttgccctgtccctgcttgtagcccctgagccctcacagttgtcacacacccagcagtctgccaaggagctgcttttcctgactactgtctctccatgcatgaaccaaggagagacgccaaagcagctgccatggactctggcctgtccaagcctctgtgcacctgcagtctctttccactggcacttccctgctttgctaccatcgtggaagaatggaagggagggggagaaggtgggtgggctcagggagaacggccagagtggccagaagatgcagagagaagccccactgggatctgagtattccccaagggcactcagccacagggatgaactagtgtttgtttgtatccttgcagttatgtgacttaaagtgactcagagatatctatgtatgcgagtgtactccgctggcaatgaagtaaatatatcaatttgtggaagctcgtgtgtcttctcaactgataaaccatacgttccct

SEQ ID NO: 4064 - protein, 134 aa, Homosapiens
MHRIGSQFFVCELALSLLVAPEPSQLSHTQQSAKELLFLTTVSPCMNQGETPKQLPWTLACPSLCAPAVSFHWHFPALLPSWKNGREGEKVGGLRENGQSGQKMQREAPLGSEYSPRALSHRDELVFVCILAVM

SEQ ID NO: 4065 - DNA, 1996 bp, Homosapiens
agctgtcactcccccctcccatctactcccattctcccagccctaggcaaccaccaatgtacttctgtctctgtacttttgcctattctggatgtttcgtataaatggaatcatacattaagtagccccttgtgactgggtttgttcacttagcgtaatgttttctgggttcacctgccataggttcttgacttcaggacagtttcctgctggctttagtttcctctggtaacttgggaatcaattgacatctatggaacttctgttatggttcaggtactataaactgtggaggagtgactaataaccgtatatatatttttcttactaatttcccttcatttcacaggtgttgaactaatacagtatagtttcttgttcttcagaagcttacagtcagcaaggaacagaaagccaaataaagtaggaaagggctcaggcctgtaggcattctcccctctgtggcttggtgccctcgccagaccatggctgatgtcagagctggtttcctagtgattgcccctcagggtcttcctgcttttctaccctaccctgccggtgagggacacctactcatgcaccacttgaagttgagttccagaaagaagacgccagggatgaggctggacagagggtctcacggatggccccgctgccaggagcagaactggttcggaggccactgcagctctaccgatacttgctgcgctgttgccagcagctgccgaccaagggcatccagcagcattacaagcatgctgtcaggcagagttttcgggttcattcagatgaagacaaccctgagagaatccagcagattattaaaagagccattgaagatgctgactggatcatgaacaaatataaaaaacaaaactgagagctccgagggtgagccttcctggcctctggaagttgagaggcccctcttctggagctcagcagcagcagctggtttggaagagccattggccttgttggctgaaagccagaaatcaggggagaagctgaccttgctccagaggctcctcttgccgcggccatgttgctagcatcctttatgtttgcacttccagccacttacgatgtgaaatttggggagaatgtagtatttttttgcttcttttgtgtgttttttatttttgtgtttttgttcttttacttttctctgaaagtgattcatttattctggagatctctttatcattctctgagtcccagagcagatgtcccctcaggtagcaacctgtacagaagaaagcacgtgggttttagaaccagacagatctggatttgaatcccagatgcaataagatgaaggtgaagtgcctcacacaggatgtggcacatgacagtgcctgaagggctcccttcaaggaagccgtcctgccccgccccctcctctgctcctgcagcgccctgcacagctctgctccccgcatgcaccgcatcgggtctcagttttttgtttgcgagcttgccctgtccctgcttgtagcccctgagccctcacagttgtcacacacccagcagtctgccaaggagctgcttttcctgactactgtctctccatgcctagggaagtcaaagccctgggccttgccttcagggagttgacagtgtccttgaagtggtgaagtgcccaccacatgaaccaaggagagacgccaaagcagctgccatggactctggcctgtccaagcctctgtgcacctgcagtctctttccactggcacttccctgctttgctaccatcgtggaagaatggaagggagggggagaaggtgggtgggctcagggagaacggccagagtggccagaagatgcagagagaagccccactgggatctgagtattccccaagggcactcagccacagggatgaactagtgtttgtttgtatccttgcagttatgtgacttaaagtgactcagagatatctatgtatgcgagtgtactccgctggcaatgaagtaaatatatcaatttgtggaag

SEQ ID NO: 4066 - protein, 123 aa, Homosapiens; identical to SEQ ID NO: 4056

SEQ ID NO: 4067 - DNA, 2197 bp, Homosapiens
gtcgccgcggcggcgtccggggctggcgttcccctggaggctgggacagagggtctcacggatggccccgctgccaggagcagaactggttcggaggccactgcagctctaccgatacttgctgcgctgttgccagcagctgccgaccaagggcatccagcagcattacaagcatgctgtcaggcagagttttcgggttcattcagatgaagacaaccctgagagaatccagcagattattaaaagagccattgaagatgctgactggatcatgaacaaagtaggtgcttggcccctgggctctgcctgcgagctggggtgatgatggctgtgatccccatgaccactagaggccactcctgccccacagttgagaatggtccctgtggaggaggccaccagccagctgcttccctcctccagaagctgaaaggtgaagacaaatcccttctggttgcatttatattctgcaagtggggaggggctctcactcttcatccttaaaggcaaatttctgcccaacagtgctgatcgagctgagagggggcagcaggaagaaggagggaaagctatagtgccagagccggcggtggcactgtgatgccgcagagagggaagctgtcctggcgggggactccctgtctctggggggtattcacactggggcagaattatggaggaaacattcagtatgttttggtggaggaagggagtgagtcaggaatgtagactggcgtcttggcccttagatgctggtattagaaggacctagagagttggagtgtgaccatacctccctgtccttctaactcactctccagagtgagttatcactatcctccctccccagccctgtcagcttcctttttcactaaagaagaaagggagtccaggcatgaactagagatttggctgcccagtgcctcctgcttgggtttcaccacctccaagaagcccctgcaggaggcaggtgaggtccagatgatggaggcctgagatttctccagagtcctcctgcccctgttggcttccctcctccacttcgaatctctctgtcttgcagtataaaaaacaaaactgagagctccgagggtgagccttcctggcctctggaagttgagaggcccctcttctggagctcagcagcagcagctggtttggaagagccattggccttgttggctgaaagccagaaatcaggggagaagctgaccttgctccagaggctcctcttgccgcggccatgttgctagcatcctttatgtttgcacttccagccacttacgatgtgaaatttggggagaatgtagtatttttttgcttcttttgtgtgttttttatttttgtgtttttgttcttttacttttctctgaaagtgattcatttattctggagatctctttatcattctctgagtcccagagcagatgtcccctcaggtagcaacctgtacagaagaaagcacgtgggttttagaaccagacagatctggatttgaatcccagatgcaataagatgaaggtgaagtgcctcacacaggatgtggcacatgacagtgcctgaagggctcccttcaaggaagccgtcctgccccgccccctcctctgctcctgcagcgccctgcacagctctgctccccgcatgcaccgcatcgggtctcagttttttgtttgcgagcttgccctgtccctgcttgtagcccctgagccctcacagttgtcacacacccagcagtctgccaaggagctgcttttcctgactactgtctctccatgcctagggaagtcaaagccctgggccttgccttcagggagttgacagtgtccttgaagtggtgaagtgcccaccacatgaaccaaggagagacgccaaagcagctgccatggactctggcctgtccaagcctctgtgcacctgcagtctctttccactggcacttccctgctttgctaccatcgtggaagaatggaagggagggggagaaggtgggtgggctcagggagaacggccagagtggccagaagatgcagagagaagccccactgggatctgagtattccccaagggcactcagccacagggatgaactagtgtttgtttgtatccttgcagttatgtgacttaaagtgactcagagatatctatgtatgcgagtgtactccgctggcaatgaagtaaatatatcaatttgtggaag

SEQ ID NO: 4068 - protein, 86 aa, Homosapiens; identical to SEQ ID NO: 4058

SEQ ID NO: 4069 - DNA, 1420 bp, Homosapiens
gcactcgtcgccgcggcggcgtccggggctggcgttcccctggaggctgggacagagggtctcacggatggccccgctgccaggagcagaactggttcggaggccactgcagctctaccgatacttgctgcgctgttgccagcagctgccgaccaagggcatccagcagcattacaagcatgctgtcaggcagagttttcgggttcattcagatgaagacaaccctgagagaatccagcagattattaaaagagccattgaagatgctgactggatcatgaacaaatataaaaaacaaaactgagagctccgagggtgagccttcctggcctctggaagttgagaggcccctcttctggagctcagcagcagcagctggtttggaagagccattggccttgttggctgaaagccagaaatcaggggagaagctgaccttgctccagaggctcctcttgccgcggccatgttgctagcatcctttatgtttgcacttccagccacttacgatgtgaaatttggggagaatgtagtatttttttgcttcttttgtgtgttttttatttttgtgtttttgttcttttacttttctctgaaagtgattcatttattctggagatctctttatcattctctgagtcccagagcagatgtcccctcaggtagcaacctgtacagaagaaagcacgtgggttttagaaccagacagatctggatttgaatcccagatgcaataagatgaaggtgaagtgcctcacacaggatgtggcacatgacagtgcctgaagggctcccttcaaggaagccgtcctgccccgccccctcctctgctcctgcagcgccctgcacagctctgctccccgcatgcaccgcatcgggtctcagttttttgtttgcgagcttgccctgtccctgcttgtagcccctgagccctcacagttgtcacacacccagcagtctgccaaggagctgcttttcctgactactgtctctccatgcctagggaagtcaaagccctgggccttgccttcagggagttgacagtgtccttgaagtggtgaagtgcccaccacatgaaccaaggagagacgccaaagcagctgccatggactctggcctgtccaagcctctgtgcacctgcagtctctttccactggcacttccctgctttgctaccatcgtggaagaatggaagggagggggagaaggtgggtgggctcagggagaacggccagagtggccagaagatgcagagagaagccccactgggatctgagtattccccaagggcactcagccacagggatgaactagtgtttgtttgtatccttgcagttatgtgacttaaagtgactcagagatatctatgtatgcgagtgtactccgctggcaatgaagtaaatatatcaatttgtggaag

SEQ ID NO: 4070 - protein, 78 aa, Homosapiens; identical to SEQ ID NO: 607

SEQ ID NO: 4071 - DNA, 1501 bp, Homosapiens
agtccccggggcgcaggcgcactcgtcgccgcggcggcgtccggggctggcgttcccctggaggctgggacagagggtctcacggatggccccgctgccaggagcagaactggttcggaggccactgcagctctaccgatacttgctgcgctgttgccagcagctgccgaccaagggcatccagcagcattacaagcatgctgtcaggcagagttttcgggttcattcagatgaagacaaccctgagagaatccagcagattattaaaagagccattgaagatgctgactggatcatgaacaaattgagaatggtccctgtggaggaggccaccagccagctgcttccctcctccagaagctgaaagtataaaaaacaaaactgagagctccgagggtgagccttcctggcctctggaagttgagaggcccctcttctggagctcagcagcagcagctggtttggaagagccattggccttgttggctgaaagccagaaatcaggggagaagctgaccttgctccagaggctcctcttgccgcggccatgttgctagcatcctttatgtttgcacttccagccacttacgatgtgaaatttggggagaatgtagtatttttttgcttcttttgtgtgttttttatttttgtgtttttgttcttttacttttctctgaaagtgattcatttattctggagatctctttatcattctctgagtcccagagcagatgtcccctcaggtagcaacctgtacagaagaaagcacgtgggttttagaaccagacagatctggatttgaatcccagatgcaataagatgaaggtgaagtgcctcacacaggatgtggcacatgacagtgcctgaagggctcccttcaaggaagccgtcctgccccgccccctcctctgctcctgcagcgccctgcacagctctgctccccgcatgcaccgcatcgggtctcagttttttgtttgcgagcttgccctgtccctgcttgtagcccctgagccctcacagttgtcacacacccagcagtctgccaaggagctgcttttcctgactactgtctctccatgcctagggaagtcaaagccctgggccttgccttcagggagttgacagtgtccttgaagtggtgaagtgcccaccacatgaaccaaggagagacgccaaagcagctgccatggactctggcctgtccaagcctctgtgcacctgcagtctctttccactggcacttccctgctttgctaccatcgtggaagaatggaagggagggggagaaggtgggtgggctcagggagaacggccagagtggccagaagatgcagagagaagccccactgggatctgagtattccccaagggcactcagccacagggatgaactagtgtttgtttgtatccttgcagttatgtgacttaaagtgactcagagatatctatgtatgcgagtgtactccgctggcaatgaagtaaatatatcaatttgtggaag

SEQ ID NO: 4072 - protein, 92 aa, Homosapiens; identical to SEQ ID NO: 4060

SEQ ID NO: 4073 - DNA, 736 bp, Homosapiens
atttttttgcttcttttgtgtgttttttatttttgtgtttttgttcttttacttttctctgaaagtgattcatttattctggagatctctttatcattctctgagtcccagagcagatgtcccctcaggtagcaacctgtacagaagaaagcacgtgggttttagaaccagacagatctggatttgaatcccagatgcaataagatgaaggtgaagtgcctcacacaggatgtggcacatgacagtgcctgaagggctcccttcaaggaagccgtcctgccccgccccctcctctgctcctgcagcgccctgcacagctctgctccccgcatgcaccgcatcgggtctcagttttttgtttgcgagcttgccctgtccctgcttgtagcccctgagccctcacagttgtcacacacccagcagtctgccaaggagctgcttttcctgactactgtctctccatgcctagggaagtcaaagccctgggccttgccttcagggagttgacagtgtccttgaagtggtgaagtgcccaccacatgaaccaaggagagactggccagaagatgcagagagaagccccactgggatctgagtattccccaagggcactcagccacagggatgaactagtgtttgtttgtatccttgcagttatgtgacttaaagtgactcagagatatctatgtatgcgagtgtactccgctggcaatgaagtaaatatatcaatttgtgg

SEQ ID NO: 4074 - protein, 40 aa, Homosapiens
MNQGETGQKMQREAPLGSEYSPRALSHRDELVFVCILAVM

SEQ ID NO: 4075 - DNA, 1343 bp, Homosapiens
tgcaagcgtatgcacactgaggaaaggctacttgaggacaaaagagaaagcggcccatctaccagctgggaagagaaccctcaccacaaaccaaattggctgaaaccttgatcttggacttctggtctccagaattttccagtggctagaattccaagatcaaggtgtcagcagcatggttctttctgagagctgtgaagaagaatccgttccatgcctctcccccagtttctggtggtgtgctggcagtctttggcattctttggcctgcagacgcatcaccctaatctcagcccagctccggaacgcctttcccatgtttggtgtgttttctacctaatgagttttgatggaagtgaaggctgttatttacctctggaagctaaaaataccagctccctggtcatctcagagttggtttccgatgcaactaaaaacatcaactgatatgaggtccaaaagatggaattttaagcaccaaagacgctcccttatgggcaaagtctcaataggacatctgcatgttcagttgagattctgctttcccctcagatgacagaattattggcaaccagttaaattgacgcaattggaaacccagaaacatgatcaacaaagataaggagatggagataccagtcacccctatcaaagtggcaagtgggagggggatgctggttggtctgtcggagctgacgaaggaatgggattggaatgtttcttttaccaattatgtaaacacagcctggagttccgagatgagtccatctcacttgctcagaactttgcctggtgagagcggttacaagcgaacaaggtggaaatgaaagaaaccctgactttcccactaggaaggaagagactgttccttcttgtgatgtactctgaagaaaaattctaggatttggacagatttcttgggttataaaacatgattttcttctctgtttcttgggcttttataatgggtactgttgttttcttgcaaagctttaatgattccataaggacttgtataaagtttatgggagaattttcaatgtagatgtgaatggcagaaacccaagaatctgtgtgaggttgaataagatcctgtgtctccagagaggtctgatggggagacacagatctaaattttaaaggtggtttgggccttctcaatcatatattaaggtccttttatgttatagataagtaaattaaggcccagaaagattaatagcccaaggtcccaagacctgcttgagacctgtgccccatttctgactaatattcttcatgatattgtatcactctgtatcaaaaccaaccaaccaataaaaccaaccaaccaaccaaccaac

SEQ ID NO: 4076 - protein, 77 aa, Homosapiens
MPLPQFLVVCWQSLAFFGLQTHHPNLSPAPERLSHVWCVFYLMSFDGSEGCYLPLEAKNTSSLVISELVSDATKNIN

SEQ ID NO: 4077 - DNA, 1297 bp, Homosapiens
gtgtccgacgctggctccgctctatccggctttgctaggggagctgcggcagccgcagcagcggctgcagctgcagccatgttaaaccctgggcaacaacagccatatttcccatcaccggcaccggggcaggctcctggaccagctgcagcagccccagctcaggtacaggctgccgcagctgctacagttaaggcgcaccatcatcagcactcgcatcatccacagcagcagctggatattgagccggatagacctattggatatggagcctttggtgttgtctggttgagaatctgtagtactgagaagtttctccactatcagccgagattaacagccacagctggattctttgggggctctgctttgtgaaaagagctttgaagaagcagagcctgcaccataaaaaggaaacggttgctcttctagacataacaaagcatccgtatgaaactagaaatgtggaaatctgtattgttaattttaactacaaacgaacttacttttggaaattacaggttcatgatcataaagtagataaagagtagagaataaaagtaacaatctgatgattctgcacccacttcttggtggttgaaactccatagcctataacgttgcaagtcattttgtacttagactcctgaaaagattatccaaattatgttcaaaaaaccacagcacaaaaaataaacttgttttattcttggggagaaatttcatgttatactgtccaatattaatttagaaaaaaagacagtttttttttttaaggcatttcagaaacattgccctttcaagcaagttagaacaatatccctcaacattaaataccatctttttagccatcagtaccactgggcatgtgtcataaaagagaaatgggggcagatatagctccctttcatatgctataccagaacaaaaatttgtaaaatgcataagtgcattaactgaatatgtttgaatttaaattctgggtttttaccttcaaagcacaggcagctgtagatacaaaaagtcctctaatggagtactggaatgtttcattgtcttcacaacttggagtgtcagagttttctctgccttctatattgtaaaactgagtgactattcttggtcgtttttattagatttattgatgtccaagcaatacaagaattaactgttcatatactgtatgtttccttaacatgcttatttggtttctttgatggagattgtcaaggccaaagaaactttttcatttgtcatccaaccaataaatggacagaagctgttagaagctctttaa

SEQ ID NO: 4078 - protein, 98 aa, Homosapiens
MLNPGQQQPYFPSPAPGQAPGPAAAAPAQVQAAAAATVKAHHHQHSHHPQQQLDIEPDRPIGYGAFGVVWLRICSTEKFLHYQPRLTATAGFFGGSAL

SEQ ID NO: 4079 - DNA, 2784 bp, Homosapiens
aaccctcctcagcagaagcagccggcggcgggggcaggagtcagcccgcttccgaccgtaccccgcccgcctcccggggctcctgttctttggccccgggaccctaaccttctcccggggcggttccctccgtctgggcgtccgagcgctgcccacatctttcattcctccctgcacctccttcccttcacttttgccccggctctctttctcctctctgtcctgctgtcgcctcctctcctcactccagcctccttccctggcttattctgcccaggaaagtttggaacccccgccccccctccccaatcaggtcaacctgactaggagtagggggagatgtaggaaggcctgagagttcggggggggggaagctggaagctggtttcccagaaaatttccccccatcttctccatttagggtggtgggaattttttttaatcctgtttttgaggaggtggtaggtgtttagaaaaggatgtgggaatggaaggggtagatgagtcaaccctctttcaagattccaagggtggtgtgttacctgatccttttcgtgtgtggagttcagggggtcgggaggtttggcctttattcccacattcaaagttggaacctcccccaaattaagaatggagttttagtacccacttgtggcaggaatcctggggggaaggggtccttttttcctttttcttttcttttttcccttttttttccttttggcaacccacacccttccacacacgctcaccccaaaattaaacaccaagatcctctaacttgtttggattgactgatgaagacataaagctctatgttttttgaggtggagtgagtggtttttcttcatttttaaatggccaaatgacagcttgacccagtttgctttccaatcaaagggcatttattttgaatgtctctttgtggcgcaagagccaacgcaaaaatgatggcggcttacaatggcggtacatctgcagcagcagcaggtcaccaccaccaccatcaccaccaccttccacacctccctcctcctcacctgcaccaccaccaccaccctcaacaccatcttcatccggggtcggctgccgctgtacaccctgtacagcagcacacctcttcggcagctgcggcagccgcagcagcggctgcagctgcagccatgttaaaccctgggcaacaacagccatatttcccatcaccggcaccggggcaggctcctggaccagctgcagcagccccagctcaggtacaggctgccgcagctgctacagttaaggcgcaccatcatcagcactcgcatcatccacagcagcagctggatattgagccggatagacctattggatatggagcctttggtgttgtctggtcagtaacagatccaagagatggaaagagagtagcgctcaaaaagatgcccaacgtcttccagaatctggtctcttgcaaaagggtcttccgggaattgaagatgttgtgtttttttaagcatgataatgtactctctgcccttgacatactccaacctccacacattgactattttgaagaaatatatgttgtcacagaattgatgcagagtgacctacataaaattatcgtctctcctcaaccactcagctcagatcatgtcaaagtttttctttatcagattttgcgaggtttgaaatatctccattcagctggcattttacatcgagacattaagccagggaatctccttgtgaacagcaactgtgttctaaagatttgtgattttggattggccagagtggaagaattagatgaatcccgtcatatgactcaggaagttgttactcagtattatcgggctccagaaatcctgatgggcagccgtcattacagcaatgctattgacatctggtctgtgggatgtatctttgcagaactactaggacgaagaatattgtttcaggcacagagtcccattcagcagttggatttgatcacggatctgttgggcacaccatcactggaagcaatgaggacagcttgtgaaggcgctaaggcacatatactcaggggtcctcataaacagccatctcttcctgtactctataccctgtctagccaggctacacatgaagctgttcatctcctttgcaggatgttggtctttgatccatccaaaagaatatccgctaaggatgccttagcccacccctacctagatgaagggcgactacgatatcacacatgtatgtgtaaatgttgcttttccacctccactggaagagtttataccagtgactttgagcctgtcaccaatcccaaatttgatgacactttcgagaagaacctcagttctgtccgacaggttaaagaaattattcatcagttcattttggaacagcagaaaggaaacagagtgcctctctgcatcaaccctcagtctgctgcttttaagagctttattagttccactgttgctcagccatctgagatgcccccatctcctctggtgtgggagtgatggtggaagataatgtactactgaagatgtaatgtagctttccactggagtctgggatttgcaattctggaggttaatcatgcttgtactgtaattttactaatgaagttttaaattaacaaccactacttgtatgatatgaataatatttagaaatgttactagacttttaatcttgtaaagtggttgtgcttttagaagaaaaatattttacccagagttgcacatgttttatgaatttagtgcagctgttatggctcacctcagaacaaaagagaattgaacc

SEQ ID NO: 4080 - protein, 527 aa, Homosapiens
MSLCGARANAKMMAAYNGGTSAAAAGHHHHHHHHLPHLPPPHLHHHHHPQHHLHPGSAAAVHPVQQHTSSAAAAAAAAAAAAAMLNPGQQQPYFPSPAPGQAPGPAAAAPAQVQAAAAATVKAHHHQHSHHPQQQLDIEPDRPIGYGAFGVVWSVTDPRDGKRVALKKMPNVFQNLVSCKRVFRELKMLCFFKHDNVLSALDILQPPHIDYFEEIYVVTELMQSDLHKIIVSPQPLSSDHVKVFLYQILRGLKYLHSAGILHRDIKPGNLLVNSNCVLKICDFGLARVEELDESRHMTQEVVTQYYRAPEILMGSRHYSNAIDIWSVGCIFAELLGRRILFQAQSPIQQLDLITDLLGTPSLEAMRTACEGAKAHILRGPHKQPSLPVLYTLSSQATHEAVHLLCRMLVFDPSKRISAKDALAHPYLDEGRLRYHTCMCKCCFSTSTGRVYTSDFEPVTNPKFDDTFEKNLSSVRQVKEIIHQFILEQQKGNRVPLCINPQSAAFKSFISSTVAQPSEMPPSPLVWE

SEQ ID NO: 4081 - DNA, 4245 bp, Homosapiens
aaccctcctcagcagaagcagccggcggcgggggcaggagtcagcccgcttccgaccgtaccccgcccgcctcccggggctcctgttctttggccccgggaccctaaccttctcccggggcggttccctccgtctgggcgtccgagcgctgcccacatctttcattcctccctgcacctccttcccttcacttttgccccggctctctttctcctctctgtcctgctgtcgcctcctctcctcactccagcctccttccctggcttattctgcccaggaaagtttggaacccccgccccccctccccaatcaggtcaacctgactaggagtagggggagatgtaggaaggcctgagagttcggggggggggaagctggaagctggtttcccagaaaatttccccccatcttctccatttagggtggtgggaattttttttaatcctgtttttgaggaggtggtaggtgtttagaaaaggatgtgggaatggaaggggtagatgagtcaaccctctttcaagattccaagggtggtgtgttacctgatccttttcgtgtgtggagttcagggggtcgggaggtttggcctttattcccacattcaaagttggaacctcccccaaattaagaatggagttttagtacccacttgtggcaggaatcctggggggaaggggtccttttttcctttttcttttcttttttcccttttttttccttttggcaacccacacccttccacacacgctcaccccaaaattaaacaccaagatcctctaacttgtttggattgactgatgaagacataaagctctatgttttttgaggtggagtgagtggtttttcttcatttttaaatggccaaatgacagcttgacccagtttgctttccaatcaaagggcatttattttgaatgtctctttgtggcgcaagagccaacgcaaaaatgatggcggcttacaatggcggtacatctgcagcagcagcaggtcaccaccaccaccatcaccaccaccttccacacctccctcctcctcacctgcaccaccaccaccaccctcaacaccatcttcatccggggtcggctgccgctgtacaccctgtacagcagcacacctcttcggcagctgcggcagccgcagcagcggctgcagctgcagccatgttaaaccctgggcaacaacagccatatttcccatcaccggcaccggggcaggctcctggaccagctgcagcagccccagctcaggtacaggctgccgcagctgctacagttaaggcgcaccatcatcagcactcgcatcatccacagcagcagctggatattgagccggatagacctattggatatggagcctttggtgttgtctggtcagtaacagatccaagagatggaaagagagtagcgctcaaaaagatgcccaacgtcttccagaatctggtctcttgcaaaagggtcttccgggaattgaagatgttgtgtttttttaagcatgataatgtactctctgcccttgacatactccaacctccacacattgactattttgaagaaatatatgttgtcacagaattgatgcagagtgacctacataaaattatcgtctctcctcaaccactcagctcagatcatgtcaaagtttttctttatcagattttgcgaggtttgaaatatctccattcagctggcattttacatcgagacattaagccagggaatctccttgtgaacagcaactgtgttctaaagatttgtgattttggattggccagagtggaagaattagatgaatcccgtcatatgactcaggaagttgttactcagtattatcgggctccagaaatcctgatgggcagccgtcattacagcaatgctattgacatctggtctgtgggatgtatctttgcagaactactaggacgaagaatattgtttcaggcacagagtcccattcagcagttggatttgatcacggatctgttgggcacaccatcactggaagcaatgaggacagcttgtgaaggcgctaaggcacatatactcaggggtcctcataaacagccatctcttcctgtactctataccctgtctagccaggctacacatgaagctgttcatctcctttgcaggatgttggtctttgatccatccaaaagaatatccgctaaggatgccttagcccacccctacctagatgaagggcgactacgatatcacacatgtatgtgtaaatgttgcttttccacctccactggaagagtttataccagtgactttgagcctgtcaccaatcccaaatttgatgacactttcgagaagaacctcagttctgtccgacaggttaaagaaattattcatcagttcattttggaacagcagaaaggaaacagagtgcctctctgcatcaaccctcagtctgctgcttttaagagctttattagttccactgttgctcagccatctgagatgcccccatctcctctggtgtgggagtgatggtggaagataatgtactactgaagatgtaatgtagctttccactggagtctgggatttgcaattctggaggttaatcatgcttgtactgtaattttactaatgaagttttaaattaacaaccactacttgtatgatatgaataatatttagaaatgttactagacttttaatcttgtaaagtggttgtgcttttagaagaaaaatattttacccagagttgcacatgttttatgaatttagtgcagctgttatggctcacctcagaacaaaagagaattgaaccaaatttgggagtttggggttttatgttttgtttttcttttctaaaatgaagtgagattgttcacacacacacacacacacacacacacacacaaacacaaaggacagtcatacattttgatatttgagccattcctaaagatttggggttttctaaaactaaagaatctaggaaccttgcctgcgaccaatcatggagccacgtgagctgatcgtggctgcacctggggggagggtagggaggaggggcatgccacctaatgatcaagccctataattagcttctcattagagccgtgatggtgatgtgtgctgtctaaaatccaatgttgtgggtagagagaatgagtttgtgactaggagagactaaacttttgttttccttacccagtataaatatatatatatatatttaatctatttttattagaagtttttctgctctttcttacataaaagaaccccaagcatgcatctttcatgtgtgtaaataattcatttctgggctaatttcaaaagaatcccaatattgctgtatagaaagagaactagcttgcacattttaggtctgtgaaattttgtgagacttttcctgcactggacagtaaaaaaataataaaagacaaaaacaaatttaaaaaaaaatttaagccacaaaaaaaggcacatagggaattatgtcaaatgtgtttgtgtccttaggcaaagctgtgggagtcttgaaatgtcacagtagtaaataacttattactttttgacaagttctttttttctgttggaacactgaattcttctgtgcatatgtacatatgaatacaaatcgaaggcctctacctcctggagttatacaacttggcttgtttacctccacatgctgatgatgactattttttttttttgagttcagtgtggagacttgaaacttgaatgtcccttccaacttttatattaaaaataaaaagacaagaaaattgaagatcatttttcacctgtacaaggaatactaatggatcgtcttaaaattggtctaggaaaaaaccttggtgtgtgttatggacaattaactgttaaagttattgtaagttatctgtatttagcagagtattttcaacttgagtgatctgagctgaatttgaagactattaataagttatgtttggaagttttaacttcaatgaagtaattatttgctgtgaaagaaacaaacattgaattactaaacaaagatggtgcaatatctttgttttttttttatgaggctcctgagaatcaacccaactgaagcatttcaattcacttgaatgagaaacgtgtttagtatcaaaagagcccaagaagacactggtgtgaaaggtacaatctcagaggttggtcaattaccgtggcacactttctggtcactttgtacaatgtagatttgaagtacagtggtgaaaacattaaatgtgacatttgaaaaaga

SEQ ID NO: 4082 - protein, 527 aa, Homosapiens; identical to SEQ ID NO: 4080

SEQ ID NO: 4083 - DNA, 1458 bp, Homosapiens
cggctctctttctcctctctgtcctgctgtcgcctcctctcctcactccagcctccttccctggcttattctgcccaggaaagtttggaacccccgccccccctccccaatcaggtcaacctgactaggagtagggggagatgtaggaaggcctgagagttcggggggggggaagctggaagctggtttcccagaaaatttccccccatcttctccatttagggtggtgggaattttttttaatcctgtttttgaggaggtggtaggtgtttagaaaaggatgtgggaatggaaggggtagatgagtcaaccctctttcaagattccaagggtggtgtgttacctgatccttttcgtgtgtggagttcagggggtcgggaggtttggcctttattcccacattcaaagttggaacctcccccaaattaagaatggagttttagtacccacttgtggcaggaatcctggggggaaggggtccttttttcctttttcttttcttttttcccttttttttccttttggcaacccacacccttccacacacgctcaccccaaaattaaacaccaagatcctctaacttgtttggattgactgatgaagacataaagctctatgttttttgaggtggagtgagtggtttttcttcatttttaaatggccaaatgacagcttgacccagtttgctttccaatcaaagggcatttattttgaatgtctctttgtggcgcaagagccaacgcaaaaatgatggcggcttacaatggcggtacatctgcagcagcagcaggtcaccaccaccaccatcaccaccaccttccacacctccctcctcctcacctgcaccaccaccaccaccctcaacaccatcttcatccggggtcggctgccgctgtacaccctgtacagcagcacacctcttcggcagctgcggcagccgcagcagcggctgcagctgcagccatgttaaaccctgggcaacaacagccatatttcccatcaccggcaccggggcaggctcctggaccagctgcagcagccccagctcaggtacaggctgccgcagctgctacagttaaggcgcaccatcatcagcactcgcatcatccacagcagcagctggatattgagccggatagacctattggatatggagcctttggtgttgtctggttgagaatctgtagtactgagaagtttctccactatcagccgagattaacagccacagctggattctttgggggctctgctttgtgaaaagagctttgaagaagcagagcctgcaccataaaaaggaaacggttgctcttctagacataacaaagcatccgtatgaaactagaaatgtggaaatctgtattgttaattttaactacaaacgaacttacttttggaaattacaggttcatgatcataaagtagataaagagtagagaataaaagtaacaatctga

SEQ ID NO: 4084 - protein, 181 aa, Homosapiens
MSLCGARANAKMMAAYNGGTSAAAAGHHHHHHHHLPHLPPPHLHHHHHPQHHLHPGSAAAVHPVQQHTSSAAAAAAAAAAAAAMLNPGQQQPYFPSPAPGQAPGPAAAAPAQVQAAAAATVKAHHHQHSHHPQQQLDIEPDRPIGYGAFGVVWLRICSTEKFLHYQPRLTATAGFFGGSAL

SEQ ID NO: 4085 - DNA, 2195 bp, Homosapiens
ggtttggcctttattcccacattcaaagttggaacctcccccaaattaagaatggagttttagtacccacttgtggcaggaatcctggggggaaggggtccttttttcctttttcttttcttttttcccttttttttccttttggcaacccacacccttccacacacgctcaccccaaaattaaacaccaagatcctctaacttgtttggattgactgatgaagacataaagctctatgttttttgaggtggagtgagtggtttttcttcatttttaaatggccaaatgacagcttgacccagtttgctttccaatcaaagggcatttattttgaatgtctctttgtggcgcaagagccaacgcaaaaatgatggcggcttacaatggcggtacatctgcagcagcagcaggtcaccaccaccaccatcaccaccaccttccacacctccctcctcctcacctgcaccaccaccaccaccctcaacaccatcttcatccggggtcggctgccgctgtacaccctgtacagcagcacacctcttcggcagctgcggcagccgcagcagcggctgcagctgcagccatgttaaaccctgggcaacaacagccatatttcccatcaccggcaccggggcaggctcctggaccagctgcagcagccccagctcaggtacaggctgccgcagctgctacagttaaggcgcaccatcatcagcactcgcatcatccacagcagcagctggatattgagccggatagacctattggatatggagcctttggtgttgtctggtcagtaacagatccaagagatggaaagagagtagcgctcaaaaagatgcccaacgtcttccagaatctggtctcttgcaaaagggtcttccgggaattgaagatgttgtgtttttttaagcatgataatgtactctctgcccttgacatactccaacctccacacattgactattttgaagaaatatatgttgtcacagaattgatgcagagtgacctacataaaattatcgtctctcctcaaccactcagctcagatcatgtcaaagtttttctttatcagattttgcgaggtttgaaatatctccattcagctggcattttacatcgagacattaagccagggaatctccttgtgaacagcaactgtgttctaaagatttgtgattttggattggccagagtggaagaattagatgaatcccgtcatatgactcaggaagttgttactcagtattatcgggctccagaaatcctgatgggcagccgtcattacagcaatgctattgacatctggtctgtgggatgtatctttgcagaactactaggacgaagaatattgtttcaggcacagagtcccattcagcagttggatttgatcacggatctgttgggcacaccatcactggaagcaatgaggacagcttgtgaaggcgctaaggcacatatactcaggggtcctcataaacagccatctcttcctgtactctataccctgtctagccaggctacacatgaagctgttcatctcctttgcaggatgttggtctttgatccatccaaaagaatatccgctaaggatgccttagcccacccctacctagatgaagggcgactacgatatcacacatgtatgtgtaaatgttgcttttccacctccactggaagagtttataccagtgactttgagcctgtcaccaatcccaaatttgatgacactttcgagaagaacctcagttctgtccgacaggttaaagaaattattcatcagttcattttggaacagcagaaaggaaacagagtgcctctctgcatcaaccctcagtctgctgcttttaagagctttattagttccactgttgctcagccatctgagatgcccccatctcctctggtgtgggagtgatggtggaagataatgtactactgaagatgtaatgtagctttccactggagtctgggatttgcaattctggaggctcctgagaatcaacccaactgaagcatttcaattcacttgaatgagaaacgtgtttagtatcaaaagagcccaagaagacactggtgtgaaaggtacaatctcagaggttggtcaattaccgtggcacactttctggtcactttgtacaatgtagatttgaagtacagtggtgaaaacattaaatgtgacatttgaaaaaga

SEQ ID NO: 4086 - protein, 527 aa, Homosapiens; identical to SEQ ID NO: 4080

SEQ ID NO: 4087 - DNA, 432 bp, Homosapiens
ggattatttgaggtatatttttattaagatagaaaagcttatattaactaatctttttaagtgatctgctgacagtaattgctttaatcaaacattttttggatattgttgacttatgttaaagtagaaaaaagtttttggccaggtgcggtggctcacacctgtaatcccagcacttcgggaggctgaggcaggtggatcatgaggtcaggagatcgagactcccgggttcaagcgaattctccttccttagcctcctgagtagctgggattacaggcacacgccactatgcccagctaatttttgtttttttagtagagacgaggtttcaccatgttggtcaggctggtctcgaactcctgacctcgtgatctgtccaccttggccacctaaagtgctgggattacaggcgtgagccactacacccggcc

SEQ ID NO: 4088 - protein, 82 aa, Homosapiens
SQHFGRLRQVDHEVRRSRLPGSSEFSFLSLLSSWDYRHTPLCPANFCFFSRDEVSPCWSGWSRTPDLVICPPWPPKVLGLQA

SEQ ID NO: 4089 - DNA, 2175 bp, Homosapiens
taatgtgtcttttgaaagatcctatgtggacagtcattttatctgtagtgttgatgtgctggtctctaatttgatttcagtccaaaagaatatccgctaaggatgccttagcccacccctacctagatgaagggcgactacgatatcacacatgtatgtgtaaatgttgcttttccacctccactggaagagtttataccagtgactttgagcctgtcaccaatcccaaatttgatgacactttcgagaagaacctcagttctgtccgacaggttaaagaaattattcatcagttcattttggaacagcagaaaggaaacagagtgcctctctgcatcaaccctcagtctgctgcttttaagagctttattagttccactgttgctcagccatctgagatgcccccatctcctctggtgtgggagtgatggtggaagataatgtactactgaagatgtaatgtagctttccactggagtctgggatttgcaattctggaggttaatcatgcttgtactgtaattttactaatgaagttttaaattaacaaccactacttgtatgatatgaataatatttagaaatgttactagacttttaatcttgtaaagtggttgtgcttttagaagaaaaatattttacccagagttgcacatgttttatgaatttagtgcagctgttatggctcacctcagaacaaaagagaattgaaccaaatttgggagtttggggttttatgttttgtttttcttttctaaaatgaagtgagattgttcacacacacacacacacacacacacacacacaaacacaaaggacagtcatacattttgatatttgagccattcctaaagatttggggttttctaaaactaaagaatctaggaaccttgcctgcgaccaatcatggagccacgtgagctgatcgtggctgcacctggggggagggtagggaggaggggcatgccacctaatgatcaagccctataattagcttctcattagagccgtgatggtgatgtgtgctgtctaaaatccaatgttgtgggtagagagaatgagtttgtgactaggagagactaaacttttgttttccttacccagtataaatatatatatatatatttaatctatttttattagaagtttttctgctctttcttacataaaagaaccccaagcatgcatctttcatgtgtgtaaataattcatttctgggctaatttcaaaagaatcccaatattgctgtatagaaagagaactagcttgcacattttaggtctgtgaaattttgtgagacttttcctgcactggacagtaaaaaaataataaaagacaaaaacaaatttaaaaaaaaatttaagccacaaaaaaaggcacatagggaattatgtcaaatgtgtttgtgtccttaggcaaagctgtgggagtcttgaaatgtcacagtagtaaataacttattactttttgacaagttctttttttctgttggaacactgaattcttctgtgcatatgtacatatgaatacaaatcgaaggcctctacctcctggagttatacaacttggcttgtttacctccacatgctgatgatgactattttttttttttgagttcagtgtggagacttgaaacttgaatgtcccttccaacttttatattaaaaataaaaagacaagaaaattgaagatcatttttcacctgtacaaggaatactaatggatcgtcttaaaattggtctaggaaaaaaccttggtgtgtgttatggacaattaactgttaaagttattgtaagttatctgtatttagcagagtattttcaacttgagtgatctgagctgaatttgaagactattaataagttatgtttggaagttttaacttcaatgaagtaattatttgctgtgaaagaaacaaacattgaattactaaacaaagatggtgcaatatctttgttttttttttatgaggctcctgagaatcaacccaactgaagcatttcaattcacttgaatgagaaacgtgtttagtatcaaaagagcccaagaagacactggtgtgaaaggtacaatctcagaggttggtcaattaccgtggcacactttctggtcactttgtacaatgtagatttgaagtacagtggtgaaaacattaaatgtgacatttgaaaaaga

SEQ ID NO: 4090 - protein, 104 aa, Homosapiens
MKGDYDITHVCVNVAFPPPLEEFIPVTLSLSPIPNLMTLSRRTSVLSDRLKKLFISSFWNSRKETECLSASTLSLLLLRALLVPLLLSHLRCPHLLWCGSDGGR

SEQ ID NO: 4091 - DNA, 1074 bp, Homosapiens
ggttcaggctaggtaccccatccagtgggaccccaaatctgagcatggcagctgccccctgagctcctatgaggtggagacgtcacacagtggctgagcgtaagctcaaggatctggtgcgggtggaaggaggaagaagggcgcaccccctgctggctccccctccccgtgggactccctttcctttccaggcggggatataagccccgaaaggaaagccctgagcagaggaggcctcagcttgacctgtcccagtgcgcccttgaaactttcctcgccttccacctcctgctcatctgcttcacaagctgtcgctgtggtgtcggttcgcaggtcgtggcctctcatggccacggtgcttttggccctgctcgtctacctgggggcgctggtcgacgcctaccccatcaaacccgaggctcccggcgaagacgccttcctggggtagctgagccgctgctacgcctatcctcgccactacctcatcctggtcactcagccgtcgtgagcgcaggcgcggggcgggcggagcgggacccctggggctctccccctgcggccccgctccaccgggggcgtggctagatctgaccgcgcccttccaggccccgccctcaggtatgggaaactaggccgcccggtcgcgcgcctctccaaaacgttcttcccagactgcgaggaccgcctcggcaggtggcggtaaaagcgcccccatcaagtcacataacatcctgcctccgagagcgcggtctggccccaccctggtccatcacttacgacgtctcccaggcttgcctccccggatcggattcctttcccttcgatcccgcaggccggaggcgcagacctgtggtgaggacacccgaggcctcctgggagacctgcagaccacgcccacctcatttacatgttcactcccgaccctggaaacccggatttcgcctccggacagcggcgtctgggcagggttcgggtactgcagtcccgcgtctggatgcccccgccccctgagctgcagggctgtgtgtggtccttccctggtcccaaaataaagagcgaattgcacagaaacgg

SEQ ID NO: 4092 - protein, 54 aa, Homosapiens
MFTPDPGNPDFASGQRRLGRVRVLQSRVWMPPPPELQGCVWSFPGPKIKSELHR

SEQ ID NO: 4093 - DNA, 657 bp, Homosapiens
atggctgccgcatgccgctgcctctccctcctgctcctgtccacctgtgtggctctgttgctgtagccactgctgggtgcccggggagccccgttggagccattgtacccaggggacaataccacaccggagcagatggcccagtacacagctgagctccgtagatacatcaacatgctgaccaagcctaggcatgtgccatggacaaggagagagatcccagcccctgggaccctgggcccactccacattcctggccacaccctatccccagcccaagccccatctccagccccagtcccagccccttccaggccactcttggggaaacagagcatctgtgctgaccaggcctgggcccatgtgccctgggcaagagggtgcctacaggcggatatgaaaccggtgggctggcacctgggcacagtgcttccaggtatggagaaagagacaaagaggacacgctggccttctcagagtggggtcttcccatgctgctgcccccagagagctcagcccgctggacttgtaacactacctcccgccccctaccactccacgggcagtgccagcccagctctcccctccacactgttggctctggccgaagctcactccctgttcctgcacaggctcaataaagcaagtcaaagcaca

SEQ ID NO: 4094 - protein, 173 aa, Homosapiens
MAQYTAELRRYINMLTKPRHVPWTRREIPAPGTLGPLHIPGHTLSPAQAPSPAPVPAPSRPLLGKQSICADQAWAHVPWARGCLQADMKPVGWHLGTVLPGMEKETKRTRWPSQSGVFPCCCPQRAQPAGLVTLPPAPYHSTGSASPALPSTLLALAEAHSLFLHRLNKASQS

SEQ ID NO: 4095 - DNA, 774 bp, Homosapiens
gagctggaactcaggatggaactcaggatgggactgaaactggagcaggcccaggtgtgcagcgtcccgcagggtctcagccaggcacagattcagctggagacctgcccctggagccagagaaatcttggataagacacacccatctcttctgcctcaggaactgagactttgatgagactttgtttgcattggagacctgcccctggagccagagaaatcttggataagacacacccatctcttctgcctcaggaactgagactttgatgagactttgattgcattcgtaggcacagattcagctggagacctgcccctggagccagagaaatcttggataagacacacccatctcttctgcctcaggaactgactgagactttgatgagactttgattccatttgtaggcacagattcagctggagacctgcccctggagccagagaaatcttggataagacacacccatctcttctgcctcaggaactgactgagattttgatgagactttgattccattcgtaggcacacattcagctggagacctgcccccggagccagagcaatttgctgctgcacatcaggatctgtatgacaagctgactcagcaagaaacgttcctagaagtggttccaatgcaagactaggaccagaaccaggccctagcttagcttttcacctcaaaagtaggttgaaaatgtagaccaggatctgtatgacaagctgactcagcaagaaacgttcctagaagtggttccaatgctagacag

SEQ ID NO: 4096 - protein, 39 aa, Homosapiens
MELRMGLKLEQAQVCSVPQGLSQAQIQLETCPWSQRNLG

SEQ ID NO: 4097 - DNA, 375 bp, Homosapiens
gcggccgccaggcttcccggcccgccactcccgctgccacccaaaggcgctgcgtgccggcggcttggtggagtttcgtcgaggcccggcaggcttgggccaggagatccagcggccgggcggggtcccggctgagagaggccgatgccgccgtcagtcaccgagatgggggtaatcactttgatcaacatgacgaaggacacttggaaactgaacaagcatcacttgacaagcctacagaatccataagatggatcattgcttaatttcgggtcttagccagttagttctgataccttaagccagcagaagcaggggaccctttggggagcaggaggccaataaaaagttcagaggttaaaaaaaaagaaaaaa

SEQ ID NO: 4098 - protein, 34 aa, Homosapiens
MPPSVTEMGVITLINMTKDTWKLNKHHLTSLQNP

SEQ ID NO: 4099 - DNA, 1950 bp, Homosapiens
agttaaggcctttgtccgttgaggtcaggactaggtggtctcagccaatggggacagagcggtcacggggaccgggtttgcgcggctccgaggcctaaccaggcagccgagcctgcctgcgtcccgaggccgccttcccgggacctctgcaccctcaggtcctccgttgggtggtgttcgggcggccgccaggcttcccggcccgccactcccgctgccacccaaaggcgctgcgtgccggcggcttggtggagtttcgtcgaggcccggcaggcttgggccaggagatccagcggccgggcggggtcccggctgagagaggccgatgccgccgtcagtcaccgagatggggtggggacgcttcaaggcctgggtctggccagggggcagtcacagcagggccctagggtaatcactttgatcaacatgacgaaggacacttggaaactgaacaagcatcacttgacaagcctacagaatccataagatggatcattgcttaatttcgggtcttagccagttagatttaccttcagctttaacaaaaaattggccgtcaaaacctgagtcctgtcctcttgctctcctccccggacagcatgaacttcaccacttgctccaccctctccaccaactaccagtccctgggcactgtccaggcacccagctatgtgcccagctggtcagcagtgtggccagtgtctatgcaggcatcaggggctctggttcccggatctccatgtcctgcttcaccagcttccagggcagcatggggtccaggggcctgcccgcagtgatggccgggggtctggcaggaatgggagtcatccagaatgagaaggaaaccatgcaaagcctcaacgaccacctggcctcctacctggacagagttaggagcctggataccaagaactggaagctggagagccaggagcacctggagaagaagggaccccaggtcagagactggagccatgacttcaagaccatcgagaacctgagggctcagatctttgcaaatactgtggacagtgcccacattgttctgcagatcgacaatgcctgtcttgctggtgatgactttagggtcaagtatgagacagagctggccatgtgccagtctgtggagagtgacatccatgggctccacaaggtcattgatgacaccaatgtcacttggctgcagctggaagcagagatcaaggctctcaaggagaagctgctcttcatgaagaagaaccatgaagaggaagtaaagggcctataagcccagattgccagctctgggttgactgtggaggtagatgcccccaaatctcatgaccttgccaaaatcttggcagacattgggcccaatatgacgagctggctccgaagaacttagaggagctgggcaagtactggtctccgcagattgaggagagcaccgcagttgtcaccacgcagtctgccgaggttggagctgctgagatgacgctcacggagctgagacatacagtccagtccttggagatcgacctggactccatgagcaatctgaaggccagcttggagaacagcctgagggaggtggaggcctgttacaccctgcggacggagcagctcaacaggatcctgctgcacttggagtcagagctggcacagacccgggcagagggacagcactaggcccaggagtatgaggccctgctgaacatcaaggtcaagctggaggctgagatcgccacctaccaccgcctgctggaagacagtgaggacttcaatctttcaatcttggtgatgccctggacagcagcaactccatgcaaaccatccaaaagactaccacctgccggatattggatggcaaagtggtgtctgagaccagtgatgccaaagttctgataccttaagccagcagaagcaggggaccctttggggagcaggaggccaataaaaagttcagaggtt

SEQ ID NO: 4100 - protein, 259 aa, Homosapiens; identical to SEQ ID NO: 616

SEQ ID NO: 4101 - DNA, 621 bp, Homosapiens
taatgtagtcagtctaagacaattggtgtcccaaatggttgatagtgttttagtttacaatttcaacatttgttagaagaaaagttcagattactgggcctagattcctaataaattgtgttttgttttgtttgaaatagggtctcgttctgtcacccaggcttggagtgcagtggcttgatgacagctcactgcagcctcgacctcctgggttcaagtgatcctcccacctcagcctcctgaatagctggggctacaggctcacaccaccatgtgtggctaattaattttttttttccagaaacaggttttcactgtgttgcccaggctggttttgaactcttgggttcgagtgatctgcccacctcggcctcccaaggtgctgagattatagggtgagccaccgcgtctggcctattttatgctttttaatgttactttaaaacttcataaatgtattcttccccttttccctttcccctttttctccattttaaaatgttatgtacgaaagttgcccagcacaccatcagaaaggacctttatcctatatgttcttcccatataaaatactagccagcttttctttttacattagtgtccctcttattggacacattt

SEQ ID NO: 4102 - protein, 48 aa, Homosapiens
MLFNVTLKLHKCILPLFPFPFFSILKCYVRKLPSTPSERTFILYVLPI

SEQ ID NO: 4103 - DNA, 650 bp, Homosapiens
tcttctcgccagccaatggaagcggtctgcctagccctcgcgggggcaaggcggcgaccgaggcgcgtgggtctgggaaggcgcgcggatttggcccctcttctcacatcagcgggtccaggcccaaccgacagactatgggggctccggcaaccaggcgctgcgtggagtggctgctgggcctctacttcctcagccacatccccatcaccctgttcatggacctgcaggcggtgctgccgcgcgagctctacccagtcgagtttagaaacctgctgaagtggtatgctaaggagttcaaagacccactgctacaggagcccccagcctggtttaagtcctttctgttttgcgagcttgtgtttcagctgcctttctttcccattgcaacgtatgccttcctcaaaggaagctgcaagtggattcgaactcctgcaatcatctactctgttcacaccatgacaaccttaattccgatactctccacatttctgtttgaggatttctccaaagccagtggtttcaagggacaaagacctgagactttgcatgaacggttaacccttgtgtctgtctatgccccctacttactcatcccattcatacttttaattttcatgttgcggagcccctactacaagtatgaagag

SEQ ID NO: 4104 - protein, 170 aa, Homosapiens
MGAPATRRCVEWLLGLYFLSHIPITLFMDLQAVLPRELYPVEFRNLLKWYAKEFKDPLLQEPPAWFKSFLFCELVFQLPFFPIATYAFLKGSCKWIRTPAIIYSVHTMTTLIPILSTFLFEDFSKASGFKGQRPETLHERLTLVSVYAPYLLIPFILLIFMLRSPYYKYE

SEQ ID NO: 4105 - DNA, 2102 bp, Homosapiens
tcttctcgccagccaatggaagcggtctgcctagccctcgcgggggcaaggcggcgaccgaggcgcgtgggtctgggaaggcgcgcggatttggcccctcttctcacatcagcgggtccaggcccaaccgacagactatgggggctccggcaaccaggcgctgcgtggagtggctgctgggcctctacttcctcagccacatccccatcaccctgttcatggacctgcaggcggtgctgccgcgcgagctctacccagtcgagtttagaaacctgctgaagtggtatgctaaggagttcaaagacccactgctacaggagcccccagcctggtttaagtcctttctgttttgcgagcttgtgtttcagctgcctttctttcccattgcaacgtatgccttcctcaaaggaagctgcaagtggattcgaactcctgcaatcatctactctgttcacaccatgacaaccttaattccgatactctccacatttctgtttgaggatttctccaaagccagtggtttcaagggacaaagacctgagactttgcatgaacggttaacccttgtgtctgtctatgccccctacttactcatcccattcatacttttaattttcatgttgcggagcccctactacaagtatgaagagaaaagaaaaaaaaaatgaaggaaacaaccactggcccagggtagagatgcctacagggtggttgcttgttggatacaatacaaggaacactgctcagaacccacgtcttcagcagcatttgaaacactggcagcaatgcacaagagcaagatggtgtcaggaaccatgtcaaaccctcaccttcttccattttttttttttttttaagacagtctcactctgttgcccaggctggagtaaagggcagtggcatgatctcggctcactgcaacctccgcctcctgggctcaagccatcttccttagcctcccaagtagctagaactacaggtgtgtaccaacacgtatggctaatttgttttgttttttttgtgtgtgtggagacagggttttgccatgttgcccaggttggtctcgaacgcctaggctcaagtgatctgcccacctcagtctccctaagtgctgggattacagacgtgaaccactgggcccagcccaaaccttcaccttctaagggcactgggatgaacagaccgatcggcttgagggtgggcaaaggggtgtgggctaggttataaggaagtggtaccaaataactgtgtgcctgagttccaccgcaagattactaaaagcaggaccagaccagaaactgctaaagaacatggcctgtttgacatgttcatgagtcacctgacccacagcatatatgcttatgactaaaccctccactcctgattctcaagagtgtatcacctgtcagcaaaatgaatagtgggatattttgggccattttaaatgtgaaattttgcctctttaatgttaattcaaaactatatcaatgttttcttgttcccacctctaacccaaggaaaaaagagaaaacatactatgcaaaggaagtttaaacttaagttttccttaagggtcagcccaacaatgactttcagtcaaatggattaaactggaaaatgtttttgtttctgttgtaaacagatcatcctaggcgaaagttttttttgtttgtttgcttttaaattagtttatttctaaatcttagtcttccacatttctagaggccacctgacacaagtccctgtatctgaagtctagcatctcaaggctgatctggaagtgtgctagtatgctccctagtggataacttaatcttttaatacagttccgtcattcccatcttgttttcagaagagaaggtggctacagccaggcataacatatccactgtgtgcatagagggtctcttcacgttgatgcttggcattccatcagctttctctaagtctttgctcaagttcaaccttaaaatgatgttagacaacaggtcccagtcagttccctctattttcacccattttgctcacaagccatattggcccgattagtggtactgtctgactcacgtgtgtgatccaaataaaggtagctgctgaccact

SEQ ID NO: 4106 - protein, 176 aa, Homosapiens
MGAPATRRCVEWLLGLYFLSHIPITLFMDLQAVLPRELYPVEFRNLLKWYAKEFKDPLLQEPPAWFKSFLFCELVFQLPFFPIATYAFLKGSCKWIRTPAIIYSVHTMTTLIPILSTFLFEDFSKASGFKGQRPETLHERLTLVSVYAPYLLIPFILLIFMLRSPYYKYEEKRKKK

SEQ ID NO: 4107 - DNA, 1957 bp, Homosapiens
tcttctcgccagccaatggaagcggtctgcctagccctcgcgggggcaaggcggcgaccgaggcgcgtgggtctgggaaggcgcgcggatttggcccctcttctcacatcagcgggtccaggcccaaccgacagactatgggggctccggcaaccaggcgctgcgtggagtggctgctgggcctctacttcctcagccacatccccatcaccctgttcatggacctgcaggcggtgctgccgcgcgagctctacccagtcgaggaagctgcaagtggattcgaactcctgcaatcatctactctgttcacaccatgacaaccttaattccgatactctccacatttctgtttgaggatttctccaaagccagtggtttcaagggacaaagacctgagactttgcatgaacggttaacccttgtgtctgtctatgccccctacttactcatcccattcatacttttaattttcatgttgcggagcccctactacaagtatgaagagaaaagaaaaaaaaaatgaaggaaacaaccactggcccagggtagagatgcctacagggtggttgcttgttggatacaatacaaggaacactgctcagaacccacgtcttcagcagcatttgaaacactggcagcaatgcacaagagcaagatggtgtcaggaaccatgtcaaaccctcaccttcttccattttttttttttttttaagacagtctcactctgttgcccaggctggagtaaagggcagtggcatgatctcggctcactgcaacctccgcctcctgggctcaagccatcttccttagcctcccaagtagctagaactacaggtgtgtaccaacacgtatggctaatttgttttgttttttttgtgtgtgtggagacagggttttgccatgttgcccaggttggtctcgaacgcctaggctcaagtgatctgcccacctcagtctccctaagtgctgggattacagacgtgaaccactgggcccagcccaaaccttcaccttctaagggcactgggatgaacagaccgatcggcttgagggtgggcaaaggggtgtgggctaggttataaggaagtggtaccaaataactgtgtgcctgagttccaccgcaagattactaaaagcaggaccagaccagaaactgctaaagaacatggcctgtttgacatgttcatgagtcacctgacccacagcatatatgcttatgactaaaccctccactcctgattctcaagagtgtatcacctgtcagcaaaatgaatagtgggatattttgggccattttaaatgtgaaattttgcctctttaatgttaattcaaaactatatcaatgttttcttgttcccacctctaacccaaggaaaaaagagaaaacatactatgcaaaggaagtttaaacttaagttttccttaagggtcagcccaacaatgactttcagtcaaatggattaaactggaaaatgtttttgtttctgttgtaaacagatcatcctaggcgaaagttttttttgtttgtttgcttttaaattagtttatttctaaatcttagtcttccacatttctagaggccacctgacacaagtccctgtatctgaagtctagcatctcaaggctgatctggaagtgtgctagtatgctccctagtggataacttaatcttttaatacagttccgtcattcccatcttgttttcagaagagaaggtggctacagccaggcataacatatccactgtgtgcatagagggtctcttcacgttgatgcttggcattccatcagctttctctaagtctttgctcaagttcaaccttaaaatgatgttagacaacaggtcccagtcagttccctctattttcacccattttgctcacaagccatattggcccgattagtggtactgtctgactcacgtgtgtgatccaaataaaggtagctgctgaccact

SEQ ID NO: 4108 - protein, 112 aa, Homosapiens
MEAVCLALAGARRRPRRVGLGRRADLAPLLTSAGPGPTDRLWGLRQPGAAWSGCWASTSSATSPSPCSWTCRRCCRASSTQSRKLQVDSNSCNHLLCSHHDNLNSDTLHISV

SEQ ID NO: 4109 - DNA, 3856 bp, Homosapiens
tcttctcgccagccaatggaagcggtctgcctagccctcgcgggggcaaggcggcgaccgaggcgcgtgggtctgggaaggcgcgcggatttggcccctcttctcacatcagcgggtccaggcccaaccgacagactatgggggctccggcaaccaggcgctgcgtggagtggctgctgggcctctacttcctcagccacatccccatcaccctgttcatggacctgcaggcggtgctgccgcgcgagctctacccagtcgagtttagaaacctgctgaagtggtatgctaaggagttcaaagacccactgctacaggagcccccagcctggtttaagtcctttctgttttgcgagcttgtgtttcagctgcctttctttcccattgcaacgtatgccttcctcaaaggaagctgcaagtggattcgaactcctgcaatcatctactctgttcacaccatgacaaccttaattccgatactctccacatttctgtttgaggatttctccaaagccagtggtttcaagggacaaagacctgagactttgcatgaacggttaacccttgtgtctgtctatgccccctacttactcatcccattcatacttttaattttcatgttgcggagcccctactacaagtatgaagagaaaagaaaaaaaaaatgaaggaaacaaccactggcccagggtagagatgcctacagggtggttgcttgttggatacaatacaaggaacactgctcagaacccacgtcttcagcagcatttgaaacactggcagcaatgcacaagagcaagatggtgtcaggaaccatgtcaaaccctcaccttcttccattttttttttttttttaagacagtctcactctgttgcccaggctggagtaaagggcagtggcatgatctcggctcactgcaacctccgcctcctgggctcaagccatcttccttagcctcccaagtagctagaactacaggtgtgtaccaacacgtatggctaatttgttttgttttttttgtgtgtgtggagacagggttttgccatgttgcccaggttggtctcgaacgcctaggctcaagtgatctgcccacctcagtctccctaagtgctgggattacagacgtgaaccactgggcccagcccaaaccttcaccttctaagggcactgggatgaacagaccgatcggcttgagggtgggcaaaggggtgtgggctaggttataaggaagtggtaccaaataactgtgtgcctgagttccaccgcaagattactaaaagcaggaccagaccagaaactgctaaagaacatggcctgtttgacatgttcatgagtcacctgacccacagcatatatgcttatgactaaaccctccactcctgattctcaagagtgtatcacctgtcagcaaaatgaatagtgggatattttgggccattttaaatgtgaaattttgcctctttaatgttaattcaaaactatatcaatgttttcttgttcccacctctaacccaaggaaaaaagagaaaacatactatgcaaaggaagtttaaacttaagttttccttaagggtcagcccaacaatgactttcagtcaaatggattaaactggaaaatgtttttgtttctgttgtaaacagatcatcctaggcgaaagttttttttgtttgtttgcttttaaattagtttatttctaaatcttagtcttccacatttctagaggccacctgacacaagtccctgtatctgaagtctagcatctcaaggctgatctggaagtgtgctagtatgctccctagtggataacttaatcttttaatacagttccgtcattcccatcttgttttcagaagagaaggtggctacagccaggcataacatatccactgtgtgcatagagggtctcttcacgttgatgcttggcattccatcagctttctctaagtctttgctcaagttcaaccttaaaatgatgttagacaacaggtcccagtcagttccctctattttcacccattttgctcacaagccatattggcccgattagtggtactgtctgactcacgtgtgtgatccaaataaaggtagctgctgaccactgcctggtttgttttgtggactaggggatagagaatccagggttctctcatgaggagttaaacatatttcaagagcaacaggaaaaaaggtacatcaagccatttgaaaacaaaaatttattgcttctccttccaaagctttgtgaatttacaaaaaaaaggatgaaagtttacaaactgcttagttccaactaagcataagaggtgagaacgtacactgcagggccaccagcagcagctgtgcactgatgttaaaactggctcccccagacttgtagtgctgtcttcagggggctgcattccttacacgccacctcttgtgacataggtcattggtcaagccgctggaatgctacagaggtttttttggttttgagaggcttttttttgttttgccttcctactataaaagcgaaattttcagttcatttctgaaaaataaattggtcaataaattcattttgttctgcttctactttacacaaagcttcatattcaacccgatacctgaaaaacaaaattgttagaggccctgaaaaaaagatgaagtaaaccacagacctaattcttctagagaaggatatagaggtttaaatgatttcaagaaatggtgtgagttcagaatgaagaaagaaagaggcaaagccctacccagagccacccatgagaaatctccagccctaggaaagtcttctttcagagagccagccaacttcgtggaccctttcatgctcaaactactagaggtggtttgatattaacaagttttctatttccttcccatcaaatgtaattttattttttaaaatcttcaaatcaggatgacaagtgagatgctattcctgggaaaacaatgatgaagaataaggacaagaagtgatcattccagaaggaagagtggaaattcagctgtgtaaagaacttgctttacatcatgacttcttacctttctagctgcattttcttttctgctattagggcttgaagttgctgctgttgagcttctctctgctttgctatagatttgagcaagttccgagcaccgatggcctacagtattgccagagaaggccatggcttcattaaaaccatctacagcatcaagtcctcaaagtggggaggggttatctgggagctgtgtcagtcttcagagaggaaaagaaagtggagccccaaagcttttgggttaagtcagaaggattaacctactgatcacaaagtgcctcaagaactagacggcagctttgaggcaggtctaggagtattcctagagccagggacacaggcacaatagcacatttggtggtgccattcagccttgtgcctttcaccaatcatactatgtaagccttcatttcttcatttataaaatgaggataagaccatctacatcagtgctgatatgaagatgaaacgaggccaggtgtggtggctcacacctgcaatcccagcactttgggaggccaaggtaggcagttcacttgaggccaggagtttgcaaccagcctggccaacatggtgaaaccccatctttactaaaaatacaaaaaaatggccgggcgcagtcactcacgccttaatcccagcactttgggaggctgaggcgggcggatcacctaaggttgggagtttgagaccagcctgaccaacatggagaaaccctgtctctactaaaaatacaaaattagccaggcatggtggcacatgcctgtaatcccagctactcgggaggctgaggcaggagaatcgcttgaa

SEQ ID NO: 4110 - protein, 176 aa, Homosapiens; identical to SEQ ID NO: 4106

SEQ ID NO: 4111 - DNA, 3711 bp, Homosapiens
tcttctcgccagccaatggaagcggtctgcctagccctcgcgggggcaaggcggcgaccgaggcgcgtgggtctgggaaggcgcgcggatttggcccctcttctcacatcagcgggtccaggcccaaccgacagactatgggggctccggcaaccaggcgctgcgtggagtggctgctgggcctctacttcctcagccacatccccatcaccctgttcatggacctgcaggcggtgctgccgcgcgagctctacccagtcgaggaagctgcaagtggattcgaactcctgcaatcatctactctgttcacaccatgacaaccttaattccgatactctccacatttctgtttgaggatttctccaaagccagtggtttcaagggacaaagacctgagactttgcatgaacggttaacccttgtgtctgtctatgccccctacttactcatcccattcatacttttaattttcatgttgcggagcccctactacaagtatgaagagaaaagaaaaaaaaaatgaaggaaacaaccactggcccagggtagagatgcctacagggtggttgcttgttggatacaatacaaggaacactgctcagaacccacgtcttcagcagcatttgaaacactggcagcaatgcacaagagcaagatggtgtcaggaaccatgtcaaaccctcaccttcttccattttttttttttttttaagacagtctcactctgttgcccaggctggagtaaagggcagtggcatgatctcggctcactgcaacctccgcctcctgggctcaagccatcttccttagcctcccaagtagctagaactacaggtgtgtaccaacacgtatggctaatttgttttgttttttttgtgtgtgtggagacagggttttgccatgttgcccaggttggtctcgaacgcctaggctcaagtgatctgcccacctcagtctccctaagtgctgggattacagacgtgaaccactgggcccagcccaaaccttcaccttctaagggcactgggatgaacagaccgatcggcttgagggtgggcaaaggggtgtgggctaggttataaggaagtggtaccaaataactgtgtgcctgagttccaccgcaagattactaaaagcaggaccagaccagaaactgctaaagaacatggcctgtttgacatgttcatgagtcacctgacccacagcatatatgcttatgactaaaccctccactcctgattctcaagagtgtatcacctgtcagcaaaatgaatagtgggatattttgggccattttaaatgtgaaattttgcctctttaatgttaattcaaaactatatcaatgttttcttgttcccacctctaacccaaggaaaaaagagaaaacatactatgcaaaggaagtttaaacttaagttttccttaagggtcagcccaacaatgactttcagtcaaatggattaaactggaaaatgtttttgtttctgttgtaaacagatcatcctaggcgaaagttttttttgtttgtttgcttttaaattagtttatttctaaatcttagtcttccacatttctagaggccacctgacacaagtccctgtatctgaagtctagcatctcaaggctgatctggaagtgtgctagtatgctccctagtggataacttaatcttttaatacagttccgtcattcccatcttgttttcagaagagaaggtggctacagccaggcataacatatccactgtgtgcatagagggtctcttcacgttgatgcttggcattccatcagctttctctaagtctttgctcaagttcaaccttaaaatgatgttagacaacaggtcccagtcagttccctctattttcacccattttgctcacaagccatattggcccgattagtggtactgtctgactcacgtgtgtgatccaaataaaggtagctgctgaccactgcctggtttgttttgtggactaggggatagagaatccagggttctctcatgaggagttaaacatatttcaagagcaacaggaaaaaaggtacatcaagccatttgaaaacaaaaatttattgcttctccttccaaagctttgtgaatttacaaaaaaaaggatgaaagtttacaaactgcttagttccaactaagcataagaggtgagaacgtacactgcagggccaccagcagcagctgtgcactgatgttaaaactggctcccccagacttgtagtgctgtcttcagggggctgcattccttacacgccacctcttgtgacataggtcattggtcaagccgctggaatgctacagaggtttttttggttttgagaggcttttttttgttttgccttcctactataaaagcgaaattttcagttcatttctgaaaaataaattggtcaataaattcattttgttctgcttctactttacacaaagcttcatattcaacccgatacctgaaaaacaaaattgttagaggccctgaaaaaaagatgaagtaaaccacagacctaattcttctagagaaggatatagaggtttaaatgatttcaagaaatggtgtgagttcagaatgaagaaagaaagaggcaaagccctacccagagccacccatgagaaatctccagccctaggaaagtcttctttcagagagccagccaacttcgtggaccctttcatgctcaaactactagaggtggtttgatattaacaagttttctatttccttcccatcaaatgtaattttattttttaaaatcttcaaatcaggatgacaagtgagatgctattcctgggaaaacaatgatgaagaataaggacaagaagtgatcattccagaaggaagagtggaaattcagctgtgtaaagaacttgctttacatcatgacttcttacctttctagctgcattttcttttctgctattagggcttgaagttgctgctgttgagcttctctctgctttgctatagatttgagcaagttccgagcaccgatggcctacagtattgccagagaaggccatggcttcattaaaaccatctacagcatcaagtcctcaaagtggggaggggttatctgggagctgtgtcagtcttcagagaggaaaagaaagtggagccccaaagcttttgggttaagtcagaaggattaacctactgatcacaaagtgcctcaagaactagacggcagctttgaggcaggtctaggagtattcctagagccagggacacaggcacaatagcacatttggtggtgccattcagccttgtgcctttcaccaatcatactatgtaagccttcatttcttcatttataaaatgaggataagaccatctacatcagtgctgatatgaagatgaaacgaggccaggtgtggtggctcacacctgcaatcccagcactttgggaggccaaggtaggcagttcacttgaggccaggagtttgcaaccagcctggccaacatggtgaaaccccatctttactaaaaatacaaaaaaatggccgggcgcagtcactcacgccttaatcccagcactttgggaggctgaggcgggcggatcacctaaggttgggagtttgagaccagcctgaccaacatggagaaaccctgtctctactaaaaatacaaaattagccaggcatggtggcacatgcctgtaatcccagctactcgggaggctgaggcaggagaatcgcttgaa

SEQ ID NO: 4112 - protein, 112 aa, Homosapiens; identical to SEQ ID NO: 4108

SEQ ID NO: 4113 - DNA, 2117 bp, Homosapiens
gggttccagttgcctctctcgggtcctgcccatgcctcccccgctcctaacccaactttagttcggtgttttcctcgggctttgtctctatcccagccccttctcccaagcggcgggggcgaacgctttgtttcctttaaagtcacttcttccctgggtttaaggtttcccgcgattccacctctggccggttgtcagtgtctgagggaagtagtctggatgaagtggtgtccaaagtcacatgtcagcatggatccgcatcctttttatttgacaagtttagaaacctgctgaagtggtatgctaaggagttcaaagacccactgctacaggagcccccagcctggtttaagtcctttctgttttgcgagcttgtgtttcagctgcctttctttcccattgcaacgtatgccttcctcaaaggaagctgcaagtggattcgaactcctgcaatcatctactctgttcacaccatgacaaccttaattccgatactctccacatttctgtttgaggatttctccaaagccagtggtttcaagggacaaagacctgagactttgcatgaacggttaacccttgtgtctgtctatgccccctacttactcatcccattcatacttttaattttcatgttgcggagcccctactacaagtatgaagagaaaagaaaaaaaaaatgaaggaaacaaccactggcccagggtagagatgcctacagggtggttgcttgttggatacaatacaaggaacactgctcagaacccacgtcttcagcagcatttgaaacactggcagcaatgcacaagagcaagatggtgtcaggaaccatgtcaaaccctcaccttcttccattttttttttttttttaagacagtctcactctgttgcccaggctggagtaaagggcagtggcatgatctcggctcactgcaacctccgcctcctgggctcaagccatcttccttagcctcccaagtagctagaactacaggtgtgtaccaacacgtatggctaatttgttttgttttttttgtgtgtgtggagacagggttttgccatgttgcccaggttggtctcgaacgcctaggctcaagtgatctgcccacctcagtctccctaagtgctgggattacagacgtgaaccactgggcccagcccaaaccttcaccttctaagggcactgggatgaacagaccgatcggcttgagggtgggcaaaggggtgtgggctaggttataaggaagtggtaccaaataactgtgtgcctgagttccaccgcaagattactaaaagcaggaccagaccagaaactgctaaagaacatggcctgtttgacatgttcatgagtcacctgacccacagcatatatgcttatgactaaaccctccactcctgattctcaagagtgtatcacctgtcagcaaaatgaatagtgggatattttgggccattttaaatgtgaaattttgcctctttaatgttaattcaaaactatatcaatgttttcttgttcccacctctaacccaaggaaaaaagagaaaacatactatgcaaaggaagtttaaacttaagttttccttaagggtcagcccaacaatgactttcagtcaaatggattaaactggaaaatgtttttgtttctgttgtaaacagatcatcctaggcgaaagttttttttgtttgtttgcttttaaattagtttatttctaaatcttagtcttccacatttctagaggccacctgacacaagtccctgtatctgaagtctagcatctcaaggctgatctggaagtgtgctagtatgctccctagtggataacttaatcttttaatacagttccgtcattcccatcttgttttcagaagagaaggtggctacagccaggcataacatatccactgtgtgcatagagggtctcttcacgttgatgcttggcattccatcagctttctctaagtctttgctcaagttcaaccttaaaatgatgttagacaacaggtcccagtcagttccctctattttcacccattttgctcacaagccatattggcccgattagtggtactgtctgactcacgtgtgtgatccaaataaaggtagctgctgaccact

SEQ ID NO: 4114 - protein, 58 aa, Homosapiens
MLRSSKTHCYRSPQPGLSPFCFASLCFSCLSFPLQRMPSSKEAASGFELLQSSTLFTP

SEQ ID NO: 4115 - DNA, 3871 bp, Homosapiens
gggttccagttgcctctctcgggtcctgcccatgcctcccccgctcctaacccaactttagttcggtgttttcctcgggctttgtctctatcccagccccttctcccaagcggcgggggcgaacgctttgtttcctttaaagtcacttcttccctgggtttaaggtttcccgcgattccacctctggccggttgtcagtgtctgagggaagtagtctggatgaagtggtgtccaaagtcacatgtcagcatggatccgcatcctttttatttgacaagtttagaaacctgctgaagtggtatgctaaggagttcaaagacccactgctacaggagcccccagcctggtttaagtcctttctgttttgcgagcttgtgtttcagctgcctttctttcccattgcaacgtatgccttcctcaaaggaagctgcaagtggattcgaactcctgcaatcatctactctgttcacaccatgacaaccttaattccgatactctccacatttctgtttgaggatttctccaaagccagtggtttcaagggacaaagacctgagactttgcatgaacggttaacccttgtgtctgtctatgccccctacttactcatcccattcatacttttaattttcatgttgcggagcccctactacaagtatgaagagaaaagaaaaaaaaaatgaaggaaacaaccactggcccagggtagagatgcctacagggtggttgcttgttggatacaatacaaggaacactgctcagaacccacgtcttcagcagcatttgaaacactggcagcaatgcacaagagcaagatggtgtcaggaaccatgtcaaaccctcaccttcttccattttttttttttttttaagacagtctcactctgttgcccaggctggagtaaagggcagtggcatgatctcggctcactgcaacctccgcctcctgggctcaagccatcttccttagcctcccaagtagctagaactacaggtgtgtaccaacacgtatggctaatttgttttgttttttttgtgtgtgtggagacagggttttgccatgttgcccaggttggtctcgaacgcctaggctcaagtgatctgcccacctcagtctccctaagtgctgggattacagacgtgaaccactgggcccagcccaaaccttcaccttctaagggcactgggatgaacagaccgatcggcttgagggtgggcaaaggggtgtgggctaggttataaggaagtggtaccaaataactgtgtgcctgagttccaccgcaagattactaaaagcaggaccagaccagaaactgctaaagaacatggcctgtttgacatgttcatgagtcacctgacccacagcatatatgcttatgactaaaccctccactcctgattctcaagagtgtatcacctgtcagcaaaatgaatagtgggatattttgggccattttaaatgtgaaattttgcctctttaatgttaattcaaaactatatcaatgttttcttgttcccacctctaacccaaggaaaaaagagaaaacatactatgcaaaggaagtttaaacttaagttttccttaagggtcagcccaacaatgactttcagtcaaatggattaaactggaaaatgtttttgtttctgttgtaaacagatcatcctaggcgaaagttttttttgtttgtttgcttttaaattagtttatttctaaatcttagtcttccacatttctagaggccacctgacacaagtccctgtatctgaagtctagcatctcaaggctgatctggaagtgtgctagtatgctccctagtggataacttaatcttttaatacagttccgtcattcccatcttgttttcagaagagaaggtggctacagccaggcataacatatccactgtgtgcatagagggtctcttcacgttgatgcttggcattccatcagctttctctaagtctttgctcaagttcaaccttaaaatgatgttagacaacaggtcccagtcagttccctctattttcacccattttgctcacaagccatattggcccgattagtggtactgtctgactcacgtgtgtgatccaaataaaggtagctgctgaccactgcctggtttgttttgtggactaggggatagagaatccagggttctctcatgaggagttaaacatatttcaagagcaacaggaaaaaaggtacatcaagccatttgaaaacaaaaatttattgcttctccttccaaagctttgtgaatttacaaaaaaaaggatgaaagtttacaaactgcttagttccaactaagcataagaggtgagaacgtacactgcagggccaccagcagcagctgtgcactgatgttaaaactggctcccccagacttgtagtgctgtcttcagggggctgcattccttacacgccacctcttgtgacataggtcattggtcaagccgctggaatgctacagaggtttttttggttttgagaggcttttttttgttttgccttcctactataaaagcgaaattttcagttcatttctgaaaaataaattggtcaataaattcattttgttctgcttctactttacacaaagcttcatattcaacccgatacctgaaaaacaaaattgttagaggccctgaaaaaaagatgaagtaaaccacagacctaattcttctagagaaggatatagaggtttaaatgatttcaagaaatggtgtgagttcagaatgaagaaagaaagaggcaaagccctacccagagccacccatgagaaatctccagccctaggaaagtcttctttcagagagccagccaacttcgtggaccctttcatgctcaaactactagaggtggtttgatattaacaagttttctatttccttcccatcaaatgtaattttattttttaaaatcttcaaatcaggatgacaagtgagatgctattcctgggaaaacaatgatgaagaataaggacaagaagtgatcattccagaaggaagagtggaaattcagctgtgtaaagaacttgctttacatcatgacttcttacctttctagctgcattttcttttctgctattagggcttgaagttgctgctgttgagcttctctctgctttgctatagatttgagcaagttccgagcaccgatggcctacagtattgccagagaaggccatggcttcattaaaaccatctacagcatcaagtcctcaaagtggggaggggttatctgggagctgtgtcagtcttcagagaggaaaagaaagtggagccccaaagcttttgggttaagtcagaaggattaacctactgatcacaaagtgcctcaagaactagacggcagctttgaggcaggtctaggagtattcctagagccagggacacaggcacaatagcacatttggtggtgccattcagccttgtgcctttcaccaatcatactatgtaagccttcatttcttcatttataaaatgaggataagaccatctacatcagtgctgatatgaagatgaaacgaggccaggtgtggtggctcacacctgcaatcccagcactttgggaggccaaggtaggcagttcacttgaggccaggagtttgcaaccagcctggccaacatggtgaaaccccatctttactaaaaatacaaaaaaatggccgggcgcagtcactcacgccttaatcccagcactttgggaggctgaggcgggcggatcacctaaggttgggagtttgagaccagcctgaccaacatggagaaaccctgtctctactaaaaatacaaaattagccaggcatggtggcacatgcctgtaatcccagctactcgggaggctgaggcaggagaatcgcttgaa

SEQ ID NO: 4116 - protein, 58 aa, Homosapiens; identical to SEQ ID NO: 4114

SEQ ID NO: 4117 - DNA, 1223 bp, Homosapiens
agctgcctgtctacatcagcctgggctgcagcgcgctgccgccgcggggccggcagccatggccaaggacatcctgggtgaagcagggctacactttgatgaactgaacaagctgagggtgttggacccagaggttacccagcagaccatagagctgaaggaagagtgcaaagactttgtggacaaaattggccagtttcagaaaatagttggtggtttaattgagcttgttgatcaacttgcaaaagaagcagaaaatgaaaagatgaaggccatcggtgctcggaacttgctcaaatctatagcaaagcagagagaagctcaacagcagcaacttcaagccctaatagcagaaaagaaaatgcagctagaaaggtaagaagtcatgatgtaaagcaagttctttacacagctgaatttccactcttccttctggaatgatcacttcttgtccttattcttcatcattgttttcccaggaatagcatctcacttgtcatcctgatttgaagattttaaaaaataaaattacatttgatgggaaggaaatagaaaacttgttaatatcaaaccacctctagtagtttgagcatgaaagggtccacgaagttggctggctctctgaaagaagactttcctagggctggagatttctcatgggtggctctgggtagggctttgcctctttctttcttcattctgaactcacaccatttcttgaaatcatttaaacctctatatccttctctagaagaattaggtctgtggtttacttcatctttttttcagggcctctaacaattttgtttttcaggtatcgggttgaatatgaagctttgtgtaaagtagaagcagaacaaaatgaatttattgaccaatttatttttcagaaatgaactgaaaatttcgcttttatagtaggaaggcaaaacaaaaaaaagcctctcaaaaccaaaaaaacctctgtagcattccagcggcttgaccaatgacctatgtcacaagaggtggcgtgtaaggaatgcagccccctgaagacagcactacaagtctgggggagccagttttaacatcagtgcacagctgctgctggtggccctgcagtgtacgttctcacctcttatgcttagttggaactaagcagtttgtaaactttcatccttttttttgtaaattcacaaagctttggaaggagaagcaataaatttttgttttcaaatggc

SEQ ID NO: 4118 - protein, 106 aa, Homosapiens
MAKDILGEAGLHFDELNKLRVLDPEVTQQTIELKEECKDFVDKIGQFQKIVGGLIELVDQLAKEAENEKMKAIGARNLLKSIAKQREAQQQQLQALIAEKKMQLER

SEQ ID NO: 4119 - DNA, 703 bp, Homosapiens
ccggctgtcgctgacccaggagaagctgcctgtctacatcagcctgggctgcagcgcgctgccgccgcggggccggcagccatggccaaggacatcctgggtgaagcagggctacactttgatgaactgaacaagctgagggtgttggacccagaggttacccagcagaccatagagctgaaggaagagtgcaaagactttgtggacaaaattggccagtttcagaaaatagttggtggtttaattgagcttgttgatcaacttgcaaaagaagcagaaaatgaaaagatgaaggtatcgggttgaatatgaagctttgtgtaaagtagaagcagaacaaaatgaatttattgaccaatttatttttcagaaatgaactgaaaatttcgcttttatagtaggaaggcaaaacaaaaaaaagcctctcaaaaccaaaaaaacctctgtagcattccagcggcttgaccaatgacctatgtcacaagaggtggcgtgtaaggaatgcagccccctgaagacagcactacaagtctgggggagccagttttaacatcagtgcacagctgctgctggtggccctgcagtgtacgttctcacctcttatgcttagttggaactaagcagtttgtaaactttcatccttttttttgtaaattcacaaagctttggaaggagaagcaataaatttttgttttcaaatggc

SEQ ID NO: 4120 - protein, 74 aa, Homosapiens
MAKDILGEAGLHFDELNKLRVLDPEVTQQTIELKEECKDFVDKIGQFQKIVGGLIELVDQLAKEAENEKMKVSG

SEQ ID NO: 4121 - DNA, 850 bp, Homosapiens
ctgggtaccggctgtcgctgacccaggagaagctgcctgtctacatcagcctgggctgcagcgcgctgccgccgcggggccggcagagcagaactcctctagggaacctggatgggaaacagccatggccaaggacatcctgggtgaagcagggctacactttgatgaactgaacaagctgagggtgttggacccagaggttacccagcagaccatagagctgaaggaagagtgcaaagactttgtggacaaaattggccagtttcagaaaatagttggtggtttaattgagcttgttgatcaacttgcaaaagaagcagaaaatgaaaagatgaaggccatcggtgctcggaacttgctcaaatctatagcaaagcagagagaagctcaacagcagcaacttcaagccctaatagcagaaaagaaaatgcagctagaaaggtatcgggttgaatatgaagctttgtgtaaagtagaagcagaacaaaatgaatttattgaccaatttatttttcagaaatgaactgaaaatttcgcttttatagtaggaaggcaaaacaaaaaaaagcctctcaaaaccaaaaaaacctctgtagcattccagcggcttgaccaatgacctatgtcacaagaggtggcgtgtaaggaatgcagccccctgaagacagcactacaagtctgggggagccagttttaacatcagtgcacagctgctgctggtggccctgcagtgtacgttctcacctcttatgcttagttggaactaagcagtttgtaaactttcatccttttttttgtaaattcacaaagctttggaaggagaagcaataaatttttgttttcaaatggc

SEQ ID NO: 4122 - protein, 132 aa, Homosapiens
MAKDILGEAGLHFDELNKLRVLDPEVTQQTIELKEECKDFVDKIGQFQKIVGGLIELVDQLAKEAENEKMKAIGARNLLKSIAKQREAQQQQLQALIAEKKMQLERYRVEYEALCKVEAEQNEFIDQFIFQK

SEQ ID NO: 4123 - DNA, 788 bp, Homosapiens
ccgtggcaggctggctgggtaccggctgtcgctgacccaggagaagctgcctgtctacatcagcctgggctgcagcgcgctgccgccgcggggccggcagagcagaactcctctagggaacctggatgggaaacagccatggccaaggacatcctgggtgaagcagggctacactttgatgaactgaacaagctgagggtgttggacccagaggttacccagcagaccatagagctgaaggaagagtgcaaagactttgtggacaaaattggccagtttcagaaaatagttggtggtttaattgagcttgttgatcaacttgcaaaagaagcagaaaatgaaaagatgaaggccatcggtgctcggaacttgctcaaatctatagcaaagcagagagaagctcaacagcagcaacttcaagccctaatagcagaaaagaaaatgcagctagaaagaaatgaactgaaaatttcgcttttatagtaggaaggcaaaacaaaaaaaagcctctcaaaaccaaaaaaacctctgtagcattccagcggcttgaccaatgacctatgtcacaagaggtggcgtgtaaggaatgcagccccctgaagacagcactacaagtctgggggagccagttttaacatcagtgcacagctgctgctggtggccctgcagtgtacgttctcacctcttatgcttagttggaactaagcagtttgtaaactttcatccttttttttgtaaattcacaaagctttggaaggagaagcaataaatttttgttttcaaatggc

SEQ ID NO: 4124 - protein, 114 aa, Homosapiens
MAKDILGEAGLHFDELNKLRVLDPEVTQQTIELKEECKDFVDKIGQFQKIVGGLIELVDQLAKEAENEKMKAIGARNLLKSIAKQREAQQQQLQALIAEKKMQLERNELKISLL

SEQ ID NO: 4125 - DNA, 2447 bp, Homosapiens
atccgtggcagcggccgtggcaggctggctgggtaccggctgtcgctgacccaggagaagctgcctgtctacatcagcctgggctgcagcgcgctgccgccgcggggccggcagccatggccaaggacatcctgggtgaagcagggctacactttgatgaactgaacaagctgagggtgttggacccagaggttacccagcagaccatagagctgaaggaagagtgcaaagactttgtggacaaaattggccagtttcagaaaatagttggtggtttaattgagcttgttgatcaacttgcaaaagaagcagaaaatgaaaagatgaaggtaagatcagcatgtcttccgcctacatcttggcctgggaccctagttcactaccctctcatccctcttccctcttgatttatttagaggggtagagggctgggtgggtgaatttttatttaagattttaataacttctggtccacttaacctactgaacttttgccaatctttatttcctttaatctttattttttttttttttttgagacagagtcttgctgtgtcacccaggctggagtgcactggtgcaatctcggctcactgcaagctctgcctctcagattcaagcgattctcccacctcaccctcccgagtaggtgggactacaggtgtgtgccaccacacccagctgaggtttttgtatttttttttttttttttgagacggagttttctctcgttgcccaggctggagtgcaatggtgcgatcttggctcactgcaacctccgcctcctgggttcaagcgattctcctgcctcagcctcccgagtagctgggattacaggcatgtgccaccatgcctggctaattttgtatttttagtagagacagggtttctccatgttggtcaggctggtctcaaactcccaaccttaggtgatccgcccgcctcagcctcccaaagtgctgggattaaggcgtgagtgactgcgcccggccatttttttgtatttttagtaaagatggggtttcaccatgttggccaggctggttgcaaactcctggcctcaagtgaactgcctaccttggcctcccaaagtgctgggattgcaggtgtgagccaccacacctggcctcgtttcatcttcatatcagcactgatgtagatggtcttatcctcattttataaatgaagaaatgaaggcttacatagtatgattggtgaaaggcacaaggctgaatggcaccaccaaatgtgctattgtgcctgtgtccctggctctaggaatactcctagacctgcctcaaagctgccgtctagttcttgaggcactttgtgatcagtaggttaatccttctgacttaacccaaaagctttggggctccactttcttttcctctctgaagactgacacagctcccagataacccctccccactttgaggacttgatgctgtagatggttttaatgaagccatggccttctctggcaatactgtaggccatcggtgctcggaacttgctcaaatctatagcaaagcagagagaagctcaacagcagcaacttcaagccctaatagcagaaaagaaaatgcagctagaaaggtaagaagtcatgatgtaaagcaagttctttacacagctgaatttccactcttccttctggaatgatcacttcttgtccttattcttcatcattgttttcccaggaatagcatctcacttgtcatcctgatttgaagattttaaaaaataaaattacatttgatgggaaggaaatagaaaacttgttaatatcaaaccacctctagtagtttgagcatgaaagggtccacgaagttggctggctctctgaaagaagactttcctagggctggagatttctcatgggtggctctgggtagggctttgcctctttctttcttcattctgaactcacaccatttcttgaaatcatttaaacctctatatccttctctagaagaattaggtctgtggtttacttcatctttttttcagggcctctaacaattttgtttttcaggtatcgggttgaatatgaagctttgtgtaaagtagaagcagaacaaaatgaatttattgaccaatttatttttcagaaatgaactgaaaatttcgcttttatagtaggaaggcaaaacaaaaaaaagcctctcaaaaccaaaaaaacctctgtagcattccagcggcttgaccaatgacctatgtcacaagaggtggcgtgtaaggaatgcagccccctgaagacagcactacaagtctgggggagccagttttaacatcagtgcacagctgctgctggtggccctgcagtgtacgttctcacctcttatgcttagttggaactaagcagtttgtaaactttcatccttttttttgtaaattcacaaagctttggaaggagaagcaataaatttttgttttcaaatggc

SEQ ID NO: 4126 - protein, 96 aa, Homosapiens
MAKDILGEAGLHFDELNKLRVLDPEVTQQTIELKEECKDFVDKIGQFQKIVGGLIELVDQLAKEAENEKMKVRSACLPPTSWPGTLVHYPLIPLPS

SEQ ID NO: 4127 - DNA, 976 bp, Homosapiens
ggtaaacaggctctgtatccgtggcagcggccgtggcaggctggctgggtaccggctgtcgctgacccaggagaagctgcctgtctacatcagcctgggctgcagcgcgctgccgccgcggggccggcagccatggccaaggacatcctgggtgaagcagggctacactttgatgaactgaacaagctgagggtgttggacccagaggttacccagcagaccatagagctgaaggaagagtgcaaagactttgtggacaaaattggccagtttcagaaaatagttggtggtttaattgagcttgttgatcaacttgcaaaagaagcagaaaatgaaaagatgaagagtcttgctgtgtcacccaggctggagtgcactggtgcaatctcggctcactgcaagctctgcctctcagattcaagcgattctcccacctcaccctcccgagtaggtgggactacaggccatcggtgctcggaacttgctcaaatctatagcaaagcagagagaagctcaacagcagcaacttcaagccctaatagcagaaaagaaaatgcagctagaaaggtatcgggttgaatatgaagctttgtgtaaagtagaagcagaacaaaatgaatttattgaccaatttatttttcagaaatgaactgaaaatttcgcttttatagtaggaaggcaaaacaaaaaaaagcctctcaaaaccaaaaaaacctctgtagcattccagcggcttgaccaatgacctatgtcacaagaggtggcgtgtaaggaatgcagccccctgaagacagcactacaagtctgggggagccagttttaacatcagtgcacagctgctgctggtggccctgcagtgtacgttctcacctcttatgcttagttggaactaagcagtttgtaaactttcatccttttttttgtaaattcacaaagctttggaaggagaagcaataaatttttgttttcaaatggc

SEQ ID NO: 4128 - protein, 148 aa, Homosapiens; identical to SEQ ID NO: 620

SEQ ID NO: 4129 - DNA, 867 bp, Homosapiens
gacgtcataggtaaacaggctctgtatccgtggcagcggccgtggcaggctggctgggtaccggctgtcgctgacccaggagaagctgcctgtctacatcagcctgggctgcagcgcgctgccgccgcggggccggcagccatggccaaggacatcctgggtgaagcagggctacactttgatgaactgaacaagctgagggtgttggacccagaggttacccagcagaccatagagctgaaggaagagtgcaaagactttgtggacaaaattggccagtttcagaaaatagttggtggtttaattgagcttgttgatcaacttgcaaaagaagcagaaaatgaaaagatgaaggccatcggtgctcggaacttgctcaaatctatagcaaagcagagagaagctcaacagcagcaacttcaagccctaatagcagaaaagaaaatgcagctagaaaggtatcgggttgaatatgaagctttgtgtaaagtagaagcagaacaaaatgaatttattgaccaatttatttttcagaaatgaactgaaaatttcgcttttatagtaggaaggcaaaacaaaaaaaagcctctcaaaaccaaaaaaacctctgtagcattccagcggcttgaccaatgacctatgtcacaagaggtggcgtgtaaggaatgcagccccctgaagacagcactacaagtctgggggagccagttttaacatcagtgcacagctgctgctggtggccctgcagtgtacgttctcacctcttatgcttagttggaactaagcagtttgtaaactttcatccttttttttgtaaattcacaaagctttggaaggagaagcaataaatttttgttttcaaatggc

SEQ ID NO: 4130 - protein, 132 aa, Homosapiens; identical to SEQ ID NO: 4122

SEQ ID NO: 4131 - DNA, 1115 bp, Homosapiens
aggaaggtagtgacgtcataggtaaacaggctctgtatccgtggcagcggccgtggcaggctggctgggtaccggctgtcgctgacccaggagaagctgcctgtctacatcagcctgggctgcagcgcgctgccgccgcggggccggcagctgaactatgtgctcttcagggcgggcaccgtgttgcattcatctttgtacccccagcatctagcagtgttggcatgtagtaggcactcaagaaatgtgtgttgaatgaacgatgcctgtgacaagcaagcggactttattctttcctgacccttgctcctatgacacacctcctcctgactgccactgtcactccttcagagcagaactcctctagggaacctggatgggaaacagccatggccaaggacatcctgggtgaagcagggctacactttgatgaactgaacaagctgagggtgttggacccagaggttacccagcagaccatagagctgaaggaagagtgcaaagactttgtggacaaaattggccagtttcagaaaatagttggtggtttaattgagcttgttgatcaacttgcaaaagaagcagaaaatgaaaagatgaaggccatcggtgctcggaacttgctcaaatctatagcaaagcagagagaagctcaacagcagcaacttcaagccctaatagcagaaaagaaaatgcagctagaaaggtatcgggttgaatatgaagctttgtgtaaagtagaagcagaacaaaatgaatttattgaccaatttatttttcagaaatgaactgaaaatttcgcttttatagtaggaaggcaaaacaaaaaaaagcctctcaaaaccaaaaaaacctctgtagcattccagcggcttgaccaatgacctatgtcacaagaggtggcgtgtaaggaatgcagccccctgaagacagcactacaagtctgggggagccagttttaacatcagtgcacagctgctgctggtggccctgcagtgtacgttctcacctcttatgcttagttggaactaagcagtttgtaaactttcatccttttttttgtaaattcacaaagctttggaaggagaagcaataaatttttgttttcaaatggc

SEQ ID NO: 4132 - protein, 158 aa, Homosapiens
MTHLLLTATVTPSEQNSSREPGWETAMAKDILGEAGLHFDELNKLRVLDPEVTQQTIELKEECKDFVDKIGQFQKIVGGLIELVDQLAKEAENEKMKAIGARNLLKSIAKQREAQQQQLQALIAEKKMQLERYRVEYEALCKVEAEQNEFIDQFIFQK

SEQ ID NO: 4133 - DNA, 1554 bp, Homosapiens
aggaaggtagtgacgtcataggtaaacaggctctgtatccgtggcagcggccgtggcaggctggctgggtaccggctgtcgctgacccaggagaagctgcctgtctacatcagcctgggctgcagcgcgctgccgccgcggggccggcagctgaactatgtgctcttcagggcgggcaccgtgttgcattcatctttgtacccccagcatctagcagtgttggcatgtagtaggcactcaagaaatgtgtgttgaatgaacgatgcctgtgacaagcaagcggactttattctttcctgacccttgctcctatgacacacctcctcctgactgccactgtcactccttcagagcagaactcctctagggaacctggatgggaaacagccatggccaaggacatcctgggtgaagcagggctacactttgatgaactgaacaagctgagggtgttggacccagaggttacccagcagaccatagagctgaaggaagagtgcaaagactttgtggacaaaattggccagtttcagaaaatagttggtggtttaattgagcttgttgatcaacttgcaaaagaagcagaaaatgaaaagatgaaggccatcggtgctcggaacttgctcaaatctatagcaaagcagagagaagctcaacagcagcaacttcaagccctaatagcagaaaagaaaatgcagctagaaaggtaagaagtcatgatgtaaagcaagttctttacacagctgaatttccactcttccttctggaatgatcacttcttgtccttattcttcatcattgttttcccaggaatagcatctcacttgtcatcctgatttgaagattttaaaaaataaaattacatttgatgggaaggaaatagaaaacttgttaatatcaaaccacctctagtagtttgagcatgaaagggtccacgaagttggctggctctctgaaagaagactttcctagggctggagatttctcatgggtggctctgggtagggctttgcctctttctttcttcattctgaactcacaccatttcttgaaatcatttaaacctctatatccttctctagaagaattaggtctgtggtttacttcatctttttttcagggcctctaacaattttgtttttcaggtatcgggttgaatatgaagctttgtgtaaagtagaagcagaacaaaatgaatttattgaccaatttatttttcagaaatgaactgaaaatttcgcttttatagtaggaaggcaaaacaaaaaaaagcctctcaaaaccaaaaaaacctctgtagcattccagcggcttgaccaatgacctatgtcacaagaggtggcgtgtaaggaatgcagccccctgaagacagcactacaagtctgggggagccagttttaacatcagtgcacagctgctgctggtggccctgcagtgtacgttctcacctcttatgcttagttggaactaagcagtttgtaaactttcatccttttttttgtaaattcacaaagctttggaaggagaagcaataaatttttgttttcaaatggc

SEQ ID NO: 4134 - protein, 132 aa, Homosapiens
MTHLLLTATVTPSEQNSSREPGWETAMAKDILGEAGLHFDELNKLRVLDPEVTQQTIELKEECKDFVDKIGQFQKIVGGLIELVDQLAKEAENEKMKAIGARNLLKSIAKQREAQQQQLQALIAEKKMQLER

SEQ ID NO: 4135 - DNA, 1450 bp, Homosapiens
aggaaggtagtgacgtcataggtaaacaggctctgtatccgtggcagcggccgtggcaggctggctgggtaccggctgtcgctgacccaggagaagctgcctgtctacatcagcctgggctgcagcgcgctgccgccgcggggccggcagctgaactatgtgctcttcagggcgggcaccgtgttgcattcatctttgtacccccagcatctagcagtgttggcatgtagtaggcactcaagaaatgtgtgttgaatgaacgatgcctgtgacaagcaagcggactttattctttcctgacccttgctcctatgacacacctcctcctgactgccactgtcactccttcagagcagaactcctctagggaacctggatgggaaacagccatggccaaggacatcctgggtgaagcagggctacactttgatgaactgaacaagctgagggtgttggacccagaggttacccagcagaccatagagctgaaggaagagtgcaaagactttgtggacaaaattggccagtttcagaaaatagttggtggtttaattgagcttgttgatcaacttgcaaaagaagcagaaaatgaaaagatgaaggccatcggtgctcggaacttgctcaaatctatagcaaagcagagagaagctcaacagcagcaacttcaagccctaatagcagaaaagaaaatgcagctagaaaggaatagcatctcacttgtcatcctgatttgaagattttaaaaaataaaattacatttgatgggaaggaaatagaaaacttgttaatatcaaaccacctctagtagtttgagcatgaaagggtccacgaagttggctggctctctgaaagaagactttcctagggctggagatttctcatgggtggctctgggtagggctttgcctctttctttcttcattctgaactcacaccatttcttgaaatcatttaaacctctatatccttctctagaagaattaggtctgtggtttacttcatctttttttcagggcctctaacaattttgtttttcaggtatcgggttgaatatgaagctttgtgtaaagtagaagcagaacaaaatgaatttattgaccaatttatttttcagaaatgaactgaaaatttcgcttttatagtaggaaggcaaaacaaaaaaaagcctctcaaaaccaaaaaaacctctgtagcattccagcggcttgaccaatgacctatgtcacaagaggtggcgtgtaaggaatgcagccccctgaagacagcactacaagtctgggggagccagttttaacatcagtgcacagctgctgctggtggccctgcagtgtacgttctcacctcttatgcttagttggaactaagcagtttgtaaactttcatccttttttttgtaaattcacaaagctttggaaggagaagcaataaatttttgttttcaaatggc

SEQ ID NO: 4136 - protein, 141 aa, Homosapiens
MTHLLLTATVTPSEQNSSREPGWETAMAKDILGEAGLHFDELNKLRVLDPEVTQQTIELKEECKDFVDKIGQFQKIVGGLIELVDQLAKEAENEKMKAIGARNLLKSIAKQREAQQQQLQALIAEKKMQLERNSISLVILI

SEQ ID NO: 4137 - DNA, 2720 bp, Homosapiens
aggaaggtagtgacgtcataggtaaacaggctctgtatccgtggcagcggccgtggcaggctggctgggtaccggctgtcgctgacccaggagaagctgcctgtctacatcagcctgggctgcagcgcgctgccgccgcggggccggcagctgaactatgtgctcttcagggcgggcaccgtgttgcattcatctttgtacccccagcatctagcagtgttggcatgtagtaggcactcaagaaatgtgtgttgaatgaacgatgcctgtgacaagcaagcggactttattctttcctgacccttgctcctatgacacacctcctcctgactgccactgtcactccttcagagcagaactcctctagggaacctggatgggaaacagccatggccaaggacatcctgggtgaagcagggctacactttgatgaactgaacaagctgagggtgttggacccagaggttacccagcagaccatagagctgaaggaagagtgcaaagactttgtggacaaaattggccagtttcagaaaatagttggtggtttaattgagcttgttgatcaacttgcaaaagaagcagaaaatgaaaagatgaaggtaagatcagcatgtcttccgcctacatcttggcctgggaccctagttcactaccctctcatccctcttccctcttgatttatttagaggggtagagggctgggtgggtgaatttttatttaagattttaataacttctggtccacttaacctactgaacttttgccaatctttatttcctttaatctttattttttttttttttttgagacagagtcttgctgtgtcacccaggctggagtgcactggtgcaatctcggctcactgcaagctctgcctctcagattcaagcgattctcccacctcaccctcccgagtaggtgggactacaggtgtgtgccaccacacccagctgaggtttttgtatttttttttttttttttgagacggagttttctctcgttgcccaggctggagtgcaatggtgcgatcttggctcactgcaacctccgcctcctgggttcaagcgattctcctgcctcagcctcccgagtagctgggattacaggcatgtgccaccatgcctggctaattttgtatttttagtagagacagggtttctccatgttggtcaggctggtctcaaactcccaaccttaggtgatccgcccgcctcagcctcccaaagtgctgggattaaggcgtgagtgactgcgcccggccatttttttgtatttttagtaaagatggggtttcaccatgttggccaggctggttgcaaactcctggcctcaagtgaactgcctaccttggcctcccaaagtgctgggattgcaggtgtgagccaccacacctggcctcgtttcatcttcatatcagcactgatgtagatggtcttatcctcattttataaatgaagaaatgaaggcttacatagtatgattggtgaaaggcacaaggctgaatggcaccaccaaatgtgctattgtgcctgtgtccctggctctaggaatactcctagacctgcctcaaagctgccgtctagttcttgaggcactttgtgatcagtaggttaatccttctgacttaacccaaaagctttggggctccactttcttttcctctctgaagactgacacagctcccagataacccctccccactttgaggacttgatgctgtagatggttttaatgaagccatggccttctctggcaatactgtaggccatcggtgctcggaacttgctcaaatctatagcaaagcagagagaagctcaacagcagcaacttcaagccctaatagcagaaaagaaaatgcagctagaaaggtaagaagtcatgatgtaaagcaagttctttacacagctgaatttccactcttccttctggaatgatcacttcttgtccttattcttcatcattgttttcccaggaatagcatctcacttgtcatcctgatttgaagattttaaaaaataaaattacatttgatgggaaggaaatagaaaacttgttaatatcaaaccacctctagtagtttgagcatgaaagggtccacgaagttggctggctctctgaaagaagactttcctagggctggagatttctcatgggtggctctgggtagggctttgcctctttctttcttcattctgaactcacaccatttcttgaaatcatttaaacctctatatccttctctagaagaattaggtctgtggtttacttcatctttttttcagggcctctaacaattttgtttttcaggtatcgggttgaatatgaagctttgtgtaaagtagaagcagaacaaaatgaatttattgaccaatttatttttcagaaatgaactgaaaatttcgcttttatagtaggaaggcaaaacaaaaaaaagcctctcaaaaccaaaaaaacctctgtagcattccagcggcttgaccaatgacctatgtcacaagaggtggcgtgtaaggaatgcagccccctgaagacagcactacaagtctgggggagccagttttaacatcagtgcacagctgctgctggtggccctgcagtgtacgttctcacctcttatgcttagttggaactaagcagtttgtaaactttcatccttttttttgtaaattcacaaagctttggaaggagaagcaataaatttttgttttcaaatggc

SEQ ID NO: 4138 - protein, 122 aa, Homosapiens
MTHLLLTATVTPSEQNSSREPGWETAMAKDILGEAGLHFDELNKLRVLDPEVTQQTIELKEECKDFVDKIGQFQKIVGGLIELVDQLAKEAENEKMKVRSACLPPTSWPGTLVHYPLIPLPS

SEQ ID NO: 4139 - DNA, 707 bp, Homosapiens
agcggccgtggcaggctggctgggtaccggctgtcgctgacccaggagaagctgcctgtctacatcagcctgggctgcagcgcgctgccgccgcggggccggcagccatggccaaggacatcctgggtgaagcagggctacactttgatgaactgaacaagctgagggtgttggacccagaggttacccagcagaccatagagctgaaggaagagtgcaaagactttgtggacagtgagtattggggagatacagtgccactcagctttgagctgccatttcaactgtaccccaggctcatcttggccctgccacagtggagctgctggctccctggaggttgaatctggcgtctgtgagttcccacgtgccacccttttctgtctgccctcttgtgctctcatgtgtccccaacagggcaccagtcaaaccaaacaccgggatggggaggggagggtgtctttagatatgccatctttcatttcttgctcttagaaaccttaaactttctgggaacacaaccatggcttgggtgtgggaaatagaattatgtactcatgatttgatttcttcagagaaagtcttctcaggggcaggttctctgttatttggagttagaagtgataggtgaagtttctagaagcagctcaacagacttactgaagtcatcttttggctggaaatcttcaggaagcctcctgtcccag

SEQ ID NO: 4140 - protein, 78 aa, Homosapiens [sequence omitted]

SEQ ID NO: 4141 - DNA, 1872 bp, Homosapiens
gggaaacagaggcccgaggggaggcccggcctacaagacccagaagccttagcgccggcaaggcggccagaagtagctctgctctctccgcgaagaccctcgggggattccgcctccaccctttcccggatagagcgctatgcatgcagggacttgtagtctcaggctccccagccggctgggctgggcagcactccgggcggagtcgacgagcgcaggatgtgagctcacagcttgggactgctgaggggcaggcggctgcaggctaggggcggctcggagtccgctggccacccagctgagaggagaggcgcccccggggacgcactgagattatgaggctctggcctccactggccactcactcgtgaccctttccaccacggcggagccttccaagcctacctcctgccgtgtggtgatctacctgcagcgggagatgtcgggggacacctgcctgtgcccagcctcaggggccaagcccaagctcagtggcttcaagggaggagggttgggcaacaagtatgtccagctcaacgtgggcggctctctgtactacaccactgtgcgggccctgacccgccacgacaccatgctcaaggccatgttcagtgggcgcatggaggtgctgaccgacaaagaaggctggatcctcatagaccgttgtggaaagcactttggcaccattttgaattacctccgagatgacaccatcaccctccctcagaaccggcaagaaatcaaggaattgatggctgaagcaaagtattacctcatccaggggctggtgaatatgtgccagagtgccctgcaggacaagaaggactcctaccagcctgtgtgcaacatccccatcatcacatccctaaaggaggaggagcggctcatcgaatcctccaccaagcccgtggtgaagctgctgtacaacagaagcaacaacaagtattcctacaccagcaactctgacgaccacctgctgaaaaacatcgagctgtttgacaagctctccctgcgcttcaacggccgcgtgctcttcatcaaggatgtcattggtgacgagatctgctgctggtccttttatggccagggccgtaagctggcagaggtgtgctgtacctccatcgtgtatgccacggagaagaagcagaccaaggtggaattcccagaggcccgaatctatgaggagacactcaacgtcctactctatgagactccccgcgtccccgacaactccttgttggaggccacaagccgtagccgcagccaggcttcccccagtgaagatgaggagacctttgaactgcgggaccgtgtccgccgcatccacgtcaagcgctacagcacttacgatgaccggcagctcggccaccagtctacccatcgcgactgaccagaccctcagggagtcagggcacgggaggccctatctcccatcctgtggaacccgccccattggccaccccatgctgctgctgcctgggtctctgctctagcacccagaggcatgacaggccctgctcagaggtcagagggtctgggcagaggagggaccacattcccctgccttgcccctgagcacttctggagactgcgtcctgtcctatctgctcaccatcacccttcctgcccgacggagctgcttctgctccctggggcatatggactgacccacctcctgctgagaaccttcccctaggccctgtgcagaaggctactgccccttaggcctcagctgggggaaaggcagttctggtgctgtagaggccctggtgcagaaagtgggacgtcttttttcctaaggtgtttaagcacaggcttgataagtttggtttttaaaaaataatctaggaaatgaataattctaaatctagt

SEQ ID NO: 4142 - protein, 316 aa, Homosapiens; identical to SEQ ID NO: 622

SEQ ID NO: 4143 - DNA, 3814 bp, Homosapiens
gggaaacagaggcccgaggggaggcccggcctacaagacccagaagccttagcgccggcaaggcggccagaagtagctctgctctctccgcgaagaccctcgggggattccgcctccaccctttcccggatagagcgctatgcatgcagggacttgtagtctcaggctccccagccggctgggctgggcagcactccgggcggagtcgacgagcgcaggatgtgagctcacagcttgggactgctgaggggcaggcggctgcaggctaggggcggctcggagtccgctggccacccagctgagaggagaggcgcccccggggacgcactgagattatgaggctctggcctccactggccactcactcgtgaccctttccaccacggcggagccttccaagcctacctcctgccgtgtggtgatctacctgcagcgggagatgtcgggggacacctgcctgtgcccagcctcaggggccaagcccaagctcagtggcttcaagggaggagggttgggcaacaagtatgtccagctcaacgtgggcggctctctgtactacaccactgtgcgggccctgacccgccacgacaccatgctcaaggccatgttcagtgggcgcatggaggtgctgaccgacaaagaaggctggatcctcatagaccgttgtggaaagcactttggcaccattttgaattacctccgagatgacaccatcaccctccctcagaaccggcaagaaatcaaggaattgatggctgaagcaaagtattacctcatccaggggctggtgaatatgtgccagagtgccctgcaggacaagaaggactcctaccagcctgtgtgcaacatccccatcatcacatccctaaaggaggaggagcggctcatcgaatcctccaccaagcccgtggtgaagctgctgtacaacagaagcaacaacaagtattcctacaccagcaactctgacgaccacctgctgaaaaacatcgagctgtttgacaagctctccctgcgcttcaacggccgcgtgctcttcatcaaggatgtcattggtgacgagatctgctgctggtccttttatggccagggccgtaagctggcagaggtgtgctgtacctccatcgtgtatgccacggagaagaagcagaccaaggtggaattcccagaggcccgaatctatgaggagacactcaacgtcctactctatgagactccccgcgtccccgacaactccttgttggaggccacaagccgtagccgcagccaggcttcccccagtgaagatgaggagacctttgaactgcgggaccgtgtccgccgcatccacgtcaagcgctacagcacttacgatgaccggcagctcggccaccagtctacccatcgcgactgaccagaccctcagggagtcagggcacgggaggccctatctcccatcctgtggaacccgccccattggccaccccatgctgctgctgcctgggtctctgctctagcacccagaggcatgacaggccctgctcagaggtcagagggtctgggcagaggagggaccacattcccctgccttgcccctgagcacttctggagactgcgtcctgtcctatctgctcaccatcacccttcctgcccgacggagctgcttctgctccctggggcatatggactgacccacctcctgctgagaaccttcccctaggccctgtgcagaaggctactgccccttaggcctcagctgggggaaaggcagttctggtgctgtagaggccctggtgcagaaagtgggacgtcttttttcctaaggtgtttaagcacaggcttgataagtttggtttttaaaaaataatctaggaaatgaataattctaaatctagtaatgaggaaactgagcatttcttttgccctccagggtgccaagaccctacatatgacagaacccttggcccttctccatgcctgtgggatctgtttctttaaagcactttgtactgttattcaggaggttgataatctccttgacccatgtctttctaccctaatccccacttccctgcagaatcaatctgagggaggggataaagaggaagcaataaaaaaaaaacatccgacagagcagctctggctttgcagcctggccagcagctcagagtgcaccgaggagggaaggatggctaagctgggaccggcagtcctcacagggtgcctgtgagaaaggacattttacccccacatcatagtcacatcactgactcctaggtctagcacgactgctctttgtgattctcttgagtacccttggcttccagccatgctgtcctcacatacggtaaagccaaagagctgtcacatgggccagaaacatgagccacggcaggaagaccgtggagcccgtgggcactgcatggtgttggctggcatgcccatcagctgaggacagcaaactcccagcagcccctacagaggtggcacatgcttggccacacatctactccctgcccacaccatctatgctcttggttggtgctggctgggatggcggttctgcccagtggtgtctctgagcgcgggatgacaggagcaaccgaagcaccctgaaggccttcactccttgttgggtaactcagccatggagatgccaagcactagccaggaggtgagttcctctttagggctttggttttcattcctttttgtttggcttggccaaaccagaattcagcttatctgaattattttccaaaggaatgctgtcagggagggactgttctgccagcctaacaaagcaacgtagccacgtatagtacccactttctgctctttggagagaacacaggttatcaagttcatctctcttgactactcttatgatagctgatgccacagagcctatgggcaaatgccagacccagggttagacacaaggacctgaagtgacatgacggcgggacaggggaaatgtgactttctaattaggcattttatgttagtcacagtcttgaatgtataaacagcactaagactctcaggtcaggtaccttggtgatcagctactagttcttccagccctcattgaggtaacaagataaagacaaatccacttctttggccaaattcaggctttggctttatgactttcccacagagactggaatgcgtcagcctgagaccactggcctattttctcagctgccctcttgaggtcctttaacactcaaattcccagctccccactgaggtgttgtgatgcttgccttttgacctccccatcccctttagtccctgcttactactttgacattcacatcctcagtgtctcagtcttttttgccgagaaagcacagtagtctgggactgggcatttatcttctctgactgaaaatctctccttggtcttaaggaaaatactaacattgaactcactgacatgatcttagcttctttaatcagactttgtgacttaaaagtttgggggttttctttgaaagtttccagccctattcagaaagcaactcttggctgtgtgcatttttcaactccaagcagcccaggggtaagtaaacaaagtatggatgaaggtcagattttcttgtcagtttctgagaaacctggcagcctgctgttaacaacacaggccagtattgggttttattgaatttggtatgtgaccaaggtcggcctaaaggatggcgcaggtcctgggcaggaaagaatttttcctttatcacataactgtaatatttggttgctcagcataagtgatggaagcaaacactaatttctaataaaattgtgttaaactcaatggtacagagccatg

SEQ ID NO: 4144 - protein, 316 aa, Homosapiens; identical to SEQ ID NO: 622

SEQ ID NO: 4145 - DNA, 1311 bp, Homosapiens
gctgaggggcaggcggctgcaggctaggggcggctcggagtccgctggccacccagctgagaggagaggcgcccccggggacggctggatcctcatagaccgttgtggaaagcactttggcaccattttgaattacctccgagatgacaccatcaccctccctcagaaccggcaagaaatcaaggaattgatggctgaagcaaagtattacctcatccaggggctggtgaatatgtgccagagtgccctgcaggacaagaaggactcctaccagcctgtgtgcaacatccccatcatcacatccctaaaggaggaggagcggctcatcgaatcctccaccaagcccgtggtgaagctgctgtacaacagaagcaacaacaagtattcctacaccagcaactctgacgaccacctgctgaaaaacatcgagctgtttgacaagctctccctgcgcttcaacggccgcgtgctcttcatcaaggatgtcattggtgacgagatctgctgctggtccttttatggccagggccgtaagctggcagaggtgtgctgtacctccatcgtgtatgccacggagaagaagcagaccaaggtggaattcccagaggcccgaatctatgaggagacactcaacgtcctactctatgagactccccgcgtccccgacaactccttgttggaggccacaagccgtagccgcagccaggcttcccccagtgaagatgaggagacctttgaactgcgggaccgtgtccgccgcatccacgtcaagcgctacagcacttacgatgaccggcagctcggccaccagtctacccatcgcgactgaccagaccctcagggagtcagggcacgggaggccctatctcccatcctgtggaacccgccccattggccaccccatgctgctgctgcctgggtctctgctctagcacccagaggcatgacaggccctgctcagaggtcagagggtctgggcagaggagggaccacattcccctgccttgcccctgagcacttctggagactgcgtcctgtcctatctgctcaccatcacccttcctgcccgacggagctgcttctgctccctggggcatatggactgacccacctcctgctgagaaccttcccctaggccctgtgcagaaggctactgccccttaggcctcagctgggggaaaggcagttctggtgctgtagaggccctggtgcagaaagtgggacgtcttttttcctaaggtgtttaagcacaggcttgataagtttggtttttaaaaaataatctaggaaatgaataattctaaatctagt

SEQ ID NO: 4146 - protein, 212 aa, Homosapiens
MAEAKYYLIQGLVNMCQSALQDKKDSYQPVCNIPIITSLKEEERLIESSTKPVVKLLYNRSNNKYSYTSNSDDHLLKNIELFDKLSLRFNGRVLFIKDVIGDEICCWSFYGQGRKLAEVCCTSIVYATEKKQTKVEFPEARIYEETLNVLLYETPRVPDNSLLEATSRSRSQASPSEDEETFELRDRVRRIHVKRYSTYDDRQLGHQSTHRD

SEQ ID NO: 4147 - DNA, 3253 bp, Homosapiens
gctgaggggcaggcggctgcaggctaggggcggctcggagtccgctggccacccagctgagaggagaggcgcccccggggacggctggatcctcatagaccgttgtggaaagcactttggcaccattttgaattacctccgagatgacaccatcaccctccctcagaaccggcaagaaatcaaggaattgatggctgaagcaaagtattacctcatccaggggctggtgaatatgtgccagagtgccctgcaggacaagaaggactcctaccagcctgtgtgcaacatccccatcatcacatccctaaaggaggaggagcggctcatcgaatcctccaccaagcccgtggtgaagctgctgtacaacagaagcaacaacaagtattcctacaccagcaactctgacgaccacctgctgaaaaacatcgagctgtttgacaagctctccctgcgcttcaacggccgcgtgctcttcatcaaggatgtcattggtgacgagatctgctgctggtccttttatggccagggccgtaagctggcagaggtgtgctgtacctccatcgtgtatgccacggagaagaagcagaccaaggtggaattcccagaggcccgaatctatgaggagacactcaacgtcctactctatgagactccccgcgtccccgacaactccttgttggaggccacaagccgtagccgcagccaggcttcccccagtgaagatgaggagacctttgaactgcgggaccgtgtccgccgcatccacgtcaagcgctacagcacttacgatgaccggcagctcggccaccagtctacccatcgcgactgaccagaccctcagggagtcagggcacgggaggccctatctcccatcctgtggaacccgccccattggccaccccatgctgctgctgcctgggtctctgctctagcacccagaggcatgacaggccctgctcagaggtcagagggtctgggcagaggagggaccacattcccctgccttgcccctgagcacttctggagactgcgtcctgtcctatctgctcaccatcacccttcctgcccgacggagctgcttctgctccctggggcatatggactgacccacctcctgctgagaaccttcccctaggccctgtgcagaaggctactgccccttaggcctcagctgggggaaaggcagttctggtgctgtagaggccctggtgcagaaagtgggacgtcttttttcctaaggtgtttaagcacaggcttgataagtttggtttttaaaaaataatctaggaaatgaataattctaaatctagtaatgaggaaactgagcatttcttttgccctccagggtgccaagaccctacatatgacagaacccttggcccttctccatgcctgtgggatctgtttctttaaagcactttgtactgttattcaggaggttgataatctccttgacccatgtctttctaccctaatccccacttccctgcagaatcaatctgagggaggggataaagaggaagcaataaaaaaaaaacatccgacagagcagctctggctttgcagcctggccagcagctcagagtgcaccgaggagggaaggatggctaagctgggaccggcagtcctcacagggtgcctgtgagaaaggacattttacccccacatcatagtcacatcactgactcctaggtctagcacgactgctctttgtgattctcttgagtacccttggcttccagccatgctgtcctcacatacggtaaagccaaagagctgtcacatgggccagaaacatgagccacggcaggaagaccgtggagcccgtgggcactgcatggtgttggctggcatgcccatcagctgaggacagcaaactcccagcagcccctacagaggtggcacatgcttggccacacatctactccctgcccacaccatctatgctcttggttggtgctggctgggatggcggttctgcccagtggtgtctctgagcgcgggatgacaggagcaaccgaagcaccctgaaggccttcactccttgttgggtaactcagccatggagatgccaagcactagccaggaggtgagttcctctttagggctttggttttcattcctttttgtttggcttggccaaaccagaattcagcttatctgaattattttccaaaggaatgctgtcagggagggactgttctgccagcctaacaaagcaacgtagccacgtatagtacccactttctgctctttggagagaacacaggttatcaagttcatctctcttgactactcttatgatagctgatgccacagagcctatgggcaaatgccagacccagggttagacacaaggacctgaagtgacatgacggcgggacaggggaaatgtgactttctaattaggcattttatgttagtcacagtcttgaatgtataaacagcactaagactctcaggtcaggtaccttggtgatcagctactagttcttccagccctcattgaggtaacaagataaagacaaatccacttctttggccaaattcaggctttggctttatgactttcccacagagactggaatgcgtcagcctgagaccactggcctattttctcagctgccctcttgaggtcctttaacactcaaattcccagctccccactgaggtgttgtgatgcttgccttttgacctccccatcccctttagtccctgcttactactttgacattcacatcctcagtgtctcagtcttttttgccgagaaagcacagtagtctgggactgggcatttatcttctctgactgaaaatctctccttggtcttaaggaaaatactaacattgaactcactgacatgatcttagcttctttaatcagactttgtgacttaaaagtttgggggttttctttgaaagtttccagccctattcagaaagcaactcttggctgtgtgcatttttcaactccaagcagcccaggggtaagtaaacaaagtatggatgaaggtcagattttcttgtcagtttctgagaaacctggcagcctgctgttaacaacacaggccagtattgggttttattgaatttggtatgtgaccaaggtcggcctaaaggatggcgcaggtcctgggcaggaaagaatttttcctttatcacataactgtaatatttggttgctcagcataagtgatggaagcaaacactaatttctaataaaattgtgttaaactcaatggtacagagccatg

SEQ ID NO: 4148 - protein, 212 aa, Homosapiens; identical to SEQ ID NO: 4146

SEQ ID NO: 4149 - DNA, 745 bp, Homosapiens
accatgctgcccaggctggtctcgaattcctgagcgcaggcgatcccccaggagtcaagaccagccttggcaacatagcaagaccccatctcttggcatttaatatgtactagctcatttaactcattcagcaattaaactactgagtgcctactatgttaagcagtagggaacaatgaaaaaatattgtctttgccttcaaacagttcaaagaagcatcataacaggaatttttaaaaagagagaaagctagcatttattgtacccctacgtgccaggcattgggtactcagaagagaacacatatagaaagtcatgtccacatggagcttacattctagtggaaggaaacagactagcaacaaggacttaaataaataagcagataattccagaacctgataaatgcaataaagataataaaacagtgatatgagagtgattagggagaggcactaatttagacaaagggacaggaaaagcatctttgggatggtgacatttcagctgaggtttgaagagagcattgtagacagatggaagagtaagtgcaaagttcctgttagaaacaagttttagggggcgggtgtggtggctcacacctgtaatcctagcactttaggaggccgaagtgggtggattgcttgagcccaggagttcaagaccagtctgggcaacatagtgagagtttgtttctacaaataaaaaaaaattagccagatatggtggctcatgcctgtggtcc

SEQ ID NO: 4150 - protein, 33 aa, Homosapiens
PCCPGWSRIPERRRSPRSQDQPWQHSKTPSLGI

SEQ ID NO: 4151 - DNA, 394 bp, Homosapiens
cattttgaattacctccgagatgacaccatcaccctccctcagaaccggcaagaaatcaaggaattgatggctgaagcaaagtattacctattcagaaagcaactcttggctgtgtgcatttttcaactccaagcagcccaggggtaagtaaacaaagtatggatgaaggtcagattttcttgtcagtttctgagaaacctggcagcctgctgttaacaacacaggccagtattgggttttattgaatttggtatgtgaccaaggtcggcctaaaggatggcgcaggtcctgggcaggaaagaatttttcctttatcacataactgtaatatttggttgctcagcataagtgatggaagcaaacactaatttctaataaaattgtgttaaactc

SEQ ID NO: 4152 - protein, 42 aa, Homosapiens
ETWQPAVNNTGQYWVLLNLVCDQGRPKGWRRSWAGKNFSFIT

SEQ ID NO: 4153 - DNA, 411 bp, Homosapiens
cattttgaattacctccgagatgacaccatcaccctccctcagaaccggcaagaaatcaaggaattgatggctgaagcaaagtattacctattcagaaagcaactcttggctgtgtgcatttttcaactccaagcagcccaggggtaagtaaacaaagtatggatgaaggtcagattttcttgtcagtttctgagaaacctggcagcctgctgttaacaacacaggccagtattgggttttattgaatttggtatgtgaccaaggtcggcctaaaggatggcgcaggtcctgggcaggaaagaatttttcctttatcacataactgtaatatttggttgctcagcataagtgatggaagcaaacactaatttctaataaaattgtgttaaactcaatggtacagagccatg

SEQ ID NO: 4154 - protein, 42 aa, Homosapiens; identical to SEQ ID NO: 4152

SEQ ID NO: 4155 - DNA, 4962 bp, Homosapiens
gagggccgggacgccgcgcggggcagtgtgggactggggcggaaccgcccggccgcgggtcgggctctgtgtcagcagccgggcgggcgctcgggcgggacatggcagcctgtacagcccggcggcccctggccgtgggcagccgctggtggtcccggtcgctgactggggcccggtggcaaagccgctctgtgcggcggccggagctggagccttctcgccagcgtcgaccacgacgacgcggaggcacctctcgtcccgaaaccgaccagagggcaaagtgttggagacagttggtgtgtttgaggtgccaaaacagaatggaaaatatgagaccgggcagcttttccttcatagcatttttggctaccgaggtgtcgtcctgtttccctggcaggccagactgtatgaccgggatgtggcttctgcagctccagaaaaagcagagaaccctgctggccatggctccaaggaggtgaaaggcaaaactcacacttactatcaggtgctgattgatgctcgtgactgcccacatatatctcagagatctcagacagaagctgtgaccttcttggctaaccatgatgacagtcgggccctctatgccatcccaggcttggactatgtcagccatgaagacatcctcccctacacctccactgatcaggttcccatccaacatgaactctttgaaagatttcttctgtatgaccagacaaaagcacctccttttgtggctcgggagacgctaagggcctggcaagagaagaatcacccctggctggagctctccgatgttcatcgggaaacaactgagaacatacgtgtcactgtcatccccttctacatgggcatgagggaagcccagaattcccacgtgtactggtggcgctactgtatccgtttggagaaccttgacagtgatgtggtacagctccgggagcggcactggaggatattcagtctctctggcaccttggagacagtgcgaggccgaggggtagtgggcagggaaccagtgttatccaaggagcagcctgcgttccagtatagcagccacgtctcgctgcaggcttccagtgggcacatgtggggcacgttccgctttgaaagacctgatggctcccactttgatgttcggattcctcccttctccctggaaagcaataaagatgagaagacaccaccctcaggccttcactggtaggccagctgaggccccaagtgcccaggcttggtcaccgggaagaacaactctcatcccacaattgctgcagaactcttctctccccatcatgggccacagtgggtctcttaatttgattgtggggttctttttgtggggaggggtggtataacttttcttcagaagacccatgtgggacacctccaaggctggcctcctcataagccctgcctacaccatgttccagtaaacctctccaccaaggaactgtgttcagctgccacaggcctggaggagtttcctggcctgtcacgtgaggtttgatcagtaaaccagtgcacgcttggccacccttgccatttctgctcccagagtctcaggctccccttctgacccagtgtgcgcccttgactgctttctttgctgcccttccagggagctgcccccctggtagggcatgtgcctgtttccctctcagcctggaggctggctggacatctcctagggtcactgtgcctctcagctagttggcgggggtgctggactggactcttgttcactttaccttctgccaaatgcagagagggaggccagtgtcagggtcggagtggcctggctcttagcactgaccgaccattgccatttctggcctcgctaggcccaggagaggagggaggcaagccagtcgggtttcctggagcaatgggtgtgccagccctcagcatgactctgccaagcatccagaccacaaatgcaggaatttggctgaggagcagctttaggtatggattgatgactaagtcaagctacttcctgagcttctctcagatttccaagagccagagatgaattgtgctgcatcttgccccaattcttaggatttcttttcctccgccactgcagtgattgttagaggtagttttcttgaattaatattaaatcacagttccagcccttgttattcttgtccttagtcctccagggggagctggggttgcagggcaacagtacagtcgcgcttacgacctggctagaacacaaggtcagatgataaacagaagcacaggaactcagcccatggccgcaagctggtcaaggcctgctcactgtaaacatggctctgtaccattgagtttaacacaattttattagaaattagtgtttgcttccatcacttatgctgagcaaccaaatattacagttatgtgataaaggaaaaattctttcctgcccaggacctgcgccatcctttaggccgaccttggtcacataccaaattcaataaaacccaatactggcctgtgttgttaacagcaggctgccaggtttctcagaaactgacaagaaaatctgaccttcatccatactttgtttacttacccctgggctgcttggagttgaaaaatgcacacagccaagagttgctttctgaatagggctggaaactttcaaagaaaacccccaaacttttaagtcacaaagtctgattaaagaagctaagatcatgtcagtgagttcaatgttagtattttccttaagaccaaggagagattttcagtcagagaagataaatgcccagtcccagactactgtgctttctcggcaaaaaagactgagacactgaggatgtgaatgtcaaagtagtaagcagggactaaaggggatggggaggtcaaaaggcaagcatcacaacacctcagtggggagctgggaatttgagtgttaaaggacctcaagagggcagctgagaaaataggccagtggtctcaggctgacgcattccagtctctgtgggaaagtcataaagccaaagcctgaatttggccaaagaagtggatttgtctttatcttgttacctcaatgagggctggaagaactagtagctgatcaccaaggtacctgacctgagagtcttagtgctgtttatacattcaagactgtgactaacataaaatgcctaattagaaagtcacatttcccctgtcccgccgtcatgtcacttcaggtccttgtgtctaaccctgggtctggcatttgcccataggctctgtggcatcagctatcataagagtagtcaagagagatgaacttgataacctgtgttctctccaaagagcagaaagtgggtactatacgtggctacgttgctttgttaggctggcagaacagtccctccctgacagcattcctttggaaaataattcagataagctgaattctggtttggccaagccaaacaaaaaggaatgaaaaccaaagccctaaagaggaactcacctcctggctagtgcttggcatctccatggctgagttacccaacaaggagtgaaggccttcagggtgcttcggttgctcctgtcatcccgcgctcagagacaccactgggcagaaccgccatcccagccagcaccaaccaagagcatagatggtgtgggcagggagtagatgtgtggccaagcatgtgccacctctgtaggggctgctgggagtttgctgtcctcagctgatgggcatgccagccaacaccatgcagtgcccacgggctccacggtcttcctgccgtggctcatgtttctggcccatgtgacagctctttggctttaccgtatgtgaggacagcatggctggaagccaagggtactcaagagaatcacaaagagcagtcgtgctagacctaggagtcagtgatgtgactatgatgtgggggtaaaatgtcctttctcacaggcaccctgtgaggactgccggtcccagcttagccatccttccctcctcggtgcactctgagctgctggccaggctgcaaagccagagctgctctgtcggatgttttttttttattgcttcctctttatcccctccctcagattgattctgcagggaagtggggattagggtagaaagacatgggtcaaggagattatcaacctcctgaataacagtacaaagtgctttaaagaaacagatcccacaggcatggagaagggccaagggttctgtcatatgtagggtcttggcaccctggagggcaaaagaaatgctcagtttcctcattactagatttagaattattcatttcctagattattttttaaaaaccaaacttatcaagcctgtgcttaaacaccttaggaaaaaagacgtcccactttctgcaccagggcctctacagcaccagaactgcctttcccccagctgaggcctaaggggcagtagccttctgcacagggcctaggggaaggttctcagcaggaggtgggtcagtccatatgccccagggagcagaagcagctccgtcgggcaggaagggtgatggtgagcagataggacaggacgcagtctccagaagtgctcaggggcaaggcaggggaatgtggtccctcctctgcccagaccctctgacctctgagcagggcctgtcatgcctctgggtgctagagcagagacccaggcagcagcagcatggggtggccaatggggcgggttccacaggatgggagatagggcctcccgtgccctgactccctgagggtctggtcagtcgcgatgggtagactggtggccgagctgccggtcatcgtaagtgctgtagcgcttgacgtggatgcggcggacacggtcccgcagttcaaaggtctcctcatcttcactgggggaagcctggctgcggctacggcttgtggcctccaacaaggagttgtcggggacgcggggagtctcatagagtaggacgttgagtgtctcctcatagattcgggcctctgggaattccacct

SEQ ID NO: 4156 - protein, 125 aa, Homosapiens
MAACTARRPLAVGSRWWSRSLTGARWQSRSVRRPELEPSRQRRPRRRGGTSRPETDQRAKCWRQLVCLRCQNRMENMRPGSFSFIAFLATEVSSCFPGRPDCMTGMWLLQLQKKQRTLLAMAPRR

SEQ ID NO: 4157 - DNA, 1444 bp, Homosapiens
agcacgactgctctttgtgattctcttgagtacccttggcttccagccatgctgtcctcacatacggtaaagccaaagagctgtcacatgggccagaaacatgagccacggcaggaagaccgtggagcccgtgggcactgcatggtgttggctggcatgcccatcagctgaggacagcaaactcccagcagcccctacagaggtggcacatgcttggccacacatctactccctgcccacaccatctatgctcttggttggtgctggctgggatggcggttctgcccagtggtgtctctgagcgcgggatgacaggagcaaccgaagcaccctgaaggccttcactccttgttgggtaactcagccatggagatgccaagcactagccaggaggtgagttcctctttagggctttggttttcattcctttttgtttggcttggccaaaccagaattcagcttatctgaattattttccaaaggaatgctgtcagggagggactgttctgccagcctaacaaagcaacgtagccacgtatagtacccactttctgctctttggagagaacacaggttatcaagttcatctctcttgactactcttatgatagctgatgccacagagcctatgggcaaatgccagacccagggttagacacaaggacctgaagtgacatgacggcgggacaggggaaatgtgactttctaattaggcattttatgttagtcacagtcttgaatgtataaacagcactaagactctcaggtcaggtaccttggtgatcagctactagttcttccagccctcattgaggtaacaagataaagacaaatccacttctttggccaaattcaggctttggctttatgactttcccacagagacctccccatcccctttagtccctgcttactactttgacattcacatcctcagtgtctcagtcttttttgccgagaaagcacagtagtctgggactgggcatttatcttctctgactgaaaatctctccttggtcttaaggaaaatactaacattgaactcactgacatgatcttagcttctttaatcagactttgtgacttaaaagtttgggggttttctttgaaagtttccagccctattcagaaagcaactcttggctgtgtgcatttttcaactccaagcagcccaggggtaagtaaacaaagtatggatgaaggtcagattttcttgtcagtttctgagaaacctggcagcctgctgttaacaacacaggccagtattgggttttattgaatttggtatgtgaccaaggtcggcctaaaggatggcgcaggtcctgggcaggaaagaatttttcctttatcacataactgtaatatttggttgctcagcataagtgatggaagcaaacactaatttctaataaaattgtgttaaactcaatggtacagagccatg

SEQ ID NO: 4158 - protein, 75 aa, Homosapiens [sequence omitted]

SEQ ID NO: 4159 - DNA, 2695 bp, Homosapiens
gagggccgggacgccgcgcggggcagtgtgggactggggcggaaccgcccggccgcgggtcgggctctgtgtcagcagccgggcgggcgctcgggcgggacatggcagcctgtacagcccggcggcccctggccgtgggcagccgctggtggtcccggtcgctgactggggcccggtggcaaagccgctctgtgcggcggccggagctggagccttctcgccagcgtcgaccacgacgacgcggaggcacctctcgtcccgaaaccgaccagagggcaaagtgttggagacagttggtgtgtttgaggtgccaaaacagaatggaaaatatgagaccgggcagcttttccttcatagcatttttggctaccgaggtgtcgtcctgtttccctggcaggccagactgtatgaccgggatgtggcttctgcagctccagaaaaagcagagaaccctgctggccatggctccaaggaggtgaaaggcaaaactcacacttactatcaggtgctgattgatgctcgtgactgcccacatatatctcagagatctcagacagaagctgtgaccttcttggctaaccatgatgacagtcgggccctctatgccatcccaggcttggactatgtcagccatgaagacatcctcccctacacctccactgatcaggttcccatccaacatgaactctttgaaagatttcttctgtatgaccagacaaaagcacctccttttgtggctcgggagacgctaagggcctggcaagagaagaatcacccctggctggagctctccgatgttcatcgggaaacaactgagaacatacgtgtcactgtcatccccttctacatgggcatgagggaagcccagaattcccacgtgtactggtggcgctactgtatccgtttggagaaccttgacagtgatgtggtacagctccgggagcggcactggaggatattcagtctctctggcaccttggagacagtgcgaggccgaggggtagtgggcagggaaccagtgttatccaaggagcagcctgcgttccagtatagcagccacgtctcgctgcaggcttccagtgggcacatgtggggcacgttccgctttgaaagacctgatggctcccactttgatgttcggattcctcccttctccctggaaagcaataaagatgagaagacaccaccctcaggccttcactggtaggccagctgaggccccaagtgcccaggcttggtcaccgggaagaacaactctcatcccacaattgctgcagaactcttctctccccatcatgggccacagtgggtctcttaatttgattgtggggttctttttgtggggaggggtggtataacttttcttcagaagacccatgtgggacacctccaaggctggcctcctcataagccctgcctacaccatgttccagtaaacctctccaccaaggaactgtgttcagctgccacaggcctggaggagtttcctggcctgtcacgtgaggtttgatcagtaaaccagtgcacgcttggccacccttgccatttctgctcccagagtctcaggctccccttctgacccagtgtgcgcccttgactgctttctttgctgcccttccagggagctgcccccctggtagggcatgtgcctgtttccctctcagcctggaggctggctggacatctcctagggtcactgtgcctctcagctagttggcgggggtgctggactggactcttgttcactttaccttctgccaaatgcagagagggaggccagtgtcagggtcggagtggcctggctcttagcactgaccgaccattgccatttctggcctcgctaggcccaggagaggagggaggcaagccagtcgggtttcctggagcaatgggtgtgccagccctcagcatgactctgccaagcatccagaccacaaatgcaggaatttggctgaggagcagctttaggtatggattgatgactaagtcaagctacttcctgagcttctctcagatttccaagagccagagatgaattgtgctgcatcttgccccaattcttaggatttcttttcctccgccactgcagtgattgttagaggtagttttcttgaattaatattaaatcacagttccagcccttgttattcttgtccttagtcctccagggggagctggggttgcagggcaacagtacagtcgcgcttacgacctggctagaacacaaggtcagatgataaacagaagcacaggaactcagcccatggccgcaagctggtcaaggcctgctcactgtaaacatggctctgtaccattgagtttaacacaattttattagaaattagtgtttgcttccatcacttatgctgagcaaccaaatattacagttatgtgataaaggaaaaattctttcctgcccaggacctgcgccatcctttaggccgaccttggtcacataccaaattcaataaaacccaatactggcctgtgttgttaacagcaggctgccaggtttctcagaaactgacaagaaaatctgaccttcatccatactttgtttacttacccctgggctgcttggagttgaaaaatgcacacagccaagagttgctttctgaatagggctggaaactttcaaagaaaacccccaaacttttaagtcacaaagtctgattaaagaagctaagatcatgtc

SEQ ID NO: 4160 - protein, 125 aa, Homosapiens; identical to SEQ ID NO: 4156

SEQ ID NO: 4161 - DNA, 2146 bp, Homosapiens
gagggccgggacgccgcgcggggcagtgtgggactggggcggaaccgcccggccgcgggtcgggctctgtgtcagcagccgggcgggcgctcgggcgggacatggcagcctgtacagcccggcggcccctggccgtgggcagccgctggtggtcccggtcgctgactggggcccggtggcaaagccgctctgtgcggcggccggagctggagccttctcgccagcgtcgaccacgacgacgcggaggcacctctcgtcccgaaaccgaccagagggcaaagtgttggagacagttggtgtgtttgaggtgccaaaacagaatggaaaatatgagaccgggcagcttttccttcatagcatttttggctaccgaggtgtcgtcctgtttccctggcaggccagactgtatgaccgggatgtggcttctgcagctccagaaaaagcagagaaccctgctggccatggctccaaggaggtgaaaggcaaaactcacacttactatcaggtgctgattgatgctcgtgactgcccacatatatctcagagatctcagacagaagctgtgaccttcttggctaaccatgatgacagtcgggccctctatgccatcccaggcttggactatgtcagccatgaagacatcctcccctacacctccactgatcaggttcccatccaacatgaactctttgaaagatttcttctgtatgaccagacaaaagcacctccttttgtggctcgggagacgctaagggcctggcaagagaagaatcacccctggctggagctctccgatgttcatcgggaaacaactgagaacatacgtgtcactgtcatccccttctacatgggcatgagggaagcccagaattcccacgtgtactggtggcgctactgtatccgtttggagaaccttgacagtgatgtggtacagctccgggagcggcactggaggatattcagtctctctggcaccttggagacagtgcgaggccgaggggtagtgggcagggaaccagtgttatccaaggagcagcctgcgttccagtatagcagccacgtctcgctgcaggcttccagtgggcacatgtggggcacgttccgctttgaaagacctgatggctcccactttgatgttcggattcctcccttctccctggaaagcaataaagatgagaagacaccaccctcaggccttcactggtaggccagctgaggccccaagtgcccaggcttggtcaccgggaagaacaactctcatcccacaattgctgcagaactcttctctccccatcatgggccacagtgggtctcttaatttgattgtggggttctttttgtggggaggggtggtataacttttcttcagaagacccatgtgggacacctccaaggctggcctcctcataagccctgcctacaccatgttccagtaaacctctccaccaaggaactgtgttcagctgccacaggcctggaggagtttcctggcctgtcacgtgaggtttgatcagtaaaccagtgcacgcttggccacccttgccatttctgctcccagagtctcaggctccccttctgacccagtgtgcgcccttgactgctttctttgctgcccttccagggagctgcccccctggtagggcatgtgcctgtttccctctcagcctggaggctggctggacatctcctagggtcactgtgcctctcagctagttggcgggggtgctggactggactcttgttcactttaccttctgccaaatgcagagagggaggccagtgtcagggtcggagtggcctggctcttagcactgaccgaccattgccatttctggcctcgctaggcccaggagaggagggaggcaagccagtcgggtttcctggagcaatgggtgtgccagccctcagcatgactctgccaagcatccagaccacaaatgcaggaatttggctgaggagcagctttaggtatggattgatgactaagtcaagctacttcctgagcttctctcagatttccaagagccagagatgaattgtgctgcatcttgccccaattcttaggatttcttttcctccgccactgcagtgattgttagaggtagttttcttgaattaatattaaatcacagttccagcccttgtt

SEQ ID NO: 4162 - protein, 125 aa, Homosapiens; identical to SEQ ID NO: 4156

SEQ ID NO: 4163 - DNA, 672 bp, Homosapiens
ggggcacgttccgctttgaaagacctgatggctcccactttgatgttcggattcctcccttctccctggaaagcaataaagatgagaagacaccaccctcaggccttcactggtaggccagctgaggccccaagtgcccaggcttggtcaccgggaagaacaactctcatcccacaattgctgcagaactcttctctccccatcatgggccacagtgggtctcttaatttgattgtggggttctttttgtggggaggggtggtataacttttcttcagaagacccatgtgggacacctccaaggctggcctcctcataagccctgcctacaccatgttccagtaaacctctccaccaaggaactgtgttcagctgccacaggcctggaggagtttcctggcctgtcacgtgaggtttgatcagtaaaccaccctcagcatgactctgccaagcatccagaccacaaatgcaggaatttggctgaggagcagctttaggtatggattgatgactaagtcaagctacttcctgagcttctctcagatttccaagagccagagatgaattgtgctgcatcttgccccaattcttaggatttcttttcctccgccactgcagtgattgttagaggtagttttcttgaattaatattaaatcacagttccagccctt

SEQ ID NO: 4164 - protein, 79 aa, Homosapiens
MAPTLMFGFLPSPWKAIKMRRHHPQAFTGRPAEAPSAQAWSPGRTTLIPQLLQNSSLPIMGHSGSLNLIVGFFLWGGVV

SEQ ID NO: 4165 - DNA, 899 bp, Homosapiens
gagggccgggacgccgcgcggggcagtgtgggactggggcggaaccgcccggccgcgggtcgggctctgtgtcagcagccgggcgggcgctcgggcgggacatggcagcctgtacagcccggcggcccctggccgtgggcagccgctggtggtcccggtcgctgactggggcccggtggcaaagccgctctgtgcggcggccggagctggagccttctcgccagcgtcgaccacgacgacgcggaggcacctctcgtcccgaaaccgaccagagggcaaagtgttggagacagttggtgtgtttgaggtgccaaaacagaatggaaaatatgagaccgggcagcttttccttcatagcatttttggctaccgaggtgtcgtcctgtttccctggcaggccagactgtatgaccgggatgtggcttctgcagctccagaaaaagcagagaaccctgctggccatggctccaaggaggtgaaaggcaaaactcacacttactatcaggtgctgattgatgctcgtgactgcccacatatatctcagagatctcagacagaagctgtgaccttcttggctaaccatgatgacagtcgggccctctatgccatcccaggcttggactatgtcagccatgaagacatcctcccctacacctccactgatcaggttcccatccaacatgaactctttgaaagatttcttctgtatgaccagacaaaagcacctccttttgtggctcgggagacgctaagggcctggcaagagaagaatcacccctggctggagctctccgatgttcatcgggaaacaactgagaacatacgtgtcactgtcatccccttctacatgggcatgagggggaaccagtgttatccaaggagcagcctgcgttccagta

SEQ ID NO: 4166 - protein, 125 aa, Homosapiens; identical to SEQ ID NO: 4156

SEQ ID NO: 4167 - DNA, 884 bp, Homosapiens
cgggcggaagtccgggttggggtcacctgaccggagagccggctagatatggcgtcctctttgcttgcgggcgagcgattggtgcgtgctttgggccccggcggggagctggagccagagcggctaccccgaaagctgcgggccgagcttgaggccgcgctggggaagaagcacaagggcggtgatagctccagtggcccccaacgcttggtttctttccgtctcatccgggatctgcaccagcatctgagagaaagggattccaaactatacctccatgagctcctagaaggcagtgaaatctatctcccagaggttgtgaagcctccacggaacccagaactagttgcccggctggagaagattaagatacagctggccaatgaggaatataaacggatcacccgcaacgtcacttgtcaggatacaagacatggtgggactctcagcgacctgggaaagcaagtgagatcattgaaggctctggtcatcaccatcttcaatttcattgtcacggtggttgctgccttcgtctgcacttaccttggaagccaatatatcttcacagaaatggcctcgcgggtgctagctgcattgatcgtcgcctctgtggtgggtctggccgagctgtatgtcatggtgcgggcaatggaaggcgagctgggagaactgtaactggtgcttcatcatcaagtctagagaagactttgggggcttcaggctccaattggcagtcaccgactcagtcaacccatcagactttttgtattcagctccagttagtcagaagaccagcccaggccagctgctgtttctgtggggagccctaatcttctgtgaatttccaaagggagcattggaggagattgagataacacatcttt

SEQ ID NO: 4168 - protein, 208 aa, Homosapiens; identical to SEQ ID NO: 626

SEQ ID NO: 4169 - DNA, 1489 bp, Homosapiens
cgggcggaagtccgggttggggtcacctgaccggagagccggctagatatggcgtcctctttgcttgcgggcgagcgattggtgcgtgctttgggccccggcggggagctggagccagagcggctaccccgaaagctgcgggccgagcttgaggccgcgctggggaagaagcacaagggcggtgatagctccagtggcccccaacgcttggtttctttccgtctcatccgggatctgcaccagcatctgagagaaagggattccaaactatacctccatgagctcctagaaggcagtgaaatctatctcccagaggttgtgaagcctccacggaacccagaactagttgcccggctggagaagattaagatacagctggccaatgaggaatataaacggatcacccgcaacgtcacttgtcaggatacaagacatggtgggactctcagcgacctgggaaagcaagtgagatcattgaaggctctggtcatcaccatcttcaatttcattgtcacggtggttgctgccttcgtctgcacttaccttggaagccaatatatcttcacagaaatggcctcgcgggtgctagctgcattgatcgtcgcctctgtggtgggtctggccgagctgtatgtcatggtgcgggcaatggaaggcgagctgggagaactgtaactggtgcttcatcatcaagtctagagaagactttgggggcttcaggctccaattggcagtcaccgactcagtcaacccatcagactttttgtattcagctccagttagtcagaagaccagcccaggccagctgctgtttctgtggggagccctaatcttctgtgaatttccaaagggagcattggaggagattgagataacacatctttaaaacagaaagaactggtcttggtctatcagtacctcttcctgaatctggtacccatctgccttctccagttcattctaaacactgctgggactagggtttttccatcaggagcaaatggaatccaggccttcccagaagtagaccatactgccttgaacttgtccatatgtacaaactgatcaccagctttctccatacatttttaatgcagacctgtaattgagttcagaagcctccaagaaaacagaaaggatcccctttctccagtttgtgctggaagaggagctgatcagagacatcaaataagagaaagatgggttgctagaggatggtagaactggaagcaaggcagctacctttttgcaaaaggaaatggtgttaggccccttttccagaagataagacagactcatagagattaaatgatcactatggtccttcttctgttaaatggagccaaagacgcctatgttgttctgaagtcttgtaatgtttaacttctgagaacttagattagtggtgtgatgatagagtctgtataacgcattgaaaagggtatcaggcttagttatttatccaataaatatttattgtatgcagggt

SEQ ID NO: 4170 - protein, 208 aa, Homosapiens; identical to SEQ ID NO: 626

SEQ ID NO: 4171 - DNA, 1681 bp, Homosapiens
cgggcggaagtccgggttggggtcacctgaccggagagccggctagatatggcgtcctctttgcttgcgggcgagcgattggtgcgtgctttgggccccggcggggagctggagccagagcggctaccccgaaagctgcgggccgagcttgaggccgcgctggggaagaagcacaagggcggtgatagctccagtggcccccaacgcttggtttctttccgtctcatccgggatctgcaccagcatctgagagaaagggattccaaactatacctccatgagctcctagaaggcagtgaaatctatctcccagaggttgtgaagcctccacggaacccagaactagttgcccggctggagaagattaagatacagctggccaatgaggaatataaacggatcacccgcaacgtcacttgtcaggatacaagacatggtgggactctcagcgacctgggaaagcaagtgagatcattgaaggctctggtcatcaccatcttcaatttcattgtcacggtggttgctgccttcgtctgcacttaccttggaagccaatatatcttcacagaaatggcctcgcgggtgctagctgcattgatcgtcgcctctgtggtgggtctggccgagctgtatgtcatggtgcgggcaatggaaggcgagctgggagaactgtaactggtgcttcatcatcaagtctagagaagactttgggggcttcaggctccaattggcagtcaccgactcagtcaacccatcagactttttgtattcagctccagttagtcagaagaccagcccaggccagctgctgtttctgtggggagccctaatcttctgtgaatttccaaagggagcattggaggagattgagataacacatctttaaaacagaaagaactggtcttggtctatcagtacctcttcctgaatctggtacccatctgccttctccagttcattctaaacactgctgggactagggtttttccatcaggagcaaatggaatccaggccttcccagaagtagaccatactgccttgaacttgtccatatgtacaaactgatcaccagctttctccatacatttttaatgcagacctgtaattgagttcagaagcctccaagaaaacagaaaggatcccctttctccagtttgtgctggaagaggagctgatcagagacatcaaataagagaaagatgggttgctagaggatggtagaactggaagcaaggcagctacctttttgcaaaaggaaatggtgttaggccccttttccagaagataagacagactcatagagattaaatgatcactatggtccttcttctgttaaatggagccaaagacgcctatgttgttctgaagtcttgtaatgtttaacttctgagaacttagattagtggtgtgatgatagagtctgtataacgcattgaaaagggtatcaggcttagttatttatccaataaatatttattgtatgcagggtattcctattttaactcctgtgacaacacaaagcatagcgatttccatagttctaactgttcagggtctgctcctcctggtacactctttttggttcactgtatgtactcctgttgtctttttttttttttccaaagcacttttctgttttcataaattatatactcattcactcagtggacacttcctctac

SEQ ID NO: 4172 - protein, 208 aa, Homosapiens; identical to SEQ ID NO: 626

SEQ ID NO: 4173 - DNA, 3106 bp, Homosapiens
cgggcggaagtccgggttggggtcacctgaccggagagccggctagatatggcgtcctctttgcttgcgggcgagcgattggtgcgtgctttgggccccggcggggagctggagccagagcggctaccccgaaagctgcgggccgagcttgaggccgcgctggggaagaagcacaagggcggtgatagctccagtggcccccaacgcttggtttctttccgtctcatccgggatctgcaccagcatctgagagaaagggattccaaactatacctccatgagctcctagaaggcagtgaaatctatctcccagaggttgtgaagcctccacggaacccagaactagttgcccggctggagaagattaagatacagctggccaatgaggaatataaacggatcacccgcaacgtcacttgtcaggatacaagacatggtgggactctcagcgacctgggaaagcaagtgagatcattgaaggctctggtcatcaccatcttcaatttcattgtcacggtggttgctgccttcgtctgcacttaccttggaagccaatatatcttcacagaaatggcctcgcgggtgctagctgcattgatcgtcgcctctgtggtgggtctggccgagctgtatgtcatggtgcgggcaatggaaggcgagctgggagaactgtaactggtgcttcatcatcaagtctagagaagactttgggggcttcaggctccaattggcagtcaccgactcagtcaacccatcagactttttgtattcagctccagttagtcagaagaccagcccaggccagctgctgtttctgtggggagccctaatcttctgtgaatttccaaagggagcattggaggagattgagataacacatctttaaaacagaaagaactggtcttggtctatcagtacctcttcctgaatctggtacccatctgccttctccagttcattctaaacactgctgggactagggtttttccatcaggagcaaatggaatccaggccttcccagaagtagaccatactgccttgaacttgtccatatgtacaaactgatcaccagctttctccatacatttttaatgcagacctgtaattgagttcagaagcctccaagaaaacagaaaggatcccctttctccagtttgtgctggaagaggagctgatcagagacatcaaataagagaaagatgggttgctagaggatggtagaactggaagcaaggcagctacctttttgcaaaaggaaatggtgttaggccccttttccagaagataagacagactcatagagattaaatgatcactatggtccttcttctgttaaatggagccaaagacgcctatgttgttctgaagtcttgtaatgtttaacttctgagaacttagattagtggtgtgatgatagagtctgtataacgcattgaaaagggtatcaggcttagttatttatccaataaatatttattgtatgcagggtattcctattttaactcctgtgacaacacaaagcatagcgatttccatagttctaactgttcagggtctgctcctcctggtacactctttttggttcactgtatgtactcctgttgtctttttttttttttccaaagcacttttctgttttcataaattatatactcattcactcagtggacacttcctctacaatgtttgccagtttctgttagttgggagaagtgtcagctgtgaaaagaaaaagtaggtggcattttacagtgtttccagtaacctgagctatataaaatttgtgttaaaaagctacactgggccaggtgaggtggctcacacctgtaatcgtagcattttgggaggctgaggcaggcggatcacttgaggttgggagtttaagaccagcatggccaatatagcgaaaccccatctttactaaaaatacaaaaaaattagccaggcgtggtggtacatgcctgtaatcccagcactttgggagaccaaggtgggaggatgcttgagttcaggagtttgagaccagcctgggcaacatggcaaaagcccatctctacaaaaaaacgcagaaattagctgacatggtagcgcacgcctgtagtcccagctactcaggaggctaaggtgggaggatcacttgagcctgggaggcagaggttgcagtaagctgagtaagccaagatcatgctattgcactctagcctggatgacagagtgagaccttgtctcaatgaaaaagcagggggcactgggaggggagaaccaaatgccctatcctccagttctcagcatatagaagggagctctctcatctgctagccactcctgcctcactgtgccatgctttctgtaatgcactctgggtccagggactgcttggcaggaggtgggaagaacaagaagtttagggccttcccagtttcttagggcctgtctggagagggaactagcgtttactgagtttttacgatgtgttacacaccatgtaaagccctttacctacattatttcttataccccaaacagagagcaaataagtatccccattttttagtcacatagagttccagagttgccacagttacatcgcaaagtcaggatttgaatccagtgcagaccgcaaacaccatggttttctctccaaagcagagcagctccagaggtggaggtgactggaatgtcctagattcagtgggaccaggagctgggggtgctagcagaggctctcatctccccagggtcttgtcagtcagagtcctaaacccttcaattaactatccctctaatcccagctgaagcctgggtaatacctcccaccaagaggtatctgtgtggaacctggccctatttagggattaggtgatggagataaatttccatggcaaacggccctcgtccccgttcgtttgcagagcacaacaatccagattaaggtacagagtttgggttttatttggagattagttggtattacaggtgatggtgataccaaaacccaatgctgctatacctgcctccatcccagatctgtcaggttgtctccacagccccacatcagagggcatccaatctgatctttgtgaaaattaaatcaacataagcccca

SEQ ID NO: 4174 - protein, 208 aa, Homosapiens; identical to SEQ ID NO: 626

SEQ ID NO: 4175 - DNA, 1015 bp, Homosapiens
ggagagccggctagatatggcgtcctctttgcttgcgggcgagcgattggtgcgtgctttgggccccggcggggagctggagccagagcggctaccccgaaagctgcgggccgagcttgaggccgcgctggggaagaagcacaagggcggtgatagctccagtggcccccaacgcttggtttctttccgtctcatccgggatctgcaccagcatctgagagaaagggattccaaactatacctccatgagctcctagaaggcagtgaaatctatctcccagaggttgtgaagcctccacggaacccagaactagttgcccggctggagaagattaagatacagctggccaatgaggaatataaacggatcacccgcaacgtcacttgtcaggatacaagacatggtgggactctcagcgacctgggaaagcaaggtgaggtactaggagatcaggcttctaaaaccttttcctgagatgggtcatgacactcaggcttgttgtttgactgaaacccagttggtgggggagccatgagataagagcacctcctagagaatgttgaactaaaggtgccctctctggctcctccccaaagtgagatcattgaaggctctggtcatcaccatcttcaatttcattgtcacggtggttgctgccttcgtctgcacttaccttggaagccaatatatcttcacagaaatggcctcgcgggtgctagctgcattgatcgtcgcctctgtggtgggtctggccgagctgtatgtcatggtgcgggcaatggaaggcgagctgggagaactgtaactggtgcttcatcatcaagtctagagaagactttgggggcttcaggctccaattggcagtcaccgactcagtcaacccatcagactttttgtattcagctccagttagtcagaagaccagcccaggccagctgctgtttctgtggggagccctaatcttctgtgaatttccaaagggagcattggaggagattgagataacacatcttt

SEQ ID NO: 4176 - protein, 152 aa, Homosapiens
MASSLLAGERLVRALGPGGELEPERLPRKLRAELEAALGKKHKGGDSSSGPQRLVSFRLIRDLHQHLRERDSKLYLHELLEGSEIYLPEVVKPPRNPELVARLEKIKIQLANEEYKRITRNVTCQDTRHGGTLSDLGKQGEVLGDQASKTFS

SEQ ID NO: 4177 - DNA, 1620 bp, Homosapiens
ggagagccggctagatatggcgtcctctttgcttgcgggcgagcgattggtgcgtgctttgggccccggcggggagctggagccagagcggctaccccgaaagctgcgggccgagcttgaggccgcgctggggaagaagcacaagggcggtgatagctccagtggcccccaacgcttggtttctttccgtctcatccgggatctgcaccagcatctgagagaaagggattccaaactatacctccatgagctcctagaaggcagtgaaatctatctcccagaggttgtgaagcctccacggaacccagaactagttgcccggctggagaagattaagatacagctggccaatgaggaatataaacggatcacccgcaacgtcacttgtcaggatacaagacatggtgggactctcagcgacctgggaaagcaaggtgaggtactaggagatcaggcttctaaaaccttttcctgagatgggtcatgacactcaggcttgttgtttgactgaaacccagttggtgggggagccatgagataagagcacctcctagagaatgttgaactaaaggtgccctctctggctcctccccaaagtgagatcattgaaggctctggtcatcaccatcttcaatttcattgtcacggtggttgctgccttcgtctgcacttaccttggaagccaatatatcttcacagaaatggcctcgcgggtgctagctgcattgatcgtcgcctctgtggtgggtctggccgagctgtatgtcatggtgcgggcaatggaaggcgagctgggagaactgtaactggtgcttcatcatcaagtctagagaagactttgggggcttcaggctccaattggcagtcaccgactcagtcaacccatcagactttttgtattcagctccagttagtcagaagaccagcccaggccagctgctgtttctgtggggagccctaatcttctgtgaatttccaaagggagcattggaggagattgagataacacatctttaaaacagaaagaactggtcttggtctatcagtacctcttcctgaatctggtacccatctgccttctccagttcattctaaacactgctgggactagggtttttccatcaggagcaaatggaatccaggccttcccagaagtagaccatactgccttgaacttgtccatatgtacaaactgatcaccagctttctccatacatttttaatgcagacctgtaattgagttcagaagcctccaagaaaacagaaaggatcccctttctccagtttgtgctggaagaggagctgatcagagacatcaaataagagaaagatgggttgctagaggatggtagaactggaagcaaggcagctacctttttgcaaaaggaaatggtgttaggccccttttccagaagataagacagactcatagagattaaatgatcactatggtccttcttctgttaaatggagccaaagacgcctatgttgttctgaagtcttgtaatgtttaacttctgagaacttagattagtggtgtgatgatagagtctgtataacgcattgaaaagggtatcaggcttagttatttatccaataaatatttattgtatgcagggt

SEQ ID NO: 4178 - protein, 152 aa, Homosapiens; identical to SEQ ID NO: 4176

SEQ ID NO: 4179 - DNA, 1812 bp, Homosapiens
ggagagccggctagatatggcgtcctctttgcttgcgggcgagcgattggtgcgtgctttgggccccggcggggagctggagccagagcggctaccccgaaagctgcgggccgagcttgaggccgcgctggggaagaagcacaagggcggtgatagctccagtggcccccaacgcttggtttctttccgtctcatccgggatctgcaccagcatctgagagaaagggattccaaactatacctccatgagctcctagaaggcagtgaaatctatctcccagaggttgtgaagcctccacggaacccagaactagttgcccggctggagaagattaagatacagctggccaatgaggaatataaacggatcacccgcaacgtcacttgtcaggatacaagacatggtgggactctcagcgacctgggaaagcaaggtgaggtactaggagatcaggcttctaaaaccttttcctgagatgggtcatgacactcaggcttgttgtttgactgaaacccagttggtgggggagccatgagataagagcacctcctagagaatgttgaactaaaggtgccctctctggctcctccccaaagtgagatcattgaaggctctggtcatcaccatcttcaatttcattgtcacggtggttgctgccttcgtctgcacttaccttggaagccaatatatcttcacagaaatggcctcgcgggtgctagctgcattgatcgtcgcctctgtggtgggtctggccgagctgtatgtcatggtgcgggcaatggaaggcgagctgggagaactgtaactggtgcttcatcatcaagtctagagaagactttgggggcttcaggctccaattggcagtcaccgactcagtcaacccatcagactttttgtattcagctccagttagtcagaagaccagcccaggccagctgctgtttctgtggggagccctaatcttctgtgaatttccaaagggagcattggaggagattgagataacacatctttaaaacagaaagaactggtcttggtctatcagtacctcttcctgaatctggtacccatctgccttctccagttcattctaaacactgctgggactagggtttttccatcaggagcaaatggaatccaggccttcccagaagtagaccatactgccttgaacttgtccatatgtacaaactgatcaccagctttctccatacatttttaatgcagacctgtaattgagttcagaagcctccaagaaaacagaaaggatcccctttctccagtttgtgctggaagaggagctgatcagagacatcaaataagagaaagatgggttgctagaggatggtagaactggaagcaaggcagctacctttttgcaaaaggaaatggtgttaggccccttttccagaagataagacagactcatagagattaaatgatcactatggtccttcttctgttaaatggagccaaagacgcctatgttgttctgaagtcttgtaatgtttaacttctgagaacttagattagtggtgtgatgatagagtctgtataacgcattgaaaagggtatcaggcttagttatttatccaataaatatttattgtatgcagggtattcctattttaactcctgtgacaacacaaagcatagcgatttccatagttctaactgttcagggtctgctcctcctggtacactctttttggttcactgtatgtactcctgttgtctttttttttttttccaaagcacttttctgttttcataaattatatactcattcactcagtggacacttcctctac

SEQ ID NO: 4180 - protein, 152 aa, Homosapiens; identical to SEQ ID NO: 4176

SEQ ID NO: 4181 - DNA, 3237 bp, Homosapiens
ggagagccggctagatatggcgtcctctttgcttgcgggcgagcgattggtgcgtgctttgggccccggcggggagctggagccagagcggctaccccgaaagctgcgggccgagcttgaggccgcgctggggaagaagcacaagggcggtgatagctccagtggcccccaacgcttggtttctttccgtctcatccgggatctgcaccagcatctgagagaaagggattccaaactatacctccatgagctcctagaaggcagtgaaatctatctcccagaggttgtgaagcctccacggaacccagaactagttgcccggctggagaagattaagatacagctggccaatgaggaatataaacggatcacccgcaacgtcacttgtcaggatacaagacatggtgggactctcagcgacctgggaaagcaaggtgaggtactaggagatcaggcttctaaaaccttttcctgagatgggtcatgacactcaggcttgttgtttgactgaaacccagttggtgggggagccatgagataagagcacctcctagagaatgttgaactaaaggtgccctctctggctcctccccaaagtgagatcattgaaggctctggtcatcaccatcttcaatttcattgtcacggtggttgctgccttcgtctgcacttaccttggaagccaatatatcttcacagaaatggcctcgcgggtgctagctgcattgatcgtcgcctctgtggtgggtctggccgagctgtatgtcatggtgcgggcaatggaaggcgagctgggagaactgtaactggtgcttcatcatcaagtctagagaagactttgggggcttcaggctccaattggcagtcaccgactcagtcaacccatcagactttttgtattcagctccagttagtcagaagaccagcccaggccagctgctgtttctgtggggagccctaatcttctgtgaatttccaaagggagcattggaggagattgagataacacatctttaaaacagaaagaactggtcttggtctatcagtacctcttcctgaatctggtacccatctgccttctccagttcattctaaacactgctgggactagggtttttccatcaggagcaaatggaatccaggccttcccagaagtagaccatactgccttgaacttgtccatatgtacaaactgatcaccagctttctccatacatttttaatgcagacctgtaattgagttcagaagcctccaagaaaacagaaaggatcccctttctccagtttgtgctggaagaggagctgatcagagacatcaaataagagaaagatgggttgctagaggatggtagaactggaagcaaggcagctacctttttgcaaaaggaaatggtgttaggccccttttccagaagataagacagactcatagagattaaatgatcactatggtccttcttctgttaaatggagccaaagacgcctatgttgttctgaagtcttgtaatgtttaacttctgagaacttagattagtggtgtgatgatagagtctgtataacgcattgaaaagggtatcaggcttagttatttatccaataaatatttattgtatgcagggtattcctattttaactcctgtgacaacacaaagcatagcgatttccatagttctaactgttcagggtctgctcctcctggtacactctttttggttcactgtatgtactcctgttgtctttttttttttttccaaagcacttttctgttttcataaattatatactcattcactcagtggacacttcctctacaatgtttgccagtttctgttagttgggagaagtgtcagctgtgaaaagaaaaagtaggtggcattttacagtgtttccagtaacctgagctatataaaatttgtgttaaaaagctacactgggccaggtgaggtggctcacacctgtaatcgtagcattttgggaggctgaggcaggcggatcacttgaggttgggagtttaagaccagcatggccaatatagcgaaaccccatctttactaaaaatacaaaaaaattagccaggcgtggtggtacatgcctgtaatcccagcactttgggagaccaaggtgggaggatgcttgagttcaggagtttgagaccagcctgggcaacatggcaaaagcccatctctacaaaaaaacgcagaaattagctgacatggtagcgcacgcctgtagtcccagctactcaggaggctaaggtgggaggatcacttgagcctgggaggcagaggttgcagtaagctgagtaagccaagatcatgctattgcactctagcctggatgacagagtgagaccttgtctcaatgaaaaagcagggggcactgggaggggagaaccaaatgccctatcctccagttctcagcatatagaagggagctctctcatctgctagccactcctgcctcactgtgccatgctttctgtaatgcactctgggtccagggactgcttggcaggaggtgggaagaacaagaagtttagggccttcccagtttcttagggcctgtctggagagggaactagcgtttactgagtttttacgatgtgttacacaccatgtaaagccctttacctacattatttcttataccccaaacagagagcaaataagtatccccattttttagtcacatagagttccagagttgccacagttacatcgcaaagtcaggatttgaatccagtgcagaccgcaaacaccatggttttctctccaaagcagagcagctccagaggtggaggtgactggaatgtcctagattcagtgggaccaggagctgggggtgctagcagaggctctcatctccccagggtcttgtcagtcagagtcctaaacccttcaattaactatccctctaatcccagctgaagcctgggtaatacctcccaccaagaggtatctgtgtggaacctggccctatttagggattaggtgatggagataaatttccatggcaaacggccctcgtccccgttcgtttgcagagcacaacaatccagattaaggtacagagtttgggttttatttggagattagttggtattacaggtgatggtgataccaaaacccaatgctgctatacctgcctccatcccagatctgtcaggttgtctccacagccccacatcagagggcatccaatctgatctttgtgaaaattaaatcaacataagcccca

SEQ ID NO: 4182 - protein, 152 aa, Homosapiens; identical to SEQ ID NO: 4176

SEQ ID NO: 4183 - DNA, 955 bp, Homosapiens
tagatatggcgtcctctttgcttgcgggcgagcgattggtgcgtgctttgggccccggcggggagctggagccagagcggctaccccgaaagctgcgggccgagcttgaggccgcgctggggaagaagcacaagggcggtgatagctccagtggcccccaacgcttggtttctttccgtctcatccgggatctgcaccagcatctgagagaaagggattccaaactatacctccatgagctccagttagtcagaagaccagcccaggccagctgctgtttctgtggggagccctaatcttctgtgaatttccaaagggagcattggaggagattgagataacacatctttaaaacagaaagaactggtcttggtctatcagtacctcttcctgaatctggtacccatctgccttctccagttcattctaaacactgctgggactagggtttttccatcaggagcaaatggaatccaggccttcccagaagtagaccatactgccttgaacttgtccatatgtacaaactgatcaccagctttctccatacatttttaatgcagacctgtaattgagttcagaagcctccaagaaaacagaaaggatcccctttctccagtttgtgctggaagaggagctgatcagagacatcaaataagagaaagatgggttgctagaggatggtagaactggaagcaaggcagctacctttttgcaaaaggaaatggtgttaggccccttttccagaagataagacagactcatagagattaaatgatcactatggtccttcttctgttaaatggagccaaagacgcctatgttgttctgaagtcttgtaatgtttaacttctgagaacttagattagtggtgtgatgatagagtctgtataacgcattgaaaagggtatcaggcttagttatttatccaataaatatttattgtatgcagggt

SEQ ID NO: 4184 - protein, 96 aa, Homosapiens
MASSLLAGERLVRALGPGGELEPERLPRKLRAELEAALGKKHKGGDSSSGPQRLVSFRLIRDLHQHLRERDSKLYLHELQLVRRPAQASCCFCGEP

SEQ ID NO: 4185 - DNA, 1147 bp, Homosapiens
tagatatggcgtcctctttgcttgcgggcgagcgattggtgcgtgctttgggccccggcggggagctggagccagagcggctaccccgaaagctgcgggccgagcttgaggccgcgctggggaagaagcacaagggcggtgatagctccagtggcccccaacgcttggtttctttccgtctcatccgggatctgcaccagcatctgagagaaagggattccaaactatacctccatgagctccagttagtcagaagaccagcccaggccagctgctgtttctgtggggagccctaatcttctgtgaatttccaaagggagcattggaggagattgagataacacatctttaaaacagaaagaactggtcttggtctatcagtacctcttcctgaatctggtacccatctgccttctccagttcattctaaacactgctgggactagggtttttccatcaggagcaaatggaatccaggccttcccagaagtagaccatactgccttgaacttgtccatatgtacaaactgatcaccagctttctccatacatttttaatgcagacctgtaattgagttcagaagcctccaagaaaacagaaaggatcccctttctccagtttgtgctggaagaggagctgatcagagacatcaaataagagaaagatgggttgctagaggatggtagaactggaagcaaggcagctacctttttgcaaaaggaaatggtgttaggccccttttccagaagataagacagactcatagagattaaatgatcactatggtccttcttctgttaaatggagccaaagacgcctatgttgttctgaagtcttgtaatgtttaacttctgagaacttagattagtggtgtgatgatagagtctgtataacgcattgaaaagggtatcaggcttagttatttatccaataaatatttattgtatgcagggtattcctattttaactcctgtgacaacacaaagcatagcgatttccatagttctaactgttcagggtctgctcctcctggtacactctttttggttcactgtatgtactcctgttgtctttttttttttttccaaagcacttttctgttttcataaattatatactcattcactcagtggacacttcctctac

SEQ ID NO: 4186 - protein, 96 aa, Homosapiens; identical to SEQ ID NO: 4184

SEQ ID NO: 4187 - DNA, 2572 bp, Homosapiens
tagatatggcgtcctctttgcttgcgggcgagcgattggtgcgtgctttgggccccggcggggagctggagccagagcggctaccccgaaagctgcgggccgagcttgaggccgcgctggggaagaagcacaagggcggtgatagctccagtggcccccaacgcttggtttctttccgtctcatccgggatctgcaccagcatctgagagaaagggattccaaactatacctccatgagctccagttagtcagaagaccagcccaggccagctgctgtttctgtggggagccctaatcttctgtgaatttccaaagggagcattggaggagattgagataacacatctttaaaacagaaagaactggtcttggtctatcagtacctcttcctgaatctggtacccatctgccttctccagttcattctaaacactgctgggactagggtttttccatcaggagcaaatggaatccaggccttcccagaagtagaccatactgccttgaacttgtccatatgtacaaactgatcaccagctttctccatacatttttaatgcagacctgtaattgagttcagaagcctccaagaaaacagaaaggatcccctttctccagtttgtgctggaagaggagctgatcagagacatcaaataagagaaagatgggttgctagaggatggtagaactggaagcaaggcagctacctttttgcaaaaggaaatggtgttaggccccttttccagaagataagacagactcatagagattaaatgatcactatggtccttcttctgttaaatggagccaaagacgcctatgttgttctgaagtcttgtaatgtttaacttctgagaacttagattagtggtgtgatgatagagtctgtataacgcattgaaaagggtatcaggcttagttatttatccaataaatatttattgtatgcagggtattcctattttaactcctgtgacaacacaaagcatagcgatttccatagttctaactgttcagggtctgctcctcctggtacactctttttggttcactgtatgtactcctgttgtctttttttttttttccaaagcacttttctgttttcataaattatatactcattcactcagtggacacttcctctacaatgtttgccagtttctgttagttgggagaagtgtcagctgtgaaaagaaaaagtaggtggcattttacagtgtttccagtaacctgagctatataaaatttgtgttaaaaagctacactgggccaggtgaggtggctcacacctgtaatcgtagcattttgggaggctgaggcaggcggatcacttgaggttgggagtttaagaccagcatggccaatatagcgaaaccccatctttactaaaaatacaaaaaaattagccaggcgtggtggtacatgcctgtaatcccagcactttgggagaccaaggtgggaggatgcttgagttcaggagtttgagaccagcctgggcaacatggcaaaagcccatctctacaaaaaaacgcagaaattagctgacatggtagcgcacgcctgtagtcccagctactcaggaggctaaggtgggaggatcacttgagcctgggaggcagaggttgcagtaagctgagtaagccaagatcatgctattgcactctagcctggatgacagagtgagaccttgtctcaatgaaaaagcagggggcactgggaggggagaaccaaatgccctatcctccagttctcagcatatagaagggagctctctcatctgctagccactcctgcctcactgtgccatgctttctgtaatgcactctgggtccagggactgcttggcaggaggtgggaagaacaagaagtttagggccttcccagtttcttagggcctgtctggagagggaactagcgtttactgagtttttacgatgtgttacacaccatgtaaagccctttacctacattatttcttataccccaaacagagagcaaataagtatccccattttttagtcacatagagttccagagttgccacagttacatcgcaaagtcaggatttgaatccagtgcagaccgcaaacaccatggttttctctccaaagcagagcagctccagaggtggaggtgactggaatgtcctagattcagtgggaccaggagctgggggtgctagcagaggctctcatctccccagggtcttgtcagtcagagtcctaaacccttcaattaactatccctctaatcccagctgaagcctgggtaatacctcccaccaagaggtatctgtgtggaacctggccctatttagggattaggtgatggagataaatttccatggcaaacggccctcgtccccgttcgtttgcagagcacaacaatccagattaaggtacagagtttgggttttatttggagattagttggtattacaggtgatggtgataccaaaacccaatgctgctatacctgcctccatcccagatctgtcaggttgtctccacagccccacatcagagggcatccaatctgatctttgtgaaaattaaatcaacataagcccca

SEQ ID NO: 4188 - protein, 96 aa, Homosapiens; identical to SEQ ID NO: 4184

SEQ ID NO: 4189 - DNA, 977 bp, Homosapiens
gaatttctcgtggatgacaaatttgcttgtgcagtttctgctcttttgagagccccctcttcacttccaggcacacctaggcccaattcacccttgagaaagtctaggtttttaccaaatacaaatatcacaggttttgtctcttctttttctccactttaggaatcagcttagcatagtgagcttgtaggaatccggatttctttccacctcaaaagcaagagtggtgaaatctgatactttgttttgtttgtttgtttttttaatataggatggcaaaagctgtgttgaaagatctggcctgagagtagcatgtgagttccagtcctagctctgtcactaatcctttgaaggagtcatttctcctcgctgggcctcagttcccttatgtgtaaagggaaggaacaggacaaactagcacataagaacccagaactagttgcccggctggagaagattaagatacagctggccaatgaggaatataaacggatcacccgcaacgtcacttgtcaggatacaagacatggtgggactctcagcgacctgggaaagcaagtgagatcattgaaggctctggtcatcaccatcttcaatttcattgtcacggtggttgctgccttcgtctgcacttaccttggaagccaatatatcttcacagaaatggcctcgcgggtgctagctgcattgatcgtcgcctctgtggtgggtctggccgagctgtatgtcatggtgcgggcaatggaaggcgagctgggagaactgtaactggtgcttcatcatcaagtctagagaagactttgggggcttcaggctccaattggcagtcaccgactcagtcaacccatcagactttttgtattcagctccagttagtcagaagaccagcccaggccagctgctgtttctgtggggagccctaatcttctgtgaatttccaaagggagcattggaggagattgagataacacatcttt

SEQ ID NO: 4190 - protein, 126 aa, Homosapiens
MCKGKEQDKLAHKNPELVARLEKIKIQLANEEYKRITRNVTCQDTRHGGTLSDLGKQVRSLKALVITIFNFIVTVVAAFVCTYLGSQYIFTEMASRVLAALIVASVVGLAELYVMVRAMEGELGEL

SEQ ID NO: 4191 - DNA, 1582 bp, Homosapiens
gaatttctcgtggatgacaaatttgcttgtgcagtttctgctcttttgagagccccctcttcacttccaggcacacctaggcccaattcacccttgagaaagtctaggtttttaccaaatacaaatatcacaggttttgtctcttctttttctccactttaggaatcagcttagcatagtgagcttgtaggaatccggatttctttccacctcaaaagcaagagtggtgaaatctgatactttgttttgtttgtttgtttttttaatataggatggcaaaagctgtgttgaaagatctggcctgagagtagcatgtgagttccagtcctagctctgtcactaatcctttgaaggagtcatttctcctcgctgggcctcagttcccttatgtgtaaagggaaggaacaggacaaactagcacataagaacccagaactagttgcccggctggagaagattaagatacagctggccaatgaggaatataaacggatcacccgcaacgtcacttgtcaggatacaagacatggtgggactctcagcgacctgggaaagcaagtgagatcattgaaggctctggtcatcaccatcttcaatttcattgtcacggtggttgctgccttcgtctgcacttaccttggaagccaatatatcttcacagaaatggcctcgcgggtgctagctgcattgatcgtcgcctctgtggtgggtctggccgagctgtatgtcatggtgcgggcaatggaaggcgagctgggagaactgtaactggtgcttcatcatcaagtctagagaagactttgggggcttcaggctccaattggcagtcaccgactcagtcaacccatcagactttttgtattcagctccagttagtcagaagaccagcccaggccagctgctgtttctgtggggagccctaatcttctgtgaatttccaaagggagcattggaggagattgagataacacatctttaaaacagaaagaactggtcttggtctatcagtacctcttcctgaatctggtacccatctgccttctccagttcattctaaacactgctgggactagggtttttccatcaggagcaaatggaatccaggccttcccagaagtagaccatactgccttgaacttgtccatatgtacaaactgatcaccagctttctccatacatttttaatgcagacctgtaattgagttcagaagcctccaagaaaacagaaaggatcccctttctccagtttgtgctggaagaggagctgatcagagacatcaaataagagaaagatgggttgctagaggatggtagaactggaagcaaggcagctacctttttgcaaaaggaaatggtgttaggccccttttccagaagataagacagactcatagagattaaatgatcactatggtccttcttctgttaaatggagccaaagacgcctatgttgttctgaagtcttgtaatgtttaacttctgagaacttagattagtggtgtgatgatagagtctgtataacgcattgaaaagggtatcaggcttagttatttatccaataaatatttattgtatgcagggt

SEQ ID NO: 4192 - protein, 126 aa, Homosapiens; identical to SEQ ID NO: 4190

SEQ ID NO: 4193 - DNA, 1774 bp, Homosapiens
gaatttctcgtggatgacaaatttgcttgtgcagtttctgctcttttgagagccccctcttcacttccaggcacacctaggcccaattcacccttgagaaagtctaggtttttaccaaatacaaatatcacaggttttgtctcttctttttctccactttaggaatcagcttagcatagtgagcttgtaggaatccggatttctttccacctcaaaagcaagagtggtgaaatctgatactttgttttgtttgtttgtttttttaatataggatggcaaaagctgtgttgaaagatctggcctgagagtagcatgtgagttccagtcctagctctgtcactaatcctttgaaggagtcatttctcctcgctgggcctcagttcccttatgtgtaaagggaaggaacaggacaaactagcacataagaacccagaactagttgcccggctggagaagattaagatacagctggccaatgaggaatataaacggatcacccgcaacgtcacttgtcaggatacaagacatggtgggactctcagcgacctgggaaagcaagtgagatcattgaaggctctggtcatcaccatcttcaatttcattgtcacggtggttgctgccttcgtctgcacttaccttggaagccaatatatcttcacagaaatggcctcgcgggtgctagctgcattgatcgtcgcctctgtggtgggtctggccgagctgtatgtcatggtgcgggcaatggaaggcgagctgggagaactgtaactggtgcttcatcatcaagtctagagaagactttgggggcttcaggctccaattggcagtcaccgactcagtcaacccatcagactttttgtattcagctccagttagtcagaagaccagcccaggccagctgctgtttctgtggggagccctaatcttctgtgaatttccaaagggagcattggaggagattgagataacacatctttaaaacagaaagaactggtcttggtctatcagtacctcttcctgaatctggtacccatctgccttctccagttcattctaaacactgctgggactagggtttttccatcaggagcaaatggaatccaggccttcccagaagtagaccatactgccttgaacttgtccatatgtacaaactgatcaccagctttctccatacatttttaatgcagacctgtaattgagttcagaagcctccaagaaaacagaaaggatcccctttctccagtttgtgctggaagaggagctgatcagagacatcaaataagagaaagatgggttgctagaggatggtagaactggaagcaaggcagctacctttttgcaaaaggaaatggtgttaggccccttttccagaagataagacagactcatagagattaaatgatcactatggtccttcttctgttaaatggagccaaagacgcctatgttgttctgaagtcttgtaatgtttaacttctgagaacttagattagtggtgtgatgatagagtctgtataacgcattgaaaagggtatcaggcttagttatttatccaataaatatttattgtatgcagggtattcctattttaactcctgtgacaacacaaagcatagcgatttccatagttctaactgttcagggtctgctcctcctggtacactctttttggttcactgtatgtactcctgttgtctttttttttttttccaaagcacttttctgttttcataaattatatactcattcactcagtggacacttcctctac

SEQ ID NO: 4194 - protein, 126 aa, Homosapiens; identical to SEQ ID NO: 4190

SEQ ID NO: 4195 - DNA, 3199 bp, Homosapiens
gaatttctcgtggatgacaaatttgcttgtgcagtttctgctcttttgagagccccctcttcacttccaggcacacctaggcccaattcacccttgagaaagtctaggtttttaccaaatacaaatatcacaggttttgtctcttctttttctccactttaggaatcagcttagcatagtgagcttgtaggaatccggatttctttccacctcaaaagcaagagtggtgaaatctgatactttgttttgtttgtttgtttttttaatataggatggcaaaagctgtgttgaaagatctggcctgagagtagcatgtgagttccagtcctagctctgtcactaatcctttgaaggagtcatttctcctcgctgggcctcagttcccttatgtgtaaagggaaggaacaggacaaactagcacataagaacccagaactagttgcccggctggagaagattaagatacagctggccaatgaggaatataaacggatcacccgcaacgtcacttgtcaggatacaagacatggtgggactctcagcgacctgggaaagcaagtgagatcattgaaggctctggtcatcaccatcttcaatttcattgtcacggtggttgctgccttcgtctgcacttaccttggaagccaatatatcttcacagaaatggcctcgcgggtgctagctgcattgatcgtcgcctctgtggtgggtctggccgagctgtatgtcatggtgcgggcaatggaaggcgagctgggagaactgtaactggtgcttcatcatcaagtctagagaagactttgggggcttcaggctccaattggcagtcaccgactcagtcaacccatcagactttttgtattcagctccagttagtcagaagaccagcccaggccagctgctgtttctgtggggagccctaatcttctgtgaatttccaaagggagcattggaggagattgagataacacatctttaaaacagaaagaactggtcttggtctatcagtacctcttcctgaatctggtacccatctgccttctccagttcattctaaacactgctgggactagggtttttccatcaggagcaaatggaatccaggccttcccagaagtagaccatactgccttgaacttgtccatatgtacaaactgatcaccagctttctccatacatttttaatgcagacctgtaattgagttcagaagcctccaagaaaacagaaaggatcccctttctccagtttgtgctggaagaggagctgatcagagacatcaaataagagaaagatgggttgctagaggatggtagaactggaagcaaggcagctacctttttgcaaaaggaaatggtgttaggccccttttccagaagataagacagactcatagagattaaatgatcactatggtccttcttctgttaaatggagccaaagacgcctatgttgttctgaagtcttgtaatgtttaacttctgagaacttagattagtggtgtgatgatagagtctgtataacgcattgaaaagggtatcaggcttagttatttatccaataaatatttattgtatgcagggtattcctattttaactcctgtgacaacacaaagcatagcgatttccatagttctaactgttcagggtctgctcctcctggtacactctttttggttcactgtatgtactcctgttgtctttttttttttttccaaagcacttttctgttttcataaattatatactcattcactcagtggacacttcctctacaatgtttgccagtttctgttagttgggagaagtgtcagctgtgaaaagaaaaagtaggtggcattttacagtgtttccagtaacctgagctatataaaatttgtgttaaaaagctacactgggccaggtgaggtggctcacacctgtaatcgtagcattttgggaggctgaggcaggcggatcacttgaggttgggagtttaagaccagcatggccaatatagcgaaaccccatctttactaaaaatacaaaaaaattagccaggcgtggtggtacatgcctgtaatcccagcactttgggagaccaaggtgggaggatgcttgagttcaggagtttgagaccagcctgggcaacatggcaaaagcccatctctacaaaaaaacgcagaaattagctgacatggtagcgcacgcctgtagtcccagctactcaggaggctaaggtgggaggatcacttgagcctgggaggcagaggttgcagtaagctgagtaagccaagatcatgctattgcactctagcctggatgacagagtgagaccttgtctcaatgaaaaagcagggggcactgggaggggagaaccaaatgccctatcctccagttctcagcatatagaagggagctctctcatctgctagccactcctgcctcactgtgccatgctttctgtaatgcactctgggtccagggactgcttggcaggaggtgggaagaacaagaagtttagggccttcccagtttcttagggcctgtctggagagggaactagcgtttactgagtttttacgatgtgttacacaccatgtaaagccctttacctacattatttcttataccccaaacagagagcaaataagtatccccattttttagtcacatagagttccagagttgccacagttacatcgcaaagtcaggatttgaatccagtgcagaccgcaaacaccatggttttctctccaaagcagagcagctccagaggtggaggtgactggaatgtcctagattcagtgggaccaggagctgggggtgctagcagaggctctcatctccccagggtcttgtcagtcagagtcctaaacccttcaattaactatccctctaatcccagctgaagcctgggtaatacctcccaccaagaggtatctgtgtggaacctggccctatttagggattaggtgatggagataaatttccatggcaaacggccctcgtccccgttcgtttgcagagcacaacaatccagattaaggtacagagtttgggttttatttggagattagttggtattacaggtgatggtgataccaaaacccaatgctgctatacctgcctccatcccagatctgtcaggttgtctccacagccccacatcagagggcatccaatctgatctttgtgaaaattaaatcaacataagcccca

SEQ ID NO: 4196 - protein, 126 aa, Homosapiens; identical to SEQ ID NO: 4190

SEQ ID NO: 4197 - DNA, 987 bp, Homosapiens
tggagttacgactagtatgtgggtctcctgatacctttagcagtgctttacccctggaaccaatgattgtgatgtgctttctaacaagctgggaatatcattcttctcatttgatttttctgcttcagaacccagaactagttgcccggctggagaagattaagatacagctggccaatgaggaatataaacggatcacccgcaacgtcacttgtcaggatacaagacatggtgggactctcagcgacctgggaaagcaagtgagatcattgaaggctctggtcatcaccatcttcaatttcattgtcacggtggttgctgccttcgtctgcacttaccttggaagccaatatatcttcacagaaatggcctcggtgagtaggcactgggcagggcagggtgccctggtgggggtgttagtgggtaagggaggacgtatgtgaaagtgccttgcacaggttaggtattgaacagatatttatgccattaataaggggagcattagagctttccagcagtcacgggaggttaggtaataaccccaggagaagccacattctcttttcttcccctcccccaacttagagggtggttggggggctctccatcctcattaaagttgctggggtacagagctggttgttggcctgcatcccttaagcctggttctccccatctccagcgggtgctagctgcattgatcgtcgcctctgtggtgggtctggccgagctgtatgtcatggtgcgggcaatggaaggcgagctgggagaactgtaactggtgcttcatcatcaagtctagagaagactttgggggcttcaggctccaattggcagtcaccgactcagtcaacccatcagactttttgtattcagctccagttagtcagaagaccagcccaggccagctgctgtttctgtggggagccctaatcttctgtgaatttccaaagggagcattggaggagattgagataacacatcttt

SEQ ID NO: 4198 - protein, 126 aa, Homosapiens
MIVMCFLTSWEYHSSHLIFLLQNPELVARLEKIKIQLANEEYKRITRNVTCQDTRHGGTLSDLGKQVRSLKALVITIFNFIVTVVAAFVCTYLGSQYIFTEMASVSRHWAGQGALVGVLVGKGGRM

SEQ ID NO: 4199 - DNA, 1592 bp, Homosapiens
tggagttacgactagtatgtgggtctcctgatacctttagcagtgctttacccctggaaccaatgattgtgatgtgctttctaacaagctgggaatatcattcttctcatttgatttttctgcttcagaacccagaactagttgcccggctggagaagattaagatacagctggccaatgaggaatataaacggatcacccgcaacgtcacttgtcaggatacaagacatggtgggactctcagcgacctgggaaagcaagtgagatcattgaaggctctggtcatcaccatcttcaatttcattgtcacggtggttgctgccttcgtctgcacttaccttggaagccaatatatcttcacagaaatggcctcggtgagtaggcactgggcagggcagggtgccctggtgggggtgttagtgggtaagggaggacgtatgtgaaagtgccttgcacaggttaggtattgaacagatatttatgccattaataaggggagcattagagctttccagcagtcacgggaggttaggtaataaccccaggagaagccacattctcttttcttcccctcccccaacttagagggtggttggggggctctccatcctcattaaagttgctggggtacagagctggttgttggcctgcatcccttaagcctggttctccccatctccagcgggtgctagctgcattgatcgtcgcctctgtggtgggtctggccgagctgtatgtcatggtgcgggcaatggaaggcgagctgggagaactgtaactggtgcttcatcatcaagtctagagaagactttgggggcttcaggctccaattggcagtcaccgactcagtcaacccatcagactttttgtattcagctccagttagtcagaagaccagcccaggccagctgctgtttctgtggggagccctaatcttctgtgaatttccaaagggagcattggaggagattgagataacacatctttaaaacagaaagaactggtcttggtctatcagtacctcttcctgaatctggtacccatctgccttctccagttcattctaaacactgctgggactagggtttttccatcaggagcaaatggaatccaggccttcccagaagtagaccatactgccttgaacttgtccatatgtacaaactgatcaccagctttctccatacatttttaatgcagacctgtaattgagttcagaagcctccaagaaaacagaaaggatcccctttctccagtttgtgctggaagaggagctgatcagagacatcaaataagagaaagatgggttgctagaggatggtagaactggaagcaaggcagctacctttttgcaaaaggaaatggtgttaggccccttttccagaagataagacagactcatagagattaaatgatcactatggtccttcttctgttaaatggagccaaagacgcctatgttgttctgaagtcttgtaatgtttaacttctgagaacttagattagtggtgtgatgatagagtctgtataacgcattgaaaagggtatcaggcttagttatttatccaataaatatttattgtatgcagggt

SEQ ID NO: 4200 - protein, 126 aa, Homosapiens; identical to SEQ ID NO: 4198

SEQ ID NO: 4201 - DNA, 1784 bp, Homosapiens
tggagttacgactagtatgtgggtctcctgatacctttagcagtgctttacccctggaaccaatgattgtgatgtgctttctaacaagctgggaatatcattcttctcatttgatttttctgcttcagaacccagaactagttgcccggctggagaagattaagatacagctggccaatgaggaatataaacggatcacccgcaacgtcacttgtcaggatacaagacatggtgggactctcagcgacctgggaaagcaagtgagatcattgaaggctctggtcatcaccatcttcaatttcattgtcacggtggttgctgccttcgtctgcacttaccttggaagccaatatatcttcacagaaatggcctcggtgagtaggcactgggcagggcagggtgccctggtgggggtgttagtgggtaagggaggacgtatgtgaaagtgccttgcacaggttaggtattgaacagatatttatgccattaataaggggagcattagagctttccagcagtcacgggaggttaggtaataaccccaggagaagccacattctcttttcttcccctcccccaacttagagggtggttggggggctctccatcctcattaaagttgctggggtacagagctggttgttggcctgcatcccttaagcctggttctccccatctccagcgggtgctagctgcattgatcgtcgcctctgtggtgggtctggccgagctgtatgtcatggtgcgggcaatggaaggcgagctgggagaactgtaactggtgcttcatcatcaagtctagagaagactttgggggcttcaggctccaattggcagtcaccgactcagtcaacccatcagactttttgtattcagctccagttagtcagaagaccagcccaggccagctgctgtttctgtggggagccctaatcttctgtgaatttccaaagggagcattggaggagattgagataacacatctttaaaacagaaagaactggtcttggtctatcagtacctcttcctgaatctggtacccatctgccttctccagttcattctaaacactgctgggactagggtttttccatcaggagcaaatggaatccaggccttcccagaagtagaccatactgccttgaacttgtccatatgtacaaactgatcaccagctttctccatacatttttaatgcagacctgtaattgagttcagaagcctccaagaaaacagaaaggatcccctttctccagtttgtgctggaagaggagctgatcagagacatcaaataagagaaagatgggttgctagaggatggtagaactggaagcaaggcagctacctttttgcaaaaggaaatggtgttaggccccttttccagaagataagacagactcatagagattaaatgatcactatggtccttcttctgttaaatggagccaaagacgcctatgttgttctgaagtcttgtaatgtttaacttctgagaacttagattagtggtgtgatgatagagtctgtataacgcattgaaaagggtatcaggcttagttatttatccaataaatatttattgtatgcagggtattcctattttaactcctgtgacaacacaaagcatagcgatttccatagttctaactgttcagggtctgctcctcctggtacactctttttggttcactgtatgtactcctgttgtctttttttttttttccaaagcacttttctgttttcataaattatatactcattcactcagtggacacttcctctac

SEQ ID NO: 4202 - protein, 126 aa, Homosapiens; identical to SEQ ID NO: 4198

SEQ ID NO: 4203 - DNA, 3209 bp, Homosapiens
tggagttacgactagtatgtgggtctcctgatacctttagcagtgctttacccctggaaccaatgattgtgatgtgctttctaacaagctgggaatatcattcttctcatttgatttttctgcttcagaacccagaactagttgcccggctggagaagattaagatacagctggccaatgaggaatataaacggatcacccgcaacgtcacttgtcaggatacaagacatggtgggactctcagcgacctgggaaagcaagtgagatcattgaaggctctggtcatcaccatcttcaatttcattgtcacggtggttgctgccttcgtctgcacttaccttggaagccaatatatcttcacagaaatggcctcggtgagtaggcactgggcagggcagggtgccctggtgggggtgttagtgggtaagggaggacgtatgtgaaagtgccttgcacaggttaggtattgaacagatatttatgccattaataaggggagcattagagctttccagcagtcacgggaggttaggtaataaccccaggagaagccacattctcttttcttcccctcccccaacttagagggtggttggggggctctccatcctcattaaagttgctggggtacagagctggttgttggcctgcatcccttaagcctggttctccccatctccagcgggtgctagctgcattgatcgtcgcctctgtggtgggtctggccgagctgtatgtcatggtgcgggcaatggaaggcgagctgggagaactgtaactggtgcttcatcatcaagtctagagaagactttgggggcttcaggctccaattggcagtcaccgactcagtcaacccatcagactttttgtattcagctccagttagtcagaagaccagcccaggccagctgctgtttctgtggggagccctaatcttctgtgaatttccaaagggagcattggaggagattgagataacacatctttaaaacagaaagaactggtcttggtctatcagtacctcttcctgaatctggtacccatctgccttctccagttcattctaaacactgctgggactagggtttttccatcaggagcaaatggaatccaggccttcccagaagtagaccatactgccttgaacttgtccatatgtacaaactgatcaccagctttctccatacatttttaatgcagacctgtaattgagttcagaagcctccaagaaaacagaaaggatcccctttctccagtttgtgctggaagaggagctgatcagagacatcaaataagagaaagatgggttgctagaggatggtagaactggaagcaaggcagctacctttttgcaaaaggaaatggtgttaggccccttttccagaagataagacagactcatagagattaaatgatcactatggtccttcttctgttaaatggagccaaagacgcctatgttgttctgaagtcttgtaatgtttaacttctgagaacttagattagtggtgtgatgatagagtctgtataacgcattgaaaagggtatcaggcttagttatttatccaataaatatttattgtatgcagggtattcctattttaactcctgtgacaacacaaagcatagcgatttccatagttctaactgttcagggtctgctcctcctggtacactctttttggttcactgtatgtactcctgttgtctttttttttttttccaaagcacttttctgttttcataaattatatactcattcactcagtggacacttcctctacaatgtttgccagtttctgttagttgggagaagtgtcagctgtgaaaagaaaaagtaggtggcattttacagtgtttccagtaacctgagctatataaaatttgtgttaaaaagctacactgggccaggtgaggtggctcacacctgtaatcgtagcattttgggaggctgaggcaggcggatcacttgaggttgggagtttaagaccagcatggccaatatagcgaaaccccatctttactaaaaatacaaaaaaattagccaggcgtggtggtacatgcctgtaatcccagcactttgggagaccaaggtgggaggatgcttgagttcaggagtttgagaccagcctgggcaacatggcaaaagcccatctctacaaaaaaacgcagaaattagctgacatggtagcgcacgcctgtagtcccagctactcaggaggctaaggtgggaggatcacttgagcctgggaggcagaggttgcagtaagctgagtaagccaagatcatgctattgcactctagcctggatgacagagtgagaccttgtctcaatgaaaaagcagggggcactgggaggggagaaccaaatgccctatcctccagttctcagcatatagaagggagctctctcatctgctagccactcctgcctcactgtgccatgctttctgtaatgcactctgggtccagggactgcttggcaggaggtgggaagaacaagaagtttagggccttcccagtttcttagggcctgtctggagagggaactagcgtttactgagtttttacgatgtgttacacaccatgtaaagccctttacctacattatttcttataccccaaacagagagcaaataagtatccccattttttagtcacatagagttccagagttgccacagttacatcgcaaagtcaggatttgaatccagtgcagaccgcaaacaccatggttttctctccaaagcagagcagctccagaggtggaggtgactggaatgtcctagattcagtgggaccaggagctgggggtgctagcagaggctctcatctccccagggtcttgtcagtcagagtcctaaacccttcaattaactatccctctaatcccagctgaagcctgggtaatacctcccaccaagaggtatctgtgtggaacctggccctatttagggattaggtgatggagataaatttccatggcaaacggccctcgtccccgttcgtttgcagagcacaacaatccagattaaggtacagagtttgggttttatttggagattagttggtattacaggtgatggtgataccaaaacccaatgctgctatacctgcctccatcccagatctgtcaggttgtctccacagccccacatcagagggcatccaatctgatctttgtgaaaattaaatcaacataagcccca

SEQ ID NO: 4204 - protein, 126 aa, Homosapiens; identical to SEQ ID NO: 4198

SEQ ID NO: 4205 - DNA, 752 bp, Homosapiens
ggtgagccactgtgcccagccattcgagcatttcttctgacagggctccctactactctatggcatgctcctaccctggaacaggagagtagatgggtactggcagcctatgtcctctctccgaaatgcctgctctgtagtccagaaaagagtcaaaatggttccagacaaaagaatccatggggagggcagagttaatatgttggggaatagagagggctgagccagactgtcaatggatgctctctgagctgcttctattctgaatcatcttctttttctttttcccaggatacaagacatggtgggactctcagcgacctgggaaagcaagtgagatcattgaaggctctggtcatcaccatcttcaatttcattgtcacggtggttgctgccttcgtctgcacttaccttggaagccaatatatcttcacagaaatggcctcgcgggtgctagctgcattgatcgtcgcctctgtggtgggtctggccgagctgtatgtcatggtgcgggcaatggaaggcgagctgggagaactgtaactggtgcttcatcatcaagtctagagaagactttgggggcttcaggctccaattggcagtcaccgactcagtcaacccatcagactttttgtattcagctccagttagtcagaagaccagcccaggccagctgctgtttctgtggggagccctaatcttctgtgaatttccaaagggagcattggaggagattgagataacacatcttt

SEQ ID NO: 4206 - protein, 34 aa, Homosapiens
MASRVLAALIVASVVGLAELYVMVRAMEGELGEL

SEQ ID NO: 4207 - DNA, 1357 bp, Homosapiens
ggtgagccactgtgcccagccattcgagcatttcttctgacagggctccctactactctatggcatgctcctaccctggaacaggagagtagatgggtactggcagcctatgtcctctctccgaaatgcctgctctgtagtccagaaaagagtcaaaatggttccagacaaaagaatccatggggagggcagagttaatatgttggggaatagagagggctgagccagactgtcaatggatgctctctgagctgcttctattctgaatcatcttctttttctttttcccaggatacaagacatggtgggactctcagcgacctgggaaagcaagtgagatcattgaaggctctggtcatcaccatcttcaatttcattgtcacggtggttgctgccttcgtctgcacttaccttggaagccaatatatcttcacagaaatggcctcgcgggtgctagctgcattgatcgtcgcctctgtggtgggtctggccgagctgtatgtcatggtgcgggcaatggaaggcgagctgggagaactgtaactggtgcttcatcatcaagtctagagaagactttgggggcttcaggctccaattggcagtcaccgactcagtcaacccatcagactttttgtattcagctccagttagtcagaagaccagcccaggccagctgctgtttctgtggggagccctaatcttctgtgaatttccaaagggagcattggaggagattgagataacacatctttaaaacagaaagaactggtcttggtctatcagtacctcttcctgaatctggtacccatctgccttctccagttcattctaaacactgctgggactagggtttttccatcaggagcaaatggaatccaggccttcccagaagtagaccatactgccttgaacttgtccatatgtacaaactgatcaccagctttctccatacatttttaatgcagacctgtaattgagttcagaagcctccaagaaaacagaaaggatcccctttctccagtttgtgctggaagaggagctgatcagagacatcaaataagagaaagatgggttgctagaggatggtagaactggaagcaaggcagctacctttttgcaaaaggaaatggtgttaggccccttttccagaagataagacagactcatagagattaaatgatcactatggtccttcttctgttaaatggagccaaagacgcctatgttgttctgaagtcttgtaatgtttaacttctgagaacttagattagtggtgtgatgatagagtctgtataacgcattgaaaagggtatcaggcttagttatttatccaataaatatttattgtatgcagggt

SEQ ID NO: 4208 - protein, 34 aa, Homosapiens; identical to SEQ ID NO: 4206

SEQ ID NO: 4209 - DNA, 1549 bp, Homosapiens
ggtgagccactgtgcccagccattcgagcatttcttctgacagggctccctactactctatggcatgctcctaccctggaacaggagagtagatgggtactggcagcctatgtcctctctccgaaatgcctgctctgtagtccagaaaagagtcaaaatggttccagacaaaagaatccatggggagggcagagttaatatgttggggaatagagagggctgagccagactgtcaatggatgctctctgagctgcttctattctgaatcatcttctttttctttttcccaggatacaagacatggtgggactctcagcgacctgggaaagcaagtgagatcattgaaggctctggtcatcaccatcttcaatttcattgtcacggtggttgctgccttcgtctgcacttaccttggaagccaatatatcttcacagaaatggcctcgcgggtgctagctgcattgatcgtcgcctctgtggtgggtctggccgagctgtatgtcatggtgcgggcaatggaaggcgagctgggagaactgtaactggtgcttcatcatcaagtctagagaagactttgggggcttcaggctccaattggcagtcaccgactcagtcaacccatcagactttttgtattcagctccagttagtcagaagaccagcccaggccagctgctgtttctgtggggagccctaatcttctgtgaatttccaaagggagcattggaggagattgagataacacatctttaaaacagaaagaactggtcttggtctatcagtacctcttcctgaatctggtacccatctgccttctccagttcattctaaacactgctgggactagggtttttccatcaggagcaaatggaatccaggccttcccagaagtagaccatactgccttgaacttgtccatatgtacaaactgatcaccagctttctccatacatttttaatgcagacctgtaattgagttcagaagcctccaagaaaacagaaaggatcccctttctccagtttgtgctggaagaggagctgatcagagacatcaaataagagaaagatgggttgctagaggatggtagaactggaagcaaggcagctacctttttgcaaaaggaaatggtgttaggccccttttccagaagataagacagactcatagagattaaatgatcactatggtccttcttctgttaaatggagccaaagacgcctatgttgttctgaagtcttgtaatgtttaacttctgagaacttagattagtggtgtgatgatagagtctgtataacgcattgaaaagggtatcaggcttagttatttatccaataaatatttattgtatgcagggtattcctattttaactcctgtgacaacacaaagcatagcgatttccatagttctaactgttcagggtctgctcctcctggtacactctttttggttcactgtatgtactcctgttgtctttttttttttttccaaagcacttttctgttttcataaattatatactcattcactcagtggacacttcctctac

SEQ ID NO: 4210 - protein, 34 aa, Homosapiens; identical to SEQ ID NO: 4206

SEQ ID NO: 4211 - DNA, 2974 bp, Homosapiens
ggtgagccactgtgcccagccattcgagcatttcttctgacagggctccctactactctatggcatgctcctaccctggaacaggagagtagatgggtactggcagcctatgtcctctctccgaaatgcctgctctgtagtccagaaaagagtcaaaatggttccagacaaaagaatccatggggagggcagagttaatatgttggggaatagagagggctgagccagactgtcaatggatgctctctgagctgcttctattctgaatcatcttctttttctttttcccaggatacaagacatggtgggactctcagcgacctgggaaagcaagtgagatcattgaaggctctggtcatcaccatcttcaatttcattgtcacggtggttgctgccttcgtctgcacttaccttggaagccaatatatcttcacagaaatggcctcgcgggtgctagctgcattgatcgtcgcctctgtggtgggtctggccgagctgtatgtcatggtgcgggcaatggaaggcgagctgggagaactgtaactggtgcttcatcatcaagtctagagaagactttgggggcttcaggctccaattggcagtcaccgactcagtcaacccatcagactttttgtattcagctccagttagtcagaagaccagcccaggccagctgctgtttctgtggggagccctaatcttctgtgaatttccaaagggagcattggaggagattgagataacacatctttaaaacagaaagaactggtcttggtctatcagtacctcttcctgaatctggtacccatctgccttctccagttcattctaaacactgctgggactagggtttttccatcaggagcaaatggaatccaggccttcccagaagtagaccatactgccttgaacttgtccatatgtacaaactgatcaccagctttctccatacatttttaatgcagacctgtaattgagttcagaagcctccaagaaaacagaaaggatcccctttctccagtttgtgctggaagaggagctgatcagagacatcaaataagagaaagatgggttgctagaggatggtagaactggaagcaaggcagctacctttttgcaaaaggaaatggtgttaggccccttttccagaagataagacagactcatagagattaaatgatcactatggtccttcttctgttaaatggagccaaagacgcctatgttgttctgaagtcttgtaatgtttaacttctgagaacttagattagtggtgtgatgatagagtctgtataacgcattgaaaagggtatcaggcttagttatttatccaataaatatttattgtatgcagggtattcctattttaactcctgtgacaacacaaagcatagcgatttccatagttctaactgttcagggtctgctcctcctggtacactctttttggttcactgtatgtactcctgttgtctttttttttttttccaaagcacttttctgttttcataaattatatactcattcactcagtggacacttcctctacaatgtttgccagtttctgttagttgggagaagtgtcagctgtgaaaagaaaaagtaggtggcattttacagtgtttccagtaacctgagctatataaaatttgtgttaaaaagctacactgggccaggtgaggtggctcacacctgtaatcgtagcattttgggaggctgaggcaggcggatcacttgaggttgggagtttaagaccagcatggccaatatagcgaaaccccatctttactaaaaatacaaaaaaattagccaggcgtggtggtacatgcctgtaatcccagcactttgggagaccaaggtgggaggatgcttgagttcaggagtttgagaccagcctgggcaacatggcaaaagcccatctctacaaaaaaacgcagaaattagctgacatggtagcgcacgcctgtagtcccagctactcaggaggctaaggtgggaggatcacttgagcctgggaggcagaggttgcagtaagctgagtaagccaagatcatgctattgcactctagcctggatgacagagtgagaccttgtctcaatgaaaaagcagggggcactgggaggggagaaccaaatgccctatcctccagttctcagcatatagaagggagctctctcatctgctagccactcctgcctcactgtgccatgctttctgtaatgcactctgggtccagggactgcttggcaggaggtgggaagaacaagaagtttagggccttcccagtttcttagggcctgtctggagagggaactagcgtttactgagtttttacgatgtgttacacaccatgtaaagccctttacctacattatttcttataccccaaacagagagcaaataagtatccccattttttagtcacatagagttccagagttgccacagttacatcgcaaagtcaggatttgaatccagtgcagaccgcaaacaccatggttttctctccaaagcagagcagctccagaggtggaggtgactggaatgtcctagattcagtgggaccaggagctgggggtgctagcagaggctctcatctccccagggtcttgtcagtcagagtcctaaacccttcaattaactatccctctaatcccagctgaagcctgggtaatacctcccaccaagaggtatctgtgtggaacctggccctatttagggattaggtgatggagataaatttccatggcaaacggccctcgtccccgttcgtttgcagagcacaacaatccagattaaggtacagagtttgggttttatttggagattagttggtattacaggtgatggtgataccaaaacccaatgctgctatacctgcctccatcccagatctgtcaggttgtctccacagccccacatcagagggcatccaatctgatctttgtgaaaattaaatcaacataagcccca

SEQ ID NO: 4212 - protein, 34 aa, Homosapiens; identical to SEQ ID NO: 4206

SEQ ID NO: 4213 - DNA, 976 bp, Homosapiens
ttagtgggtaagggaggacgtatgtgaaagtgccttgcacaggttaggtattgaacagatatttatgccattaataaggggagcattagagctttccagcagtcacgggaggttaggtaataaccccaggagaagccacattctcttttcttcccctcccccaacttagagggtggttggggggctctccatcctcattaaagttgctggggtacagagctggttgttggcctgcatcccttaagcctggttctccccatctccagcgggtgctagctgcattgatcgtcgcctctgtggtgggtctggccgagctgtatgtcatggtgcgggcaatggaaggcgagctgggagaactgtaactggtgcttcatcatcaagtctagagaagactttgggggcttcaggctccaattggcagtcaccgactcagtcaacccatcagactttttgtattcagctccagttagtcagaagaccagcccaggccagctgctgtttctgtggggagccctaatcttctgtgaatttccaaagggagcattggaggagattgagataacacatctttaaaacagaaagaactggtcttggtctatcagtacctcttcctgaatctggtacccatctgccttctccatttgtgctggaagaggagctgatcagagacatcaaataagagaaagatgggttgctagaggatggtagaactggaagcaaggcagctacctttttgcaaaaggaaatggtgttaggccccttttccagaagataagacagactcatagagattaaatgatcactatggtccttcttctgttaaatggagccaaagacgcctatgttgttctgaagtcttgtaatgtttaacttctgagaacttagattagtggtgtgatgatagagtctgtataacgcattgaaaagggtatcaggcttagttatttatccaataaatatttattgtatgcagggt

SEQ ID NO: 4214 - protein, 84 aa, Homosapiens [sequence omitted]

SEQ ID NO: 4215 - DNA, 1168 bp, Homosapiens
ttagtgggtaagggaggacgtatgtgaaagtgccttgcacaggttaggtattgaacagatatttatgccattaataaggggagcattagagctttccagcagtcacgggaggttaggtaataaccccaggagaagccacattctcttttcttcccctcccccaacttagagggtggttggggggctctccatcctcattaaagttgctggggtacagagctggttgttggcctgcatcccttaagcctggttctccccatctccagcgggtgctagctgcattgatcgtcgcctctgtggtgggtctggccgagctgtatgtcatggtgcgggcaatggaaggcgagctgggagaactgtaactggtgcttcatcatcaagtctagagaagactttgggggcttcaggctccaattggcagtcaccgactcagtcaacccatcagactttttgtattcagctccagttagtcagaagaccagcccaggccagctgctgtttctgtggggagccctaatcttctgtgaatttccaaagggagcattggaggagattgagataacacatctttaaaacagaaagaactggtcttggtctatcagtacctcttcctgaatctggtacccatctgccttctccatttgtgctggaagaggagctgatcagagacatcaaataagagaaagatgggttgctagaggatggtagaactggaagcaaggcagctacctttttgcaaaaggaaatggtgttaggccccttttccagaagataagacagactcatagagattaaatgatcactatggtccttcttctgttaaatggagccaaagacgcctatgttgttctgaagtcttgtaatgtttaacttctgagaacttagattagtggtgtgatgatagagtctgtataacgcattgaaaagggtatcaggcttagttatttatccaataaatatttattgtatgcagggtattcctattttaactcctgtgacaacacaaagcatagcgatttccatagttctaactgttcagggtctgctcctcctggtacactctttttggttcactgtatgtactcctgttgtctttttttttttttccaaagcacttttctgttttcataaattatatactcattcactcagtggacacttcctctac

SEQ ID NO: 4216 - protein, 84 aa, Homosapiens [sequence omitted]

SEQ ID NO: 4217 - DNA, 2593 bp, Homosapiens
ttagtgggtaagggaggacgtatgtgaaagtgccttgcacaggttaggtattgaacagatatttatgccattaataaggggagcattagagctttccagcagtcacgggaggttaggtaataaccccaggagaagccacattctcttttcttcccctcccccaacttagagggtggttggggggctctccatcctcattaaagttgctggggtacagagctggttgttggcctgcatcccttaagcctggttctccccatctccagcgggtgctagctgcattgatcgtcgcctctgtggtgggtctggccgagctgtatgtcatggtgcgggcaatggaaggcgagctgggagaactgtaactggtgcttcatcatcaagtctagagaagactttgggggcttcaggctccaattggcagtcaccgactcagtcaacccatcagactttttgtattcagctccagttagtcagaagaccagcccaggccagctgctgtttctgtggggagccctaatcttctgtgaatttccaaagggagcattggaggagattgagataacacatctttaaaacagaaagaactggtcttggtctatcagtacctcttcctgaatctggtacccatctgccttctccatttgtgctggaagaggagctgatcagagacatcaaataagagaaagatgggttgctagaggatggtagaactggaagcaaggcagctacctttttgcaaaaggaaatggtgttaggccccttttccagaagataagacagactcatagagattaaatgatcactatggtccttcttctgttaaatggagccaaagacgcctatgttgttctgaagtcttgtaatgtttaacttctgagaacttagattagtggtgtgatgatagagtctgtataacgcattgaaaagggtatcaggcttagttatttatccaataaatatttattgtatgcagggtattcctattttaactcctgtgacaacacaaagcatagcgatttccatagttctaactgttcagggtctgctcctcctggtacactctttttggttcactgtatgtactcctgttgtctttttttttttttccaaagcacttttctgttttcataaattatatactcattcactcagtggacacttcctctacaatgtttgccagtttctgttagttgggagaagtgtcagctgtgaaaagaaaaagtaggtggcattttacagtgtttccagtaacctgagctatataaaatttgtgttaaaaagctacactgggccaggtgaggtggctcacacctgtaatcgtagcattttgggaggctgaggcaggcggatcacttgaggttgggagtttaagaccagcatggccaatatagcgaaaccccatctttactaaaaatacaaaaaaattagccaggcgtggtggtacatgcctgtaatcccagcactttgggagaccaaggtgggaggatgcttgagttcaggagtttgagaccagcctgggcaacatggcaaaagcccatctctacaaaaaaacgcagaaattagctgacatggtagcgcacgcctgtagtcccagctactcaggaggctaaggtgggaggatcacttgagcctgggaggcagaggttgcagtaagctgagtaagccaagatcatgctattgcactctagcctggatgacagagtgagaccttgtctcaatgaaaaagcagggggcactgggaggggagaaccaaatgccctatcctccagttctcagcatatagaagggagctctctcatctgctagccactcctgcctcactgtgccatgctttctgtaatgcactctgggtccagggactgcttggcaggaggtgggaagaacaagaagtttagggccttcccagtttcttagggcctgtctggagagggaactagcgtttactgagtttttacgatgtgttacacaccatgtaaagccctttacctacattatttcttataccccaaacagagagcaaataagtatccccattttttagtcacatagagttccagagttgccacagttacatcgcaaagtcaggatttgaatccagtgcagaccgcaaacaccatggttttctctccaaagcagagcagctccagaggtggaggtgactggaatgtcctagattcagtgggaccaggagctgggggtgctagcagaggctctcatctccccagggtcttgtcagtcagagtcctaaacccttcaattaactatccctctaatcccagctgaagcctgggtaatacctcccaccaagaggtatctgtgtggaacctggccctatttagggattaggtgatggagataaatttccatggcaaacggccctcgtccccgttcgtttgcagagcacaacaatccagattaaggtacagagtttgggttttatttggagattagttggtattacaggtgatggtgataccaaaacccaatgctgctatacctgcctccatcccagatctgtcaggttgtctccacagccccacatcagagggcatccaatctgatctttgtgaaaattaaatcaacataagcccca

SEQ ID NO: 4218 - protein, 85 aa, Homosapiens [sequence omitted]

SEQ ID NO: 4219 - DNA, 2344 bp, Homosapiens
agctgtatgtcatggtgcgggcaatggaaggcgagctgggagaactgtaactggtgcttcatcatcaagtctagagaagactttgggggcttcaggctccaattggcagtcaccgactcagtcaacccatcagactttttgtattcagctccagttagtcagaagaccagcccaggccagctgctgtttctgtggggagccctaatcttctgtgaatttccaaagggagcattggaggagattgagataacacatctttaaaacagaaagaactggtcttggtctatcagtacctcttcctgaatctggtacccatctgccttctccagttcattctaaacactgctgggactagggtttttccatcaggagcaaatggaatccaggccttcccagaagtagaccatactgccttgaacttgtccatatgtacaaactgatcaccagctttctccatacatttttaatgcagacctgtaattgagttcagaagcctccaagaaaacagaaaggatcccctttctccagtttgtgctggaagaggagctgatcagagacatcaaataagagaaagatgggttgctagaggatggtagaactggaagcaaggcagctacctttttgcaaaaggaaatggtgttaggccccttttccagaagataagacagactcatagagattaaatgatcactatggtccttcttctgttaaatggagccaaagacgcctatgttgttctgaagtcttgtaatgtttaacttctgagaacttagattagtggtgtgatgatagagtctgtataacgcattgaaaagggtatcaggcttagttatttatccaataaatatttattgtatgcagggtattcctattttaactcctgtgacaacacaaagcatagcgatttccatagttctaactgttcagggtctgctcctcctggtacactctttttggttcactgtatgtactcctgttgtctttttttttttttccaaagcacttttctgttttcataaattatatactcattcactcagtggacacttcctctacaatgtttgccagtttctgttagttgggagaagtgtcagctgtgaaaagaaaaagtaggtggcattttacagtgtttccagtaacctgagctatataaaatttgtgttaaaaagctacactgggccaggtgaggtggctcacacctgtaatcccagcactttgggagaccaaggtgggaggatgcttgagttcaggagtttgagaccagcctgggcaacatggcaaaagcccatctctacaaaaaaacgcagaaattagctgacatggtagcgcacgcctgtagtcccagctactcaggaggctaaggtgggaggatcacttgagcctgggaggcagaggttgcagtaagctgagtaagccaagatcatgctattgcactctagcctggatgacagagtgagaccttgtctcaatgaaaaagcagggggcactgggaggggagaaccaaatgccctatcctccagttctcagcatatagaagggagctctctcatctgctagccactcctgcctcactgtgccatgctttctgtaatgcactctgggtccagggactgcttggcaggaggtgggaagaacaagaagtttagggccttcccagtttcttagggcctgtctggagagggaactagcgtttactgagtttttacgatgtgttacacaccatgtaaagccctttacctacattatttcttataccccaaacagagagcaaataagtatccccattttttagtcacatagagttccagagttgccacagttacatcgcaaagtcaggatttgaatccagtgcagaccgcaaacaccatggttttctctccaaagcagagcagctccagaggtggaggtgactggaatgtcctagattcagtgggaccaggagctgggggtgctagcagaggctctcatctccccagggtcttgtcagtcagagtcctaaacccttcaattaactatccctctaatcccagctgaagcctgggtaatacctcccaccaagaggtatctgtgtggaacctggccctatttagggattaggtgatggagataaatttccatggcaaacggccctcgtccccgttcgtttgcagagcacaacaatccagattaaggtacagagtttgggttttatttggagattagttggtattacaggtgatggtgataccaaaacccaatgctgctatacctgcctccatcccagatctgtcaggttgtctccacagccccacatcagagggcatccaatctgatctttgtgaaaattaaatcaacataagcccca

SEQ ID NO: 4220 - protein, 85 aa, Homosapiens [sequence omitted]

SEQ ID NO: 4221 - DNA, 831 bp, Homosapiens
ctggtgcttcatcatcaagtctagagaagactttgggggcttcaggctccaattggcagtcaccgactcagtcaacccatcagactttttgtattcagctccagttagtcagaagaccagcccaggccagctgctgtttctgtggggagccctaatcttctgtgaatttccaaagggagcattggaggagattgagataacacatctttaaaacagaaagaactggtcttggtctatcagtacctcttcctgaatctggtacccatctgccttctccagttcattctaaacactgctgggactagggtttttccatcaggactgatcagagacatcaaataagagaaagatgggttgctagaggatggtagaactggaagcaaggcagctacctttttgcaaaaggaaatggtgttaggccccttttccagaagataagacagactcatagagattaaatgatcactatggtccttcttctgttaaatggagccaaagacgcctatgttgttctgaagtcttgtaatgtttaacttctgagaacttagattagtggtgtgatgatagagtctgtataacgcattgaaaagggtatcaggcttagttatttatccaataaatatttattgtatgcagggtattcctattttaactcctgtgacaacacaaagcatagcgatttccatagttctaactgttcagggtctgctcctcctggtacactctttttggttcactgtatgtactcctgttgtctttttttttttttccaaagcacttttctgttttcataaattatatactcattcactcagtggacacttcctctac

SEQ ID NO: 4222 - protein, 66 aa, Homosapiens [sequence omitted]

SEQ ID NO: 4223 - DNA, 2256 bp, Homosapiens
ctggtgcttcatcatcaagtctagagaagactttgggggcttcaggctccaattggcagtcaccgactcagtcaacccatcagactttttgtattcagctccagttagtcagaagaccagcccaggccagctgctgtttctgtggggagccctaatcttctgtgaatttccaaagggagcattggaggagattgagataacacatctttaaaacagaaagaactggtcttggtctatcagtacctcttcctgaatctggtacccatctgccttctccagttcattctaaacactgctgggactagggtttttccatcaggactgatcagagacatcaaataagagaaagatgggttgctagaggatggtagaactggaagcaaggcagctacctttttgcaaaaggaaatggtgttaggccccttttccagaagataagacagactcatagagattaaatgatcactatggtccttcttctgttaaatggagccaaagacgcctatgttgttctgaagtcttgtaatgtttaacttctgagaacttagattagtggtgtgatgatagagtctgtataacgcattgaaaagggtatcaggcttagttatttatccaataaatatttattgtatgcagggtattcctattttaactcctgtgacaacacaaagcatagcgatttccatagttctaactgttcagggtctgctcctcctggtacactctttttggttcactgtatgtactcctgttgtctttttttttttttccaaagcacttttctgttttcataaattatatactcattcactcagtggacacttcctctacaatgtttgccagtttctgttagttgggagaagtgtcagctgtgaaaagaaaaagtaggtggcattttacagtgtttccagtaacctgagctatataaaatttgtgttaaaaagctacactgggccaggtgaggtggctcacacctgtaatcgtagcattttgggaggctgaggcaggcggatcacttgaggttgggagtttaagaccagcatggccaatatagcgaaaccccatctttactaaaaatacaaaaaaattagccaggcgtggtggtacatgcctgtaatcccagcactttgggagaccaaggtgggaggatgcttgagttcaggagtttgagaccagcctgggcaacatggcaaaagcccatctctacaaaaaaacgcagaaattagctgacatggtagcgcacgcctgtagtcccagctactcaggaggctaaggtgggaggatcacttgagcctgggaggcagaggttgcagtaagctgagtaagccaagatcatgctattgcactctagcctggatgacagagtgagaccttgtctcaatgaaaaagcagggggcactgggaggggagaaccaaatgccctatcctccagttctcagcatatagaagggagctctctcatctgctagccactcctgcctcactgtgccatgctttctgtaatgcactctgggtccagggactgcttggcaggaggtgggaagaacaagaagtttagggccttcccagtttcttagggcctgtctggagagggaactagcgtttactgagtttttacgatgtgttacacaccatgtaaagccctttacctacattatttcttataccccaaacagagagcaaataagtatccccattttttagtcacatagagttccagagttgccacagttacatcgcaaagtcaggatttgaatccagtgcagaccgcaaacaccatggttttctctccaaagcagagcagctccagaggtggaggtgactggaatgtcctagattcagtgggaccaggagctgggggtgctagcagaggctctcatctccccagggtcttgtcagtcagagtcctaaacccttcaattaactatccctctaatcccagctgaagcctgggtaatacctcccaccaagaggtatctgtgtggaacctggccctatttagggattaggtgatggagataaatttccatggcaaacggccctcgtccccgttcgtttgcagagcacaacaatccagattaaggtacagagtttgggttttatttggagattagttggtattacaggtgatggtgataccaaaacccaatgctgctatacctgcctccatcccagatctgtcaggttgtctccacagccccacatcagagggcatccaatctgatctttgtgaaaattaaatcaacataagcccca

SEQ ID NO: 4224 - protein, 85 aa, Homosapiens [sequence omitted]

SEQ ID NO: 4225 - DNA, 429 bp, Homosapiens
gcacggtgtgccagggcaagtggacgcagccatggctggccgcatctacatctcaggcatggcaccccgcccctccttggccaagaaacaaaggtttaggctgtccttgttctccagtgaggagagcaacttgggagccaacaactatgatgactacaggatggactggcttgtgcctgccacctgtgaacccatccagagtgtcttcttcttctctggagacaagtactaccgagtcaatcttcgcacacggcgagtggacactgtggaccctccctacccacgctccatcgctcagtactggctgggctgcccagctcctggccatctgtaggagtcagagcccacatggccgggccctctgtagctccctcctcccatctccttcccccagcccaataaaggtcccttagccccgagtttaaaatt

SEQ ID NO: 4226 - protein, 100 aa, Homosapiens
MAGRIYISGMAPRPSLAKKQRFRLSLFSSEESNLGANNYDDYRMDWLVPATCEPIQSVFFFSGDKYYRVNLRTRRVDTVDPPYPRSIAQYWLGCPAPGHL

SEQ ID NO: 4227 - DNA, 584 bp, Homosapiens
agacctctcattcaccccttccctgccacagctggtaccagacagccccagttcattagccgggactggcacggtgtgccagggcaagtggacgcagccatggctggccgcatctacatctcaggcatggcaccccgcccctccttggccaagaaacaaaggtttaggcatcgcaaccgcaaaggctaccgttcacaacgaggccacagccgtggccgcaaccagaactcccgccggccatcccgcgccacgtggctgtccttgttctccagtgaggagagcaacttgggagccaacaactatgatgactacaggatggactggcttgtgcctgccacctgtgaacccatccagagtgtcttcttcttctctggagacaagtactaccgagtcaatcttcgcacacggcgagtggacactgtggaccctccctacccacgctccatcgctcagtactggctgggctgcccagctcctggccatctgtaggagtcagagcccacatggccgggccctctgtagctccctcctcccatctccttcccccagcccaataaaggtcccttagccccgagtttaaaatt

SEQ ID NO: 4228 - protein, 129 aa, Homosapiens
MAGRIYISGMAPRPSLAKKQRFRHRNRKGYRSQRGHSRGRNQNSRRPSRATWLSLFSSEESNLGANNYDDYRMDWLVPATCEPIQSVFFFSGDKYYRVNLRTRRVDTVDPPYPRSIAQYWLGCPAPGHL

SEQ ID NO: 4229 - DNA, 774 bp, Homosapiens
aacagcctctgggatctccagtcttgccctggcccagccctcctaatgcccaccaccctgctcctcagggaaacagtactgggagtaccagttccagcaccagcccagtcaggaggagtgtgaaggcagctccctgtcggctgtgtttgaacactttgccatgatgcagcgggacagctgggaggacatcttcgagcttctcttctggggcagaacctctgctggtaccagacagccccagttcattagccgggactggcacggtgtgccagggcaagtggacgcagccatggctggccgcatctacatctcaggcatggcaccccgcccctccttggccaagaaacaaaggtttaggcatcgcaaccgcaaaggctaccgttcacaacgaggccacagccgtggccgcaaccagaactcccgccggccatcccgcgccacgtggctgtccttgttctccagtgaggagagcaacttgggagccaacaactatgatgactacaggatggactggcttgtgcctgccacctgtgaacccatccagagtgtcttcttcttctctggagacaagtactaccgagtcaatcttcgcacacggcgagtggacactgtggaccctccctacccacgctccatcgctcagtactggctgggctgcccagctcctggccatctgtaggagtcagagcccacatggccgggccctctgtagctccctcctcccatctccttcccccagcccaataaaggtcccttagccccgagtttaaaatt

SEQ ID NO: 4230 - protein, 172 aa, Homosapiens
MMQRDSWEDIFELLFWGRTSAGTRQPQFISRDWHGVPGQVDAAMAGRIYISGMAPRPSLAKKQRFRHRNRKGYRSQRGHSRGRNQNSRRPSRATWLSLFSSEESNLGANNYDDYRMDWLVPATCEPIQSVFFFSGDKYYRVNLRTRRVDTVDPPYPRSIAQYWLGCPAPGHL

SEQ ID NO: 4231 - DNA, 2025 bp, Homosapiens
caatcatggatcaatagctatgtttggagaaggaatttgtggctgctccagctactgggcattttgtctggtccagttcatgtaatctcccaacaccccatgaagcaaggctttgttaatcctattttactgaaaatgaactaagactcagagagataaagctgttgcccaatgagccttctttctgccctccagatccacggtgctaattccccttccgatgacctaatgattctgagcttggcaaaggtcttatctcccagctcgcccaggcccagtgttccaggaatgtgacctttgctgcagcagccgctggagggggcagaggggatgggctggaggttgagcaaacagagcagcagaaaaggcagttcctcttctccagtgccctccttccctgtctctgcctctccctcccttcctcaggcatcagagcggagacttcagggagaccagagcccagcttgccaggcactgagctagaagccctgccatggcacccctgagaccccttctcatactggccctgctggcatgggttgctctggctgaccaagagtcatgcaagggccgctgcactgagggcttcaacgtggacaagaagtgccagtgtgacgagctctgctcttactaccagagctgctgcacagactatacggctgagtgcaagccccaagtgactcgcggggatgtgttcactatgccggaggatgagtacacggtctatgacgatggcgaggagaaaaacaatgccactgtccatgaacaggtggggggcccctccctgacctctgacctccaggcccagtccaaagggaatcctgagcagacacctgttctgaaacctgaggaagaggcccctgcgcctgaggtgggcgcctctaagcctgaggggatagactcaaggcctgagacccttcatccagggagacctcagcccccagcagaggaggagctgtgcagtgggaagcccttcgacgccttcaccgacctcaagaacggttccctctttgccttccgagggcagtactgctatgaactggacgaaaaggcagtgaggcctgggtaccccaagctcatccgagatgtctggggcatcgagggccccatcgatgccgccttcacccgcatcaactgtcaggggaagacctacctcttcaagggtagtcagtactggcgctttgaggatggtgtcctggaccctgattacccccgaaatatctctgacggcttcgatggcatcccggacaacgtggatgcagccttggccctccctgcccatagctacagtggccgggagcgggtctacttcttcaaggggaaacagtactgggagtaccagttccagcaccagcccagtcaggaggagtgtgaaggcagctccctgtcggctgtgtttgaacactttgccatgatgcagcgggacagctgggaggacatcttcgagcttctcttctggggcagaacctctgctggtaccagacagccccagttcattagccgggactggcacggtgtgccagggcaagtggacgcagccatggctggccgcatctacatctcaggcatggcaccccgcccctccttggccaagaaacaaaggtttaggcatcgcaaccgcaaaggctaccgttcacaacgaggccacagccgtggccgcaaccagaactcccgccggccatcccgcgccacgtggctgtccttgttctccagtgaggagagcaacttgggagccaacaactatgatgactacaggatggactggcttgtgcctgccacctgtgaacccatccagagtgtcttcttcttctctggagacaagtactaccgagtcaatcttcgcacacggcgagtggacactgtggaccctccctacccacgctccatcgctcagtactggctgggctgcccagctcctggccatctgtaggagtcagagcccacatggccgggccctctgtagctccctcctcccatctccttcccccagcccaataaaggtcccttagccccgagtttaaaatt

SEQ ID NO: 4232 - protein, 478 aa, Homosapiens; identical to SEQ ID NO: 628

SEQ ID NO: 4233 - DNA, 569 bp, Homosapiens
gggagatcctaacttcaacagcctctgggatctccagtcttgccctggcccagccctcctaatgcccaccaccctgctcctcagggaaacagtactgggagtaccagttccagcaccagcccagtcaggaggagtgtgaaggcagctccctgtcggctgtgtttgaacactttgccatgatgcagcgggacagctgggaggacatcttcgagcttctcttctggggcagaacctctggtatggagagagggcaagtcttgcttctccctcaaaagggctgaaaccccttggtattggtagagccaggccggctggagggggctgtggttgtggagctatcgatcaaagtctgtttgctcaggccagactttgcttctgttgaccttttggggaaagctcagctctacctggaccccacaccttggactttgcctagcacagctgagagcacagccagcagagggaggggctgtggctgaggagtttagggggcctgggggggtggggtcgagacaccactccctcctcccatctccttcccccagcccaataaaggtcccttagccccg

SEQ ID NO: 4234 - protein, 34 aa, Homosapiens
MMQRDSWEDIFELLFWGRTSGMERGQVLLLPQKG

SEQ ID NO: 4235 - DNA, 761 bp, Homosapiens
tggatgcagccttggccctccctgcccatagctacagtggccgggagcgggtctacttcttcaagggtactcagggggtggtgggagactgagcaggcagtggagcagtcttggattcctttcacatttcactggggacaggcctcagcatgtgcccacccctgacccccacctcatgctgggagatcctaacttcaacagcctctgggatctccagtcttgccctggcccagccctcctaatgcccaccaccctgctcctcagggaaacagtactgggagtaccagttccagcaccagcccagtcaggaggagtgtgaaggcagctccctgtcggctgtgtttgaacactttgccatgatgcagcgggacagctgggaggacatcttcgagcttctcttctggggcagaacctctgctggtaccagacagccccagttcattagccgggactggcacggtgtgccagggcaagtggacgcagccatggctggccgcatctacatctcaggcatggcaccccgcccctccttggccaagaaacaaaggtttaggcatcgcaaccgcaaaggctaccgttcacaacgaggccacagccgtggccgcaaccagaactcccgccggccatcccgcgccacgtggctgtccttgttctccagtgaggagagcaacttgggagccaacaactatgatgactacaggatggactggcttgtgcctgccacctgtgaacccatccagagtgtcttcttcttctctgga

SEQ ID NO: 4236 - protein, 134 aa, Homosapiens
MMQRDSWEDIFELLFWGRTSAGTRQPQFISRDWHGVPGQVDAAMAGRIYISGMAPRPSLAKKQRFRHRNRKGYRSQRGHSRGRNQNSRRPSRATWLSLFSSEESNLGANNYDDYRMDWLVPATCEPIQSVFFFS

SEQ ID NO: 4237 - DNA, 1602 bp, Homosapiens
tccctcccttcctcaggcatcagagcggagacttcagggagaccagagcccagcttgccaggcactgagctagaagccctgccatggcacccctgagaccccttctcatactggccctgctggcatgggttgctctggctgaccaaggtacaggggagtgttggtggccatctgggtcaatgtagggagggcgagggtggtctgggcttggtggcaccgactgacactccttcctcatagagtcatgcaagggccgctgcactgagggcttcaacgtggacaagaagtgccagtgtgacgagctctgctcttactaccagagctgctgcacagactatacggctgagtgcaagccccaaggtgtgttcagagcccaggtgggtgggctggggtgccccctgctgctggagactcactaccatccactctctgcagtgactcgcggggatgtgttcactatgccggaggatgagtacacggtctatgacgatggcgaggagaaaaacaatgccactgtccatgaacaggtggggggcccctccctgacctctgacctccaggcccagtccaaagggaatcctgagcagacacctgttctgaaacctgaggaagaggcccctgcgcctgaggtgggcgcctctaagcctgaggggatagactcaaggcctgagacccttcatccagggagacctcagcccccagcagaggaggagctgtgcagtgggaagcccttcgacgccttcaccgacctcaagaacggttccctctttgccttccgaggtgaatccagggcaggtactggggatgcgggtctgccccaggagcgtccctgctctcacaccatctcctccactctagggcagtactgctatgaactggacgaaaaggcagtgaggcctgggtaccccaagctcatccgagatgtctggggcatcgagggccccatcgatgccgccttcacccgcatcaactgtcaggggaagacctacctcttcaagggtagtcagtactggcgctttgaggatggtgtcctggaccctgattacccccgaaatatctctgacggcttcgatggcatcccggacaacgtggatgcagccttggccctccctgcccatagctacagtggccgggagcgggtctacttcttcaagggtactcagggggtggtgggagactgagcaggcagtggagcagtcttggattcctttcacatttcactggggacaggcctcagcatgtgcccacccctgacccccacctcatgctgggagatcctaacttcaacagcctctgggatctccagtcttgccctggcccagccctcctaatgcccaccaccctgctcctcagggaaacagtactgggagtaccagttccagcaccagcccagtcaggaggagtgtgaaggcagctccctgtcggctgtgtttgaacactttgccatgatgcagcgggacagctgggaggacatcttcgagcttctcttctggggcagaacctctggtatggagagagggcaagtcttgcttctccctcaaaagggctgaaaccccttggtattggtagagccaggccggctggagggggctgtggttgtgg

SEQ ID NO: 4238 - protein, 240 aa, Homosapiens
MPEDEYTVYDDGEEKNNATVHEQVGGPSLTSDLQAQSKGNPEQTPVLKPEEEAPAPEVGASKPEGIDSRPETLHPGRPQPPAEEELCSGKPFDAFTDLKNGSLFAFRGESRAGTGDAGLPQERPCSHTISSTLGQYCYELDEKAVRPGYPKLIRDVWGIEGPIDAAFTRINCQGKTYLFKGSQYWRFEDGVLDPDYPRNISDGFDGIPDNVDAALALPAHSYSGRERVYFFKGTQGVVGD

SEQ ID NO: 4239 - DNA, 1412 bp, Homosapiens
caatcatggatcaatagctatgtttggagaaggaatttgtggctgctccagctactgggcattttgtctggtccagttcatgtaatctcccaacaccccatgaagcaaggctttgttaatcctattttactgaaaatgaactaagactcagagagataaagctgttgcccaatgagccttctttctgccctccagatccacggtgctaattccccttccgatgacctaatgattctgagcttggcaaaggtcttatctcccagctcgcccaggcccagtgttccaggaatgtgacctttgctgcagcagccgctggagggggcagaggggatgggctggaggttgagcaaacagagcagcagaaaaggcagttcctcttctccagtgccctccttccctgtctctgcctctccctcccttcctcaggcatcagagcggagacttcagggagaccagagcccagcttgccaggcactgagctagaagccctgccatggcacccctgagaccccttctcatactggccctgctggcatgggttgctctggctgaccaagagtcatgcaagggccgctgcactgagggcttcaacgtggacaagaagtgccagtgtgacgagctctgctcttactaccagagctgctgcacagactatacggctgagtgcaagccccaagtgactcgcggggatgtgttcactatgccggaggatgagtacacggtctatgacgatggcgaggagaaaaacaatgccactgtccatgaacaggtggggggcccctccctgacctctgacctccaggcccagtccaaagggaatcctgagcagacacctgttctgaaacctgaggaagaggcccctgcgcctgaggtgggcgcctctaagcctgaggggatagactcaaggcctgagacccttcatccagggagacctcagcccccagcagaggaggagctgtgcagtgggaagcccttcgacgccttcaccgacctcaagaacggttccctctttgccttccgagggcagtactgctatgaactggacgaaaaggcagtgaggcctgggtaccccaagctcatccgagatgtctggggcatcgagggccccatcgatgccgccttcacccgcatcaactgtcaggggaagacctacctcttcaagggtagtcagtactggcgctttgaggatggtgtcctggaccctgattacccccgaaatatctctgacggcttcgatggcatcccggacaacgtggatgcagccttggcctgggagtaccagttccagcaccagcccagtcaggaggagtgtgaaggcagctccctgtcggctgtgtttgaacactttgccatgatgcagcgggacagctgggaggacatcttcgagcttctcttctggggcagaacctctg

SEQ ID NO: 4240 - protein, 305 aa, Homosapiens
MAPLRPLLILALLAWVALADQESCKGRCTEGFNVDKKCQCDELCSYYQSCCTDYTAECKPQVTRGDVFTMPEDEYTVYDDGEEKNNATVHEQVGGPSLTSDLQAQSKGNPEQTPVLKPEEEAPAPEVGASKPEGIDSRPETLHPGRPQPPAEEELCSGKPFDAFTDLKNGSLFAFRGQYCYELDEKAVRPGYPKLIRDVWGIEGPIDAAFTRINCQGKTYLFKGSQYWRFEDGVLDPDYPRNISDGFDGIPDNVDAALAWEYQFQHQPSQEECEGSSLSAVFEHFAMMQRDSWEDIFELLFWGRT

SEQ ID NO: 4241 - DNA, 4051 bp, Homosapiens
atggtcctgacgctgcttctctccgcctacaagctgtgtcgcttcttcgccatgtcgggcccacggcggggcgccgagcggctggcggtgcctgggccagatgggggcggtggcacgggcccatggtgggctgcgggtggcccgggcccgcgaaagtgtcgccgggggcaggcaccgaggtgcaggacgccctggagcgcgcgctgccggagctgcagcaggccttgtccgcgctgaagcaggcgggcggcgcgcgggccgtgggcgccggcctggccgaggtcttccaactggtggaggaggcctggctgctgcggccgtgggccgcgaggtagcccagggtctgtgcgacgccatccgcctcgatggcggcctcgacctgctgttgcggctgctgcaggcgccggagttggagacgcgtgtgcaggccgcgcgcctgctggagcagatcctggtggctgagaaccgagaccgcgtggcgcgcattgggctgggcgtgatcctgaacctggcgaaggaacgcgaacccgtagagctggcgcggagtgggtcaggcatcttggagcacatgttcaagcattcggaggagacatgccagaggctggtggcggccggcggcctggacgcggtgctgtattggtgccgccgcacggaccccgcgctgctgcgccactgcgcgctggcgctgggcaactgcgcgctgcacgggggccaggcggtgcagcgacgcatggtagagaagcgcgcagccgagtggctcttcccgctcgccttctccaaggaggacgagctgctttcgctgcacgcctgcctcgcagtagcggtgttggcgactaacaaggaggtggagcgcgaggtggagcgctcgggcacgctggcgctcgtggagccgcttgtggcctcgctggaccctggccgcttcgcccgctgtctggtggacgccagcgacacaagccagggccgcgggcccgacgacctgcagcgcctcgtgccgttgctcgactctaaccgcttggaggcgcagtgcatcggggctttctacctctgcgccgaggctgccatcaagagcctgcaaggcaagaccaaggtgttcagcgacatcggcgccatccagagcctgaaacgcctggtttcctactctaccaatggcactaagtcggcgctggccaagcgcgcgctgcgcctgctgggcgaggaggtgccacggcccatcctgccctccgtgcccagctggaaggaggccgaggttcagacgtggctgcagcagatcggtttctccaagtactgcgagagcttccgggagcagcaggtggatggcgacctgcttctgcggctcacggaggaggaactccagaccgacctgggcatgaaatcgggcatcacccgcaagaggttctttagggagctcacggagctcaagaccttcgccaactattctacgtgcgaccgcagcaacctggcggactggctgggcagcctggacccgcgcttccgccagtacacctacggcctggtcagctgcggcctggaccgctccctgctgcaccgcgtgtctgagcagcagctgctggaagactgcggcatccacctgggcgtgcaccgcgcccgcatcctcacggcggccagagaaatgctacactccccgctgccctgtactggtggcaaacccagtggggacactccagatgtcttcatcagctaccgccggaactcaggttcccagctggccagtctcctgaaggtgcacctgcagctgcatggcttcagtgtcttcattgatgtggagaagctggaagcaggcaagttcgaggacaaactcatccagagtgtcatgggtgcccgcaactttgtgttggtgctatcacctggagcactggacaagtgcatgcaagaccatgactgcaaggattgggtgcataaggagattgtgactgctttaagctgcggcaagaacattgtgcccatcattgatggcttcgagtggcctgagccccaggtcctgcctgaggacatgcaggctgtgcttactttcaacggtatcaagtggtcccacgaataccaggaggccaccattgagaagatcatccgcttcctgcagggccgctcctcccgggactcatctgcaggctctgacaccagtttggagggtgctgcacccatgggtccaacctaaccagtccccagttccccagccctgctgtgacttccatttccatcgtcctttctgaaggaacagctcctgaaaccagtctccctgggctgagacaacctgggctcttcttaggaaatggctctccctccccctgtcccccaccctcatggcccacctccaacccactttcctcagtatctggagagggaagggaagtcaggcttgggcacgggaggttagaactcccccaggccctgccattgggttgtctgtctccgtcatggggagggtccctgctcagttctggagacactggagttggggtgggggtggttctgcattcccttctcctgctgatagcagtcagcttgaggaggatgaaggaaggcagcctcagacaggaattaaggcaatgcccaggcgggcctgggcactgtattctgagcaaaggcctgggcccaggagccagccagggatgagtgccatcatggctctccactcagactgtgcctggcccctgcacttacaacttcctgccgctctgtggccttgccctgtaatcactcagtgcccttagctagcctgactaagtcccagatcccctacagcttccttcggtgtggtatcttttgccacatccagggcgagggttgaggcaaaccagccctccctctgacttccttgtcactgcagccagctttgctgcacttgctggtgcacaggagcctcctgtttgggcctgggtctgggcatggggaggccgtgcctcaaagcccaccctaccccatgccttggtgctgtgcctcaggctccttcctggtctggcccagctggcttccccagcccctcagccatccagggctacccactgcttactcagggaccaggcagcccccatggcagtaaaagcagcctagacagaacctgcagctctgtggaaagaggcaaagtcctgaaaaggcaaagggttgtcacttagggcagcttctccaactttaacatgcatccaagtcacctgggaatgttgttaaaatcaggagatctggggtggggcctaggactctgcatttcttacagattcccaggtgagctgatgctggtggttaagggtagcaaatctctaaagcacgaagccctcacaaatctttgccatttcccaaacactccgctccatggtctccagtcatcagagcaactctacctggtattatcatccccattttacagataatgacactgaggctcagaaaggttgaggataagcccactttcctgtcattagtggcagccccagatccagacctaggcctcctggcacccagtccactggcagtggaattgctttcctgagaatcattctgaggctgggctattgcttctcccttgcttcaaagaatctagcagcgggggataggattttgcaacaaaaagctgacccagaggccatacagagcaggaatatcccattgccccctcctccactgggttcagagggtaagaaagcaccctccaataaacccaggctccaggccgtgggggctgctgaaggctctttccccgcaagggccaggtgttgacaccttaaagctggcgcccccagccccactcttggctgtgctggccaggtgactcctagttcttggccacatcatcagaaagtcaaaggtctcactccaggtttggggctccttccttccactcccctccctgccagagtctgtcttggccagtgccagcctcgatgctttggttttgaccccacctgatcctcctttcctcatgcagcacaagtgctcaccggggccagagccagggcatggatatgacaagcagggcagcctggacactgccctcacaggacagcgccaataacaatacagtgtctgagtatctccaggg

SEQ ID NO: 4242 - protein, 690 aa, Homosapiens
MGAVARAHGGLRVARARESVAGGRHRGAGRPGARAAGAAAGLVRAEAGGRRAGRGRRPGRGLPTGGGGLAAAAVGREVAQGLCDAIRLDGGLDLLLRLLQAPELETRVQAARLLEQILVAENRDRVARIGLGVILNLAKEREPVELARSGSGILEHMFKHSEETCQRLVAAGGLDAVLYWCRRTDPALLRHCALALGNCALHGGQAVQRRMVEKRAAEWLFPLAFSKEDELLSLHACLAVAVLATNKEVEREVERSGTLALVEPLVASLDPGRFARCLVDASDTSQGRGPDDLQRLVPLLDSNRLEAQCIGAFYLCAEAAIKSLQGKTKVFSDIGAIQSLKRLVSYSTNGTKSALAKRALRLLGEEVPRPILPSVPSWKEAEVQTWLQQIGFSKYCESFREQQVDGDLLLRLTEEELQTDLGMKSGITRKRFFRELTELKTFANYSTCDRSNLADWLGSLDPRFRQYTYGLVSCGLDRSLLHRVSEQQLLEDCGIHLGVHRARILTAAREMLHSPLPCTGGKPSGDTPDVFISYRRNSGSQLASLLKVHLQLHGFSVFIDVEKLEAGKFEDKLIQSVMGARNFVLVLSPGALDKCMQDHDCKDWVHKEIVTALSCGKNIVPIIDGFEWPEPQVLPEDMQAVLTFNGIKWSHEYQEATIEKIIRFLQGRSSRDSSAGSDTSLEGAAPMGPT

SEQ ID NO: 4243 - DNA, 6949 bp, Homosapiens
atggtcctgacgctgcttctctccgcctacaagctgtgtcgcttcttcgccatgtcgggcccacggcggggcgccgagcggctggcggtgcctgggccagatgggggcggtggcacgggcccatggtgggctgcgggtggcccgggcccgcgaaagtgtcgccgggggcaggcaccgaggtgcaggacgccctggagcgcgcgctgccggagctgcagcaggccttgtccgcgctgaagcaggcgggcggcgcgcgggccgtgggcgccggcctggccgaggtcttccaactggtggaggaggcctggctgctgcggccgtgggccgcgaggtagcccagggtctgtgcgacgccatccgcctcgatggcggcctcgacctgctgttgcggctgctgcaggcgccggagttggagacgcgtgtgcaggccgcgcgcctgctggagcagatcctggtggctgagaaccgagaccgcgtggcgcgcattgggctgggcgtgatcctgaacctggcgaaggaacgcgaacccgtagagctggcgcggagtgggtcaggcatcttggagcacatgttcaagcattcggaggagacatgccagaggctggtggcggccggcggcctggacgcggtgctgtattggtgccgccgcacggaccccgcgctgctgcgccactgcgcgctggcgctgggcaactgcgcgctgcacgggggccaggcggtgcagcgacgcatggtagagaagcgcgcagccgagtggctcttcccgctcgccttctccaaggaggacgagctgctttcgctgcacgcctgcctcgcagtagcggtgttggcgactaacaaggaggtggagcgcgaggtggagcgctcgggcacgctggcgctcgtggagccgcttgtggcctcgctggaccctggccgcttcgcccgctgtctggtggacgccagcgacacaagccagggccgcgggcccgacgacctgcagcgcctcgtgccgttgctcgactctaaccgcttggaggcgcagtgcatcggggctttctacctctgcgccgaggctgccatcaagagcctgcaaggcaagaccaaggtgttcagcgacatcggcgccatccagagcctgaaacgcctggtttcctactctaccaatggcactaagtcggcgctggccaagcgcgcgctgcgcctgctgggcgaggaggtgccacggcccatcctgccctccgtgcccagctggaaggaggccgaggttcagacgtggctgcagcagatcggtttctccaagtactgcgagagcttccgggagcagcaggtggatggcgacctgcttctgcggctcacggaggaggaactccagaccgacctgggcatgaaatcgggcatcacccgcaagaggttctttagggagctcacggagctcaagaccttcgccaactattctacgtgcgaccgcagcaacctggcggactggctgggcagcctggacccgcgcttccgccagtacacctacggcctggtcagctgcggcctggaccgctccctgctgcaccgcgtgtctgagcagcagctgctggaagactgcggcatccacctgggcgtgcaccgcgcccgcatcctcacggcggccagagaaatgctacactccccgctgccctgtactggtggcaaacccagtggggacactccagatgtcttcatcagctaccgccggaactcaggttcccagctggccagtctcctgaaggtgcacctgcagctgcatggcttcagtgtcttcattgatgtggagaagctggaagcaggcaagttcgaggacaaactcatccagagtgtcatgggtgcccgcaactttgtgttggtgctatcacctggagcactggacaagtgcatgcaagaccatgactgcaaggattgggtgcataaggagattgtgactgctttaagctgcggcaagaacattgtgcccatcattgatggcttcgagtggcctgagccccaggtcctgcctgaggacatgcaggctgtgcttactttcaacggtatcaagtggtcccacgaataccaggaggccaccattgagaagatcatccgcttcctgcagggccgctcctcccgggactcatctgcaggctctgacaccagtttggagggtgctgcacccatgggtccaacctaaccagtccccagttccccagccctgctgtgacttccatttccatcgtcctttctgaaggaacagctcctgaaaccagtctccctgggctgagacaacctgggctcttcttaggaaatggctctccctccccctgtcccccaccctcatggcccacctccaacccactttcctcagtatctggagagggaagggaagtcaggcttgggcacgggaggttagaactcccccaggccctgccattgggttgtctgtctccgtcatggggagggtccctgctcagttctggagacactggagttggggtgggggtggttctgcattcccttctcctgctgatagcagtcagcttgaggaggatgaaggaaggcagcctcagacaggaattaaggcaatgcccaggcgggcctgggcactgtattctgagcaaaggcctgggcccaggagccagccagggatgagtgccatcatggctctccactcagactgtgcctggcccctgcacttacaacttcctgccgctctgtggccttgccctgtaatcactcagtgcccttagctagcctgactaagtcccagatcccctacagcttccttcggtgtggtatcttttgccacatccagggcgagggttgaggcaaaccagccctccctctgacttccttgtcactgcagccagctttgctgcacttgctggtgcacaggagcctcctgtttgggcctgggtctgggcatggggaggccgtgcctcaaagcccaccctaccccatgccttggtgctgtgcctcaggctccttcctggtctggcccagctggcttccccagcccctcagccatccagggctacccactgcttactcagggaccaggcagcccccatggcagtaaaagcagcctagacagaacctgcagctctgtggaaagaggcaaagtcctgaaaaggcaaagggttgtcacttagggcagcttctccaactttaacatgcatccaagtcacctgggaatgttgttaaaatcaggagatctggggtggggcctaggactctgcatttcttacagattcccaggtgagctgatgctggtggttaagggtagcaaatctctaaagcacgaagccctcacaaatctttgccatttcccaaacactccgctccatggtctccagtcatcagagcaactctacctggtattatcatccccattttacagataatgacactgaggctcagaaaggttgaggataagcccactttcctgtcattagtggcagccccagatccagacctaggcctcctggcacccagtccactggcagtggaattgctttcctgagaatcattctgaggctgggctattgcttctcccttgcttcaaagaatctagcagcgggggataggattttgcaacaaaaagctgacccagaggccatacagagcaggaatatcccattgccccctcctccactgggttcagagggtaagaaagcaccctccaataaacccaggctccaggccgtgggggctgctgaaggctctttccccgcaagggccaggtgttgacaccttaaagctggcgcccccagccccactcttggctgtgctggccaggtgactcctagttcttggccacatcatcagaaagtcaaaggtctcactccaggtttggggctccttccttccactcccctccctgccagagtctgtcttggccagtgccagcctcgatgctttggttttgaccccacctgatcctcctttcctcatgcagcacaagtgctcaccggggccagagccagggcatggatatgacaagcagggcagcctggacactgccctcacaggacagcgccaataacaatacagtgtctgagtatctccaggggatgatttctggctctttgtctccaatcagtcccactccctcctgaggtccccaagggcagtattcagagaggtttcctgcgttttatttctatttggtataccctccactgttgtccactgccctgtgtggccttctggttgacctctgcccgatcttctgtctctctgagggaatcagagtccagcatccagccccagctggaacagctgaagtcacaagcctcctctaagccaaggccagtgtgttcagaggtgactgccacccatactaggacaaacacagctcagatcaccaggtcaagcacctaggcctggcttctcctgagacagaggactcagaagtggcctttcctccaaagcctgctcagacacaggtctgtagggccagggtgttctgcttggctgggctgcagctgctacccctcggttggggctgagtcagccagatcctccccctacttctccccaagggccaagaactgctcagggacattaaaggtcaaaagtccagccacactcattcatcctttccccaggcccatgaagagaggcatctcattgtagaatgtatgaggaagtgggaagtatctcagagaatcagctaagtttcctaacttgtccatccaaatgtgatcaccacgattcaacaatttggggcattgctgatctagccgttcctagtggggcttgctcaaggttgcacagcgagtcagtagaagccctggctggccccacttggtaccaatccaccaggcagctcagggctcctgcccagcccagcagcttctgttgtctaacgtatggcaggcagactgggagcaggaaaacagagggccccaaagcccaaggcaccagaaggtttgtttcagtttgctgaagctgatttgtaatgattggcactcttcagccaggggagtgggtaggccatagccaaggatcgattccccaaccacagcaaaggcaacactcttcctccagagatcaccaagcccctcttacctccctccctccttcccaaggctggcactaaccaggtaccacattcattgttaaggaatggctgatgactgctacacgtgttgggaacctggttggggctgtgcagtttgggctggaaggagagatgccagccctcgtgctgcctctggtccctgaagtgtcacctctctcaggacctctcctctggcctgtggggttataagtgatggatagcagaaagggagaactgactcctgtcccaaatagctcctctgccacctgtcctgcagtgggcctgtgtgggttatgattctagatcctagacagaggctgggtcagctgtggatggggtggtgccttggtctctcttgactacctcgtccaaagagagcactgcccttagacaagagttgcttgtcctgctgtgggctgggcttccagctgcagacctccagttgcttggtgttcactttgctcctcttgccctctgtcttctggtccaggcagatcaggggctctggggaaactgctggaactcgaggtgaggatcagccttttccagcatcctgtgagagaccagagagagagtttggatttcatgtggggaaccctcaaggcctgtctggagaagtgacacaggatttactggggtgggctggtccaggtagctctcctgaacctcctccttccccaagctgagaagctgagagctggaggacaatatccagggacatggctctggaaaataacttttttttttttaagagacagggtcttgctctgttgtccaggctggagggcagtgacataatcatagctcactgtacccttgaactcctgggctcaagtgatcctcctgcctcagcctccttagtagctgggactaccagtgcataccaccatgcctgggtgattttttaaattttttatacagacaaggtcttgctatgttgcccaggctgatcttgaattcccgggctcaagtggtcctcctgcctcagcctcccacaggatcgggattacaggcaagagcctccacgcccggccatgaaatataattcttaatatcatacaggaaaaagtcagcgggtcaagctagcctgtggcccagccacaactagctgacaaagcttcctggccttccctttaacacagttctgctgccatagttccatctataaaatgggaatggagggaaataggggaactgggatagagaacacagccttgccaagcagcaatgttagcctgatccttcctccacctagctcgccatctcgcccttggaaaatggctcctggaggattaggcagccatctgcaaggagaggggcaacctgggacaagacacccagagggtaaggattccaggaatgaagctgccatttctggttgggaggagaagaggaaacttttaagagaaagggctccattatgagcatgggttcagggccctgcattacccaatcagaacagccgggatgagcaggaggccagctcccaggaggaaggggaaccccttcataaagttcagagtggctgggtagagtgagttgaagaatgccggaggccgtcagcatggccaggctattcacacaggccacagcagaaaagagagcacctgtgaagaaataaataccatactctggagtccgaaagggccatattccaactctggcaccaccacctcacagctgtgtgaccgggagtagtcacttaacctatgtctccccttcctcaccagtaaatcctgctacatcatgtactgtgacaaggattcagtaaggtcatatgtggacagtagctggcacagaggggctactaaacaaatggctgctattaaatccacattaaaagtacatgtgatctgacagaacccagcacataaaagaaaaaaaaaagtacatgtgatattgtct

SEQ ID NO: 4244 - protein, 690 aa, Homosapiens; identical to SEQ ID NO: 4242

SEQ ID NO: 4245 - DNA, 2922 bp, Homosapiens
gcttttgggggcggggagcctgtacgcagccaccgttagggtcactcggctctgatctaggtcccatccgcctcctccacgccatctccagttccttcccttgcatcttgtgctcgaggtccaagggcggagtagcgaagcccttcctgacacccgactcctcccccaggagcagcaggtggatggcgacctgcttctgcggctcacggaggaggaactccagaccgacctgggcatgaaatcgggcatcacccgcaagaggttctttagggagctcacggagctcaagaccttcgccaactattctacgtgcgaccgcagcaacctggcggactggctgggcagcctggacccgcgcttccgccagtacacctacggcctggtcagctgcggcctggaccgctccctgctgcaccgcgtgtctgagcagcagctgctggaagactgcggcatccacctgggcgtgcaccgcgcccgcatcctcacggcggccagagaaatgctacactccccgctgccctgtactggtggcaaacccagtggggacactccagatgtcttcatcagctaccgccggaactcaggttcccagctggccagtctcctgaaggtgcacctgcagctgcatggcttcagtgtcttcattgatgtggagaagctggaagcaggcaagttcgaggacaaactcatccagagtgtcatgggtgcccgcaactttgtgttggtgctatcacctggagcactggacaagtgcatgcaagaccatgactgcaaggattgggtgcataaggagattgtgactgctttaagctgcggcaagaacattgtgcccatcattgatggcttcgagtggcctgagccccaggtcctgcctgaggacatgcaggctgtgcttactttcaacggtatcaagtggtcccacgaataccaggaggccaccattgagaagatcatccgcttcctgcagggccgctcctcccgggactcatctgcaggctctgacaccagtttggagggtgctgcacccatgggtccaacctaaccagtccccagttccccagccctgctgtgacttccatttccatcgtcctttctgaaggaacagctcctgaaaccagtctccctgggctgagacaacctgggctcttcttaggaaatggctctccctccccctgtcccccaccctcatggcccacctccaacccactttcctcagtatctggagagggaagggaagtcaggcttgggcacgggaggttagaactcccccaggccctgccattgggttgtctgtctccgtcatggggagggtccctgctcagttctggagacactggagttggggtgggggtggttctgcattcccttctcctgctgatagcagtcagcttgaggaggatgaaggaaggcagcctcagacaggaattaaggcaatgcccaggcgggcctgggcactgtattctgagcaaaggcctgggcccaggagccagccagggatgagtgccatcatggctctccactcagactgtgcctggcccctgcacttacaacttcctgccgctctgtggccttgccctgtaatcactcagtgcccttagctagcctgactaagtcccagatcccctacagcttccttcggtgtggtatcttttgccacatccagggcgagggttgaggcaaaccagccctccctctgacttccttgtcactgcagccagctttgctgcacttgctggtgcacaggagcctcctgtttgggcctgggtctgggcatggggaggccgtgcctcaaagcccaccctaccccatgccttggtgctgtgcctcaggctccttcctggtctggcccagctggcttccccagcccctcagccatccagggctacccactgcttactcagggaccaggcagcccccatggcagtaaaagcagcctagacagaacctgcagctctgtggaaagaggcaaagtcctgaaaaggcaaagggttgtcacttagggcagcttctccaactttaacatgcatccaagtcacctgggaatgttgttaaaatcaggagatctggggtggggcctaggactctgcatttcttacagattcccaggtgagctgatgctggtggttaagggtagcaaatctctaaagcacgaagccctcacaaatctttgccatttcccaaacactccgctccatggtctccagtcatcagagcaactctacctggtattatcatccccattttacagataatgacactgaggctcagaaaggttgaggataagcccactttcctgtcattagtggcagccccagatccagacctaggcctcctggcacccagtccactggcagtggaattgctttcctgagaatcattctgaggctgggctattgcttctcccttgcttcaaagaatctagcagcgggggataggattttgcaacaaaaagctgacccagaggccatacagagcaggaatatcccattgccccctcctccactgggttcagagggtaagaaagcaccctccaataaacccaggctccaggccgtgggggctgctgaaggctctttccccgcaagggccaggtgttgacaccttaaagctggcgcccccagccccactcttggctgtgctggccaggtgactcctagttcttggccacatcatcagaaagtcaaaggtctcactccaggtttggggctccttccttccactcccctccctgccagagtctgtcttggccagtgccagcctcgatgctttggttttgaccccacctgatcctcctttcctcatgcagcacaagtgctcaccggggccagagccagggcatggatatgacaagcagggcagcctggacactgccctcacaggacagcgccaataacaatacagtgtctgagtatctccagggga

SEQ ID NO: 4246 - protein, 268 aa, Homosapiens
MKSGITRKRFFRELTELKTFANYSTCDRSNLADWLGSLDPRFRQYTYGLVSCGLDRSLLHRVSEQQLLEDCGIHLGVHRARILTAAREMLHSPLPCTGGKPSGDTPDVFISYRRNSGSQLASLLKVHLQLHGFSVFIDVEKLEAGKFEDKLIQSVMGARNFVLVLSPGALDKCMQDHDCKDWVHKEIVTALSCGKNIVPIIDGFEWPEPQVLPEDMQAVLTFNGIKWSHEYQEATIEKIIRFLQGRSSRDSSAGSDTSLEGAAPMGPT

SEQ ID NO: 4247 - DNA, 6482 bp, Homosapiens
acagcgcaagccccacgccacgcgtcgctggtcccaggcagcgagtcgctcgcgcgccccgccgcccgcctggcgacagctccgccgcgcacgcacatggaggggagcgcgagccccccggaaaagccccgcgcccgccctgcggctgccgtgctgtgccggggcccggtagagccgctggtcttcctggccaactttgccttggtcctgcagggcccgctcaccacgcagtatctgtggcaccgcttcagcgccgacctcggctacaatggcacccgccaaagggggggctgcagcaaccgcagcgcggaccccaccatgcaggaagtggagacccttacctcccactggaccctctacatgaacgtgggcggcttcctggtggggctcttctcgtccaccctgctgggagcttggagcgacagtgtgggccgccgcccgctgctagtgctggcctcgctgggcctgctgctccaggccctagtgtccgtttttgtggtgcagctgcagctccacgtcggctacttcgtgctgggtcgcatcctttgtgccctcctcggcgacttcggtggccttctggctgctagctttgcgtccgtggcagatgtcagctccagtcgcagccgcaccttccggatggccctgctggaagccagcatcggggtggctgggatgctggcaagcctcctcgggggccactggctccgggcccagggttatgccaaccccttctggctggccttggccttgctgatagccatgactctctatgcagctttctgctttggtgagaccttaaaggagccaaagtccacccggctcttcacgttccgtcaccaccgatccattgtccagctctatgtggctcccgccccagagaagtccaggaaacatttagccctctactcactggccatcttcgtggtgatcactgtgcactttggggcccaggacatcttaaccctttatgaactaagcacacccctctgctgggactccaaactaatcggctatggttctgcagctcagcatctcccctacctcaccagcctgctggccctgaagctcctgcagtactgcctggccgatgcctgggtagctgagatcggcctggccttcaacatcctggggatggtggtctttgcctttgccactatcacgcctctcatgttcacaggatatgggttgcttttcctgtcattagtcatcacacctgtcatccgggctaaactctccaagctggtgagagagacagagcagggtgctctcttttctgctgtggcctgtgtgaatagcctggccatgctgacggcctccggcattcttcaactcactctacccagccactctgaactttatgaaggggttccccttcctcctgggagctggcctcctgctcatcccggctgttctgattgggatgctggaaaaggctgatcctcacctcgagttccagcagtttccccagagcccctgatctgcctggaccagaagacagagggcaagaggagcaaagtgaacaccaagcaactggaggtctgcagctggaagcccagcccacagcaggacaagcaactcttgtctaagggcagtgctctctttggacgaggtagtcaagagagaccaaggcaccaccccatccacagctgacccagcctctgtctaggatctagaatcataacccacacaggcccactgcaggacaggtggcagaggagctatttgggacaggagtcagttctccctttctgctatccatcacttataaccccacaggccagaggagaggtcctgagagaggtgacacttcagggaccagaggcagcacgagggctggcatctctccttccagcccaaactgcacagccccaaccaggttcccaacacgtgtagcagtcatcagccattccttaacaatgaatgtggtacctggttagtgccagccttgggaaggagggagggaggtaagaggggcttggtgatctctggaggaagagtgttgcctttgctgtggttggggaatcgatccttggctatggcctacccactcccctggctgaagagtgccaatcattacaaatcagcttcagcaaactgaaacaaaccttctggtgccttgggctttggggccctctgttttcctgctcccagtctgcctgccatacgttagacaacagaagctgctgggctgggcaggagccctgagctgcctggtggattggtaccaagtggggccagccagggcttctactgactcgctgtgcaaccttgagcaagccccactaggaacggctagatcagcaatgccccaaattgttgaatcgtggtgatcacatttggatggacaagttaggaaacttagctgattctctgagatacttcccacttcctcatacattctacaatgagatgcctctcttcatgggcctggggaaaggatgaatgagtgtggctggacttttgacctttaatgtccctgagcagttcttggcccttggggagaagtagggggaggatctggctgactcagccccaaccgaggggtagcagctgcagcccagccaagcagaacaccctggccctacagacctgtgtctgagcaggctttggaggaaaggccacttctgagtcctctgtctcaggagaagccaggcctaggtgcttgacctggtgatctgagctgtgtttgtcctagtatgggtggcagtcacctctgaacacactggccttggcttagaggaggcttgtgacttcagctgttccagctggggctggatgctggactctgattccctcagagagacagaagatcgggcagaggtcaaccagaaggccacacagggcagtggacaacagtggagggtataccaaatagaaataaaacgcaggaaacctctctgaatactgcccttggggacctcaggagggagtgggactgattggagacaaagagccagaaatcatcccctggagatactcagacactgtattgttattggcgctgtcctgtgagggcagtgtccaggctgccctgcttgtcatatccatgccctggctctggccccggtgagcacttgtgctgcatgaggaaaggaggatcaggtggggtcaaaaccaaagcatcgaggctggcactggccaagacagactctggcagggaggggagtggaaggaaggagccccaaacctggagtgagacctttgactttctgatgatgtggccaagaactaggagtcacctggccagcacagccaagagtggggctgggggcgccagctttaaggtgtcaacacctggcccttgcggggaaagagccttcagcagcccccacggcctggagcctgggtttattggagggtgctttcttaccctctgaacccagtggaggagggggcaatgggatattcctgctctgtatggcctctgggtcagctttttgttgcaaaatcctatcccccgctgctagattctttgaagcaagggagaagcaatagcccagcctcagaatgattctcaggaaagcaattccactgccagtggactgggtgccaggaggcctaggtctggatctggggctgccactaatgacaggaaagtgggcttatcctcaacctttctgagcctcagtgtcattatctgtaaaatggggatgataataccaggtagagttgctctgatgactggagaccatggagcggagtgtttgggaaatggcaaagatttgtgagggcttcgtgctttagagatttgctacccttaaccaccagcatcagctcacctgggaatctgtaagaaatgcagagtcctaggccccaccccagatctcctgattttaacaacattcccaggtgacttggatgcatgttaaagttggagaagctgccctaagtgacaaccctttgccttttcaggactttgcctctttccacagagctgcaggttctgtctaggctgcttttactgccatgggggctgcctggtccctgagtaagcagtgggtagccctggatggctgaggggctggggaagccagctgggccagaccaggaaggagcctgaggcacagcaccaaggcatggggtagggtgggctttgaggcacggcctccccatgcccagacccaggcccaaacaggaggctcctgtgcaccagcaagtgcagcaaagctggctgcagtgacaaggaagtcagagggagggctggtttgcctcaaccctcgccctggatgtggcaaaagataccacaccgaaggaagctgtaggggatctgggacttagtcaggctagctaagggcactgagtgattacagggcaaggccacagagcggcaggaagttgtaagtgcaggggccaggcacagtctgagtggagagccatgatggcactcatccctggctggctcctgggcccaggcctttgctcagaatacagtgcccaggcccgcctgggcattgccttaattcctgtctgaggctgccttccttcatcctcctcaagctgactgctatcagcaggagaagggaatgcagaaccacccccaccccaactccagtgtctccagaactgagcagggaccctccccatgacggagacagacaacccaatggcagggcctgggggagttctaacctcccgtgcccaagcctgacttcccttccctctccagatactgaggaaagtgggttggaggtgggccatgagggtgggggacagggggagggagagccatttcctaagaagagcccaggttgtctcagcccagggagactggtttcaggagctgttccttcagaaaggacgatggaaatggaagtcacagcagggctggggaactggggactggttaggttggacccatgggtgcagcaccctccaaactggtgtcagagcctgcagatgagtcccgggaggagcggccctgcaggaagcggatgatcttctcaatggtggcctcctggtattcgtgggaccacctgtgggcacaggagccaatgtggttcagacagctgggcagagggagctgctagtcagctgtttgcccacactctgcctgtcatggtgatttgtaccctacccccctggtcccagggccctggggctcacttgataccgttgaaagtaagcacagcctgcatgtcctcaggcaggacctggggctcaggccactcgaagccatcaatgatgggcacaatgttcttgccgcagcttaaagcagtcacaatctcctggagaaagaaaggaaaggaggaagatacccctgtacccatctagggacccttgtagccaggcaggtgctgggaggcccactggcccgaggctgggcccagggcaggacaccagtcctgatgtccaccttgatgtctaccttaacccttgtagtgtaataaaaaataaatatttttcctttgcccagagttcctggcacagagctgctaaaacccttggaatctcttgagtgatgagtgtctttgtatgctaaagagatgattccccactgggggcccggggggtgctatgggggtagcctagatagtttcaggaagagggctggtcaccagggagaccagggcatgactagaggattggaactttcagccccacctcccagcctccagagaggtgctggagattgagttcaatcaccaatggccaatgatttaatcaatcatgcctacataatggaacctccataaaaacccccaaacaaggggttttgaagagcctccaggttgataaacaggtgtaggtgctgggaaggtggtagaaggcatggcatccacacctccaccctccatacgtagagatcctatgtatctcttccatttggctattcttgagctgtgtcctttataactgtgaaattaaataattcagctgggcatggtgggtcacgcctgtaatcccaacactttgggaggctgaggcaggaggatcacttgagcccaggattttgagattaataatattatttattactattattcaagctttgttaaatcaaacctaaagctcttggaactttaagttattctgagccttgacaggaattggtctctgcagcctgagtcatggggcatgcagctgcaacttccacctattttttttttttctgtaattacttaggaagaccaaatggcaccagagataagactcccttagatccccacttagatcaccaccctttctcagggggtaataaagtcatcttccttggaatgtagcaatctataaccaatcaaagcactgtaacatacgcactggtcttgtatggaaaatgttgtaatcctgctaaaattcctctctctttgcctgtggaagtgaaaccttaacttctccagtttggaatgctcaccccatgcctttggagtcaatgcttactgggtggctattctcaaactttgcactcaaagaaactctatacttagtcttattttctgaatctcattatttaaggttgacataataaacaactaatagtaagt

SEQ ID NO: 4248 - protein, 446 aa, Homosapiens
MEGSASPPEKPRARPAAAVLCRGPVEPLVFLANFALVLQGPLTTQYLWHRFSADLGYNGTRQRGGCSNRSADPTMQEVETLTSHWTLYMNVGGFLVGLFSSTLLGAWSDSVGRRPLLVLASLGLLLQALVSVFVVQLQLHVGYFVLGRILCALLGDFGGLLAASFASVADVSSSRSRTFRMALLEASIGVAGMLASLLGGHWLRAQGYANPFWLALALLIAMTLYAAFCFGETLKEPKSTRLFTFRHHRSIVQLYVAPAPEKSRKHLALYSLAIFVVITVHFGAQDILTLYELSTPLCWDSKLIGYGSAAQHLPYLTSLLALKLLQYCLADAWVAEIGLAFNILGMVVFAFATITPLMFTGYGLLFLSLVITPVIRAKLSKLVRETEQGALFSAVACVNSLAMLTASGILQLTLPSHSELYEGVPLPPGSWPPAHPGCSDWDAGKG

SEQ ID NO: 4249 - DNA, 2127 bp, Homosapiens
caagaacattgtgcccatcattgatggcttcgagtggcctgagccccaggtcctgcctgaggacatgcaggctgtgcttactttcaacggtatcaagtgagccccagggccctgggaccaggggggtagggtacaaatcaccatgacaggcagagtgtgggcaaacagctgactagcagctccctctgcccagctgtctgaaccacattggctcctgtgcccacaggtggtcccacgaataccaggaggccaccattgagaagatcatccgcttcctgcagggccgctcctcccgggactcatctgcaggctctgacaccagtttggagggtgctgcacccatgggtccaacctaaccagtccccagttccccagccctgctgtgacttccatttccatcgtcctttctgaaggaacagctcctgaaaccagtctccctgggctgagacaacctgggctcttcttaggaaatggctctccctccccctgtcccccaccctcatggcccacctccaacccactttcctcagtatctggagagggaagggaagtcaggcttgggcacgggaggttagaactcccccaggccctgccattgggttgtctgtctccgtcatggggagggtccctgctcagttctggagacactggagttggggtgggggtggttctgcattcccttctcctgctgatagcagtcagcttgaggaggatgaaggaaggcagcctcagacaggaattaaggcaatgcccaggcgggcctgggcactgtattctgagcaaaggcctgggcccaggagccagccagggatgagtgccatcatggctctccactcagactgtgcctggcccctgcacttacaacttcctgccgctctgtggccttgccctgtaatcactcagtgcccttagctagcctgactaagtcccagatcccctacagcttccttcggtgtggtatcttttgccacatccagggcgagggttgaggcaaaccagccctccctctgacttccttgtcactgcagccagctttgctgcacttgctggtgcacaggagcctcctgtttgggcctgggtctgggcatggggaggccgtgcctcaaagcccaccctaccccatgccttggtgctgtgcctcaggctccttcctggtctggcccagctggcttccccagcccctcagccatccagggctacccactgcttactcagggaccaggcagcccccatggcagtaaaagcagcctagacagaacctgcagctctgtggaaagaggcaaagtcctgaaaaggcaaagggttgtcacttagggcagcttctccaactttaacatgcatccaagtcacctgggaatgttgttaaaatcaggagatctggggtggggcctaggactctgcatttcttacagattcccaggtgagctgatgctggtggttaagggtagcaaatctctaaagcacgaagccctcacaaatctttgccatttcccaaacactccgctccatggtctccagtcatcagagcaactctacctggtattatcatccccattttacagataatgacactgaggctcagaaaggttgaggataagcccactttcctgtcattagtggcagccccagatccagacctaggcctcctggcacccagtccactggcagtggaattgctttcctgagaatcattctgaggctgggctattgcttctcccttgcttcaaagaatctagcagcgggggataggattttgcaacaaaaagctgacccagaggccatacagagcaggaatatcccattgcccccttaaagctggcgcccccagccccactcttggctgtgctggccaggtgactcctagttcttggccacatcatcagaaagtcaaaggtctcactccaggtttggggctccttccttccactcccctccctgccagagtctgtcttggccagtgccagcctcgatgctttggttttgaccccacctgatcctcctttcctcatgcagcacaagtgctcaccggggccagagccagggcatggatatgacaagcagggcagcctggacactgccctcacaggacagcgccaataacaatacagtgtctgagtatctccaggg

SEQ ID NO: 4250 - protein, 136 aa, Homosapiens
MAHLQPTFLSIWRGKGSQAWAREVRTPPGPAIGLSVSVMGRVPAQFWRHWSWGGGGSAFPSPADSSQLEEDEGRQPQTGIKAMPRRAWALYSEQRPGPRSQPGMSAIMALHSDCAWPLHLQLPAALWPCPVITQCP

SEQ ID NO: 4251 - DNA, 4340 bp, Homosapiens
gtccgtttttgtggtgcagctgcagctccacgtcggctacttcgtgctgggtcgcatcctttgtgccctcctcggcgacttcggtggccttctggctgctagctttgcgtccgtggcagatgtcagctccagtcgcagccgcaccttccggatggccctgctggaagccagcatcggggtggctgggatgctggcaagcctcctcgggggccactggctccgggcccagggttatgccaaccccttctggctggccttggccttgctgatagccatgactctctatgcagctttctgctttggtgagaccttaaaggagccaaagtccacccggctcttcacgttccgtcaccaccgatccattgtccagctctatgtggctcccgccccagagaagtccaggaaacatttagccctctactcactggccatcttcgtggtgatcactgtgcactttggggcccaggacatcttaaccctttatgaactaagcacacccctctgctgggactccaaactaatcggctatggttctgcagctcagcatctcccctacctcaccagcctgctggccctgaagctcctgcagtactgcctggccgatgcctgggtagctgagatcggcctggccttcaacatcctggggatggtggtctttgcctttgccactatcacgcctctcatgttcacaggtaaagtgtgtgggctcagggacagcttgtcccagaggcactgggtaagaactgggggccggccactcactgcccccagatgtggttcattcctgtgtctttggaaacatagttatgcccccagcctgcactggagaacagacaactaagaaatccctcaaaaatgccatctttgatacatggaaaatatagaccttcagtagctaaagtaattaacccactgttatcaaccattaatattgttagtaatatagagcaaaagacaaaagtgtggctcatacactaattgctttaccccttggcctcccaccgcctattcatatgttcttaaacaaagtccatgccattaatgcctggtactcacttctctgataagaatcacaggacctacctcaaatacccttagtcagcttctttgggttttttaaaaaccagtcttctcggaccacagatatgaaattcctgcttcagttcctcttctcctctttctccttctcctttccctcctcacttcctccccttctttttttgatgggagagggtcaacaggccagtaaatgaggaagttaactttttaaaatttttatttgattgatgtatttagagacagggtctcgctttgttacccaggctagagtgcagtggcacgatcatggctcactgcagcctcatcccccgggcccagatgatcctcccaccttggcctctctagtagctgggaccactggtgcacattaccacaccttgctaatttttgtattttttatagagatggggtcctcaccattttgcccagtccaggtctctaactcctgagctcaaggatccgcctgcctcagcctcccaaagtgttgggattacaggcatgagccaccgtgcccggctttagttaactttttttaaagggacagatttattttgatagagccctaaaatgtgctgtgtatagtcaacaatacaataatcacagatttcttaactcaactgcttgtctgacaattaagcagaagggaacctttccctcctgctgatggccctgggggatgcagagatgataaagatgctgtcattgctctgggtcggggggaggtctcaacagagtgggatttgaggggcctgacactgctagggtccctggatgcctcatcgtataccttctttggaggatccactgtcctgtaggagtttgcagttttgctgaggagtcagcagtcgcacagggagagaaatggttatgaagaaaacaggaagcctgtaagtaactgaatgcaaagggaaaaggaactcccatttgctgtgtccctatgccatgctcttcatagatgttacctttttacctcatgtattggttccctgagattgctgtaatgacataccacaaacttgggggcttaacacaacagaaacatattctctcacagttctggaggccagaagtccaaagtcagtaccaccgggctgaatggaagcagtcagcaggcagtgctcccttgcaagcctccaggagagaacgtgtttctcatttcttccagcttctggggctgctggcattccttggcttggggcggccatcaccagtctctgcctctgtgctcacattgactctcctcctctttgtgccttctcaattctgtcggtgccaaatctccgtctgctttcctcttataaagatatgtgtgacggcatttagggcccaacctaatccaggataactctgctctctcaggaggcttaactgcacacctgcatagactcattttccaaataaggtagtatttacaggttccagggctatgaatctgatgccattgggcaccattattcagcctcctatgcctcagaaccatcctgtgatgaaggccttattatcttcctcatacagggagtcaggatcagagagggtaagtaccccaggccacacagataatatgtaatggcatcaggttttgaactcagggctgactccaaagcccatgcttgttttctgtgccctgccatatccctactaagtgccaagtgggtgggtgatgcctgtgtgaatagcctggccatgctgacggcctccggcattcttcaactcactctacccagccactctgaactttatgaaggggttccccttcctcctgggagctggcctcctgctcatcccggctgttctgattgggatgctggaaaaggctgatcctcacctcgagttccagcagtttccccagagcccctgatctgcctggaccagaagacagagggcaagaggagcaaagtgaacaccaagcaactggaggtctgcagctggaagcccagcccacagcaggacaagcaactcttgtctaagggcagtgctctctttggacgaggtagtcaagagagaccaaggcaccaccccatccacagctgacccagcctctgtctaggatctagaatcataacccacacaggcccactgcaggacaggtggcagaggagctatttgggacaggagtcagttctccctttctgctatccatcacttataaccccacaggccagaggagaggtcctgagagaggtgacacttcagggaccagaggcagcacgagggctggcatctctccttccagcccaaactgcacagccccaaccaggttcccaacacgtgtagcagtcatcagccattccttaacaatgaatgtggtacctggttagtgccagccttgggaaggagggagggaggtaagaggggcttggtgatctctggaggaagagtgttgcctttgctgtggttggggaatcgatccttggctatggcctacccactcccctggctgaagagtgccaatcattacaaatcagcttcagcaaactgaaacaaaccttctggtgccttgggctttggggccctctgttttcctgctcccagtctgcctgccatacgttagacaacagaagctgctgggctgggcaggagccctgagctgcctggtggattggtaccaagtggggccagccagggcttctactgactcgctgtgcaaccttgagcaagccccactaggaacggctagatcagcaatgccccaaattgttgaatcgtggtgatcacatttggatggacaagttaggaaacttagctgattctctgagatacttcccacttcctcatacattctacaatgagatgcctctcttcatgggcctggggaaaggatgaatgagtgtggctggacttttgacctttaatgtccctgagcagttcttggcccttggggagaagtagggggaggatctggctgactcagccccaaccgaggggtagcagctgcagcccagccaagcagaacaccctggccctacagacctgtgtctgagcaggctttggaggaaaggccacttctgagtcctctgtctcaggagaagccaggcctaggtgcttgacctggtgatctgagctgtgtttgtcctagtatgggtggcagtcacctctgaacacactggccttggcttagaggaggcttgtgacttcagctgttccagctggggctggatgctggactctgattccctcagagagacagaagatcgggcagaggtcaaccagaaggccacacagggcagtggacaacagtggagggtataccaaatagaaataaaacgcaggaaacctctctg

SEQ ID NO: 4252 - protein, 83 aa, Homosapiens
MASGFELRADSKAHACFLCPAISLLSAKWVGDACVNSLAMLTASGILQLTLPSHSELYEGVPLPPGSWPPAHPGCSDWDAGKG

SEQ ID NO: 4253 - DNA, 3537 bp, Homosapiens
gtccgtttttgtggtgcagctgcagctccacgtcggctacttcgtgctgggtcgcatcctttgtgccctcctcggcgacttcggtggccttctggctgctagctttgcgtccgtggcagatgtcagctccagtcgcagccgcaccttccggatggccctgctggaagccagcatcggggtggctgggatgctggcaagcctcctcgggggccactggctccgggcccagggttatgccaaccccttctggctggccttggccttgctgatagccatgactctctatgcagctttctgctttggtgagaccttaaaggagccaaagtccacccggctcttcacgttccgtcaccaccgatccattgtccagctctatgtggctcccgccccagagaagtccaggaaacatttagccctctactcactggccatcttcgtggtgatcactgtgcactttggggcccaggacatcttaaccctttatgaactaagcacacccctctgctgggactccaaactaatcggctatggttctgcagctcagcatctcccctacctcaccagcctgctggccctgaagctcctgcagtactgcctggccgatgcctgggtagctgagatcggcctggccttcaacatcctggggatggtggtctttgcctttgccactatcacgcctctcatgttcacaggtaaagtgtgtgggctcagggacagcttgtcccagaggcactgggtaagaactgggggccggccactcactgcccccagatgtggttcattcctgtgtctttggaaacatagttatgcccccagcctgcactggagaacagacaactaagaaatccctcaaaaatgccatctttgatacatggaaaatatagaccttcagtagctaaagtaattaacccactgttatcaaccattaatattgttagtaatatagagcaaaagacaaaagtgtggctcatacactaattgctttaccccttggcctcccaccgcctattcatatgttcttaaacaaagtccatgccattaatgcctggtactcacttctctgataagaatcacaggacctacctcaaatacccttagtcagcttctttgggttttttaaaaaccagtcttctcggaccacagatatgaaattcctgcttcagttcctcttctcctctttctccttctcctttccctcctcacttcctccccttctttttttgatgggagagggtcaacaggccagtaaatgaggaagttaactttttaaaatttttatttgattgatgtatttagagacagggtctcgctttgttacccaggctagagtgcagtggcacgatcatggctcactgcagcctcatcccccgggcccagatgatcctcccaccttggcctctctagtagctgggaccactggtgcacattaccacaccttgctaatttttgtattttttatagagatggggtcctcaccattttgcccagtccaggtctctaactcctgagctcaaggatccgcctgcctcagcctcccaaagtgttgggattacaggcatgagccaccgtgcccggctttagttaactttttttaaagggacagatttattttgatagagccctaaaatgtgctgtgtatagtcaacaatacaataatcacagatttcttaactcaactgcttgtctgacaattaagcagaagggaacctttccctcctgctgatggccctgggggatgcagagatgataaagatgctgtcattgctctgggtcggggggaggtctcaacagagtgggatttgaggggcctgacactgctagggtccctggatgcctcatcgtataccttctttggaggatccactgtcctgtaggagtttgcagttttgctgaggagtcagcagtcgcacagggagagaaatggttatgaagaaaacaggaagcctgtaagtaactgaatgcaaagggaaaaggaactcccatttgctgtgtccctatgccatgctcttcatagatgttacctttttacctcatgtattggttccctgagattgctgtaatgacataccacaaacttgggggcttaacacaacagaaacatattctctcacagttctggaggccagaagtccaaagtcagtaccaccgggctgaatggaagcagtcagcaggcagtgctcccttgcaagcctccaggagagaacgtgtttctcatttcttccagcttctggggctgctggcattccttggcttggggcggccatcaccagtctctgcctctgtgctcacattgactctcctcctctttgtgccttctcaattctgtcggtgccaaatctccgtctgctttcctcttataaagatatgtgtgacggcatttagggcccaacctaatccaggataactctgctctctcaggaggcttaactgcacacctgcatagactcattttccaaataaggtagtatttacaggttccagggctatgaatctgatgccattgggcaccattattcagcctcctatgcctcagaaccatcctgtgatgaaggccttattatcttcctcatacagggagtcaggatcagagagggtaagtaccccaggccacacagataatatgtaatggcatcaggttttgaactcagggctgactccaaagcccatgcttgttttctgtgccctgccatatccctactaagtgccaagtgggtgggtgatgcctgtgtgaatagcctggccatgctgacggcctccggcattcttcaactcactctacccagccactctgaactttatgaaggggttccccttcctcctgggagctggcctcctgctcatcccggctgttctgattgggatgctggaaaaggctgatcctcacctcgagttccagcagtttccccagagcccctgatctgcctggaccagaagacagagggcaagaggagcaaagtgaacaccaagcaactggaggtctgcagctggaagcccagcccacagcaggacaagcaactcttgtctaagggcagtgctctctttggacgaggtagtcaagagagaccaaggcaccaccccatccacagctgacccagcctctgtctaggatctagaatcataacccacacaggcccactgcaggacaggtggcagaggagctatttgggacaggagtcagttctccctttctgctatccatcacttataaccccacaggccagaggagaggtcctgagagaggtgacacttcagggaccagaggcagcacgagggctggcatctctccttccagcccaaactgcacagccccaaccaggttcccaacacgtgtagcagtcatcagccattccttaacaatgaatgtggtacctggttagtgccagccttgggaaggagggagggaggtaagaggggcttggtgatctctggaggaagagtgttgcctttgctgtggttggggaatcgatccttggctatggcctacccactcccctggctgaagagtgccaatcattacaaatcagcttcagcaaactg

SEQ ID NO: 4254 - protein, 83 aa, Homosapiens; identical to SEQ ID NO: 4252

SEQ ID NO: 4255 - DNA, 2004 bp, Homosapiens
gccccacgccacgcgtcgctggtcccaggcagcgagtcgctcgcgcgccccgccgcccgcctggcgacagctccgccgcgcacgcacatggaggggagcgcgagccccccggaaaagccccgcgcccgccctgcggctgccgtgctgtgccggggcccggtagagccgctggtcttcctggccaactttgccttggtcctgcagggcccgctcaccacgcagtatctgtggcaccgcttcagcgccgacctcggctacaatggcacccgccaaagggggggctgcagcaaccgcagcgcggaccccaccatgcaggaagtggagacccttacctcccactggaccctctacatgaacgtgggcggcttcctggtggggctcttctcgtccaccctgctgggagcttggagcgacagtgtgggccgccgcccgctgctagtgctggcctcgctgggcctgctgctccaggccctagtgtccgtttttgtggtgcagctgcagctccacgtcggctacttcgtgctgggtcgcatcctttgtgccctcctcggcgacttcggtggccttctggctgctagctttgcgtccgtggcagatgtcagctccagtcgcagccgcaccttccggatggccctgctggaagccagcatcggggtggctgggatgctggcaagcctcctcgggggccactggctccgggcccagggttatgccaaccccttctggctggccttggccttgctgatagccatgactctctatgcagctttctgctttggtgagaccttaaaggagccaaagtccacccggctcttcacgttccgtcaccaccgatccattgtccagctctatgtggctcccgccccagagaagtccaggaaacatttagccctctactcactggccatcttcgtggtgatcactgtgcactttggggcccaggacatcttaaccctttatgaactaagcacacccctctgctgggactccaaactaatcggctatggttctgcagctcagcatctcccctacctcaccagcctgctggccctgaagctcctgcagtactgcctggccgatgcctgggtagctgagatcggcctggccttcaacatcctggggatggtggtctttgcctttgccactatcacgcctctcatgttcacaggtgctctcttttctgctgtggcctgtgtgaatagcctggccatgctgacggcctccggcattcttcaactcactctacccagccactctgaactttatgaaggggttccccttcctcctgggagctggcctcctgctcatcccggctgttctgattgggatgctggaaaaggctgatcctcacctcgagttccagcagtttccccagagcccctgatctgcctggaccagaagacagagggcaagaggagcaaagtgaacaccaagcaactggaggtctgcagctggaagcccagcccacagcaggacaagcaactcttgtctaagggcagtgctctctttggacgaggtagtcaagagagaccaaggcaccaccccatccacagctgacccagcctctgtctaggatctagaatcataacccacacaggcccactgcaggacaggtggcagaggagctatttgggacaggagtcagttctccctttctgctatccatcacttataaccccacaggccagaggagaggtcctgagagaggtgacacttcagggaccagaggcagcacgagggctggcatctctccttccagcccaaactgcacagccccaaccaggttcccaacacgtgtagcagtcatcagccattccttaacaatgaatgtggtacctggttagtgccagccttgggaaggagggagggaggtaagaggggcttggtgatctctggaggaagagtgttgcctttgctgtggttggggaatcgatccttggctatggcctacccactcccctggctgaagagtgccaatcattacaaatcagcttcagcaaactg

SEQ ID NO: 4256 - protein, 418 aa, Homosapiens
MEGSASPPEKPRARPAAAVLCRGPVEPLVFLANFALVLQGPLTTQYLWHRFSADLGYNGTRQRGGCSNRSADPTMQEVETLTSHWTLYMNVGGFLVGLFSSTLLGAWSDSVGRRPLLVLASLGLLLQALVSVFVVQLQLHVGYFVLGRILCALLGDFGGLLAASFASVADVSSSRSRTFRMALLEASIGVAGMLASLLGGHWLRAQGYANPFWLALALLIAMTLYAAFCFGETLKEPKSTRLFTFRHHRSIVQLYVAPAPEKSRKHLALYSLAIFVVITVHFGAQDILTLYELSTPLCWDSKLIGYGSAAQHLPYLTSLLALKLLQYCLADAWVAEIGLAFNILGMVVFAFATITPLMFTGALFSAVACVNSLAMLTASGILQLTLPSHSELYEGVPLPPGSWPPAHPGCSDWDAGKG

SEQ ID NO: 4257 - DNA, 2097 bp, Homosapiens
acagcgcaagccccacgccacgcgtcgctggtcccaggcagcgagtcgctcgcgcgccccgccgcccgcctggcgacagctccgccgcgcacgcacatggaggggagcgcgagccccccggaaaagccccgcgcccgccctgcggctgccgtgctgtgccggggcccggtagagccgctggtcttcctggccaactttgccttggtcctgcagggcccgctcaccacgcagtatctgtggcaccgcttcagcgccgacctcggctacaatggcacccgccaaagggggggctgcagcaaccgcagcgcggaccccaccatgcaggaagtggagacccttacctcccactggaccctctacatgaacgtgggcggcttcctggtggggctcttctcgtccaccctgctgggagcttggagcgacagtgtgggccgccgcccgctgctagtgctggcctcgctgggcctgctgctccaggccctagtgtccgtttttgtggtgcagctgcagctccacgtcggctacttcgtgctgggtcgcatcctttgtgccctcctcggcgacttcggtggccttctggctgctagctttgcgtccgtggcagatgtcagctccagtcgcagccgcaccttccggatggccctgctggaagccagcatcggggtggctgggatgctggcaagcctcctcgggggccactggctccgggcccagggttatgccaaccccttctggctggccttggccttgctgatagccatgactctctatgcagctttctgctttggtgagaccttaaaggagccaaagtccacccggctcttcacgttccgtcaccaccgatccattgtccagctctatgtggctcccgccccagagaagtccaggaaacatttagccctctactcactggccatcttcgtggtgatcactgtgcactttggggcccaggacatcttaaccctttatgaactaagcacacccctctgctgggactccaaactaatcggctatggttctgcagctcagcatctcccctacctcaccagcctgctggccctgaagctcctgcagtactgcctggccgatgcctgggtagctgagatcggcctggccttcaacatcctggggatggtggtctttgcctttgccactatcacgcctctcatgttcacaggatatgggttgcttttcctgtcattagtcatcacacctgtcatccgggctaaactctccaagctggtgagagagacagagcagggtgctctcttttctgctgtggcctgtgtgaatagcctggccatgctgacggcctccggcattcttcaactcactctacccagccactctgaactttatgaaggggttccccttcctcctgggagctggcctcctgctcatcccggctgttctgattgggatgctggaaaaggctgatcctcacctcgagttccagcagtttccccagagcccctgatctgcctggaccagaagacagagggcaagaggagcaaagtgaacaccaagcaactggaggtctgcagctggaagcccagcccacagcaggacaagcaactcttgtctaagggcagtgctctctttggacgaggtagtcaagagagaccaaggcaccaccccatccacagctgacccagcctctgtctaggatctagaatcataacccacacaggcccactgcaggacaggtggcagaggagctatttgggacaggagtcagttctccctttctgctatccatcacttataaccccacaggccagaggagaggtcctgagagaggtgacacttcagggaccagaggcagcacgagggctggcatctctccttccagcccaaactgcacagccccaaccaggttcccaacacgtgtagcagtcatcagccattccttaacaatgaatgtggtacctggttagtgccagccttgggaaggagggagggaggtaagaggggcttggtgatctctggaggaagagtgttgcctttgctgtggttggggaatcgatccttggctatggcctacccactcccctggctgaagagtgccaatcattacaaatcagcttcagcaaactg

SEQ ID NO: 4258 - protein, 446 aa, Homosapiens; identical to SEQ ID NO: 4248

SEQ ID NO: 4259 - DNA, 905 bp, Homosapiens
agggttaagatgtcctgggccccaaagtgcacagtgatcaccacgaagatggccagtgagtagagggctaaatgtttcctggacttctctggggcgggagccacatagagctggacaatggatcggtggtgacggaacgtgaagagccgggtggactttggctcctttaaggtctcaccaaagcagaaagctgcatagagagtcatggctatcagcaaggccaaggccagccagaaggggttggcataaccctgggcccggagccagtggcccccgaggaggcttgccagcatcccagccaccccgatgctggcttccagcagggccatccggaaggtgcggctgcgactggagctgacatctgccacggacgcaaagctagcagccagaaggccaccgaagtcgccgaggagggcacaaaggatgcgacccagcacgaagtagccgacgtggagctgcagctgcaccacaaaaacggacactagggcctggagcagcaggcccagcgaggccagcactagcagcgggcggcggcccacactgtcgctccaagctcccagcagggtggacgagaagagccccaccaggaagccgcccacgttcatgtagagggtccagtgggaggctagccaatattaaccatcgctatctaccgctgaggaaacgaggtcatcgggtactcaaggcagagctggaagagcacatgactcctgatgctgctgatgttctgcgctgtaacagagaggcagctggagaggatcggagtgggctgagcccagctgcctgggttggagcacctaggctctgccactaccttcggcatgccacttaccaccctgagcctctgttttttcatctgtaaaatggagttgctaacaaaacatgtctcaaaaagttgtggaaaa

SEQ ID NO: 4260 - protein, 52 aa, Homosapiens
MTPDAADVLRCNREAAGEDRSGLSPAAWVGAPRLCHYLRHATYHPEPLFFHL

SEQ ID NO: 4261 - DNA, 5995 bp, Homosapiens
tagtgtgtgactgggtctgtgtgagggagagagtgtgtgtggtgtggaggtgaaacggaggcaagaaagggggctacctcaggagcgagggacaaagggggcgtgaggcacctaggccgcggcaccccggcgacaggaagccgtcctgaaccgggctaccgggtaggggaagggcccgcgtagtcctcgcagggccccagagctggagtcggctccacagccccgggccgtcggcttctcacttcctggacctccccggcgcccgggcctgaggactggctcggcggagggagaagaggaaacagacttgagcagctccccgttgtctcgcaactccactgccgaggaactctcatttcttccctcgctccttcaccccccacctcatgtagaagggtgctgaggcgtcgggagggaggaggagcctgggctaccgtccctgccctccccacccccttcccggggcgctttggtgggcgtggagttggggttgggggggtgggtgggggttgctttttggagtgctggggaacttttttcccttcttcaggtcaggggaaagggaatgcccaattcagagagacatgggggcaagaaggacgggagtggaggagcttctggaactttgcagccgtcatcgggaggcggcagctctaacagcagagagcgtcaccgcttggtatcgaagcacaagcggcataagtccaaacactccaaagacatggggttggtgacccccgaagcagcatccctgggcacagttatcaaacctttggtggagtatgatgatatcagctctgattccgacaccttctccgatgacatggccttcaaactagaccgaagggagaacgacgaacgtcgtggatcagatcggagcgaccgcctgcacaaacatcgtcaccaccagcacaggcgttcccgggacttactaaaagctaaacagaccgaaaaagaaaaaagccaagaagtctccagcaagtcgggatcgatgaaggaccggatatcgggaagttcaaagcgttcgaatgaggagactgatgactatgggaaggcgcaggtagccaaaagcagcagcaaggaatccaggtcatccaagctccacaaggagaagaccaggaaagaacgggagctgaagtctgggcacaaagaccggagtaaaagtcatcgaaaaagggaaacacccaaaagttacaaaacagtggacagcccaaaacggagatccaggagcccccacaggaagtggtctgacagctccaaacaagatgatagcccctcgggagcttcttatggccaagattatgaccttagtccctcacgatctcatacctcgagcaattatgactcctacaagaaaagtcctggaagtacctcgagaaggcagtcggtcagtcccccttacaaggagccttcggcctaccagtccagcacccggtcaccgagcccctacagtaggcgacagagatctgtcagtccctatagcaggagacggtcgtccagctacgaaagaagtggctcttacagcgggcgatcgcccagtccctatggtcgaaggcggtccagcagccctttcctgagcaagcggtctctgagtcggagtccactccccagtaggaaatccatgaagtccagaagtagaagtcctgcatattcaagacattcatcttctcatagtaaaaagaagagatccagttcacgcagtcgtcattccagtatctcacctgtcaggcttccacttaattccagtctgggagctgaactcagtaggaaaaagaaggaaagagcagctgctgctgctgcagcaaagatggatggaaaggagtccaagggttcacctgtatttttgcctagaaaagagaacagttcagtagaggctaaggattcaggtttggagtctaaaaagttacccagaagtgtaaaattggaaaaatctgccccagatactgaactggtgaatgtaacacatctaaacacagaggtaaaaaattcttcagatacagggaaagtaaagttggatgagaactccgagaagcatcttgttaaagatttgaaagcacagggaacaagagactctaaacccatagcactgaaagaggagattgttactccaaaggagacagaaacatcagaaaaggagacccctccacctcttcccacaattgcttctcccccaccccctctaccaactactacccctccacctcagacaccccctttgccacctttgcctccaataccagctcttccacagcaaccacctctgcctccttctcagccagcatttagtcaggttcctgcttccagtacttcaactttgcccccttctactcactcaaagacatctgctgtgtcctctcaggcaaattctcagccccctgtacaggtttctgtgaagactcaagtatctgtaacagctgctattccacacctgaaaacttcaacgttgcctcctttgcccctcccacccttattacctggagatgatgacatggatagtccaaaagaaactcttccttcaaaacctgtgaagaaagagaaggaacagaggacacgtcacttactcacagaccttcctctccctccagagctccctggtggagatctgtctcccccagactctccagaaccaaaggcaatcacaccacctcagcaaccatataaaaagagaccaaaaatttgttgtcctcgttatggagaaagaagacaaacagaaagcgactgggggaaacgctgtgtggacaagtttgacattattgggattattggagaaggaacctatggccaagtatataaagccaaggacaaagacacaggagaactagtggctctgaagaaggtgagactagacaatgagaaagagggcttcccaatcacagccattcgtgaaatcaaaatccttcgtcagttaatccaccgaagtgttgttaacatgaaggaaattgtcacagataaacaagatgcactggatttcaagaaggacaaaggtgccttttaccttgtatttgagtatatggaccatgacttaatgggactgctagaatctggtttggtgcacttttctgaggaccatatcaagtcgttcatgaaacagctaatggaaggattggaatactgtcacaaaaagaatttcctgcatcgggatattaagtgttctaacattttgctgaataacagtgggcaaatcaaactagcagattttggacttgctcggctctataactctgaagagagtcgcccttacacaaacaaagtcattactttgtggtaccgacctccagaactactgctaggagaggaacgttacacaccagccatagatgtttggagctgtggatgtattcttggggaactattcacaaagaagcctatttttcaagccaatctggaactggctcagctagaactgatcagccgactttgtggtagcccttgtccagctgtgtggcctgatgttatcaaactgccctacttcaacaccatgaaaccgaagaagcaatatcgaaggcgtctacgagaagaattctctttcattccttctgcagcacttgatttattggaccacatgctgacactagatcctagtaagcggtgcacagctgaacagaccctacagagcgacttccttaaagatgtcgaactcagcaaaatggctcctccagacctcccccactggcaggattgccatgagttgtggagtaagaaacggcgacgtcagcgacaaagtggtgttgtagtcgaagagccacctccatccaaaacttctcgaaaagaaactacctcagggacaagtactgagcctgtgaagaacagcagcccagcaccacctcagcctgctcctggcaaggtggagtctggggctggggatgcaataggccttgctgacatcacacaacagctgaatcaaagtgaattggcagtgttattaaacctgctgcagagccaaaccgacctgagcatccctcaaatggcacagctgcttaacatccactccaacccagagatgcagcagcagctggaagccctgaaccaatccatcagtgccctgacggaagctacttcccagcagcaggactcagagaccatggccccagaggagtctttgaaggaagcaccctctgccccagtgatcctgccttcagcagaacagacgacccttgaagcttcaagcacaccagctgacatgcagaatatattggcagttctcttgagtcagctgatgaaaacccaagagccagcaggcagtctggaggaaaacaacagtgacaagaacagtgggccacaggggccccgaagaactcccacaatgccacaggaggaggcagcagcatgtcctcctcacattcttccaccagagaagaggccccctgagccccccggacctccaccgccgccacctccaccccctctggttgaaggcgatctttccagcgccccccaggagttgaacccagccgtgacagccgccttgctgcaacttttatcccagcctgaagcagagcctcctggccacctgccacatgagcaccaggccttgagaccaatggagtactccacccgaccccgtccaaacaggacttatggaaacactgatgggcctgaaacagggttcagtgccattgacactgatgaacgaaactctggtccagccttgacagaatccttggtccagaccctggtgaagaacaggaccttctcaggctctctgagccaccttggggagtccagcagttaccagggcacagggtcagtgcagtttccaggggaccaggacctccgttttgccagggtccccttagcgttacacccggtggtcgggcaaccattcctgaaggctgagggaagcagcaattctgtggtacatgcagagaccaaattgcaaaactatggggagctggggccaggaaccactggggccagcagctcaggagcaggccttcactgggggggcccaactcagtcttctgcttatggaaaactctatcgggggcctacaagagtcccaccaagagggggaagagggagaggagttccttactaacccagagacttcagtgtcctgaaagattcctttcctatccatccttccatccagttctctgaatctttaatgaaatcatttgccagagcgaggtaatcatctgcatttggctactgcaaagctgtccgttgtattccttgctcacttgctactagcaggcgacttacgaaataatgatgttggcaccagttccccctggatgggctatagccagaacatttacttcaactctaccttagtagatacaagtagagaatatggagaggatcattacattgaaaagtaaatgttttattagttcattgcctgcacttactgatcggaagagagaaagaacagtttcagtattgagatggctcaggagaggctctttgatttttaaagttttggggtgggggattgtgtgtggtttctttcttttgaattttaatttaggtgttttgggtttttttcctttaaagagaatagtgttcacaaaatttgagctgctctttggcttttgctataagggaaacagagtggcctggctgatttgaataaatgtttctttcctctccaccatctcacattttgcttttaagtgaacactttttccccattgagcatcttgaacatactttttttccaaataaattactcatccttaaagtttactccactttgacaaaagatacgcccttctccctgcacataaagcaggttgtagaacgtggcattcttgggcaagtaggtagactttacccagtctctttccttttttgctgatgtgtgctctctctctctctttctctctctctctctctctctctctctctctctctctctctgtctcgcttgctcgctctcgctgtttctctctctttgaggcatttgtttggaaaaaatcgttgagatgcccaagaacctgggataattctttactttttttgaaataaaggaaaggaaattcagactctt

SEQ ID NO: 4262 - protein, 1490 aa, Homosapiens
MPNSERHGGKKDGSGGASGTLQPSSGGGSSNSRERHRLVSKHKRHKSKHSKDMGLVTPEAASLGTVIKPLVEYDDISSDSDTFSDDMAFKLDRRENDERRGSDRSDRLHKHRHHQHRRSRDLLKAKQTEKEKSQEVSSKSGSMKDRISGSSKRSNEETDDYGKAQVAKSSSKESRSSKLHKEKTRKERELKSGHKDRSKSHRKRETPKSYKTVDSPKRRSRSPHRKWSDSSKQDDSPSGASYGQDYDLSPSRSHTSSNYDSYKKSPGSTSRRQSVSPPYKEPSAYQSSTRSPSPYSRRQRSVSPYSRRRSSSYERSGSYSGRSPSPYGRRRSSSPFLSKRSLSRSPLPSRKSMKSRSRSPAYSRHSSSHSKKKRSSSRSRHSSISPVRLPLNSSLGAELSRKKKERAAAAAAAKMDGKESKGSPVFLPRKENSSVEAKDSGLESKKLPRSVKLEKSAPDTELVNVTHLNTEVKNSSDTGKVKLDENSEKHLVKDLKAQGTRDSKPIALKEEIVTPKETETSEKETPPPLPTIASPPPPLPTTTPPPQTPPLPPLPPIPALPQQPPLPPSQPAFSQVPASSTSTLPPSTHSKTSAVSSQANSQPPVQVSVKTQVSVTAAIPHLKTSTLPPLPLPPLLPGDDDMDSPKETLPSKPVKKEKEQRTRHLLTDLPLPPELPGGDLSPPDSPEPKAITPPQQPYKKRPKICCPRYGERRQTESDWGKRCVDKFDIIGIIGEGTYGQVYKAKDKDTGELVALKKVRLDNEKEGFPITAIREIKILRQLIHRSVVNMKEIVTDKQDALDFKKDKGAFYLVFEYMDHDLMGLLESGLVHFSEDHIKSFMKQLMEGLEYCHKKNFLHRDIKCSNILLNNSGQIKLADFGLARLYNSEESRPYTNKVITLWYRPPELLLGEERYTPAIDVWSCGCILGELFTKKPIFQANLELAQLELISRLCGSPCPAVWPDVIKLPYFNTMKPKKQYRRRLREEFSFIPSAALDLLDHMLTLDPSKRCTAEQTLQSDFLKDVELSKMAPPDLPHWQDCHELWSKKRRRQRQSGVVVEEPPPSKTSRKETTSGTSTEPVKNSSPAPPQPAPGKVESGAGDAIGLADITQQLNQSELAVLLNLLQSQTDLSIPQMAQLLNIHSNPEMQQQLEALNQSISALTEATSQQQDSETMAPEESLKEAPSAPVILPSAEQTTLEASSTPADMQNILAVLLSQLMKTQEPAGSLEENNSDKNSGPQGPRRTPTMPQEEAAACPPHILPPEKRPPEPPGPPPPPPPPPLVEGDLSSAPQELNPAVTAALLQLLSQPEAEPPGHLPHEHQALRPMEYSTRPRPNRTYGNTDGPETGFSAIDTDERNSGPALTESLVQTLVKNRTFSGSLSHLGESSSYQGTGSVQFPGDQDLRFARVPLALHPVVGQPFLKAEGSSNSVVHAETKLQNYGELGPGTTGASSSGAGLHWGGPTQSSAYGKLYRGPTRVPPRGGRGRGVPY

SEQ ID NO: 4263 - DNA, 7271 bp, Homosapiens
tagtgtgtgactgggtctgtgtgagggagagagtgtgtgtggtgtggaggtgaaacggaggcaagaaagggggctacctcaggagcgagggacaaagggggcgtgaggcacctaggccgcggcaccccggcgacaggaagccgtcctgaaccgggctaccgggtaggggaagggcccgcgtagtcctcgcagggccccagagctggagtcggctccacagccccgggccgtcggcttctcacttcctggacctccccggcgcccgggcctgaggactggctcggcggagggagaagaggaaacagacttgagcagctccccgttgtctcgcaactccactgccgaggaactctcatttcttccctcgctccttcaccccccacctcatgtagaagggtgctgaggcgtcgggagggaggaggagcctgggctaccgtccctgccctccccacccccttcccggggcgctttggtgggcgtggagttggggttgggggggtgggtgggggttgctttttggagtgctggggaacttttttcccttcttcaggtcaggggaaagggaatgcccaattcagagagacatgggggcaagaaggacgggagtggaggagcttctggaactttgcagccgtcatcgggaggcggcagctctaacagcagagagcgtcaccgcttggtatcgaagcacaagcggcataagtccaaacactccaaagacatggggttggtgacccccgaagcagcatccctgggcacagttatcaaacctttggtggagtatgatgatatcagctctgattccgacaccttctccgatgacatggccttcaaactagaccgaagggagaacgacgaacgtcgtggatcagatcggagcgaccgcctgcacaaacatcgtcaccaccagcacaggcgttcccgggacttactaaaagctaaacagaccgaaaaagaaaaaagccaagaagtctccagcaagtcgggatcgatgaaggaccggatatcgggaagttcaaagcgttcgaatgaggagactgatgactatgggaaggcgcaggtagccaaaagcagcagcaaggaatccaggtcatccaagctccacaaggagaagaccaggaaagaacgggagctgaagtctgggcacaaagaccggagtaaaagtcatcgaaaaagggaaacacccaaaagttacaaaacagtggacagcccaaaacggagatccaggagcccccacaggaagtggtctgacagctccaaacaagatgatagcccctcgggagcttcttatggccaagattatgaccttagtccctcacgatctcatacctcgagcaattatgactcctacaagaaaagtcctggaagtacctcgagaaggcagtcggtcagtcccccttacaaggagccttcggcctaccagtccagcacccggtcaccgagcccctacagtaggcgacagagatctgtcagtccctatagcaggagacggtcgtccagctacgaaagaagtggctcttacagcgggcgatcgcccagtccctatggtcgaaggcggtccagcagccctttcctgagcaagcggtctctgagtcggagtccactccccagtaggaaatccatgaagtccagaagtagaagtcctgcatattcaagacattcatcttctcatagtaaaaagaagagatccagttcacgcagtcgtcattccagtatctcacctgtcaggcttccacttaattccagtctgggagctgaactcagtaggaaaaagaaggaaagagcagctgctgctgctgcagcaaagatggatggaaaggagtccaagggttcacctgtatttttgcctagaaaagagaacagttcagtagaggctaaggattcaggtttggagtctaaaaagttacccagaagtgtaaaattggaaaaatctgccccagatactgaactggtgaatgtaacacatctaaacacagaggtaaaaaattcttcagatacagggaaagtaaagttggatgagaactccgagaagcatcttgttaaagatttgaaagcacagggaacaagagactctaaacccatagcactgaaagaggagattgttactccaaaggagacagaaacatcagaaaaggagacccctccacctcttcccacaattgcttctcccccaccccctctaccaactactacccctccacctcagacaccccctttgccacctttgcctccaataccagctcttccacagcaaccacctctgcctccttctcagccagcatttagtcaggttcctgcttccagtacttcaactttgcccccttctactcactcaaagacatctgctgtgtcctctcaggcaaattctcagccccctgtacaggtttctgtgaagactcaagtatctgtaacagctgctattccacacctgaaaacttcaacgttgcctcctttgcccctcccacccttattacctggagatgatgacatggatagtccaaaagaaactcttccttcaaaacctgtgaagaaagagaaggaacagaggacacgtcacttactcacagaccttcctctccctccagagctccctggtggagatctgtctcccccagactctccagaaccaaaggcaatcacaccacctcagcaaccatataaaaagagaccaaaaatttgttgtcctcgttatggagaaagaagacaaacagaaagcgactgggggaaacgctgtgtggacaagtttgacattattgggattattggagaaggaacctatggccaagtatataaagccaaggacaaagacacaggagaactagtggctctgaagaaggtgagactagacaatgagaaagagggcttcccaatcacagccattcgtgaaatcaaaatccttcgtcagttaatccaccgaagtgttgttaacatgaaggaaattgtcacagataaacaagatgcactggatttcaagaaggacaaaggtgccttttaccttgtatttgagtatatggaccatgacttaatgggactgctagaatctggtttggtgcacttttctgaggaccatatcaagtcgttcatgaaacagctaatggaaggattggaatactgtcacaaaaagaatttcctgcatcgggatattaagtgttctaacattttgctgaataacagtgggcaaatcaaactagcagattttggacttgctcggctctataactctgaagagagtcgcccttacacaaacaaagtcattactttgtggtaccgacctccagaactactgctaggagaggaacgttacacaccagccatagatgtttggagctgtggatgtattcttggggaactattcacaaagaagcctatttttcaagccaatctggaactggctcagctagaactgatcagccgactttgtggtagcccttgtccagctgtgtggcctgatgttatcaaactgccctacttcaacaccatgaaaccgaagaagcaatatcgaaggcgtctacgagaagaattctctttcattccttctgcagcacttgatttattggaccacatgctgacactagatcctagtaagcggtgcacagctgaacagaccctacagagcgacttccttaaagatgtcgaactcagcaaaatggctcctccagacctcccccactggcaggattgccatgagttgtggagtaagaaacggcgacgtcagcgacaaagtggtgttgtagtcgaagagccacctccatccaaaacttctcgaaaagaaactacctcagggacaagtactgagcctgtgaagaacagcagcccagcaccacctcagcctgctcctggcaaggtggagtctggggctggggatgcaataggccttgctgacatcacacaacagctgaatcaaagtgaattggcagtgttattaaacctgctgcagagccaaaccgacctgagcatccctcaaatggcacagctgcttaacatccactccaacccagagatgcagcagcagctggaagccctgaaccaatccatcagtgccctgacggaagctacttcccagcagcaggactcagagaccatggccccagaggagtctttgaaggaagcaccctctgccccagtgatcctgccttcagcagaacagacgacccttgaagcttcaagcacaccagctgacatgcagaatatattggcagttctcttgagtcagctgatgaaaacccaagagccagcaggcagtctggaggaaaacaacagtgacaagaacagtgggccacaggggccccgaagaactcccacaatgccacaggaggaggcagcagcatgtcctcctcacattcttccaccagagaagaggccccctgagccccccggacctccaccgccgccacctccaccccctctggttgaaggcgatctttccagcgccccccaggagttgaacccagccgtgacagccgccttgctgcaacttttatcccagcctgaagcagagcctcctggccacctgccacatgagcaccaggccttgagaccaatggagtactccacccgaccccgtccaaacaggacttatggaaacactgatgggcctgaaacagggttcagtgccattgacactgatgaacgaaactctggtccagccttgacagaatccttggtccagaccctggtgaagaacaggaccttctcaggctctctgagccaccttggggagtccagcagttaccagggcacagggtcagtgcagtttccaggggaccaggacctccgttttgccagggtccccttagcgttacacccggtggtcgggcaaccattcctgaaggctgagggaagcagcaattctgtggtacatgcagagaccaaattgcaaaactatggggagctggggccaggaaccactggggccagcagctcaggagcaggccttcactgggggggcccaactcagtcttctgcttatggaaaactctatcgggggcctacaagagtcccaccaagagggggaagagggagaggagttccttactaacccagagacttcagtgtcctgaaagattcctttcctatccatccttccatccagttctctgaatctttaatgaaatcatttgccagagcgaggtaatcatctgcatttggctactgcaaagctgtccgttgtattccttgctcacttgctactagcaggcgacttacgaaataatgatgttggcaccagttccccctggatgggctatagccagaacatttacttcaactctaccttagtagatacaagtagagaatatggagaggatcattacattgaaaagtaaatgttttattagttcattgcctgcacttactgatcggaagagagaaagaacagtttcagtattgagatggctcaggagaggctctttgatttttaaagttttggggtgggggattgtgtgtggtttctttcttttgaattttaatttaggtgttttgggtttttttcctttaaagagaatagtgttcacaaaatttgagctgctctttggcttttgctataagggaaacagagtggcctggctgatttgaataaatgtttctttcctctccaccatctcacattttgcttttaagtgaacactttttccccattgagcatcttgaacatactttttttccaaataaattactcatccttaaagtttactccactttgacaaaagatacgcccttctccctgcacataaagcaggttgtagaacgtggcattcttgggcaagtaggtagactttacccagtctctttccttttttgctgatgtgtgctctctctctctctttctctctctctctctctctctctctctctctctctctctctgtctcgcttgctcgctctcgctgtttctctctctttgaggcatttgtttggaaaaaatcgttgagatgcccaagaacctgggataattctttactttttttgaaataaaggaaaggaaattcagactcttacattgttctctgtaactcttcaattctaaaatgttttgttttttaaaccatgttctgatggggaagttgatttgtaagtgtggacagcttggacattgctgctgagctgtggttagagatgatgcctccattcctagagggctaataacagcatttagcatattgtttacacatatatttttatgtcaaaaaaaaaacaaaaacctttcaaacagagcattgtgatattgtcaaagagaaaaacaaatcctgaagatacatggaaatgtaacctagtttagggtgggtatttttctgaagatacatcaatacctgaccttttttaaaaaaataattttaaaacagcatactgtgaggaagaacagtattgacatacccacatcccagcatgtgtaccctgccagttcttttagggatttttcctccaaagagatttggatttggttttggtaaaaggggttaaattgtgcttccaggcaagaactttgccttatcataaacaggaaatgaaaaagggaagggctgtcaggatgggataatttgggaggcttctcattctggcttctatttctatgtgagtaccagcatatagagtgttttaaaaacagatacatgtcatataatttatctgcacagacttagaccttcaggaaacataggttaagcccccttttacaaagaaaaagtaaacatacttcagcatcttggagggtagttttcaaaactcaagtttcatgtttcaatgccaagttcttattttaaaaaataaaatctacttataagagaaaggtgcattacttaaaaaaaaaaaactttaaagaaatgaaagaagaaccctcttcagatacttacttgaagactgttttcccctgttaatgagatatagctagatatcggtgtgtgtatttctttattattctctggtttttgatctggccttgcctccagggccaaacactgatttagaaagagagccttctagctattttggcattgatggctttttataccagtgtgtccagttagatttactaggcttactgacatgctattggtaaatcgcattaaagttcatctgaaccttctgtctgttgacttcttagtcctcagacatgggcctttgtgttttagaatatttgaatttgagttattgggccccactccctgttttttattaaagaacgtgagcctgggatactttcagaagtatctgttcaatgaaaaaaagttggtttcccatcaaatatgaataaaattctctatatatttcattgt

SEQ ID NO: 4264 - protein, 1490 aa, Homosapiens; identical to SEQ ID NO: 4262

SEQ ID NO: 4265 - DNA, 8192 bp, Homosapiens
tagtgtgtgactgggtctgtgtgagggagagagtgtgtgtggtgtggaggtgaaacggaggcaagaaagggggctacctcaggagcgagggacaaagggggcgtgaggcacctaggccgcggcaccccggcgacaggaagccgtcctgaaccgggctaccgggtaggggaagggcccgcgtagtcctcgcagggccccagagctggagtcggctccacagccccgggccgtcggcttctcacttcctggacctccccggcgcccgggcctgaggactggctcggcggagggagaagaggaaacagacttgagcagctccccgttgtctcgcaactccactgccgaggaactctcatttcttccctcgctccttcaccccccacctcatgtagaagggtgctgaggcgtcgggagggaggaggagcctgggctaccgtccctgccctccccacccccttcccggggcgctttggtgggcgtggagttggggttgggggggtgggtgggggttgctttttggagtgctggggaacttttttcccttcttcaggtcaggggaaagggaatgcccaattcagagagacatgggggcaagaaggacgggagtggaggagcttctggaactttgcagccgtcatcgggaggcggcagctctaacagcagagagcgtcaccgcttggtatcgaagcacaagcggcataagtccaaacactccaaagacatggggttggtgacccccgaagcagcatccctgggcacagttatcaaacctttggtggagtatgatgatatcagctctgattccgacaccttctccgatgacatggccttcaaactagaccgaagggagaacgacgaacgtcgtggatcagatcggagcgaccgcctgcacaaacatcgtcaccaccagcacaggcgttcccgggacttactaaaagctaaacagaccgaaaaagaaaaaagccaagaagtctccagcaagtcgggatcgatgaaggaccggatatcgggaagttcaaagcgttcgaatgaggagactgatgactatgggaaggcgcaggtagccaaaagcagcagcaaggaatccaggtcatccaagctccacaaggagaagaccaggaaagaacgggagctgaagtctgggcacaaagaccggagtaaaagtcatcgaaaaagggaaacacccaaaagttacaaaacagtggacagcccaaaacggagatccaggagcccccacaggaagtggtctgacagctccaaacaagatgatagcccctcgggagcttcttatggccaagattatgaccttagtccctcacgatctcatacctcgagcaattatgactcctacaagaaaagtcctggaagtacctcgagaaggcagtcggtcagtcccccttacaaggagccttcggcctaccagtccagcacccggtcaccgagcccctacagtaggcgacagagatctgtcagtccctatagcaggagacggtcgtccagctacgaaagaagtggctcttacagcgggcgatcgcccagtccctatggtcgaaggcggtccagcagccctttcctgagcaagcggtctctgagtcggagtccactccccagtaggaaatccatgaagtccagaagtagaagtcctgcatattcaagacattcatcttctcatagtaaaaagaagagatccagttcacgcagtcgtcattccagtatctcacctgtcaggcttccacttaattccagtctgggagctgaactcagtaggaaaaagaaggaaagagcagctgctgctgctgcagcaaagatggatggaaaggagtccaagggttcacctgtatttttgcctagaaaagagaacagttcagtagaggctaaggattcaggtttggagtctaaaaagttacccagaagtgtaaaattggaaaaatctgccccagatactgaactggtgaatgtaacacatctaaacacagaggtaaaaaattcttcagatacagggaaagtaaagttggatgagaactccgagaagcatcttgttaaagatttgaaagcacagggaacaagagactctaaacccatagcactgaaagaggagattgttactccaaaggagacagaaacatcagaaaaggagacccctccacctcttcccacaattgcttctcccccaccccctctaccaactactacccctccacctcagacaccccctttgccacctttgcctccaataccagctcttccacagcaaccacctctgcctccttctcagccagcatttagtcaggttcctgcttccagtacttcaactttgcccccttctactcactcaaagacatctgctgtgtcctctcaggcaaattctcagccccctgtacaggtttctgtgaagactcaagtatctgtaacagctgctattccacacctgaaaacttcaacgttgcctcctttgcccctcccacccttattacctggagatgatgacatggatagtccaaaagaaactcttccttcaaaacctgtgaagaaagagaaggaacagaggacacgtcacttactcacagaccttcctctccctccagagctccctggtggagatctgtctcccccagactctccagaaccaaaggcaatcacaccacctcagcaaccatataaaaagagaccaaaaatttgttgtcctcgttatggagaaagaagacaaacagaaagcgactgggggaaacgctgtgtggacaagtttgacattattgggattattggagaaggaacctatggccaagtatataaagccaaggacaaagacacaggagaactagtggctctgaagaaggtgagactagacaatgagaaagagggcttcccaatcacagccattcgtgaaatcaaaatccttcgtcagttaatccaccgaagtgttgttaacatgaaggaaattgtcacagataaacaagatgcactggatttcaagaaggacaaaggtgccttttaccttgtatttgagtatatggaccatgacttaatgggactgctagaatctggtttggtgcacttttctgaggaccatatcaagtcgttcatgaaacagctaatggaaggattggaatactgtcacaaaaagaatttcctgcatcgggatattaagtgttctaacattttgctgaataacagtgggcaaatcaaactagcagattttggacttgctcggctctataactctgaagagagtcgcccttacacaaacaaagtcattactttgtggtaccgacctccagaactactgctaggagaggaacgttacacaccagccatagatgtttggagctgtggatgtattcttggggaactattcacaaagaagcctatttttcaagccaatctggaactggctcagctagaactgatcagccgactttgtggtagcccttgtccagctgtgtggcctgatgttatcaaactgccctacttcaacaccatgaaaccgaagaagcaatatcgaaggcgtctacgagaagaattctctttcattccttctgcagcacttgatttattggaccacatgctgacactagatcctagtaagcggtgcacagctgaacagaccctacagagcgacttccttaaagatgtcgaactcagcaaaatggctcctccagacctcccccactggcaggattgccatgagttgtggagtaagaaacggcgacgtcagcgacaaagtggtgttgtagtcgaagagccacctccatccaaaacttctcgaaaagaaactacctcagggacaagtactgagcctgtgaagaacagcagcccagcaccacctcagcctgctcctggcaaggtggagtctggggctggggatgcaataggccttgctgacatcacacaacagctgaatcaaagtgaattggcagtgttattaaacctgctgcagagccaaaccgacctgagcatccctcaaatggcacagctgcttaacatccactccaacccagagatgcagcagcagctggaagccctgaaccaatccatcagtgccctgacggaagctacttcccagcagcaggactcagagaccatggccccagaggagtctttgaaggaagcaccctctgccccagtgatcctgccttcagcagaacagacgacccttgaagcttcaagcacaccagctgacatgcagaatatattggcagttctcttgagtcagctgatgaaaacccaagagccagcaggcagtctggaggaaaacaacagtgacaagaacagtgggccacaggggccccgaagaactcccacaatgccacaggaggaggcagcagcatgtcctcctcacattcttccaccagagaagaggccccctgagccccccggacctccaccgccgccacctccaccccctctggttgaaggcgatctttccagcgccccccaggagttgaacccagccgtgacagccgccttgctgcaacttttatcccagcctgaagcagagcctcctggccacctgccacatgagcaccaggccttgagaccaatggagtactccacccgaccccgtccaaacaggacttatggaaacactgatgggcctgaaacagggttcagtgccattgacactgatgaacgaaactctggtccagccttgacagaatccttggtccagaccctggtgaagaacaggaccttctcaggctctctgagccaccttggggagtccagcagttaccagggcacagggtcagtgcagtttccaggggaccaggacctccgttttgccagggtccccttagcgttacacccggtggtcgggcaaccattcctgaaggctgagggaagcagcaattctgtggtacatgcagagaccaaattgcaaaactatggggagctggggccaggaaccactggggccagcagctcaggagcaggccttcactgggggggcccaactcagtcttctgcttatggaaaactctatcgggggcctacaagagtcccaccaagagggggaagagggagaggagttccttactaacccagagacttcagtgtcctgaaagattcctttcctatccatccttccatccagttctctgaatctttaatgaaatcatttgccagagcgaggtaatcatctgcatttggctactgcaaagctgtccgttgtattccttgctcacttgctactagcaggcgacttacgaaataatgatgttggcaccagttccccctggatgggctatagccagaacatttacttcaactctaccttagtagatacaagtagagaatatggagaggatcattacattgaaaagtaaatgttttattagttcattgcctgcacttactgatcggaagagagaaagaacagtttcagtattgagatggctcaggagaggctctttgatttttaaagttttggggtgggggattgtgtgtggtttctttcttttgaattttaatttaggtgttttgggtttttttcctttaaagagaatagtgttcacaaaatttgagctgctctttggcttttgctataagggaaacagagtggcctggctgatttgaataaatgtttctttcctctccaccatctcacattttgcttttaagtgaacactttttccccattgagcatcttgaacatactttttttccaaataaattactcatccttaaagtttactccactttgacaaaagatacgcccttctccctgcacataaagcaggttgtagaacgtggcattcttgggcaagtaggtagactttacccagtctctttccttttttgctgatgtgtgctctctctctctctttctctctctctctctctctctctctctctctctctctctctgtctcgcttgctcgctctcgctgtttctctctctttgaggcatttgtttggaaaaaatcgttgagatgcccaagaacctgggataattctttactttttttgaaataaaggaaaggaaattcagactcttacattgttctctgtaactcttcaattctaaaatgttttgttttttaaaccatgttctgatggggaagttgatttgtaagtgtggacagcttggacattgctgctgagctgtggttagagatgatgcctccattcctagagggctaataacagcatttagcatattgtttacacatatatttttatgtcaaaaaaaaaacaaaaacctttcaaacagagcattgtgatattgtcaaagagaaaaacaaatcctgaagatacatggaaatgtaacctagtttagggtgggtatttttctgaagatacatcaatacctgaccttttttaaaaaaataattttaaaacagcatactgtgaggaagaacagtattgacatacccacatcccagcatgtgtaccctgccagttcttttagggatttttcctccaaagagatttggatttggttttggtaaaaggggttaaattgtgcttccaggcaagaactttgccttatcataaacaggaaatgaaaaagggaagggctgtcaggatgggataatttgggaggcttctcattctggcttctatttctatgtgagtaccagcatatagagtgttttaaaaacagatacatgtcatataatttatctgcacagacttagaccttcaggaaacataggttaagcccccttttacaaagaaaaagtaaacatacttcagcatcttggagggtagttttcaaaactcaagtttcatgtttcaatgccaagttcttattttaaaaaataaaatctacttataagagaaaggtgcattacttaaaaaaaaaaaactttaaagaaatgaaagaagaaccctcttcagatacttacttgaagactgttttcccctgttaatgagatatagctagatatcggtgtgtgtatttctttattattctctggtttttgatctggccttgcctccagggccaaacactgatttagaaagagagccttctagctattttggcattgatggctttttataccagtgtgtccagttagatttactaggcttactgacatgctattggtaaatcgcattaaagttcatctgaaccttctgtctgttgacttcttagtcctcagacatgggcctttgtgttttagaatatttgaatttgagttattgggccccactccctgttttttattaaagaacgtgagcctgggatactttcagaagtatctgttcaatgaaaaaaagttggtttcccatcaaatatgaataaaattctctatatatttcattgtattttggttatcagcagtcatcaataatgtttttccctcccctctcccacctcttatttttaattatgccaaatatcctaaataatatacttaagcctccattccctcatccctactagggaagggggtgagtgtatgtgtgagtgtatgtgtatgtatgatcccatctcacccccacccccattttgggagtcttttaaaatgaaaacaaagtttggtagttttgactatttctaaaagcagaggagaaaaaaaaacttatttaaatatcctggaatctgtatggaggaagaaaaggtatttgttaatttttcagttacgttatctataaacatgatggaagtaaaggtttggcagaatttcaccttgactatttgaaaattacagacccaattaattccattcaaaagtggttttcgttttgttttaattattgtacaatgagagatattgtctattaaatacattattttgaacagatgagaaatctgattctgttcatgagtgggaggcaaaactggtttgaccgtgatcatttttgtggttttgaaaacaaatatacttgacccagtttccttagttttttcttcaactgtccataggaacgataagtatttgaaagcaacatcaaatctatacgtttaaagcagggcagttagcacaaatttgcaagtagaacttctattagcttatgccatagacatcacccaaccacttgtatgtgtgtgtgtatatataatatgcatatatagttaccgtgctaaaatggttaccagcaggttttgagagagaatgctgcatcagaaaagtgtcagttgccacctcattctccctgatttaggttcctgacactgattcctttctctctcgtttttgacccccattgggtgtatcttgtctatgtacagatattttgtaata

SEQ ID NO: 4266 - protein, 1490 aa, Homosapiens; identical to SEQ ID NO: 4262

SEQ ID NO: 4267 - DNA, 8192 bp, Homosapiens; identical to SEQ ID NO: 4265

SEQ ID NO: 4268 - protein, 1490 aa, Homosapiens; identical to SEQ ID NO: 4262

SEQ ID NO: 4269 - DNA, 830 bp, Homosapiens
gctgctgatgaagaaatagatcccagtacatatcctttacgttttgttcatcaactttgatagacagcatagaggaaatgtggaactggtctccatgtaaatttgtctctagggaatgtatgatagacctacttgtccagattacattaagtttgctgtcctgcaaacctcctttctcacagtcaggatccttttttgccttagagtccttcctgaaggagctgttatggatgagagagccacaagtccaacctcatgatctgatctaaaactgggtggcctcctcccagtcaccttcttttattagccttatattaaccattaaccttcattgatctttatgattctgggtttcacagcttctgtttctgttgaattccctaactttaagaaccatgtttttgcttttatcagcctgggagctaggtccctggagacaagaattttagaacagttatgactctctctgggagtgtactaaggttagtctgaatccttctggggaattcaggtttgaaggagttagaagagtgctaacatcaccgtcactgttacctaccaatggatgcttcctgggtgcaagaccaaagatgttctttggtgtctagtcccttgtctcatgtctaatgtaacctgccattttcctttacaggtaggagcaacggtgggaatgccctctgaggaatgcagtgatgtccatcagtcacctctcacccagagcctggcaaattcagtctctttcacagaacctaaagccaagccaggttcagtgggaaatcccacctgtccaaacactgtgtgagacaccagaattagaggcctgcaagcct

SEQ ID NO: 4270 - protein, 78 aa, Homosapiens
MLPGCKTKDVLWCLVPCLMSNVTCHFPLQVGATVGMPSEECSDVHQSPLTQSLANSVSFTEPKAKPGSVGNPTCPNTV

SEQ ID NO: 4271 - DNA, 576 bp, Homosapiens
atgtgaaaaacaagacccagagaggggaaatcatttgaatcctgtcctggtattgctttgtgttcctggatttggagaatttctgggaacacaggaaaaggaaagtgaatgccaccaggatctgaacccaagattccagcctcggtcaccaccctgaccctgagaatgccactgggatggggagaacttgtcagtcttcatccttccccacaagtatactgaagccaggacagtcttaggcccctgctgccctcctggctctcagtggagagaaaagaggaaataaatttggacccagccttgagatcctggaagagctcctttggatttagccttgggatcctagcatctcctcacaaaattatgatcttccctgggcatctctaagccaccaattgggttgcctgcacctgagcaaatacagcaagcacctgccttagagagctcttagagggattatccgcagcctgaagaaagaaggttacaactgaggaagaacttctgaacagggaagagtggaagaaaagactgcagtacgtagagcatcaagggaagctgtggaaatatattttctta

SEQ ID NO: 4272 - protein, 37 aa, Homosapiens
MPPGSEPKIPASVTTLTLRMPLGWGELVSLHPSPQVY

SEQ ID NO: 4273 - DNA, 1921 bp, Homosapiens
gcatagaggctggtaccccgcctggtagagatgccacactcgctccgcggttcgcatggcgctctgaagacgccggcgcccgccgccttgaggagccgctgcccccgctccctgaagatgggggaacaatgaaataagcgagaagatccctcttctcccccctctctctcttgccccctccccccaagggcgacgcgccgccaccgccaccgcctgcgcccgggccaggggctccggggccagcccgggcggccaagccagtccctctccgtggagaagaggggacggaggccacgttggccgaggtcaaggaggaaggcgagctggggggagaggaggaggaggaagaggaggaggaagaaggactggacgaggcggagggcgagcggcccaagaagcgcgggcccaagaagcgcaagatgaccaaggcgcgcttggagcgctccaagcttcggcggcagaaggcgaacgcgcgggagcgcaaccgcatgcacgacctgaacgcagccctggacaacctgcgcaaggtggtgccctgctactccaagacgcagaagctgtccaagatcgagacgctgcgcctagccaagaactatatctgggcgctctcggagatcctgcgctccggcaagcggccagacctagtgtcctacgtgcagactctgtgcaagggtctgtcgcagcccaccaccaatctggtggccggctgtctgcagctcaactctcgcaacttcctcacggagcaaggcgccgacggtgccggccgcttccacggctcgggcggcccgttcgccatgcacccctacccgtacccgtgctcgcgcctggcgggcgcacagtgccaggcggccggcggcctgggcggcggcgcggcgcacgccctgcggacccacggctactgcgccgcctacgagacgctgtatgcggcggcaggcggtggcggcgcgagcccggactacaacagctccgagtacgagggcccgctcagccccccgctctgtctcaatggcaacttctcactcaagcaggactcctcgcccgaccacgagaaaagctaccactactctatgcactactcggcgctgcccggttcgcggcccacgggccacgggctagtcttcggctcgtcggctgtgcgcgggggcgtccactcggagaatctcttgtcttacgatatgcaccttcaccacgaccggggccccatgtacgaggagctcaatgcgttttttcataactgagacttcgcgccggctcccttctttttcttttgcctttgcccgcccccctgtccccagcccccagagcgcagggacacccccatcctaccccggcgccgggcgcggggagcgggccaccggtcctgccgctctcctggggcagcgcagtcctgttacctgtgggtggcctgtcccaggggcctcgcttcccccaggggactcgccttctctctccccaaggggttccctcctcctctctcccaaggagtgcttctccagggacctctctccgggggctccctggaggcacccctcccccattcccaatatcttcgctgaggtttcctcctccccctcctccctgcaggcccaaggcgttggtaagggggcagctgagcaatggaacgcgtttccccctctcattattattttaaaaacagacacccagctgccgaggcaaaaaggagccaggcgctccctctttcttgaagagggtagaagttagggcgccggagcccgggcctggaacgccctcacccccaacctccagtctccgcgttttgcgattttaattttggcgggaggggaagtggattgagaggaaagagagaggccaagacaatttgtaactagaatccgtttttcccttttcctttttttaaacaaacaaacatacaaaaaaaaaaaaaaaaaaaaaaaaaaaa

SEQ ID NO: 4274 - protein, 272 aa, Homosapiens [sequence omitted]

SEQ ID NO: 4275 - DNA, 2056 bp, Homosapiens
gcatagaggctggtaccccgcctggtagagatgccacactcgctccgcggttcgcatggcgctctgaagacgccggcgcccgccgccttgaggagccgctgcccccgctccctgaagatgggggaacaatgaaataagcgagaagatccctcttctcccccctctctctcttgccccctccccccctcccctcccctctccccttgactcctctccgaggcaccatgctgacccgcctgttcagcgagcccggccttctctcggacgtgcccaagttcgccagctggggcgacggcgaagacgacgagccgaggagcgacaagggcgacgcgccgccaccgccaccgcctgcgcccgggccaggggctccggggccagcccgggcggccaagccagtccctctccgtggagaagaggggacggaggccacgttggccgaggtcaaggaggaaggcgagctggggggagaggaggaggaggaagaggaggaggaagaaggactggacgaggcggagggcgagcggcccaagaagcgcgggcccaagaagcgcaagatgaccaaggcgcgcttggagcgctccaagcttcggcggcagaaggcgaacgcgcgggagcgcaaccgcatgcacgacctgaacgcagccctggacaacctgcgcaaggtggtgccctgctactccaagacgcagaagctgtccaagatcgagacgctgcgcctagccaagaactatatctgggcgctctcggagatcctgcgctccggcaagcggccagacctagtgtcctacgtgcagactctgtgcaagggtctgtcgcagcccaccaccaatctggtggccggctgtctgcagctcaactctcgcaacttcctcacggagcaaggcgccgacggtgccggccgcttccacggctcgggcggcccgttcgccatgcacccctacccgtacccgtgctcgcgcctggcgggcgcacagtgccaggcggccggcggcctgggcggcggcgcggcgcacgccctgcggacccacggctactgcgccgcctacgagacgctgtatgcggcggcaggcggtggcggcgcgagcccggactacaacagctccgagtacgagggcccgctcagccccccgctctgtctcaatggcaacttctcactcaagcaggactcctcgcccgaccacgagaaaagctaccactactctatgcactactcggcgctgcccggttcgcggcccacgggccacgggctagtcttcggctcgtcggctgtgcgcgggggcgtccactcggagaatctcttgtcttacgatatgcaccttcaccacgaccggggccccatgtacgaggagctcaatgcgttttttcataactgagacttcgcgccggctcccttctttttcttttgcctttgcccgcccccctgtccccagcccccagagcgcagggacacccccatcctaccccggcgccgggcgcggggagcgggccaccggtcctgccgctctcctggggcagcgcagtcctgttacctgtgggtggcctgtcccaggggcctcgcttcccccaggggactcgccttctctctccccaaggggttccctcctcctctctcccaaggagtgcttctccagggacctctctccgggggctccctggaggcacccctcccccattcccaatatcttcgctgaggtttcctcctccccctcctccctgcaggcccaaggcgttggtaagggggcagctgagcaatggaacgcgtttccccctctcattattattttaaaaacagacacccagctgccgaggcaaaaaggagccaggcgctccctctttcttgaagagggtagaagttagggcgccggagcccgggcctggaacgccctcacccccaacctccagtctccgcgttttgcgattttaattttggcgggaggggaagtggattgagaggaaagagagaggccaagacaatttgtaactagaatccgtttttcccttttcctttttttaaacaaacaaacatacaaaaaaaaaaaaaaaaaaaaaaaaaaaa

SEQ ID NO: 4276 - protein, 382 aa, Homosapiens
MLTRLFSEPGLLSDVPKFASWGDGEDDEPRSDKGDAPPPPPPAPGPGAPGPARAAKPVPLRGEEGTEATLAEVKEEGELGGEEEEEEEEEEGLDEAEGERPKKRGPKKRKMTKARLERSKLRRQKANARERNRMHDLNAALDNLRKVVPCYSKTQKLSKIETLRLAKNYIWALSEILRSGKRPDLVSYVQTLCKGLSQPTTNLVAGCLQLNSRNFLTEQGADGAGRFHGSGGPFAMHPYPYPCSRLAGAQCQAAGGLGGGAAHALRTHGYCAAYETLYAAAGGGGASPDYNSSEYEGPLSPPLCLNGNFSLKQDSSPDHEKSYHYSMHYSALPGSRPTGHGLVFGSSAVRGGVHSENLLSYDMHLHHDRGPMYEELNAFFHN

SEQ ID NO: 4277 - DNA, 604 bp, Homosapiens
cacgaaggttaagcaacctgctcaaggtcacccagctctcctgctctgaaccacatcctttgctaagaacttcatgggcagtatcccatccaaaccttgcaacaacccagaagggcctcttcttcagggaatggaagcagccgactggaccgggattggagtgtgtctcccacctgggggcgccagagggcacatatactgctgtactcgtttgtgccaccagagggcagcctccgcacatcgatctctactgcttccgagaactgtccaaaccggcgggactgagagagagaaacctggtccagggcagagaaagagaggagcccactgcagtgcgtgcaagcgatcttccacgcgtccatcctgaatgtgttaaaagcagcagttaaagagggagggctctggagttggactgtttgcgtttgaacccagactctgggcaaaagctgctgaacctctctgaatctaatagcctcatctgtgaattggaaggatactagcgaggattaaatgagagtgcataggaagggcctagccccggtgcccagcacagaggctccatatgtgtcaccgttgtcaatttctgactcatgtattcatctat

SEQ ID NO: 4278 - protein, 97 aa, Homosapiens
MGSIPSKPCNNPEGPLLQGMEAADWTGIGVCLPPGGARGHIYCCTRLCHQRAASAHRSLLLPRTVQTGGTEREKPGPGQRKRGAHCSACKRSSTRPS

SEQ ID NO: 4279 - DNA, 1503 bp, Homosapiens
ggaggggacgggctggggaccccaaagctgggaccggaggcccgccgcctgcgcgggggagcccagcacagaccgccgccgggaccccgagtcgcgcaccccagccccaccgcccaccccgcgcgccatggaccccaaggaccgcaagaagatccagttctcggtgcccgcgccccctagccagctcgacccccgccaggtggagatgatccggcgcaggagaccaacgcctgccatgctgttccggctctcagagcactcctcaccagaggaggaagcctccccccaccagagagcctcaggagaggggcaccatctcaagtcgaagagacccaacccctgtgcctacacaccaccttcgctgaaagctgtgcagcgcattgctgagtctcacctgcagtctatcagcaatttgaatgagaaccaggcctcagaggaggaggatgagctgggggagcttcgggagctgggttatccaagagaggaagatgaggaggaagaggaggatgatgaagaagaggaagaagaagaggacagccaggctgaagtcctgaaggtcatcaggcagtctgctgggcaaaagacaacctgtggccagggtctggaagggccctgggagcgcccaccccctctggatgagtccgagagagatggaggctctgaggaccaagtggaagacccagcactaagtgagcctggggaggaacctcagcgcccttccccctctgagcctggcacataggcacccagcctgcatctcccaggaggaagtggaggggacatcgctgttccccagaaacccactctatcctcaccctgttttgtgctcttcccctcgcctgctagggctgcggcttctgacttctagaagactaaggctggtctgtgtttgcttgtttgcccacctttggctgatacccagagaacctgggcacttgctgcctgatgcccacccctgccagtcattcctccattcacccagcgggaggtgggatgtgagacagcccacattggaaaatccagaaaaccgggaacagggatttgcccttcacaattctactccccagatcctctcccctggacacaggagacccacagggcaggaccctaagatctggggaaaggaggtcctgagaaccttgaggtacccttagatccttttctacccactttcctatggaggattccaagtcaccacttctctcaccggcttctaccagggtccaggactaaggcgtttttctccatagcctcaacattttgggaatcttcccttaatcacccttgctcctcctgggtgcctggaagatggactggcagagacctctttgttgcgttttgtgctttgatgccaggaatgccgcctagtttatgtccccggtggggcacacagcggggggcgccaggttttccttgtcccccagctgctctgcccctttccccttcttccctgactccaggcctgaacccctcccgtgctgtaataaatctttgtaaataact

SEQ ID NO: 4280 - protein, 204 aa, Homosapiens; identical to SEQ ID NO: 638

SEQ ID NO: 4281 - DNA, 1843 bp, Homosapiens
agctgggaccggagggtgagcccggcagaggcagagacacacgcggagaggaggagaggctgagggagggaggtggagaaggacgggagaggcagagagaggagacacgcagagacactcaggaggggagagacaccgagacgcagagacactcaggaggggagagacaccgagacgcagagacacccaggccggggagcgcgagggagcgaggcacagacctggctcagcgagcgcggggggcgagccccgagtcccgagagcctgggggcgcgcccagcccgggcgccgaccctcctcccgctcccgcgccctcccctcggcgggcacggtatttttatccgtgcgcgaacagccctcctcctcctctcgccgcacagcccgccgcctgcgcgggggagcccagcacagaccgccgccgggaccccgagtcgcgcaccccagccccaccgcccaccccgcgcgccatggaccccaaggaccgcaagaagatccagttctcggtgcccgcgccccctagccagctcgacccccgccaggtggagatgatccggcgcaggagaccaacgcctgccatgctgttccggctctcagagcactcctcaccagaggaggaagcctccccccaccagagagcctcaggagaggggcaccatctcaagtcgaagagacccaacccctgtgcctacacaccaccttcgctgaaagctgtgcagcgcattgctgagtctcacctgcagtctatcagcaatttgaatgagaaccaggcctcagaggaggaggatgagctgggggagcttcgggagctgggttatccaagagaggaagatgaggaggaagaggaggatgatgaagaagaggaagaagaagaggacagccaggctgaagtcctgaaggtcatcaggcagtctgctgggcaaaagacaacctgtggccagggtctggaagggccctgggagcgcccaccccctctggatgagtccgagagagatggaggctctgaggaccaagtggaagacccagcactaagtgagcctggggaggaacctcagcgcccttccccctctgagcctggcacataggcacccagcctgcatctcccaggaggaagtggaggggacatcgctgttccccagaaacccactctatcctcaccctgttttgtgctcttcccctcgcctgctagggctgcggcttctgacttctagaagactaaggctggtctgtgtttgcttgtttgcccacctttggctgatacccagagaacctgggcacttgctgcctgatgcccacccctgccagtcattcctccattcacccagcgggaggtgggatgtgagacagcccacattggaaaatccagaaaaccgggaacagggatttgcccttcacaattctactccccagatcctctcccctggacacaggagacccacagggcaggaccctaagatctggggaaaggaggtcctgagaaccttgaggtacccttagatccttttctacccactttcctatggaggattccaagtcaccacttctctcaccggcttctaccagggtccaggactaaggcgtttttctccatagcctcaacattttgggaatcttcccttaatcacccttgctcctcctgggtgcctggaagatggactggcagagacctctttgttgcgttttgtgctttgatgccaggaatgccgcctagtttatgtccccggtggggcacacagcggggggcgccaggttttccttgtcccccagctgctctgcccctttccccttcttccctgactccaggcctgaacccctcccgtgctgtaataaatctttgtaaataact

SEQ ID NO: 4282 - protein, 204 aa, Homosapiens; identical to SEQ ID NO: 638

SEQ ID NO: 4283 - DNA, 1744 bp, Homosapiens
agctgggaccggagggtgagcccggcagaggcagagacacacgcggagaggaggagaggctgagggagggaggtggagaaggacgggagaggcagagagaggagacacgcagagacactcaggaggggagagacaccgagacgcagagacactcaggaggggagagacaccgagacgcagagacacccaggccggggagcgcgagggagcgaggcacagacctggctcagcgagcgcggggggcgagccccgagtcccgagagcctgggggcgcgcccagcccgggcgccgaccctcctcccgctcccgcgccctcccctcggcgggcacggtatttttatccgtgcgcgaacagccctcctcctcctctcgccgcacagcccgccgcctgcgcgggggagcccagcacagaccgccgccgggaccccgagtcgcgcaccccagccccaccgcccaccccgcgcgccatggaccccaaggaccgcaagaagatccagttctcggtgcccgcgccccctagccagctcgacccccgccaggtggagatgatccggcgcaggagaccaacgcctgccatgctgttccggctctcagagcactcctcaccagctgtgcagcgcattgctgagtctcacctgcagtctatcagcaatttgaatgagaaccaggcctcagaggaggaggatgagctgggggagcttcgggagctgggttatccaagagaggaagatgaggaggaagaggaggatgatgaagaagaggaagaagaagaggacagccaggctgaagtcctgaaggtcatcaggcagtctgctgggcaaaagacaacctgtggccagggtctggaagggccctgggagcgcccaccccctctggatgagtccgagagagatggaggctctgaggaccaagtggaagacccagcactaagtgagcctggggaggaacctcagcgcccttccccctctgagcctggcacataggcacccagcctgcatctcccaggaggaagtggaggggacatcgctgttccccagaaacccactctatcctcaccctgttttgtgctcttcccctcgcctgctagggctgcggcttctgacttctagaagactaaggctggtctgtgtttgcttgtttgcccacctttggctgatacccagagaacctgggcacttgctgcctgatgcccacccctgccagtcattcctccattcacccagcgggaggtgggatgtgagacagcccacattggaaaatccagaaaaccgggaacagggatttgcccttcacaattctactccccagatcctctcccctggacacaggagacccacagggcaggaccctaagatctggggaaaggaggtcctgagaaccttgaggtacccttagatccttttctacccactttcctatggaggattccaagtcaccacttctctcaccggcttctaccagggtccaggactaaggcgtttttctccatagcctcaacattttgggaatcttcccttaatcacccttgctcctcctgggtgcctggaagatggactggcagagacctctttgttgcgttttgtgctttgatgccaggaatgccgcctagtttatgtccccggtggggcacacagcggggggcgccaggttttccttgtcccccagctgctctgcccctttccccttcttccctgactccaggcctgaacccctcccgtgctgtaataaatctttgtaaataact

SEQ ID NO: 4284 - protein, 171 aa, Homosapiens
MDPKDRKKIQFSVPAPPSQLDPRQVEMIRRRRPTPAMLFRLSEHSSPAVQRIAESHLQSISNLNENQASEEEDELGELRELGYPREEDEEEEEDDEEEEEEEDSQAEVLKVIRQSAGQKTTCGQGLEGPWERPPPLDESERDGGSEDQVEDPALSEPGEEPQRPSPSEPGT

SEQ ID NO: 4285 - DNA, 1710 bp, Homosapiens
agaggcagagacacacgcggagaggaggagaggctgagggagggaggtggagaaggacgggagaggcagagagaggagacacgcagagacactcaggaggggagagacaccgagacgcagagacactcaggaggggagagacaccgagacgcagagacacccaggccggggagcgccgccctcccctcggcgggcacggtatttttatccgtgcgcgaacagccctcctcctcctctcgccgcacagcccgccgcctgcgcgggggagcccagcacagaccgccgccgggaccccgagtcgcgcaccccagccccaccgcccaccccgcgcgccatggaccccaaggaccgcaagaagatccagttctcggtgcccgcgccccctagccagctcgacccccgccaggtggagatgatccggcgcaggagaccaacgcctgccatgctgttccggctctcagagcactcctcaccagaggaggaagcctccccccaccagagagcctcaggagaggggcaccatctcaagtcgaagagacccaacccctgtgcctacacaccaccttcgctgaaagctgtgcagcgcattgctgagtctcacctgcagtctatcagcaatttgaatgagaaccaggcctcagaggaggaggatgagctgggggagcttcgggagctgggttatccaagagaggaagatgaggaggaagaggaggatgatgaagaagaggaagaagaagaggacagccaggctgaagtcctgaaggtcatcaggcagtctgctgggcaaaagacaacctgtggccagggtctggaagggccctgggagcgcccaccccctctggatgagtccgagagagatggaggctctgaggaccaagtggaagacccagcactaagtgagcctggggaggaacctcagcgcccttccccctctgagcctggcacataggcacccagcctgcatctcccaggaggaagtggaggggacatcgctgttccccagaaacccactctatcctcaccctgttttgtgctcttcccctcgcctgctagggctgcggcttctgacttctagaagactaaggctggtctgtgtttgcttgtttgcccacctttggctgatacccagagaacctgggcacttgctgcctgatgcccacccctgccagtcattcctccattcacccagcgggaggtgggatgtgagacagcccacattggaaaatccagaaaaccgggaacagggatttgcccttcacaattctactccccagatcctctcccctggacacaggagacccacagggcaggaccctaagatctggggaaaggaggtcctgagaaccttgaggtacccttagatccttttctacccactttcctatggaggattccaagtcaccacttctctcaccggcttctaccagggtccaggactaaggcgtttttctccatagcctcaacattttgggaatcttcccttaatcacccttgctcctcctgggtgcctggaagatggactggcagagacctctttgttgcgttttgtgctttgatgccaggaatgccgcctagtttatgtccccggtggggcacacagcggggggcgccaggttttccttgtcccccagctgctctgcccctttccccttcttccctgactccaggcctgaacccctcccgtgctgtaataaatctttgtaaataact

SEQ ID NO: 4286 - protein, 204 aa, Homosapiens; identical to SEQ ID NO: 638

SEQ ID NO: 4287 - DNA, 1502 bp, Homosapiens
ttcatttctcacaaggactgggtgaagagttctgcagccttacagagactggaaaagaagcccaaaccaaggcccccagagaggtcccccaggcccctttgggtccctgagcctcagctggaggtggggggtgcctgcagtgcgctggctcagtctccttctgaaaagctggatccagcttgtttgaagcccttgagctgatcttagatccggcgcaggagaccaacgcctgccatgctgttccggctctcagagcactcctcaccagaggaggaagcctccccccaccagagagcctcaggagaggggcaccatctcaagtcgaagagacccaacccctgtgcctacacaccaccttcgctgaaagctgtgcagcgcattgctgagtctcacctgcagtctatcagcaatttgaatgagaaccaggcctcagaggaggaggatgagctgggggagcttcgggagctgggttatccaagagaggaagatgaggaggaagaggaggatgatgaagaagaggaagaagaagaggacagccaggctgaagtcctgaaggtcatcaggcagtctgctgggcaaaagacaacctgtggccagggtctggaagggccctgggagcgcccaccccctctggatgagtccgagagagatggaggctctgaggaccaagtggaagacccagcactaagtgagcctggggaggaacctcagcgcccttccccctctgagcctggcacataggcacccagcctgcatctcccaggaggaagtggaggggacatcgctgttccccagaaacccactctatcctcaccctgttttgtgctcttcccctcgcctgctagggctgcggcttctgacttctagaagactaaggctggtctgtgtttgcttgtttgcccacctttggctgatacccagagaacctgggcacttgctgcctgatgcccacccctgccagtcattcctccattcacccagcgggaggtgggatgtgagacagcccacattggaaaatccagaaaaccgggaacagggatttgcccttcacaattctactccccagatcctctcccctggacacaggagacccacagggcaggaccctaagatctggggaaaggaggtcctgagaaccttgaggtacccttagatccttttctacccactttcctatggaggattccaagtcaccacttctctcaccggcttctaccagggtccaggactaaggcgtttttctccatagcctcaacattttgggaatcttcccttaatcacccttgctcctcctgggtgcctggaagatggactggcagagacctctttgttgcgttttgtgctttgatgccaggaatgccgcctagtttatgtccccggtggggcacacagcggggggcgccaggttttccttgtcccccagctgctctgcccctttccccttcttccctgactccaggcctgaacccctcccgtgctgtaataaatctttgtaaataact

SEQ ID NO: 4288 - protein, 168 aa, Homosapiens; identical to SEQ ID NO: 640

SEQ ID NO: 4289 - DNA, 1418 bp, Homosapiens
ttcatttctcacaaggactgggtgaagagttctgcagccttacagagactggaaaagaagcccaaaccaaggcccccagagaggtcccccaggcccctttgggtccctgagcctcagctggagatccggcgcaggagaccaacgcctgccatgctgttccggctctcagagcactcctcaccagaggaggaagcctccccccaccagagagcctcaggagaggggcaccatctcaagtcgaagagacccaacccctgtgcctacacaccaccttcgctgaaagctgtgcagcgcattgctgagtctcacctgcagtctatcagcaatttgaatgagaaccaggcctcagaggaggaggatgagctgggggagcttcgggagctgggttatccaagagaggaagatgaggaggaagaggaggatgatgaagaagaggaagaagaagaggacagccaggctgaagtcctgaaggtcatcaggcagtctgctgggcaaaagacaacctgtggccagggtctggaagggccctgggagcgcccaccccctctggatgagtccgagagagatggaggctctgaggaccaagtggaagacccagcactaagtgagcctggggaggaacctcagcgcccttccccctctgagcctggcacataggcacccagcctgcatctcccaggaggaagtggaggggacatcgctgttccccagaaacccactctatcctcaccctgttttgtgctcttcccctcgcctgctagggctgcggcttctgacttctagaagactaaggctggtctgtgtttgcttgtttgcccacctttggctgatacccagagaacctgggcacttgctgcctgatgcccacccctgccagtcattcctccattcacccagcgggaggtgggatgtgagacagcccacattggaaaatccagaaaaccgggaacagggatttgcccttcacaattctactccccagatcctctcccctggacacaggagacccacagggcaggaccctaagatctggggaaaggaggtcctgagaaccttgaggtacccttagatccttttctacccactttcctatggaggattccaagtcaccacttctctcaccggcttctaccagggtccaggactaaggcgtttttctccatagcctcaacattttgggaatcttcccttaatcacccttgctcctcctgggtgcctggaagatggactggcagagacctctttgttgcgttttgtgctttgatgccaggaatgccgcctagtttatgtccccggtggggcacacagcggggggcgccaggttttccttgtcccccagctgctctgcccctttccccttcttccctgactccaggcctgaacccctcccgtgctgtaataaatctttgtaaataact

SEQ ID NO: 4290 - protein, 168 aa, Homosapiens; identical to SEQ ID NO: 640

SEQ ID NO: 4291 - DNA, 728 bp, Homosapiens
catttctcacaaggactgggtgaagagttctgcagccttacagagactggaaaagaagcccaaaccaaggcccccagagaggtcccccaggcccctttgggtccctgagcctcagctggaggtggggggtgcctgcagtgcgctggctcagtctccttctgaaaagctggatccagcttgtttgaagcccttgagctgatcttagatccggcgcaggagaccaacgcctgccatgctgttccggctctcagagcactcctcaccagaggaggaagcctccccccaccagagagcctcaggagaggggcaccatctcaagtcgaagagacccaacccctgtgcctacacaccaccttcgctgaaaggtactatacccccaccgaccttcctggctgtccgcctgatccctggaactgggcagacgctaggggagcttttgtcagtggggagggattgtttcgccacacatagcccgctgtcagcgtggcgcaacaacccaacgtaaagaccaattttttctcagtctggccttgcaaaacacaggagtcccgaggctgcaatgggcagctatgggccttaacatcgggttgtgggcttgaaagaaaagagatggctggcctaagacaaccagcaggcatccgcgtggaagggactccacctgcagctcctcttcaccagcctgtggtggaccacctcccacccctgctcatccagggcgccttctcctg

SEQ ID NO: 4292 - protein, 90 aa, Homosapiens
MLFRLSEHSSPEEEASPHQRASGEGHHLKSKRPNPCAYTPPSLKGTIPPPTFLAVRLIPGTGQTLGELLSVGRDCFATHSPLSAWRNNPT

SEQ ID NO: 4293 - DNA, 1293 bp, Homosapiens
agggagagggcacactttccctgtccccagagattgagaccctggggaaaataactcggattctttctctctctccctcttctcttttcctcctcgcttggttctggttcggttggctttggtggccttcctcagaggaggaagcctccccccaccagctgtgcagcgcattgctgagtctcacctgcagtctatcagcaatttgaatgagaaccaggcctcagaggaggaggatgagctgggggagcttcgggagctgggttatccaagagaggaagatgaggaggaagaggaggatgatgaagaagaggaagaagaagaggacagccaggctgaagtcctgaaggtcatcaggcagtctgctgggcaaaagacaacctgtggccagggtctggaagggccctgggagcgcccaccccctctggatgagtccgagagagatggaggctctgaggaccaagtggaagacccagcactaagtgagcctggggaggaacctcagcgcccttccccctctgagcctggcacataggcacccagcctgcatctcccaggaggaagtggaggggacatcgctgttccccagaaacccactctatcctcaccctgttttgtgctcttcccctcgcctgctagggctgcggcttctgacttctagaagactaaggctggtctgtgtttgcttgtttgcccacctttggctgatacccagagaacctgggcacttgctgcctgatgcccacccctgccagtcattcctccattcacccagcgggaggtgggatgtgagacagcccacattggaaaatccagaaaaccgggaacagggatttgcccttcacaattctactccccagatcctctcccctggacacaggagacccacagggcaggaccctaagatctggggaaaggaggtcctgagaaccttgaggtacccttagatccttttctacccactttcctatggaggattccaagtcaccacttctctcaccggcttctaccagggtccaggactaaggcgtttttctccatagcctcaacattttgggaatcttcccttaatcacccttgctcctcctgggtgcctggaagatggactggcagagacctctttgttgcgttttgtgctttgatgccaggaatgccgcctagtttatgtccccggtggggcacacagcggggggcgccaggttttccttgtcccccagctgctctgcccctttccccttcttccctgactccaggcctgaacccctcccgtgctgtaataaatctttgtaaataact

SEQ ID NO: 4294 - protein, 50 aa, Homosapiens
MPGMPPSLCPRWGTQRGAPGFPCPPAALPLSPSSLTPGLNPSRAVINLCK

SEQ ID NO: 4295 - DNA, 2880 bp, Homosapiens
agtctggggcaaggctggggaccttccaactgaagaaggaagacttgtggtggggggagtttggggccccacagagtggggcagagaaggagacagcctggaaggagtgatggggagaccccagagagcccaggaggcatgagggaggtgggggaagcgagggaggctcacggggcaccagcgcaagcaccgcacacaccttctgttgtcactgtggctcacgaagtgaactctcctcccccgctgggggagaaggaagctgcctgggctgccacctgctctcctgccttacctccccccacagccctcatggatccttctctaccaggagggcactgttttgtaggcttcagtccttttgtgggcaagggaaggtgcccggcagggttggggcttgtcagggaagaatcgagggccctagagagaggggcacagcactaagtcttagcttgaggggttgtgctccaaggctggagctctcacacttggctcaagatgaagctctgccgcgtccccaaggtcagggtagggtgatttattgtgcttttattgcctggatagcttgcccagagccagcaggaggtactgggctgggagctgggggctgggtggggcagcgggcacatacaaagcaccctctgtgcctgtccccgagttggcaggagcatagcaccctgctcactgtgccggaggtttccagcctggccctacccctctgggccttctgaggggaggggccactggcagaccaagaaggaactgcagcaactccccattccccacccccagcccctcctcagcatcttgtctgtggcctgtgaactttgtgtcgcatatgttctaagatcctgccagctcctgcagcctctcctcagtggcccctcaacctctgccatcccccagaacccctggccttggcccctttctctaaccccttgctcctttccatcttttggaaacttgtctccagctgcccacactgttcccttcccagccctatctgagcaggtctttggaggctgggggggttgctttctaggtcaccgcagagggagctgggaacctggggatgtgggtcaagattgtgggggccgcatctgagcatgccgcatcccccggcacagactgcactggctgcagactattatgtcctcagcctcggaattgttctgtcccttggagcccggggcaggagtatgtggattggcatctatgactgggcagtgccagggagtggggactatgcatcgcatgggaggtaggatcagggtaagcagtgagccctcagcaggctgggcacccccaagaaatggaaagtggcaaatccccaggccctggttcctacgccctgtgccttctgcctgggcttgaagctgggagacactgtctcccgtactgggtacttggaaaatcaagctctccagccagggaatgttaagctgctgctgtgcccgcctggtcttgcccagcctagtgccctatggtgtgggggagctgcctgggggctagcatcttaggacagcttaagagccaaacatgatcaaatctacccctggctgcctctgccctggtctgacacccatcaggctgacctgtcaactttggcctttgaacttgggcccctgagggggtattctctgccccaggcctacgggaaggaggctgggggctaggccacaggctatctccagatccatgggctgtgtctagctgacccttgctttcctcggtctcctctgtgccagctgtgcagcgcattgctgagtctcacctgcagtctatcagcaatttgaatgagaaccaggcctcagaggaggaggatgagctgggggagcttcgggagctgggttatccaagagaggaagatgaggaggaagaggaggatgatgaagaagaggaagaagaagaggacagccaggctgaagtcctgaaggtcatcaggcagtctgctgggcaaaagacaacctgtggccagggtctggaagggccctgggagcgcccaccccctctggatgagtccgagagagatggaggctctgaggaccaagtggaagacccagcactaagtgagcctggggaggaacctcagcgcccttccccctctgagcctggcacataggcacccagcctgcatctcccaggaggaagtggaggggacatcgctgttccccagaaacccactctatcctcaccctgttttgtgctcttcccctcgcctgctagggctgcggcttctgacttctagaagactaaggctggtctgtgtttgcttgtttgcccacctttggctgatacccagagaacctgggcacttgctgcctgatgcccacccctgccagtcattcctccattcacccagcgggaggtgggatgtgagacagcccacattggaaaatccagaaaaccgggaacagggatttgcccttcacaattctactccccagatcctctcccctggacacaggagacccacagggcaggaccctaagatctggggaaaggaggtcctgagaaccttgaggtacccttagatccttttctacccactttcctatggaggattccaagtcaccacttctctcaccggcttctaccagggtccaggactaaggcgtttttctccatagcctcaacattttgggaatcttcccttaatcacccttgctcctcctgggtgcctggaagatggactggcagagacctctttgttgcgttttgtgctttgatgccaggaatgccgcctagtttatgtccccggtggggcacacagcggggggcgccaggttttccttgtcccccagctgctctgcccctttccccttcttccctgactccaggcctgaacccctcccgtgctgtaataaatctttgtaaataact

SEQ ID NO: 4296 - protein, 100 aa, Homosapiens [sequence omitted]

SEQ ID NO: 4297 - DNA, 2117 bp, Homosapiens
ggcggggccgcaggcgaacgcaagtcccgcttcgctctcgggggcggactcagcggcggaagtggcgctgccggaagatcttcttccgctctgaggcgctactgaggccgcggagccggactgcggttggggcgggaagagccggggccgtggctgacatggagcagccctgctgctgaggccgcgccctccccgccctgaggtgggggcccaccaggatgagcaagctgcccagggagctgacccgagacttggagcgcagcctgcctgccgtggcctccctgggctcctcactgtcccacagccagagcctctcctcgcacctccttccgccgcctgagaagcgaagggccatctctgatgtccgccgcaccttctgtctcttcgtcaccttcgacctgctcttcatctccctgctctggatcatcgaactgaataccaacacaggcatccgtaagaacttggagcaggagatcatccagtacaactttaaaacttccttcttcgacatctttgtcctggccttcttccgcttctctggactgctcctaggctatgccgtgctgcggctccggcactggtgggtgattgcggtcacgacgctggtgtccagtgcattcctcattgtcaaggtcatcctctctgagctgctcagcaaaggggcatttggctacctgctccccatcgtctcttttgtcctcgcctggttggagacctggttccttgacttcaaagtcctaccccaggaagctgaagaggagcgatggtatcttgccgcccaggttgctgttgcccgtggacccctgctgttctccggtgctctgtccgagggacagttctattcacccccagaatcctttgcagggtctgacaatgaatcagatgaagaagttgctgggaagaaaagtttctctgctcaggagcgggagtacatccgccaggggaaggaggccacggcagtggtggaccagatcttggcccaggaagagaactggaagtttgagaagaataatgaatatggggacaccgtgtacaccattgaagttccctttcacggcaagacgtttatcctgaagaccttcctgccctgtcctgcggagctcgtgtaccaggaggtgatcctgcagcccgagaggatggtgctgtggaacaagacagtgactgcctgccagatcctgcagcgagtggaagacaacaccctcatctcctatgacgtgtctgcaggggctgcgggcggcgtggtctccccaagggacttcgtgaatgtccggcgcattgagcggcgcagggaccgatacttgtcatcagggatcgccacctcacacagtgccaagcccccgacgcacaaatatgtccggggagagaatggccctgggggcttcatcgtgctcaagtcggccagtaacccccgtgtttgcacctttgtctggattcttaatacagatctcaagggccgcctgccccggtacctcatccaccagagcctcgcggccaccatgtttgaatttgcctttcacctgcgacagcgcatcagcgagctgggggcccgggcgtgactgtgccccctcccaccctgcgggccagggtcctgtcgccaccacttccagagccagaaagggtgccagttgggctcgcactgcccacatgggacctggccccaggctgtcaccctccaccgagccacgcagtgcctggagttgactgactgagcaggctgtggggtggagcactggactccggggccccactggctggaggaagtggggtctggcctgttgatgtttacatggcgccctgcctcctggaggaccagattgctctgccccaccttgccagggcagggtctgggctgggcacctgacttggctggggaggaccagggccctgggcagggcagggcagcctgtcacccgtgtgaagatgaaggggctcttcatctgcctgcgctctcgtcggtttttttaggattattgaaagagtctgggacccttgttggggagtgggtggcaggtgggggtgggctgctggccatgaatctctgcctctcccaggctgtccccctcctcccagggcctcctgggggacctttgtattaagccaattaaaaacatgaattt

SEQ ID NO: 4298 - protein, 445 aa, Homosapiens
MSKLPRELTRDLERSLPAVASLGSSLSHSQSLSSHLLPPPEKRRAISDVRRTFCLFVTFDLLFISLLWIIELNTNTGIRKNLEQEIIQYNFKTSFFDIFVLAFFRFSGLLLGYAVLRLRHWWVIAVTTLVSSAFLIVKVILSELLSKGAFGYLLPIVSFVLAWLETWFLDFKVLPQEAEEERWYLAAQVAVARGPLLFSGALSEGQFYSPPESFAGSDNESDEEVAGKKSFSAQEREYIRQGKEATAVVDQILAQEENWKFEKNNEYGDTVYTIEVPFHGKTFILKTFLPCPAELVYQEVILQPERMVLWNKTVTACQILQRVEDNTLISYDVSAGAAGGVVSPRDFVNVRRIERRRDRYLSSGIATSHSAKPPTHKYVRGENGPGGFIVLKSASNPRVCTFVWILNTDLKGRLPRYLIHQSLAATMFEFAFHLRQRISELGARA

SEQ ID NO: 4299 - DNA, 2990 bp, Homosapiens
ggcggggccgcaggcgaacgcaagtcccgcttcgctctcgggggcggactcagcggcggaagtggcgctgccggaagatcttcttccgctctgaggcgctactgaggccgcggagccggactgcggttggggcgggaagagccggggccgtggctgacatggagcagccctgctgctgaggccgcgccctccccgccctgaggtgggggcccaccaggatgagcaagctgcccagggagctgacccgagacttggagcgcagcctgcctgccgtggcctccctgggctcctcactgtcccacagccagagcctctcctcgcacctccttccgccgcctgagaagcgaagggccatctctgatgtccgccgcaccttctgtctcttcgtcaccttcgacctgctcttcatctccctgctctggatcatcgaactgaataccaacacaggcatccgtaagaacttggagcaggagatcatccagtacaactttaaaacttccttcttcgacatctttgtcctggccttcttccgcttctctggactgctcctaggctatgccgtgctgcggctccggcactggtgggtgattgcggtcacgacgctggtgtccagtgcattcctcattgtcaaggtcatcctctctgagctgctcagcaaaggggcatttggctacctgctccccatcgtctcttttgtcctcgcctggttggagacctggttccttgacttcaaagtcctaccccaggaagctgaagaggagcgatggtatcttgccgcccaggttgctgttgcccgtggacccctgctgttctccggtgctctgtccgagggacagttctattcacccccagaatcctttgcagggtctgacaatgaatcagatgaagaagttgctgggaagaaaagtttctctgctcaggagcgggagtacatccgccaggggaaggaggccacggcagtggtggaccagatcttggcccaggaagagaactggaagtttgagaagaataatgaatatggggacaccgtgtacaccattgaagttccctttcacggcaagacgtttatcctgaagaccttcctgccctgtcctgcggagctcgtgtaccaggaggtgatcctgcagcccgagaggatggtgctgtggaacaagacagtgactgcctgccagatcctgcagcgagtggaagacaacaccctcatctcctatgacgtgtctgcaggggctgcgggcggcgtggtctccccaagggacttcgtgaatgtccggcgcattgagcggcgcagggaccgatacttgtcatcagggatcgccacctcacacagtgccaagcccccgacgcacaaatatgtccggggagagaatggccctgggggcttcatcgtgctcaagtcggccagtaacccccgtgtttgcacctttgtctggattcttaatacagatctcaagggccgcctgccccggtacctcatccaccagagcctcgcggccaccatgtttgaatttgcctttcacctgcgacagcgcatcagcgagctgggggcccgggcgtgactgtgccccctcccaccctgcgggccagggtcctgtcgccaccacttccagagccagaaagggtgccagttgggctcgcactgcccacatgggacctggccccaggctgtcaccctccaccgagccacgcagtgcctggagttgactgactgagcaggctgtggggtggagcactggactccggggccccactggctggaggaagtggggtctggcctgttgatgtttacatggcgccctgcctcctggaggaccagattgctctgccccaccttgccagggcagggtctgggctgggcacctgacttggctggggaggaccagggccctgggcagggcagggcagcctgtcacccgtgtgaagatgaaggggctcttcatctgcctgcgctctcgtcggtttttttaggattattgaaagagtctgggacccttgttggggagtgggtggcaggtgggggtgggctgctggccatgaatctctgcctctcccaggctgtccccctcctcccagggcctcctgggggacctttgtattaagccaattaaaaacatgaatttaaaaaaaaaaaaaaattccagcccctcccactgccttgcctcttgagggaagagaaaggcaggcagcagcttggatgaagagggaagacccctcacacagcctctcctgggctcacaggagggcggagcccggggagccagttcctgaaacatgccccccattccccccccgcccaccccccactccccgctttcctgaccagttcaactgagcagatgactggtcagaaaaaaatgccccgccccctgccaggcttcagcggggcaagtttaaagtctctagtccaggaatggaggtgggggtatgggcacctggcagtgcccacagcaagccttgactgtgtggcctggagatggggcctgagcttcagggtcactgaggcacctctgggatccaggccacctggagccccggacctcccagactccactcacccattccctctccccgcacggcactcacaccaggggcggcctggagcccggatcgcagggcggggccaggccactgcctgccttcctcctccctcccggctggcctgcccccttgcctgcctgcatgcaggcttccagcagagccagcttcttcagagccaggtggatcctgtttcggtcctgcctaggtgtgtgaccctgggcgaatctacctctctcagcttctgcttcccactttatgaaaatgggactgatgtcacagggttgttatgagattaaaagatatgaagaaccggggacagtgctcagtaatcaatagtctgcagttctgcacccacgtgctcctgggtactctgccgtccccacagggtcctcagctcagcccctgtcactgcctctcctgccaccctttgtccactcggcagtgttctcactcct

SEQ ID NO: 4300 - protein, 445 aa, Homosapiens; identical to SEQ ID NO: 4298

SEQ ID NO: 4301 - DNA, 984 bp, Homosapiens
cggactcagcggcggaagtggcgctgccggaagatcttcttccgctctgaggcgctactgaggccgcggagccggactgcggttggggcgggaagagccggggccgtggctgacatggagcagccctgctgctgaggccgcgccctccccgccctgaggtgggggcccaccaggatgagcaagctgcccagggagctgacccgagacttggagcgcagcctgcctgccgtggcctccctgggctcctcactgtcccacagccagagcctctcctcgcacctccttccgccgcctgagaagcgaagggccatctctgatgtccgccgcaccttctgtctcttcgtcaccttcgacctgctcttcatctccctgctctggatcatcgaactgaataccaacacaggcatccgtaagaacttggagcaggagatcatccagtacaactttaaaacttccttcttcgacatctttgtcctggccttcttccgcttctctggactgctcctaggctatgccgtgctgcggctccggcactggtgggtgattgcggtcacgacgctggtgtccagtgcattcctcattgtcaaggtcatcctctctgagctgctcagcaaaggggcatttggctacctgctccccatcgtctcttttgtcctcgcctggttggagacctggttccttgacttcaaagtcctaccccaggaagctgaagaggagcgatgtgagtgcttgcgggtaggggggtgcagcgagggttacccacagccccaagagaggggagttgcgggcatgagagtcagtctgaagcatctcgccacctctgagcagcctccagtagcctgagggggagcttgggtgggggtaccccaggctgctagggtgtaactgtcctcggtccgggaccgagtctgctcctccagggtatcttgccgcccaggttgctgttgcccgtggacccctgctgttctccggtgctctgtccga

SEQ ID NO: 4302 - protein, 222 aa, Homosapiens [sequence omitted]

SEQ ID NO: 4303 - DNA, 969 bp, Homosapiens
ggactcagcggcggaagtggcgctgccggaagatcttcttccgctctgaggcgctactgaggccgcggagccggactgcggttggggcgggaagagccggggccgtggctgacatggagcagccctgctgctgaggccgcgccctccccgccctgaggtgggggcccaccaggatgagcaagctgcccagggagctgacccgagacttggagcgcagcctgcctgccgtggcctccctgggctcctcactgtcccacagccagagcctctcctcgcacctccttccgccgcctgagaagcgaagggccatctctgatgtccgccgcaccttctgtctcttcgtcaccttcgacctgctcttcatctccctgctctggatcatcgaactgaataccaacacaggcatccgtaagaacttggagcaggagatcatccagtacaactttaaaacttccttcttcgacatctttgtcctggccttcttccgcttctctggactgctcctaggctatgccgtgctgcggctccggcactggtgggtgattgcggtcacgacgctggtgtccagtgcattcctcattgtcaaggtcatcctctctgagctgctcagcaaaggggcatttggctacctgctccccatcgtctcttttgtcctcgcctggttggagacctggttccttgacttcaaagtcctaccccaggaagctgaagaggagcgatggtatcttgccgcccaggttgctgttgcccgtggacccctgctgttctccggtgctctgtccgagggacagttctattcacccccagaatcctttgcagggtctgacaatgaatcagatgaagaagttgctgggaagaaaagtttctctgctcaggagcgggagtacatccgccaggggaaggaggccacggcagtggtggaccagatcttggcccaggaagagaactggaagtttgagaagaataatg

SEQ ID NO: 4304 - protein, 264 aa, Homosapiens
MSKLPRELTRDLERSLPAVASLGSSLSHSQSLSSHLLPPPEKRRAISDVRRTFCLFVTFDLLFISLLWIIELNTNTGIRKNLEQEIIQYNFKTSFFDIFVLAFFRFSGLLLGYAVLRLRHWWVIAVTTLVSSAFLIVKVILSELLSKGAFGYLLPIVSFVLAWLETWFLDFKVLPQEAEEERWYLAAQVAVARGPLLFSGALSEGQFYSPPESFAGSDNESDEEVAGKKSFSAQEREYIRQGKEATAVVDQILAQEENWKFEKN

SEQ ID NO: 4305 - DNA, 1356 bp, Homosapiens
cagcggcggaagtggcgctgccggaagatcttcttccgctctgaggcgctactgaggccgcggagccggactgcggttggggcgggaagagccggggccgtggctgacatggagcagccctgctgctgaggccgcgccctccccgccctgaggtgggggcccaccaggatgagcaagctgcccagggagctgacccgagacttggagcgcagcctgcctgccgtggcctccctgggctcctcactgtcccacagccagagcctctcctcgcacctccttccgccgcctgagaagcgaagggccatctctgatgtccgccgcaccttctgtctcttcgtcaccttcgacctgctcttcatctccctgctctggatcatcgaactgaataccaacacaggcatccgtaagaacttggagcaggagatcatccagtacaactttaaaacttccttcttcgacatctttgtcctggccttcttccgcttctctggactgctcctaggctatgccgtgctgcggctccggcactggtgggtgattgcggtcacgacgctggtgtccagtgcattcctcattgtcaaggtcatcctctctgaggtcagtggctcagggtctggccagtctggtgggcatcagacctgagtggtatgcttctagagaggagcatttctctaatttggggtgtctgtccctgttgtccgggttagggggagagggaatcctgtcctttggtatctataaggaatcatccttcacccgcttccctgacttagccccttgcagctctaggaatcagaaggttctttctccagcctaaccccagtttatcctgctgcagacttgagagggttcccaagcagctgctaccaggaatggggtgtatgccagtttggctggctagagttggtagccacagaagggggctctgggtttggggtgacccctgccatggagctcagccccctcccttcacagctgctcagcaaaggggcatttggctacctgctccccatcgtctcttttgtcctcgcctggttggagacctggttccttgacttcaaagtcctaccccaggaagctgaagaggagcgatgtgagtgcttgcgggtaggggggtgcagcgagggttacccacagccccaagagaggggagttgcgggcatgagagtcagtctgaagcatctcgccacctctgagcagcctccagtagcctgagggggagcttgggtgggggtaccccaggctgctagggtgtaactgtcctcggtccgggaccgagtctgctcctccagggtatcttgccgcccaggttgctgttgcccgtggacccctgctgttctccggtgctctgtccga

SEQ ID NO: 4306 - protein, 157 aa, Homosapiens [sequence omitted]

SEQ ID NO: 4307 - DNA, 724 bp, Homosapiens
gctgccggaagatcttcttccgctctgaggcgctactgaggccgcggagccggactgcggttggggcgggaagagccggggccgtggctgacatggagcagccctgctgctgaggccgcgccctccccgccctgaggtgggggcccaccaggatgagcaagctgcccagggagctgacccgagacttggagcgcagcctgcctgccgtggcctccctgggctcctcactgtcccacagccagagcctctcctcgcacctccttccgccgcctgagaagcgaagggccatctctgatgtccgccgcaccttctgtctcttcgtcaccttcgacctgctcttcatctccctgctctggatcatcgaactgaatggtcttgctctattggccaggctagagtgcagtgatgtgatcatagctcactgtagcctccaactcctagattcaagggttcctcccacctcagcctccccagtagctgggaccacaggtgcatgaccacatttggctattttttttttttttggtagagatggagtctcactatgttgcccaggctggtctcaaactcctgggctcaagtgatcctcccatctcggcctctcacagtgctgggattagaggcatgagccactgtgcctggcctctgtaattgtgcttttgaagttatttggctgtgttggctgcgattgctctgcagtcctcatgcgtacctgggaattctt

SEQ ID NO: 4308 - protein, 114 aa, Homosapiens
MSKLPRELTRDLERSLPAVASLGSSLSHSQSLSSHLLPPPEKRRAISDVRRTFCLFVTFDLLFISLLWIIELNGLALLARLECSDVIIAHCSLQLLDSRVPPTSASPVAGTTGA

SEQ ID NO: 4309 - DNA, 781 bp, Homosapiens
cgctactgaggccgcggagccggactgcggttggggcgggaagagccggggccgtggctgacatggagcagccagagcctctcctcgcacctccttccgccgcctgagaagcgaagggccatctctgatgtccgccgcaccttctgtctcttcgtcaccttcgacctgctcttcatctccctgctctggatcatcgaactgaataccaacacaggcatccgtaagaacttggagcaggagatcatccagtacaactttaaaacttccttcttcgacatctttgtcctggccttcttccgcttctctggactgctcctaggctatgccgtgctgcggctccggcactggtgggtgattgcggtcacgacgctggtgtccagtgcattcctcattgtcaaggtcatcctctctgagctgctcagcaaaggggcatttggctacctgctccccatcgtctcttttgtcctcgcctggttggagacctggttccttgacttcaaagtcctaccccaggaagctgaagaggagcgatggtatcttgccgcccaggttgctgttgcccgtggacccctgctgttctccggtgctctgtccgagggacagttctattcacccccagaatcctttgcagggtctgacaatgaatcagatgaagaagttgctgggaagaaaagtttctctgctcaggagcgggagtacatccgccaggggaaggaggccacggcagtggtggaccagatcttggcccaggaagagaactggaagtttgagaagaataatg

SEQ ID NO: 4310 - protein, 46 aa, Homosapiens
MNQMKKLLGRKVSLLRSGSTSARGRRPRQWWTRSWPRKRTGSLRRI

SEQ ID NO: 4311 - DNA, 428 bp, Homosapiens
agtaatgggattacaggcatgagccaccacacccagctacaaaccacctcctttgcaaagcaagagaaacatttaaaagagtaataccttacttggaacctcaatatataaaacagataaaaaccagactgctatgggtaaaagcagctactgaatcccacctgtcagcctttcctcaaactccagcatcaccctgagtgaggcctcgttggctagggtttgaaaatggggctcactcagatgactttgaaaggcctttgagctccatcagaccacctgccagtctaagtgatgaaaacccaccgtggcgtggaactgccctgtgcagtccccaaagtgctcattctctggctgactgtaggctgcctagccctggaggcatcacagctagcgcaggcctccacccaccacacccaccctcctgatga

SEQ ID NO: 4312 - protein, 44 aa, Homosapiens
MKTHRGVELPCAVPKVLILWLTVGCLALEASQLAQASTHHTHPP

SEQ ID NO: 4313 - DNA, 2389 bp, Homosapiens
ggtggtggcaggcccagaggctgttgacaggaccagaggctggagctcagggctaggcctgccctgctgctgaggccgcgccctccccgccctgaggtgggggcccaccaggatgagcaagctgcccagggagctgacccgagacttggagcgcagcctgcctgccgtggcctccctgggctcctcactgtcccacagccagagcctctcctcgcacctccttccgccgcctgagaagcgaagggccatctctgatgtccgccgcaccttctgtctcttcgtcaccttcgacctgctcttcatctccctgctctggatcatcgaactgaataccaacacaggcatccgtaagaacttggagcaggagatcatccagtacaactttaaaacttccttcttcgacatctttgtcctggccttcttccgcttctctggactgctcctaggctatgccgtgctgcggctccggcactggtgggtgattgcggtcacgacgctggtgtccagtgcattcctcattgtcaaggtcatcctctctgaggtcagtggctcagggtctggccagtctggtgggcatcagacctgagtggtatgcttctagagaggagcatttctctaatttggggtgtctgtccctgttgtccgggttagggggagagggaatcctgtcctttggtatctataaggaatcatccttcacccgcttccctgacttagccccttgcagctctaggaatcagaaggttctttctccagcctaaccccagtttatcctgctgcagacttgagagggttcccaagcagctgctaccaggaatggggtgtatgccagtttggctggctagagttggtagccacagaagggggctctgggtttggggtgacccctgccatggagctcagccccctcccttcacagctgctcagcaaaggggcatttggctacctgctccccatcgtctcttttgtcctcgcctggttggagacctggttccttgacttcaaagtcctaccccaggaagctgaagaggagcgatggtatcttgccgcccaggttgctgttgcccgtggacccctgctgttctccggtgctctgtccgagggacagttctattcacccccagaatcctttgcagggtctgacaatgaatcagatgaagaagttgctgggaagaaaagtttctctgctcaggagcgggagtacatccgccaggggaaggaggccacggcagtggtggaccagatcttggcccaggaagagaactggaagtttgagaagaataatgaatatggggacaccgtgtacaccattgaagttccctttcacggcaagacgtttatcctgaagaccttcctgccctgtcctgcggagctcgtgtaccaggaggtgatcctgcagcccgagaggatggtgctgtggaacaagacagtgactgcctgccagatcctgcagcgagtggaagacaacaccctcatctcctatgacgtgtctgcaggggctgcgggcggcgtggtctccccaagggacttcgtgaatgtccggcgcattgagcggcgcagggaccgatacttgtcatcagggatcgccacctcacacagtgccaagcccccgacgcacaaatatgtccggggagagaatggccctgggggcttcatcgtgctcaagtcggccagtaacccccgtgtttgcacctttgtctggattcttaatacagatctcaagggccgcctgccccggtacctcatccaccagagcctcgcggccaccatgtttgaatttgcctttcacctgcgacagcgcatcagcgagctgggggcccgggcgtgactgtgccccctcccaccctgcgggccagggtcctgtcgccaccacttccagagccagaaagggtgccagttgggctcgcactgcccacatgggacctggccccaggctgtcaccctccaccgagccacgcagtgcctggagttgactgactgagcaggctgtggggtggagcactggactccggggccccactggctggaggaagtggggtctggcctgttgatgtttacatggcgccctgcctcctggaggaccagattgctctgccccaccttgccagggcagggtctgggctgggcacctgacttggctggggaggaccagggccctgggcagggcagggcagcctgtcacccgtgtgaagatgaaggggctcttcatctgcctgcgctctcgtcggtttttttaggattattgaaagagtctgggacccttgttggggagtgggtggcaggtgggggtgggctgctggccatgaatctctgcctctcccaggctgtccccctcctcccagggcctcctgggggacctttgtattaagccaattaaaaacatgaattt

SEQ ID NO: 4314 - protein, 311 aa, Homosapiens
MELSPLPSQLLSKGAFGYLLPIVSFVLAWLETWFLDFKVLPQEAEEERWYLAAQVAVARGPLLFSGALSEGQFYSPPESFAGSDNESDEEVAGKKSFSAQEREYIRQGKEATAVVDQILAQEENWKFEKNNEYGDTVYTIEVPFHGKTFILKTFLPCPAELVYQEVILQPERMVLWNKTVTACQILQRVEDNTLISYDVSAGAAGGVVSPRDFVNVRRIERRRDRYLSSGIATSHSAKPPTHKYVRGENGPGGFIVLKSASNPRVCTFVWILNTDLKGRLPRYLIHQSLAATMFEFAFHLRQRISELGARA

SEQ ID NO: 4315 - DNA, 953 bp, Homosapiens
ggcaggcccagaggctgttgacaggaccagaggctggagctcagggctaggcctggtaggagcaggctacagccccagggatccaggaggggccctgctgctgaggccgcgccctccccgccctgaggtgggggcccaccaggatgagcaagctgcccagggagctgacccgagacttggagcgcagcctgcctgccgtggcctccctgggctcctcactgtcccacagccagagcctctcctcgcacctccttccgccgcctgagaagcgaagggccatctctgatgtccgccgcaccttctgtctcttcgtcaccttcgacctgctcttcatctccctgctctggatcatcgaactgaataccaacacaggcatccgtaagaacttggagcaggagatcatccagtacaactttaaaacttccttcttcgacatctttgtcctggccttcttccgcttctctggactgctcctaggctatgccgtgctgcggctccggcactggtgggtgattgcggtcacgacgctggtgtccagtgcattcctcattgtcaaggtcatcctctctgagctgctcagcaaaggggcatttggctacctgctccccatcgtctcttttgtcctcgcctggttggagacctggttccttgacttcaaagtcctaccccaggaagctgaagaggagcgatgtgagtgcttgcgggtaggggggtgcagcgagggttacccacagccccaagagaggggagttgcgggcatgagagtcagtctgaagcatctcgccacctctgagcagcctccagtagcctgagggggagcttgggtgggggtaccccaggctgctagggtgtaactgtcctcggtccgggaccgagtctgctcctccagggtatcttgccgcccaggttgctgttgcccgtggacccctgctgttctccggtgctctgtccga

SEQ ID NO: 4316 - protein, 222 aa, Homosapiens [sequence omitted]

SEQ ID NO: 4317 - DNA, 361 bp, Homosapiens
cctgggtggtggcttagcatcaacagcctcccctccaggttcctccatcccctacctcttgccccttccgggaggtgaggggcagccccaggcccttgcttctacctgcagagctcttcctgtctccctctcacagaccaacacaggcatccgtaagaacttggagcaggagatcatccagtacaactttaaaacttccttcttcgacatctttgtcctggccttcttccgcttctctggactgctcctaggctatgccgtgctgcggctccggcactggtgggtgattgcgcctctgccttccccttcctccctccctcccctgggcaggtcacgacgctggtgtccagtgcattcctca

SEQ ID NO: 4318 - protein, 119 aa, Homosapiens
LGGGLASTASPPGSSIPYLLPLPGGEGQPQALASTCRALPVSLSQTNTGIRKNLEQEIIQYNFKTSFFDIFVLAFFRFSGLLLGYAVLRLRHWWVIAPLPSPSSLPPLGRSRRWCPVHS

SEQ ID NO: 4319 - DNA, 3567 bp, Homosapiens
ggccttcttccgcttctctggactgctcctaggctatgccgtgctgcggctccggcactggtgggtgattgcggtaagatgccactttcctggcagcttctgggccctggcagggctggtggaagggatgggatggaggaggactcacttcccagcctctgccttccccttcctccctccctcccctgggcaggtcacgacgctggtgtccagtgcattcctcattgtcaaggtcatcctctctgaggtcagtggctcagggtctggccagtctggtgggcatcagacctgagtggtatgcttctagagaggagcatttctctaatttggggtgtctgtccctgttgtccgggttagggggagagggaatcctgtcctttggtatctataaggaatcatccttcacccgcttccctgacttagccccttgcagctctaggaatcagaaggttctttctccagcctaaccccagtttatcctgctgcagacttgagagggttcccaagcagctgctaccaggaatggggtgtatgccagtttggctggctagagttggtagccacagaagggggctctgggtttggggtgacccctgccatggagctcagccccctcccttcacagctgctcagcaaaggggcatttggctacctgctccccatcgtctcttttgtcctcgcctggttggagacctggttccttgacttcaaagtcctaccccaggaagctgaagaggagcgatgtgagtgcttgcgggtaggggggtgcagcgagggttacccacagccccaagagaggggagttgcgggcatgagagtcagtctgaagcatctcgccacctctgagcagcctccagtagcctgagggggagcttgggtgggggtaccccaggctgctagggtgtaactgtcctcggtccgggaccgagtctgctcctccagggtatcttgccgcccaggttgctgttgcccgtggacccctgctgttctccggtgctctgtccgagggacagttctattcacccccagaatcctttgcagggtctgacaatgaatcagatgaagaagttgctgggaagaaaagtttctctgctcaggagcgggagtacatccgccaggggaaggaggccacggcagtggtggaccagatcttggcccaggaagagaactggaagtttgagaagaataatgtaagaagccctctcccacctgaccttcccatgcgtgttaggagtttctgttctcttttctgaggcctgaggaagaaacccaaagattacatgggttggagccatattcctgccccaagagagggagctgggccctcgggtcggcaggaggctgggctggattggacgtttcccccgtgccccttggccccccttccccgcaccccccatgtttacttccctgctgttctgcccccttggctccaggctttgaaggggaagccaggcttctgctctgcatccgttgtttcgtttcatgatcaaaacaacattatctacaaagatcgtagagagcttggaaaacagagagcaacatgccccagtccctctctctggccagttcttgtggcagccccattggcctggagacatggttttttgtggttgcagctgcagctgtccccccgtcttttaactcgacatcaaaagcctctctcctgccagtgccataggtttgttagagctactgttttgtaacagctgctcaggtgtccccaaactcctggagttttccaccctgagctgttaaaaacctgccctgcctgtcacccatttctgtgccaccagcccaccccctgcctccactctcctccctgccaccttctgtccctgccataggaatatggggacaccgtgtacaccattgaagttccctttcacggcaagacgtttatcctgaaggtgagtgaggggagcgggtgtcctggagccccagacagcacaggaggctccaggaaggtgccgaggggccctctggtgggtgccccccaccaagagggaagggttggtctgcccgagcccatctggcaccacccagccctctgccgccctgtcccagaccttcctgccctgtcctgcggagctcgtgtaccaggaggtgatcctgcagcccgagaggatggtgctgtggaacaagacagtgactgcctgccagatcctgcagcgagtggaagacaacaccctcatctcctatgacgtgtctgcaggggctgcgggcggcgtggtctccccaagggacttcgtgaatgtccggcgcattgagcggcgcagggaccgatacttgtcatcagggatcgccacctcacacagtgccaagcccccgacgcacaaatatgtccggggagagaatggccctgggggcttcatcgtgctcaagtcggccagtaacccccgtgtttgcacctttgtctggattcttaatacagatctcaaggtggggtgctggggggctgccaggtgggttctgtggagtggaggggaccctgctgctgacttggttgctgcatgactttgggggctctctgccatgcctgggcctcccctttgtcagccacctttcttacttgaaaatttgggtcagggtccagatggtctcttagccctgggttgctgtagggcatgtgcccccccttcttacctctgagtcctgaggccctgaggaagggtggctggtggccagcccggccccaccctggtctgtttgtgttgctggtgccaagagccaggcccagcatgttcttcctgccaggggtgagtgggagagggcgacccaggctggattccagagctgcacctgcattctggcccagagcccccctgctggtgccagctgcaaggggagaccctgctgagggcaggccatcaagtgtgacttctgcctgccttcccccagggccgcctgccccggtacctcatccaccagagcctcgcggccaccatgtttgaatttgcctttcacctgcgacagcgcatcagcgagctgggggcccgggcgtgactgtgccccctcccaccctgcgggccagggtcctgtcgccaccacttccagagccagaaagggtgccagttgggctcgcactgcccacatgggacctggccccaggctgtcaccctccaccgagccacgcagtgcctggagttgactgactgagcaggctgtggggtggagcactggactccggggccccactggctggaggaagtggggtctggcctgttgatgtttacatggcgccctgcctcctggaggaccagattgctctgccccaccttgccagggcagggtctgggctgggcacctgacttggctggggaggaccagggccctgggcagggcagggcagcctgtcacccgtgtgaagatgaaggggctcttcatctgcctgcgctctcgtcggtttttttaggattattgaaagagtctgggacccttgttggggagtgggtggcaggtgggggtgggctgctggccatgaatctctgcctctcccaggctgtccccctcctcccagggcctcctgggggacctttgtattaagccaattaaaaacatgaattt

SEQ ID NO: 4320 - protein, 129 aa, Homosapiens
MVLWNKTVTACQILQRVEDNTLISYDVSAGAAGGVVSPRDFVNVRRIERRRDRYLSSGIATSHSAKPPTHKYVRGENGPGGFIVLKSASNPRVCTFVWILNTDLKVGCWGAARWVLWSGGDPAADLVAA

SEQ ID NO: 4321 - DNA, 4440 bp, Homosapiens
ggccttcttccgcttctctggactgctcctaggctatgccgtgctgcggctccggcactggtgggtgattgcggtaagatgccactttcctggcagcttctgggccctggcagggctggtggaagggatgggatggaggaggactcacttcccagcctctgccttccccttcctccctccctcccctgggcaggtcacgacgctggtgtccagtgcattcctcattgtcaaggtcatcctctctgaggtcagtggctcagggtctggccagtctggtgggcatcagacctgagtggtatgcttctagagaggagcatttctctaatttggggtgtctgtccctgttgtccgggttagggggagagggaatcctgtcctttggtatctataaggaatcatccttcacccgcttccctgacttagccccttgcagctctaggaatcagaaggttctttctccagcctaaccccagtttatcctgctgcagacttgagagggttcccaagcagctgctaccaggaatggggtgtatgccagtttggctggctagagttggtagccacagaagggggctctgggtttggggtgacccctgccatggagctcagccccctcccttcacagctgctcagcaaaggggcatttggctacctgctccccatcgtctcttttgtcctcgcctggttggagacctggttccttgacttcaaagtcctaccccaggaagctgaagaggagcgatgtgagtgcttgcgggtaggggggtgcagcgagggttacccacagccccaagagaggggagttgcgggcatgagagtcagtctgaagcatctcgccacctctgagcagcctccagtagcctgagggggagcttgggtgggggtaccccaggctgctagggtgtaactgtcctcggtccgggaccgagtctgctcctccagggtatcttgccgcccaggttgctgttgcccgtggacccctgctgttctccggtgctctgtccgagggacagttctattcacccccagaatcctttgcagggtctgacaatgaatcagatgaagaagttgctgggaagaaaagtttctctgctcaggagcgggagtacatccgccaggggaaggaggccacggcagtggtggaccagatcttggcccaggaagagaactggaagtttgagaagaataatgtaagaagccctctcccacctgaccttcccatgcgtgttaggagtttctgttctcttttctgaggcctgaggaagaaacccaaagattacatgggttggagccatattcctgccccaagagagggagctgggccctcgggtcggcaggaggctgggctggattggacgtttcccccgtgccccttggccccccttccccgcaccccccatgtttacttccctgctgttctgcccccttggctccaggctttgaaggggaagccaggcttctgctctgcatccgttgtttcgtttcatgatcaaaacaacattatctacaaagatcgtagagagcttggaaaacagagagcaacatgccccagtccctctctctggccagttcttgtggcagccccattggcctggagacatggttttttgtggttgcagctgcagctgtccccccgtcttttaactcgacatcaaaagcctctctcctgccagtgccataggtttgttagagctactgttttgtaacagctgctcaggtgtccccaaactcctggagttttccaccctgagctgttaaaaacctgccctgcctgtcacccatttctgtgccaccagcccaccccctgcctccactctcctccctgccaccttctgtccctgccataggaatatggggacaccgtgtacaccattgaagttccctttcacggcaagacgtttatcctgaaggtgagtgaggggagcgggtgtcctggagccccagacagcacaggaggctccaggaaggtgccgaggggccctctggtgggtgccccccaccaagagggaagggttggtctgcccgagcccatctggcaccacccagccctctgccgccctgtcccagaccttcctgccctgtcctgcggagctcgtgtaccaggaggtgatcctgcagcccgagaggatggtgctgtggaacaagacagtgactgcctgccagatcctgcagcgagtggaagacaacaccctcatctcctatgacgtgtctgcaggggctgcgggcggcgtggtctccccaagggacttcgtgaatgtccggcgcattgagcggcgcagggaccgatacttgtcatcagggatcgccacctcacacagtgccaagcccccgacgcacaaatatgtccggggagagaatggccctgggggcttcatcgtgctcaagtcggccagtaacccccgtgtttgcacctttgtctggattcttaatacagatctcaaggtggggtgctggggggctgccaggtgggttctgtggagtggaggggaccctgctgctgacttggttgctgcatgactttgggggctctctgccatgcctgggcctcccctttgtcagccacctttcttacttgaaaatttgggtcagggtccagatggtctcttagccctgggttgctgtagggcatgtgcccccccttcttacctctgagtcctgaggccctgaggaagggtggctggtggccagcccggccccaccctggtctgtttgtgttgctggtgccaagagccaggcccagcatgttcttcctgccaggggtgagtgggagagggcgacccaggctggattccagagctgcacctgcattctggcccagagcccccctgctggtgccagctgcaaggggagaccctgctgagggcaggccatcaagtgtgacttctgcctgccttcccccagggccgcctgccccggtacctcatccaccagagcctcgcggccaccatgtttgaatttgcctttcacctgcgacagcgcatcagcgagctgggggcccgggcgtgactgtgccccctcccaccctgcgggccagggtcctgtcgccaccacttccagagccagaaagggtgccagttgggctcgcactgcccacatgggacctggccccaggctgtcaccctccaccgagccacgcagtgcctggagttgactgactgagcaggctgtggggtggagcactggactccggggccccactggctggaggaagtggggtctggcctgttgatgtttacatggcgccctgcctcctggaggaccagattgctctgccccaccttgccagggcagggtctgggctgggcacctgacttggctggggaggaccagggccctgggcagggcagggcagcctgtcacccgtgtgaagatgaaggggctcttcatctgcctgcgctctcgtcggtttttttaggattattgaaagagtctgggacccttgttggggagtgggtggcaggtgggggtgggctgctggccatgaatctctgcctctcccaggctgtccccctcctcccagggcctcctgggggacctttgtattaagccaattaaaaacatgaatttaaaaaaaaaaaaaaattccagcccctcccactgccttgcctcttgagggaagagaaaggcaggcagcagcttggatgaagagggaagacccctcacacagcctctcctgggctcacaggagggcggagcccggggagccagttcctgaaacatgccccccattccccccccgcccaccccccactccccgctttcctgaccagttcaactgagcagatgactggtcagaaaaaaatgccccgccccctgccaggcttcagcggggcaagtttaaagtctctagtccaggaatggaggtgggggtatgggcacctggcagtgcccacagcaagccttgactgtgtggcctggagatggggcctgagcttcagggtcactgaggcacctctgggatccaggccacctggagccccggacctcccagactccactcacccattccctctccccgcacggcactcacaccaggggcggcctggagcccggatcgcagggcggggccaggccactgcctgccttcctcctccctcccggctggcctgcccccttgcctgcctgcatgcaggcttccagcagagccagcttcttcagagccaggtggatcctgtttcggtcctgcctaggtgtgtgaccctgggcgaatctacctctctcagcttctgcttcccactttatgaaaatgggactgatgtcacagggttgttatgagattaaaagatatgaagaaccggggacagtgctcagtaatcaatagtctgcagttctgcacccacgtgctcctgggtactctgccgtccccacagggtcctcagctcagcccctgtcactgcctctcctgccaccctttgtccactcggcagtgttctcactcct

SEQ ID NO: 4322 - protein, 129 aa, Homosapiens; identical to SEQ ID NO: 4320

SEQ ID NO: 4323 - DNA, 2129 bp, Homosapiens
cactacctccccacactctctccccaccccttgccattgtcatctgtgcctgttttctgcagggtctgacaatgaatcagatgaagaagttgctgggaagaaaagtttctctgctcaggagcgggagtacatccgccaggggaaggaggccacggcagtggtggaccagatcttggcccaggaagagaactggaagtttgagaagaataatgtaagaagccctctcccacctgaccttcccatgcgtgttaggagtttctgttctcttttctgaggcctgaggaagaaacccaaagattacatgggttggagccatattcctgccccaagagagggagctgggccctcgggtcggcaggaggctgggctggattggacgtttcccccgtgccccttggccccccttccccgcaccccccatgtttacttccctgctgttctgcccccttggctccaggctttgaaggggaagccaggcttctgctctgcatccgttgtttcgtttcatgatcaaaacaacattatctacaaagatcgtagagagcttggaaaacagagagcaacatgccccagtccctctctctggccagttcttgtggcagccccattggcctggagacatggttttttgtggttgcagctgcagctgtccccccgtcttttaactcgacatcaaaagcctctctcctgccagtgccataggtttgttagagctactgttttgtaacagctgctcaggtgtccccaaactcctggagttttccaccctgagctgttaaaaacctgccctgcctgtcacccatttctgtgccaccagcccaccccctgcctccactctcctccctgccaccttctgtccctgccataggaatatggggacaccgtgtacaccattgaagttccctttcacggcaagacgtttatcctgaaggtgagtgaggggagcgggtgtcctggagccccagacagcacaggaggctccaggaaggtgccgaggggccctctggtgggtgccccccaccaagagggaagggttggtctgcccgagcccatctggcaccacccagccctctgccgccctgtcccagaccttcctgccctgtcctgcggagctcgtgtaccaggaggtgatcctgcagcccgagaggatggtgctgtggaacaagacagtgactgcctgccagatcctgcagcgagtggaagacaacaccctcatctcctatgacgtgtctgcaggggctgcgggcggcgtggtctccccaagggacttcgtgaatgtccggcgcattgagcggcgcagggaccgatacttgtcatcagggatcgccacctcacacagtgccaagcccccgacgcacaaatatgtccggggagagaatggccctgggggcttcatcgtgctcaagtcggccagtaacccccgtgtttgcacctttgtctggattcttaatacagatctcaagggccgcctgccccggtacctcatccaccagagcctcgcggccaccatgtttgaatttgcctttcacctgcgacagcgcatcagcgagctgggggcccgggcgtgactgtgccccctcccaccctgcgggccagggtcctgtcgccaccacttccagagccagaaagggtgccagttgggctcgcactgcccacatgggacctggccccaggctgtcaccctccaccgagccacgcagtgcctggagttgactgactgagcaggctgtggggtggagcactggactccggggccccactggctggaggaagtggggtctggcctgttgatgtttacatggcgccctgcctcctggaggaccagattgctctgccccaccttgccagggcagggtctgggctgggcacctgacttggctggggaggaccagggccctgggcagggcagggcagcctgtcacccgtgtgaagatgaaggggctcttcatctgcctgcgctctcgtcggtttttttaggattattgaaagagtctgggacccttgttggggagtgggtggcaggtgggggtgggctgctggccatgaatctctgcctctcccaggctgtccccctcctcccagggcctcctgggggacctttgtattaagccaattaaaaacatgaattt

SEQ ID NO: 4324 - protein, 145 aa, Homosapiens
MSGALSGAGTDTCHQGSPPHTVPSPRRTNMSGERMALGASSCSSRPVTPVFAPLSGFLIQISRAACPGTSSTRASRPPCLNLPFTCDSASASWGPGRDCAPSHPAGQGPVATTSRARKGASWARTAHMGPGPRLSPSTEPRSAWS

SEQ ID NO: 4325 - DNA, 3002 bp, Homosapiens
cactacctccccacactctctccccaccccttgccattgtcatctgtgcctgttttctgcagggtctgacaatgaatcagatgaagaagttgctgggaagaaaagtttctctgctcaggagcgggagtacatccgccaggggaaggaggccacggcagtggtggaccagatcttggcccaggaagagaactggaagtttgagaagaataatgtaagaagccctctcccacctgaccttcccatgcgtgttaggagtttctgttctcttttctgaggcctgaggaagaaacccaaagattacatgggttggagccatattcctgccccaagagagggagctgggccctcgggtcggcaggaggctgggctggattggacgtttcccccgtgccccttggccccccttccccgcaccccccatgtttacttccctgctgttctgcccccttggctccaggctttgaaggggaagccaggcttctgctctgcatccgttgtttcgtttcatgatcaaaacaacattatctacaaagatcgtagagagcttggaaaacagagagcaacatgccccagtccctctctctggccagttcttgtggcagccccattggcctggagacatggttttttgtggttgcagctgcagctgtccccccgtcttttaactcgacatcaaaagcctctctcctgccagtgccataggtttgttagagctactgttttgtaacagctgctcaggtgtccccaaactcctggagttttccaccctgagctgttaaaaacctgccctgcctgtcacccatttctgtgccaccagcccaccccctgcctccactctcctccctgccaccttctgtccctgccataggaatatggggacaccgtgtacaccattgaagttccctttcacggcaagacgtttatcctgaaggtgagtgaggggagcgggtgtcctggagccccagacagcacaggaggctccaggaaggtgccgaggggccctctggtgggtgccccccaccaagagggaagggttggtctgcccgagcccatctggcaccacccagccctctgccgccctgtcccagaccttcctgccctgtcctgcggagctcgtgtaccaggaggtgatcctgcagcccgagaggatggtgctgtggaacaagacagtgactgcctgccagatcctgcagcgagtggaagacaacaccctcatctcctatgacgtgtctgcaggggctgcgggcggcgtggtctccccaagggacttcgtgaatgtccggcgcattgagcggcgcagggaccgatacttgtcatcagggatcgccacctcacacagtgccaagcccccgacgcacaaatatgtccggggagagaatggccctgggggcttcatcgtgctcaagtcggccagtaacccccgtgtttgcacctttgtctggattcttaatacagatctcaagggccgcctgccccggtacctcatccaccagagcctcgcggccaccatgtttgaatttgcctttcacctgcgacagcgcatcagcgagctgggggcccgggcgtgactgtgccccctcccaccctgcgggccagggtcctgtcgccaccacttccagagccagaaagggtgccagttgggctcgcactgcccacatgggacctggccccaggctgtcaccctccaccgagccacgcagtgcctggagttgactgactgagcaggctgtggggtggagcactggactccggggccccactggctggaggaagtggggtctggcctgttgatgtttacatggcgccctgcctcctggaggaccagattgctctgccccaccttgccagggcagggtctgggctgggcacctgacttggctggggaggaccagggccctgggcagggcagggcagcctgtcacccgtgtgaagatgaaggggctcttcatctgcctgcgctctcgtcggtttttttaggattattgaaagagtctgggacccttgttggggagtgggtggcaggtgggggtgggctgctggccatgaatctctgcctctcccaggctgtccccctcctcccagggcctcctgggggacctttgtattaagccaattaaaaacatgaatttaaaaaaaaaaaaaaattccagcccctcccactgccttgcctcttgagggaagagaaaggcaggcagcagcttggatgaagagggaagacccctcacacagcctctcctgggctcacaggagggcggagcccggggagccagttcctgaaacatgccccccattccccccccgcccaccccccactccccgctttcctgaccagttcaactgagcagatgactggtcagaaaaaaatgccccgccccctgccaggcttcagcggggcaagtttaaagtctctagtccaggaatggaggtgggggtatgggcacctggcagtgcccacagcaagccttgactgtgtggcctggagatggggcctgagcttcagggtcactgaggcacctctgggatccaggccacctggagccccggacctcccagactccactcacccattccctctccccgcacggcactcacaccaggggcggcctggagcccggatcgcagggcggggccaggccactgcctgccttcctcctccctcccggctggcctgcccccttgcctgcctgcatgcaggcttccagcagagccagcttcttcagagccaggtggatcctgtttcggtcctgcctaggtgtgtgaccctgggcgaatctacctctctcagcttctgcttcccactttatgaaaatgggactgatgtcacagggttgttatgagattaaaagatatgaagaaccggggacagtgctcagtaatcaatagtctgcagttctgcacccacgtgctcctgggtactctgccgtccccacagggtcctcagctcagcccctgtcactgcctctcctgccaccctttgtccactcggcagtgttctcactcct

SEQ ID NO: 4326 - protein, 145 aa, Homosapiens; identical to SEQ ID NO: 4324

SEQ ID NO: 4327 - DNA, 2576 bp, Homosapiens
gcaagtttaaagtctctagtccaggaatggaggtgggggtatgggcacctggcagtgcccacagcaagccttgactgtgtggcctggagatggggcctgagcttcagggtcactgaggcacctctgggatccaggccacctggagccccggacctcccagactccactcacccattccctctccccgcacggcactcacaccaggggcggcctggagcccggatcgcagggcggggccaggccactgcctgccttcctcctccctcccggctggcctgcccccttgcctgcctgcatgcaggcttccagcagagccagcttcttcagagccaggtggatcctgtttcggtcctgcctaggtgtgtgaccctgggcgaatctacctctctcagcttctgcttcccactttatgaaaatgggactgatgtcacagggttgttatgagattaaaagatatgaagaaccggggacagtgctcagtaatcaatagtctgcagttctgcacccacgtgctcctgggtactctgccgtccccacagggtcctcagctcagcccctgtcactgcctctcctgccaccctttgtccactcggcagtgttctcactcctcatccccccacacccaccacctgtctgccagcctcttgcaccatgagttgctactcctggggtgctggactgtccccacagccatctgtctcccctgctccccatgaagaagagccagtcccctcccaggtagcacatcagagcgggcaggctccagagctcttctggtcctcttgcagtggccagaaagtggggaaaggggcccagagaggggcagggactgacccatggtcacacagcctatttatggctgatctggagccaggccttctgactatcacccatcagagcccctggattcccatttcacccaacacaggtgttggggtagaactgggggccctccacccctactagcctgactgtctcctgagacctgtctcctaagaccacttacctgaccactggccatggggaaggaaaacacctggccaaggctcatgccccaggttcccaggcatgaagttgactgtctccgcccctgctggtgtggtgagggtgactggggactaggcactaggcctttggtgcaggcgcctgaggacgtggttgcactctcccttctggggatatgcccttgagcccaggcagaggagagcacagccagggcaggacctggcagccctggtacagagcccagagggggcatcagttcctgctggtcctgctctgtttacagacaagctgctgtcctccctgcaaaggggagtgggtggggcagagggcaagtgccaggggggcacaaggctgggcatgtggctggcatgagacggtgtctgagtaatgtcaggcacctggaggcattgaccccaggaccttggaccccagacctctgaccggggggcagccagcgtccaggtaccccaacccctgccctgggtccggcgtccccccattagtgagtcttggctctacttatagcatctgacaccagaggggccgaaaatagcccctggagaagggggaggagggggctatttaaagggcctgggaggggagagagaatgaggagtgatcatggctacctcagagctgagctgcgaggtgtcggaggagaactgtgagcgccgggaggccttctgggcagaatggaaggatctgacactgtccacacggcccgaggagggctgctccctgcatgaggaggacacccagagacatgagacctaccaccagcaggggcagtgccaggtgctggtgcagcgctcgccctggctgatgatgcggatgggcatcctcggccgtgggctgcaggagtaccagctgccctaccagcgggtactgccgctgcccatcttcacccctgccaagatgggcgccaccaaggaggagcgtgaggacacccccatccagcttcaggagctgctggcgctggagacagccctgggtggccagtgtgtggaccgccaggaggtggctgagatcacaaagcagctgccccctgtggtgcctgtcagcaagcccggtgcacttcgtcgctccctgtcccgctccatgtcccaggaagcacagagaggctgagagggactgtgacttgggctccgctgtgcccgccctgggctgggcccttcctggctaggactgtggaggggagctgctggccatggctgctttgtagtttgcccagagttgggggctaggggaggggggagccagaggccaggatgcctgagccccctgagttcccaaagggagggtggcagagacagtgggcactaagggtggagagttgggggccagcacagctgaggaccctcagccccaggagaagggacaaaaggtactggtgagggcaagaggtgcctgggaggagtggccctgatccaggaaaatgtgaggggaatctggaacgctctaggcagaagaagctgggagggagggggaggtgaaaagggcagaggcaaggatggtggggcccccagcaccctctgttagtgccgcaataaatgctcaatcatgtgccagag

SEQ ID NO: 4328 - protein, 167 aa, Homosapiens; identical to SEQ ID NO: 644

SEQ ID NO: 4329 - DNA, 408 bp, Homosapiens
gaggagtgatcatggctacctcagagctgagctgcgaggtgtcggaggagaactgtgagcgccgggaggccttctgggcagaatggaaggatctgacactgtccacacggcccgaggagggctgctccctgcatgaggaggacacccagagacatgagacctaccaccagcaggggcagtgccaggtgctggtgcagcgctcgccctggctgatgatgcggatgggcatcctcggccgtgggctgcaggagtaccagctgccctaccagcgggtactgccgctgcccatcttcacccctgccaagatgggcgccaccaagggagggggaggtgaaaagggcagaggcaaggatggtggggcccccagcaccctctgttagtgccgcaataaatgctcaatcatgtgcc

SEQ ID NO: 4330 - protein, 122 aa, Homosapiens
MATSELSCEVSEENCERREAFWAEWKDLTLSTRPEEGCSLHEEDTQRHETYHQQGQCQVLVQRSPWLMMRMGILGRGLQEYQLPYQRVLPLPIFTPAKMGATKGGGGEKGRGKDGGAPSTLC

SEQ ID NO: 4331 - DNA, 783 bp, Homosapiens
catggctacctcagagctgagctgcgaggtgtcggaggagaactgtgagcgccgggaggccttctgggcagaatggaaggatctgacactgtccacacggcccgaggagggctgctccctgcatgaggaggacacccagagacatgagacctaccaccagcaggggcagtgccaggtgctggtgcagcgctcgccctggctgatgatgcggatgggcatcctcggccgtgggctgcaggagtaccagctgccctaccagcgggtactgccgctgcccatcttcacccctgccaagatgggcgccaccaaggaggagcgtgaggacacccccatccagcttcaggagctgctggcgctggagacagccctgggtggccagtgtgtggaccgccaggaggtggctgagatcacaaagcagctgccccctgtggtgcctgtcagcaagcccggtgcacttcgtcgctccctgtcccgctccatgtcccaggaagcacagagaggctgagagggactgtgacttgggctccgctgtgcccgccctgggctgggcccttcctggctaggactgaccctcagccccaggagaagggacaaaaggtactggtgagggcaagaggtgcctgggaggagtggccctgatccaggaaaatgtgaggggaatctggaacgctctaggcagaagaagctgggagggagggggaggtgaaaagggcagaggcaaggatggtggggcccccagcaccctctgttagtgccgcaataaatgctcaatcatgtgccaga

SEQ ID NO: 4332 - protein, 167 aa, Homosapiens; identical to SEQ ID NO: 644

SEQ ID NO: 4333 - DNA, 514 bp, Homosapiens
gaggagaactgtgagcgccgggaggccttctgggcagaatggaaggatctgacactgtccacacggcccgaggagggcgccaccaaggaggagcgtgaggacacccccatccagcttcaggagctgctggcgctggagacagccctgggtggccagtgtgtggaccgccaggaggtggctgagatcacaaagcagctgccccctgtggtgcctgtcagcaagcccggtgcacttcgtcgctccctgtcccgctccatgtcccaggaagcacagagaggctgagagggactgtgacttgggctccgctgtgcccgccctgggctgggcccttcctggctaggactgtggaggggagctgctggccatggctgctttgtagtttgcccagagttgggggctaggggaggggggagccagaggccaggatgcctgagccccctgagttcccaaagggagggtggcagagacagtggcaccctctgttagtgccgcaataaatgctcaatcatgtgcc

SEQ ID NO: 4334 - protein, 95 aa, Homosapiens
HCPHGPRRAPPRRSVRTPPSSFRSCWRWRQPWVASVWTARRWLRSQSSCPLWCLSASPVHFVAPCPAPCPRKHREAERDCDLGSAVPALGWALPG

SEQ ID NO: 4335 - DNA, 832 bp, Homosapiens
gctgcgagggggaaactggggaaagggcctaattccccagtctccacctcgaatcaggaaagagaaggggcgggctgctgggcaaaagaggtgaagtgtccggacgcaccctcatcgacattggttcaggccccaccgtgtaccagctgctcagtgcctgcagccactttgaggacatcaccatgacagatttcctggaggtcaaccgccaggagctggggcgctggctgcaggaggagccgggggccttcaactggagcatgtacagccaacatgcctgcctcattgagggcaagggggaatgctggcaggataaggagcgccagctgcgagccagggtgaaacgggtcctgcccatcgacgtgcaccagccccagcccctgggtgctgggagcccagctcccctgcctgctgacgccctggtctctgccttctgcttggaggctgtgagcccagatcttgccagctttcagcgggccctggaccacatcaccacgctgctgaggcctggggggcacctcctcctcatcggggccctggaggagtcgtggtacctggctggggaggccaggctgacggtggtgccagtgtctgaggaggaggtgagggaggccctggtgcgtagtggctacaaggtccgggacctccgcacctatatcatgcctgcccaccttcagacaggcgtagatgatgtcaagggcgtcttcttcgcctgggctcagaaggttgggctgtgagggctgtacctggtgccctgtggcccccacccacctggattccctgttctttgaagtggcacctaataaagaaataataccctgccgctgcggtc

SEQ ID NO: 4336 - protein, 184 aa, Homosapiens
MTDFLEVNRQELGRWLQEEPGAFNWSMYSQHACLIEGKGECWQDKERQLRARVKRVLPIDVHQPQPLGAGSPAPLPADALVSAFCLEAVSPDLASFQRALDHITTLLRPGGHLLLIGALEESWYLAGEARLTVVPVSEEEVREALVRSGYKVRDLRTYIMPAHLQTGVDDVKGVFFAWAQKVGL

SEQ ID NO: 4337 - DNA, 1262 bp, Homosapiens
ctgagggtggggggcgcccagaggcgggactcggggcggggcaggcgaggcggagggcgagggctgcgggagcaagtacggagccgggggtgtgggggacgattgccgctgcagccgccgccccactcacctccggtgtgtctgcagcccggacactaagggagatggatgaatgggtggggaggatgcggcgcacatggccccgggcggctcggcggtcagctgccgcccccacagcggaccggtcggggcgggggtcgggcggtagaaaaaagggccgcgaggcgagcggggcactgggcggaccgcggcggcagcatgagcggcgcagaccgtagccccaatgcgggcgcagcccctgactcggccccgggccaggcggcggtggcttcggcctaccagcgcttcgagccgcgcgcctacctccgcaacaactacgcgccccctcgcggggacctgtgcaacccgaacggcgtcgggccgtggaagctgcgctgcttggcgcagaccttcgccaccggtgaagtgtccggacgcaccctcatcgacattggttcaggccccaccgtgtaccagctgctcagtgcctgcagccactttgaggacatcaccatgacagatttcctggaggtcaaccgccaggagctggggcgctggctgcaggaggagccgggggccttcaactggagcatgtacagccaacatgcctgcctcattgagggcaagggggaatgctggcaggataaggagcgccagctgcgagccagggtgaaacgggtcctgcccatcgacgtgcaccagccccagcccctgggtgctgggagcccagctcccctgcctgctgacgccctggtctctgccttctgcttggaggctgtgagcccagatcttgccagctttcagcgggccctggaccacatcaccacgctgctgaggcctggggggcacctcctcctcatcggggccctggaggagtcgtggtacctggctggggaggccaggctgacggtggtgccagtgtctgaggaggaggtgagggaggccctggtgcgtagtggctacaaggtccgggacctccgcacctatatcatgcctgcccaccttcagacaggcgtagatgatgtcaagggcgtcttcttcgcctgggctcagaaggttgggctgtgagggctgtacctggtgccctgtggcccccacccacctggattccctgttctttgaagtggcacctaataaagaaataataccctgccgctgcggtc

SEQ ID NO: 4338 - protein, 332 aa, Homosapiens
MNGWGGCGAHGPGRLGGQLPPPQRTGRGGGRAVEKRAARRAGHWADRGGSMSGADRSPNAGAAPDSAPGQAAVASAYQRFEPRAYLRNNYAPPRGDLCNPNGVGPWKLRCLAQTFATGEVSGRTLIDIGSGPTVYQLLSACSHFEDITMTDFLEVNRQELGRWLQEEPGAFNWSMYSQHACLIEGKGECWQDKERQLRARVKRVLPIDVHQPQPLGAGSPAPLPADALVSAFCLEAVSPDLASFQRALDHITTLLRPGGHLLLIGALEESWYLAGEARLTVVPVSEEEVREALVRSGYKVRDLRTYIMPAHLQTGVDDVKGVFFAWAQKVGL

SEQ ID NO: 4339 - DNA, 1071 bp, Homosapiens
ccgcggcggcagcatgagcggcgcagaccgtagccccaatgcgggcgcagcccctgactcggccccgggccaggcggcggtggcttcggcctaccagcgcttcgagccgcgcgcctacctccgcaacaactacgcgccccctcgcggggacctgtgcaacccgaacggcgtcgggccgtggaagctgcgctgcttggcgcagaccttcgccaccggtgaagtgtccggacgcaccctcatcgacattggttcaggccccaccgtgtaccagctgctcagtgcctgcagccactttgaggacatcaccatgacagatttcctggaggtcaaccgccaggagctggggcgctggctgcaggaggagccgggggccttcaactggagcatgtacagccaacatgcctgcctcattgagggcaaggggtaaggactggggggtgagggttggggaggaggcttcccatagagtggctggttggggcaacagaggcctgagcgtagaacagccttgagccctgccttgtgcctcctgcacagggaatgctggcaggataaggagcgccagctgcgagccagggtgaaacgggtcctgcccatcgacgtgcaccagccccagcccctgggtgctgggagcccagctcccctgcctgctgacgccctggtctctgccttctgcttggaggctgtgagcccagatcttgccagctttcagcgggccctggaccacatcaccacgctgctgaggcctggggggcacctcctcctcatcggggccctggaggagtcgtggtacctggctggggaggccaggctgacggtggtgccagtgtctgaggaggaggtgagggaggccctggtgcgtagtggctacaaggtccgggacctccgcacctatatcatgcctgcccaccttcagacaggcgtagatgatgtcaagggcgtcttcttcgcctgggctcagaaggttgggctgtgagggctgtacctggtgccctgtggcccccacccacctggattccctgttctttgaagtggcacctaataaagaaataataccctgccgctgcggtc

SEQ ID NO: 4340 - protein, 137 aa, Homosapiens
MSGADRSPNAGAAPDSAPGQAAVASAYQRFEPRAYLRNNYAPPRGDLCNPNGVGPWKLRCLAQTFATGEVSGRTLIDIGSGPTVYQLLSACSHFEDITMTDFLEVNRQELGRWLQEEPGAFNWSMYSQHACLIEGKG

SEQ ID NO: 4341 - DNA, 910 bp, Homosapiens
ccccagtggggatcctgcccccgccctgctggcctcccttctcccctcaacccttgagatgattttctcttttcaacttcttgaacttggacatgaaggatgtgggcccagaatcatgtggccagcccaccccctgttggccctcaccagccttggagtctgttctagggaaggcctcccagcatctgggactcgagagtgggcagcccctctacctcctggagctgaactggggtggaactgagtgtgctcttagctctaccgggaggacagctgcctgtttcctccccatcagcctcctccccacatccccagctgcctggctgggtcctgaagccctctgtctacctgggagaccagggaccacaggccttagggatacagggggtccccttctgttaccaccccccaccctcctccaggacaccactaggtggtgctggatgcttgttctttggccagccaaggttcacggcgattctccccatgggatcttgagggaccaagctgctgggattgggaaggagtttcacctgggtctggtttcttcccttcccagagggtcttactgttccagggtggccccagggcaggcaggggccacactatgcctgcgccctggtaaaggtgacccctgccatttaccagcagccctggcatgttcctgccccacaggaatagaatggagggagctccagaaactttccatcccaaaggcagtctccgtggttgaagcagactggatttttgctctgcccctgaccccttgtccctctttgagggaggggagctatgctaggactccaacctcagggactcgggtggcctgcgctagcttcttttgatactgaaaacttttaaggtgggagggtggcaagggatgtgcttaataaatcaattccaagcctca

SEQ ID NO: 4342 - protein, 250 aa, Homosapiens
MKDVGPESCGQPTPCWPSPALESVLGKASQHLGLESGQPLYLLELNWGGTECALSSTGRTAACFLPISLLPTSPAAWLGPEALCLPGRPGTTGLRDTGGPLLLPPPTLLQDTTRWCWMLVLWPAKVHGDSPHGILRDQAAGIGKEFHLGLVSSLPRGSYCSRVAPGQAGATLCLRPGKGDPCHLPAALACSCPTGIEWRELQKLSIPKAVSVVEADWIFALPLTPCPSLREGSYARTPTSGTRVACASFF

SEQ ID NO: 4343 - DNA, 2337 bp, Homosapiens
aagctcctcccccggcggcgagccagggagaaaggatggccggcctggcggcgcggttggtcctgctagctggggcagcggcgctggcgagcggctcccagggcgaccgtgagccggtgtaccgcgactgcgtactgcagtgcgaagagcagaactgctctgggggcgctctgaatcacttccgctcccgccagccaatctacatgagtctagcaggctggacctgtcgggacgactgtaagtatgagtgtatgtgggtcaccgttgggctctacctccaggaaggtcacaaagtgcctcagttccatggcaagtggcccttctcccggttcctgttctttcaagagccggcatcggccgtggcctcgtttctcaatggcctggccagcctggtgatgctctgccgctaccgcaccttcgtgccagcctcctcccccatgtaccacacctgtgtggccttcgcctgggtgtccctcaatgcatggttctggtccacagttttccacaccagggacactgacctcacagagaaaatggactacttctgtgcctccactgtcatcctacactcaatctacctgtgctgcgtcagctttctggaagatgacagcctgtacctgctgaaggaatcagaggacaagttcaagctggactgaagaccttggagcgagtctgccccagtggggatcctgcccccgccctgctggcctcccttctcccctcaacccttgagatgattttctcttttcaacttcttgaacttggacatgaaggatgtgggcccagaatcatgtggccagcccaccccctgttggccctcaccagccttggagtctgttctagggaaggcctcccagcatctgggactcgagagtgggcagcccctctacctcctggagctgaactggggtggaactgagtgtgctcttagctctaccgggaggacagctgcctgtttcctccccatcagcctcctccccacatccccagctgcctggctgggtcctgaagccctctgtctacctgggagaccagggaccacaggccttagggatacagggggtccccttctgttaccaccccccaccctcctccaggacaccactaggtggtgctggatgcttgttctttggccagccaaggttcacggcgattctccccatgggatcttgagggaccaagctgctgggattgggaaggagtttcaccctgaccattgccctagccaggttcccaggaggcctcaccatactccctttcagggccagggctccagcaagcccagggcaaggatcctgtgctgctgtctggttgagagcctgccaccgtgtgtcgggagtgtgggccaggctgagtgcataggtgacagggccgtgagcatgggcctgggtgtgtgtgagctcaggcctaggtgcgcagtgtggagacgggtgttgtcggggaagaggtgtggcttcaaagtgtgtgtgtgcagggggtgggtgtgttagcgtgggttaggggaacgtgtgtgcgcgtgctggtgggcatgtgagatgagtgactgccggtgaatgtgtccacagttgagaggttggagcaggatgagggaatcctgtcaccatcaataatcacttgtggagcgccagctctgcccaaggcgccacctgggcggacagccaggagctctccatggccaggctgcctgtgtgcatgttccctgtctggtgcccctttgcccgcctcctgcaaacctcacagggtccccacacaacagtgccctccagaagcagcccctcggaggcagaggaaggaaaatggggatggctggggctctctccatcctccttttctccttgccttcgcatggctggccttcccctccaaaacctccattcccctgctgccagcccctttgccatagcctgattttggggaggaggaaggggcgatttgagggagaaggggagaaagcttatggctgggtctggtttcttcccttcccagagggtcttactgttccagggtggccccagggcaggcaggggccacactatgcctgcgccctggtaaaggtgacccctgccatttaccagcagccctggcatgttcctgccccacaggaatagaatggagggagctccagaaactttccatcccaaaggcagtctccgtggttgaagcagactggatttttgctctgcccctgaccccttgtccctctttgagggaggggagctatgctaggactccaacctcagggactcgggtggcctgcgctagcttcttttgatactgaaaacttttaaggtgggagggtggcaagggatgtgcttaataaatcaattccaagcctca

SEQ ID NO: 4344 - protein, 206 aa, Homosapiens
MAGLAARLVLLAGAAALASGSQGDREPVYRDCVLQCEEQNCSGGALNHFRSRQPIYMSLAGWTCRDDCKYECMWVTVGLYLQEGHKVPQFHGKWPFSRFLFFQEPASAVASFLNGLASLVMLCRYRTFVPASSPMYHTCVAFAWVSLNAWFWSTVFHTRDTDLTEKMDYFCASTVILHSIYLCCVSFLEDDSLYLLKESEDKFKLD

SEQ ID NO: 4345 - DNA, 3029 bp, Homosapiens
atactcctaagctcctcccccggcggcgagccagggagaaaggatggccggcctggcggcgcggttggtcctgctagctggggcagcggcgctggcgagcggctcccagggcgaccgtgagccggtgtaccgcgactgcgtactgcagtgcgaagagcagaactgctctgggggcgctctgaatcacttccgctcccgccagccaatctacatgagtctagcaggctggacctgtcgggacgactgtaagtatgagtgtatgtgggtcaccgttgggctctacctccaggaaggtcacaaagtgcctcagttccatggcaagtggcccttctcccggttcctgttctttcaagagccggcatcggccgtggcctcgtttctcaatggcctggccagcctggtgatgctctgccgctaccgcaccttcgtgccagcctcctcccccatgtaccacacctgtgtggccttcgcctgggtgtccctcaatgcatggttctggtccacagttttccacaccagggacactgacctcacagagaaaatggactacttctgtgcctccactgtcatcctacactcaatctacctgtgctgcgtcaggtgagcctgcctgggtggctgcaggggcaaaatcgaaccctgggggcagaaaggggtcacccagccttcccctgggggccttcttcactagtctcccaacacctacgccccccaacccccaacacatcagctgtcctgggtgaggactctggggtaggactgggggccctggctcctgacaaggagctgtagcacttgctgcccagctgtggcctgtttggtggggagaggggtagtgacttcaggggccatgcaccaatgttggggggaggagatgcttcagggaatgctgctctggggatgggccacctgccctctgagcaaccctggacggtggggcaggaccgtggggctgcagcacccagctgtggtcagtgccttccgggctctcctgctgctcatgctgaccgtgcacgtctcctacctgagcctcatccgcttcgactatggctacaacctggtggccaacgtggctattggcctggtcaacgtggtgtggtggctggcctggtgcctgtggaaccagcggcggctgcctcacgtgcgcaagtgcgtggtggtggtcttgctgctgcaggggctgtccctgctcgagctgcttgacttcccaccgctcttctgggtcctggatgcccatgccatctggcacatcagcaccatccctgtccacgtcctctttttcagctttctggaagatgacagcctgtacctgctgaaggaatcagaggacaagttcaagctggactgaagaccttggagcgagtctgccccagtggggatcctgcccccgccctgctggcctcccttctcccctcaacccttgagatgattttctcttttcaacttcttgaacttggacatgaaggatgtgggcccagaatcatgtggccagcccaccccctgttggccctcaccagccttggagtctgttctagggaaggcctcccagcatctgggactcgagagtgggcagcccctctacctcctggagctgaactggggtggaactgagtgtgctcttagctctaccgggaggacagctgcctgtttcctccccatcagcctcctccccacatccccagctgcctggctgggtcctgaagccctctgtctacctgggagaccagggaccacaggccttagggatacagggggtccccttctgttaccaccccccaccctcctccaggacaccactaggtggtgctggatgcttgttctttggccagccaaggttcacggcgattctccccatgggatcttgagggaccaagctgctgggattgggaaggagtttcaccctgaccattgccctagccaggttcccaggaggcctcaccatactccctttcagggccagggctccagcaagcccagggcaaggatcctgtgctgctgtctggttgagagcctgccaccgtgtgtcgggagtgtgggccaggctgagtgcataggtgacagggccgtgagcatgggcctgggtgtgtgtgagctcaggcctaggtgcgcagtgtggagacgggtgttgtcggggaagaggtgtggcttcaaagtgtgtgtgtgcagggggtgggtgtgttagcgtgggttaggggaacgtgtgtgcgcgtgctggtgggcatgtgagatgagtgactgccggtgaatgtgtccacagttgagaggttggagcaggatgagggaatcctgtcaccatcaataatcacttgtggagcgccagctctgcccaaggcgccacctgggcggacagccaggagctctccatggccaggctgcctgtgtgcatgttccctgtctggtgcccctttgcccgcctcctgcaaacctcacagggtccccacacaacagtgccctccagaagcagcccctcggaggcagaggaaggaaaatggggatggctggggctctctccatcctccttttctccttgccttcgcatggctggccttcccctccaaaacctccattcccctgctgccagcccctttgccatagcctgattttggggaggaggaaggggcgatttgagggagaaggggagaaagcttatggctgggtctggtttcttcccttcccagagggtcttactgttccagggtggccccagggcaggcaggggccacactatgcctgcgccctggtaaaggtgacccctgccatttaccagcagccctggcatgttcctgccccacaggaatagaatggagggagctccagaaactttccatcccaaaggcagtctccgtggttgaagcagactggatttttgctctgcccctgaccccttgtccctctttgagggaggggagctatgctaggactccaacctcagggactcgggtggcctgcgctagcttcttttgatactgaaaacttttaaggtgggagggtggcaagggatgtgcttaataaatcaattccaagcctca

SEQ ID NO: 4346 - protein, 186 aa, Homosapiens
MAGLAARLVLLAGAAALASGSQGDREPVYRDCVLQCEEQNCSGGALNHFRSRQPIYMSLAGWTCRDDCKYECMWVTVGLYLQEGHKVPQFHGKWPFSRFLFFQEPASAVASFLNGLASLVMLCRYRTFVPASSPMYHTCVAFAWVSLNAWFWSTVFHTRDTDLTEKMDYFCASTVILHSIYLCCVR

SEQ ID NO: 4347 - DNA, 2534 bp, Homosapiens
atactcctaagctcctcccccggcggcgagccagggagaaaggatggccggcctggcggcgcggttggtcctgctagctggggcagcggcgctggcgagcggctcccagggcgaccgtgagccggtgtaccgcgactgcgtactgcagtgcgaagagcagaactgctctgggggcgctctgaatcacttccgctcccgccagccaatctacatgagtctagcaggctggacctgtcgggacgactgtaagtatgagtgtatgtgggtcaccgttgggctctacctccaggaaggtcacaaagtgcctcagttccatggcaaggtgtccctcaatgcatggttctggtccacagttttccacaccagggacactgacctcacagagaaaatggactacttctgtgcctccactgtcatcctacactcaatctacctgtgctgcgtcaggaccgtggggctgcagcacccagctgtggtcagtgccttccgggctctcctgctgctcatgctgaccgtgcacgtctcctacctgagcctcatccgcttcgactatggctacaacctggtggccaacgtggctattggcctggtcaacgtggtgtggtggctggcctggtgcctgtggaaccagcggcggctgcctcacgtgcgcaagtgcgtggtggtggtcttgctgctgcaggggctgtccctgctcgagctgcttgacttcccaccgctcttctgggtcctggatgcccatgccatctggcacatcagcaccatccctgtccacgtcctctttttcagctttctggaagatgacagcctgtacctgctgaaggaatcagaggacaagttcaagctggactgaagaccttggagcgagtctgccccagtggggatcctgcccccgccctgctggcctcccttctcccctcaacccttgagatgattttctcttttcaacttcttgaacttggacatgaaggatgtgggcccagaatcatgtggccagcccaccccctgttggccctcaccagccttggagtctgttctagggaaggcctcccagcatctgggactcgagagtgggcagcccctctacctcctggagctgaactggggtggaactgagtgtgctcttagctctaccgggaggacagctgcctgtttcctccccatcagcctcctccccacatccccagctgcctggctgggtcctgaagccctctgtctacctgggagaccagggaccacaggccttagggatacagggggtccccttctgttaccaccccccaccctcctccaggacaccactaggtggtgctggatgcttgttctttggccagccaaggttcacggcgattctccccatgggatcttgagggaccaagctgctgggattgggaaggagtttcaccctgaccattgccctagccaggttcccaggaggcctcaccatactccctttcagggccagggctccagcaagcccagggcaaggatcctgtgctgctgtctggttgagagcctgccaccgtgtgtcgggagtgtgggccaggctgagtgcataggtgacagggccgtgagcatgggcctgggtgtgtgtgagctcaggcctaggtgcgcagtgtggagacgggtgttgtcggggaagaggtgtggcttcaaagtgtgtgtgtgcagggggtgggtgtgttagcgtgggttaggggaacgtgtgtgcgcgtgctggtgggcatgtgagatgagtgactgccggtgaatgtgtccacagttgagaggttggagcaggatgagggaatcctgtcaccatcaataatcacttgtggagcgccagctctgcccaaggcgccacctgggcggacagccaggagctctccatggccaggctgcctgtgtgcatgttccctgtctggtgcccctttgcccgcctcctgcaaacctcacagggtccccacacaacagtgccctccagaagcagcccctcggaggcagaggaaggaaaatggggatggctggggctctctccatcctccttttctccttgccttcgcatggctggccttcccctccaaaacctccattcccctgctgccagcccctttgccatagcctgattttggggaggaggaaggggcgatttgagggagaaggggagaaagcttatggctgggtctggtttcttcccttcccagagggtcttactgttccagggtggccccagggcaggcaggggccacactatgcctgcgccctggtaaaggtgacccctgccatttaccagcagccctggcatgttcctgccccacaggaatagaatggagggagctccagaaactttccatcccaaaggcagtctccgtggttgaagcagactggatttttgctctgcccctgaccccttgtccctctttgagggaggggagctatgctaggactccaacctcagggactcgggtggcctgcgctagcttcttttgatactgaaaacttttaaggtgggagggtggcaagggatgtgcttaataaatcaattccaagcctca

SEQ ID NO: 4348 - protein, 269 aa, Homosapiens
MAGLAARLVLLAGAAALASGSQGDREPVYRDCVLQCEEQNCSGGALNHFRSRQPIYMSLAGWTCRDDCKYECMWVTVGLYLQEGHKVPQFHGKVSLNAWFWSTVFHTRDTDLTEKMDYFCASTVILHSIYLCCVRTVGLQHPAVVSAFRALLLLMLTVHVSYLSLIRFDYGYNLVANVAIGLVNVVWWLAWCLWNQRRLPHVRKCVVVVLLLQGLSLLELLDFPPLFWVLDAHAIWHISTIPVHVLFFSFLEDDSLYLLKESEDKFKLD

SEQ ID NO: 4349 - DNA, 2705 bp, Homosapiens
tccggaagtggaagcttcatactcctaagctcctcccccggcggcgagccagggagaaaggatggccggcctggcggcgcggttggtcctgctagctggggcagcggcgctggcgagcggctcccagggcgaccgtgagccggtgtaccgcgactgcgtactgcagtgcgaagagcagaactgctctgggggcgctctgaatcacttccgctcccgccagccaatctacatgagtctagcaggctggacctgtcgggacgactgtaagtatgagtgtatgtgggtcaccgttgggctctacctccaggaaggtcacaaagtgcctcagttccatggcaagtggcccttctcccggttcctgttctttcaagagccggcatcggccgtggcctcgtttctcaatggcctggccagcctggtgatgctctgccgctaccgcaccttcgtgccagcctcctcccccatgtaccacacctgtgtggccttcgcctgggtgtccctcaatgcatggttctggtccacagttttccacaccagggacactgacctcacagagaaaatggactacttctgtgcctccactgtcatcctacactcaatctacctgtgctgcgtcaggaccgtggggctgcagcacccagctgtggtcagtgccttccgggctctcctgctgctcatgctgaccgtgcacgtctcctacctgagcctcatccgcttcgactatggctacaacctggtggccaacgtggctattggcctggtcaacgtggtgtggtggctggcctggtgcctgtggaaccagcggcggctgcctcacgtgcgcaagtgcgtggtggtggtcttgctgctgcaggggctgtccctgctcgagctgcttgacttcccaccgctcttctgggtcctggatgcccatgccatctggcacatcagcaccatccctgtccacgtcctctttttcagctttctggaagatgacagcctgtacctgctgaaggaatcagaggacaagttcaagctggactgaagaccttggagcgagtctgccccagtggggatcctgcccccgccctgctggcctcccttctcccctcaacccttgagatgattttctcttttcaacttcttgaacttggacatgaaggatgtgggcccagaatcatgtggccagcccaccccctgttggccctcaccagccttggagtctgttctagggaaggcctcccagcatctgggactcgagagtgggcagcccctctacctcctggagctgaactggggtggaactgagtgtgctcttagctctaccgggaggacagctgcctgtttcctccccatcagcctcctccccacatccccagctgcctggctgggtcctgaagccctctgtctacctgggagaccagggaccacaggccttagggatacagggggtccccttctgttaccaccccccaccctcctccaggacaccactaggtggtgctggatgcttgttctttggccagccaaggttcacggcgattctccccatgggatcttgagggaccaagctgctgggattgggaaggagtttcaccctgaccattgccctagccaggttcccaggaggcctcaccatactccctttcagggccagggctccagcaagcccagggcaaggatcctgtgctgctgtctggttgagagcctgccaccgtgtgtcgggagtgtgggccaggctgagtgcataggtgacagggccgtgagcatgggcctgggtgtgtgtgagctcaggcctaggtgcgcagtgtggagacgggtgttgtcggggaagaggtgtggcttcaaagtgtgtgtgtgcagggggtgggtgtgttagcgtgggttaggggaacgtgtgtgcgcgtgctggtgggcatgtgagatgagtgactgccggtgaatgtgtccacagttgagaggttggagcaggatgagggaatcctgtcaccatcaataatcacttgtggagcgccagctctgcccaaggcgccacctgggcggacagccaggagctctccatggccaggctgcctgtgtgcatgttccctgtctggtgcccctttgcccgcctcctgcaaacctcacagggtccccacacaacagtgccctccagaagcagcccctcggaggcagaggaaggaaaatggggatggctggggctctctccatcctccttttctccttgccttcgcatggctggccttcccctccaaaacctccattcccctgctgccagcccctttgccatagcctgattttggggaggaggaaggggcgatttgagggagaaggggagaaagcttatggctgggtctggtttcttcccttcccagagggtcttactgttccagggtggccccagggcaggcaggggccacactatgcctgcgccctggtaaaggtgacccctgccatttaccagcagccctggcatgttcctgccccacaggaatagaatggagggagctccagaaactttccatcccaaaggcagtctccgtggttgaagcagactggatttttgctctgcccctgaccccttgtccctctttgagggaggggagctatgctaggactccaacctcagggactcgggtggcctgcgctagcttcttttgatactgaaaacttttaaggtgggagggtggcaagggatgtgcttaataaatcaattccaagcctca

SEQ ID NO: 4350 - protein, 320 aa, Homosapiens; identical to SEQ ID NO: 648

SEQ ID NO: 4351 - DNA, 852 bp, Homosapiens
aagctcctcccccggcggcgagccagggagaaaggatggccggcctggcggcgcggttggtcctgctagctggggcagcggcgctggcgagcggctcccagggcgaccgtgagccggtgtaccgcgactgcgtactgcagtgcgaagagcagaactgctctgggggcgctctgaatcacttccgctcccgccagccaatctacatgagtctagcaggctggacctgtcgggacgactgtaagtatgagtgtatgtgggtcaccgttgggctctacctccaggaaggtcacaaagtgcctcagttccatggcaagtggcccttctcccggttcctgttctttcaagagccggcatcggccgtggcctcgtttctcaatggcctggccagcctggtgatgctctgccgctaccgcaccttcgtgccagcctcctcccccatgtaccacacctgtgtggccttcgcctggatgagaaaactgaggcacagcaaggctaaataacttgcccaaggacacacaggaaatgcagagccaggaactgaaccctggcagtctggctgtagggcttgcattcttaatgataccactacctcccaaatctgaggaaagggtgtccctcaatgcatggttctggtccacagttttccacaccagggacactgacctcacagagaaaatggactacttctgtgcctccactgtcatcctacactcaatctacctgtgctgcgtcaggtgagcctgcctgggtggctgcaggggcaaaatcgaaccctgggggcagaaaggggtcacccagccttcccctgggggccttcttcactagtctcccaacacctacgccccccaaccc

SEQ ID NO: 4352 - protein, 154 aa, Homosapiens
MAGLAARLVLLAGAAALASGSQGDREPVYRDCVLQCEEQNCSGGALNHFRSRQPIYMSLAGWTCRDDCKYECMWVTVGLYLQEGHKVPQFHGKWPFSRFLFFQEPASAVASFLNGLASLVMLCRYRTFVPASSPMYHTCVAFAWMRKLRHSKAK

SEQ ID NO: 4353 - DNA, 849 bp, Homosapiens
attctactctccgctgaagtccacacagtttaaattaaagttcccggatttttgtgggcgcctgccccgcccctcgtccccctgctgtgtccatatatcgaggcgatagggttaagggaaggcggacgcctgatgggttaatgagcaaactgaagtgttttccatgatcttttttgagtcgcaattgaagtaccacctcccgagggtgattgcttccccatgcggggtagaacctttgctgtcctgttcaccactctacctccagcacagaatttggcttatgcctactcaatgtgaagatgatgaggatgaaaacctttgtgatgatccacttccacttaatgaatggttcctcgtctcctcttccttggaccaaaagtcagaggcaagaatgccctcattcataccccagtggtctatacctccagcagcaagtcgagtgagcaagtgatgtcctgaaaggcccagtggatcagtggaatgaagcgggcaggaagacttagtgctcctgaaacaaggaatccagaatccaggagaaggatggctcagtggggctttcaagggacaagtatgggggttgaaggggtcactgtccctataccaaatccgaaaatattgtgaccaggaaccattctgtccaactcttctatttcaggtggcaaagcaaagctatattcaagaccacatgcaaagctactccctgagcaaagagtcacagataaaacgggggcaccagtagaatggccaggacaaacgcagtgcagcacagagactcagaccctggcagccatgcctgcgcaggcagtgatgagagtgacatgtactgttgtggacatgcacaaaagtgag

SEQ ID NO: 4354 - protein, 95 aa, Homosapiens
MIFFESQLKYHLPRVIASPCGVEPLLSCSPLYLQHRIWLMPTQCEDDEDENLCDDPLPLNEWFLVSSSLDQKSEARMPSFIPQWSIPPAASRVSK

SEQ ID NO: 4355 - DNA, 4440 bp, Homosapiens
ccccgggcagccgcgcgccccttcccacggggccctttactgcgccgcgcgcccggcccccacccctcgcagcaccccgcgccccgcgccctcccagccgggtccagccggagccatggggccggagccgcagtgagcaccatggagctggcggccttgtgccgctgggggctcctcctcgccctcttgccccccggagccgcgagcacccaagtgtgcaccggcacagacatgaagctgcggctccctgccagtcccgagacccacctggacatgctccgccacctctaccagggctgccaggtggtgcagggaaacctggaactcacctacctgcccaccaatgccagcctgtccttcctgcaggatatccaggaggtgcagggctacgtgctcatcgctcacaaccaagtgaggcaggtcccactgcagaggctgcggattgtgcgaggcacccagctctttgaggacaactatgccctggccgtgctagacaatggagacccgctgaacaataccacccctgtcacaggggcctccccaggaggcctgcgggagctgcagcttcgaagcctcacagagatcttgaaaggaggggtcttgatccagcggaacccccagctctgctaccaggacacgattttgtggaaggacatcttccacaagaacaaccagctggctctcacactgatagacaccaaccgctctcgggcctgccacccctgttctccgatgtgtaagggctcccgctgctggggagagagttctgaggattgtcagagcctgacgcgcactgtctgtgccggtggctgtgcccgctgcaaggggccactgcccactgactgctgccatgagcagtgtgctgccggctgcacgggccccaagcactctgactgcctggcctgcctccacttcaaccacagtggcatctgtgagctgcactgcccagccctggtcacctacaacacagacacgtttgagtccatgcccaatcccgagggccggtatacattcggcgccagctgtgtgactgcctgtccctacaactacctttctacggacgtgggatcctgcaccctcgtctgccccctgcacaaccaagaggtgacagcagaggatggaacacagcggtgtgagaagtgcagcaagccctgtgcccgagtgtgctatggtctgggcatggagcacttgcgagaggtgagggcagttaccagtgccaatatccaggagtttgctggctgcaagaagatctttgggagcctggcatttctgccggagagctttgatggggacccagcctccaacactgccccgctccagccagagcagctccaagtgtttgagactctggaagagatcacaggttacctatacatctcagcatggccggacagcctgcctgacctcagcgtcttccagaacctgcaagtaatccggggacgaattctgcacaatggcgcctactcgctgaccctgcaagggctgggcatcagctggctggggctgcgctcactgagggaactgggcagtggactggccctcatccaccataacacccacctctgcttcgtgcacacggtgccctgggaccagctctttcggaacccgcaccaagctctgctccacactgccaaccggccagaggacgagtgtgtgggcgagggcctggcctgccaccagctgtgcgcccgagggcactgctggggtccagggcccacccagtgtgtcaactgcagccagttccttcggggccaggagtgcgtggaggaatgccgagtactgcaggggctccccagggagtatgtgaatgccaggcactgtttgccgtgccaccctgagtgtcagccccagaatggctcagtgacctgttttggaccggaggctgaccagtgtgtggcctgtgcccactataaggaccctcccttctgcgtggcccgctgccccagcggtgtgaaacctgacctctcctacatgcccatctggaagtttccagatgaggagggcgcatgccagccttgccccatcaactgcacccactcctgtgtggacctggatgacaagggctgccccgccgagcagagagccagccctctgacgtccatcatctctgcggtggttggcattctgctggtcgtggtcttgggggtggtctttgggatcctcatcaagcgacggcagcagaagatccggaagtacacgatgcggagactgctgcaggaaacggagctggtggagccgctgacacctagcggagcgatgcccaaccaggcgcagatgcggatcctgaaagagacggagctgaggaaggtgaaggtgcttggatctggcgcttttggcacagtctacaagggcatctggatccctgatggggagaatgtgaaaattccagtggccatcaaagtgttgagggaaaacacatcccccaaagccaacaaagaaatcttagacgaagcatacgtgatggctggtgtgggctccccatatgtctcccgccttctgggcatctgcctgacatccacggtgcagctggtgacacagcttatgccctatggctgcctcttagaccatgtccgggaaaaccgcggacgcctgggctcccaggacctgctgaactggtgtatgcagattgccaaggggatgagctacctggaggatgtgcggctcgtacacagggacttggccgctcggaacgtgctggtcaagagtcccaaccatgtcaaaattacagacttcgggctggctcggctgctggacattgacgagacagagtaccatgcagatgggggcaaggtgcccatcaagtggatggcgctggagtccattctccgccggcggttcacccaccagagtgatgtgtggagttatggtgtgactgtgtgggagctgatgacttttggggccaaaccttacgatgggatcccagcccgggagatccctgacctgctggaaaagggggagcggctgccccagccccccatctgcaccattgatgtctacatgatcatggtcaaatgttggatgattgactctgaatgtcggccaagattccgggagttggtgtctgaattctcccgcatggccagggacccccagcgctttgtggtcatccagaatgaggacttgggcccagccagtcccttggacagcaccttctaccgctcactgctggaggacgatgacatgggggacctggtggatgctgaggagtatctggtaccccagcagggcttcttctgtccagaccctgccccgggcgctgggggcatggtccaccacaggcaccgcagctcatctaccaggagtggcggtggggacctgacactagggctggagccctctgaagaggaggcccccaggtctccactggcaccctccgaaggggctggctccgatgtatttgatggtgacctgggaatgggggcagccaaggggctgcaaagcctccccacacatgaccccagccctctacagcggtacagtgaggaccccacagtacccctgccctctgagactgatggctacgttgcccccctgacctgcagcccccagcctgaatatgtgaaccagccagatgttcggccccagcccccttcgccccgagagggccctctgcctgctgcccgacctgctggtgccactctggaaaggcccaagactctctccccagggaagaatggggtcgtcaaagacgtttttgcctttgggggtgccgtggagaaccccgagtacttgacaccccagggaggagctgcccctcagccccaccctcctcctgccttcagcccagccttcgacaacctctattactgggaccaggacccaccagagcggggggctccacccagcaccttcaaagggacacctacggcagagaacccagagtacctgggtctggacgtgccagtgtgaaccagaaggccaagtccgcagaagccctgatgtgtcctcagggagcagggaaggcctgacttctgctggcatcaagaggtgggagggccctccgaccacttccaggggaacctgccatgccaggaacctgtcctaaggaaccttccttcctgcttgagttcccagatggctggaaggggtccagcctcgttggaagaggaacagcactggggagtctttgtggattctgaggccctgcccaatgagactctagggtccagtggatgccacagcccagcttggccctttccttccagatcctgggtactgaaagccttagggaagctggcctgagaggggaagcggccctaagggagtgtctaagaacaaaagcgacccattcagagactgtccctgaaacctagtactgccccccatgaggaaggaacagcaatggtgtcagtatccaggctttgtacagagtgcttttctgtttagtttttactttttttgttttgtttttttaaagatgaaataaagacccagggggag

SEQ ID NO: 4356 - protein, 1255 aa, Homosapiens [sequence omitted]

SEQ ID NO: 4357 - DNA, 4526 bp, Homosapiens
ccccgggcagccgcgcgccccttcccacggggccctttactgcgccgcgcgcccggcccccacccctcgcagcaccccgcgccccgcgccctcccagccgggtccagccggagccatggggccggagccgcagtgagcaccatggagctggcggccttgtgccgctgggggctcctcctcgccctcttgccccccggagccgcgagcacccaagtgtgcaccggcacagacatgaagctgcggctccctgccagtcccgagacccacctggacatgctccgccacctctaccagggctgccaggtggtgcagggaaacctggaactcacctacctgcccaccaatgccagcctgtccttcctgcaggatatccaggaggtgcagggctacgtgctcatcgctcacaaccaagtgaggcaggtcccactgcagaggctgcggattgtgcgaggcacccagctctttgaggacaactatgccctggccgtgctagacaatggagacccgctgaacaataccacccctgtcacaggggcctccccaggaggcctgcgggagctgcagcttcgaagcctcacagagatcttgaaaggaggggtcttgatccagcggaacccccagctctgctaccaggacacgattttgtggaaggacatcttccacaagaacaaccagctggctctcacactgatagacaccaaccgctctcgggcctgccacccctgttctccgatgtgtaagggctcccgctgctggggagagagttctgaggattgtcagagcctgacgcgcactgtctgtgccggtggctgtgcccgctgcaaggggccactgcccactgactgctgccatgagcagtgtgctgccggctgcacgggccccaagcactctgactgcctggcctgcctccacttcaaccacagtggcatctgtgagctgcactgcccagccctggtcacctacaacacagacacgtttgagtccatgcccaatcccgagggccggtatacattcggcgccagctgtgtgactgcctgtccctacaactacctttctacggacgtgggatcctgcaccctcgtctgccccctgcacaaccaagaggtgacagcagaggatggaacacagcggtgtgagaagtgcagcaagccctgtgcccgagtgtgctatggtctgggcatggagcacttgcgagaggtgagggcagttaccagtgccaatatccaggagtttgctggctgcaagaagatctttgggagcctggcatttctgccggagagctttgatggggacccagcctccaacactgccccgctccagccagagcagctccaagtgtttgagactctggaagagatcacaggttacctatacatctcagcatggccggacagcctgcctgacctcagcgtcttccagaacctgcaagtaatccggggacgaattctgcacaatggcgcctactcgctgaccctgcaagggctgggcatcagctggctggggctgcgctcactgagggaactgggcagtggactggccctcatccaccataacacccacctctgcttcgtgcacacggtgccctgggaccagctctttcggaacccgcaccaagctctgctccacactgccaaccggccagaggacgagtgtgtgggcgagggcctggcctgccaccagctgtgcgcccgagggcactgctggggtccagggcccacccagtgtgtcaactgcagccagttccttcggggccaggagtgcgtggaggaatgccgagtactgcaggggctccccagggagtatgtgaatgccaggcactgtttgccgtgccaccctgagtgtcagccccagaatggctcagtgacctgttttggaccggaggctgaccagtgtgtggcctgtgcccactataaggaccctcccttctgcgtggcccgctgccccagcggtgtgaaacctgacctctcctacatgcccatctggaagtttccagatgaggagggcgcatgccagccttgccccatcaactgcacccactcctgtgtggacctggatgacaagggctgccccgccgagcagagagccagccctctgacgtccatcatctctgcggtggttggcattctgctggtcgtggtcttgggggtggtctttgggatcctcatcaagcgacggcagcagaagatccggaagtacacgatgcggagactgctgcaggaaacggagctggtggagccgctgacacctagcggagcgatgcccaaccaggcgcagatgcggatcctgaaagagacggagctgaggaaggtgaaggtgcttggatctggcgcttttggcacagtctacaagggcatctggatccctgatggggagaatgtgaaaattccagtggccatcaaagtgttgagggaaaacacatcccccaaagccaacaaagaaatcttagacgaagcatacgtgatggctggtgtgggctccccatatgtctcccgccttctgggcatctgcctgacatccacggtgcagctggtgacacagcttatgccctatggctgcctcttagaccatgtccgggaaaaccgcggacgcctgggctcccaggacctgctgaactggtgtatgcagattgccaaggggatgagctacctggaggatgtgcggctcgtacacagggacttggccgctcggaacgtgctggtcaagagtcccaaccatgtcaaaattacagacttcgggctggctcggctgctggacattgacgagacagagtaccatgcagatgggggcaaggtgcccatcaagtggatggcgctggagtccattctccgccggcggttcacccaccagagtgatgtgtggagttatggtgtgactgtgtgggagctgatgacttttggggccaaaccttacgatgggatcccagcccgggagatccctgacctgctggaaaagggggagcggctgccccagccccccatctgcaccattgatgtctacatgatcatggtcaaatgttggatgattgactctgaatgtcggccaagattccgggagttggtgtctgaattctcccgcatggccagggacccccagcgctttgtggtcatccagaatgaggacttgggcccagccagtcccttggacagcaccttctaccgctcactgctggaggacgatgacatgggggacctggtggatgctgaggagtatctggtaccccagcagggcttcttctgtccagaccctgccccgggcgctgggggcatggtccaccacaggcaccgcagctcatctaccaggagtggcggtggggacctgacactagggctggagccctctgaagaggaggcccccaggtctccactggcaccctccgaaggggctggctccgatgtatttgatggtgacctgggaatgggggcagccaaggggctgcaaagcctccccacacatgaccccagccctctacagcggtacagtgaggaccccacagtacccctgccctctgagactgatggctacgttgcccccctgacctgcagcccccagcctgaatatgtgaaccagccagatgttcggccccagcccccttcgccccgagagggccctctgcctgctgcccgacctgctggtgccactctggaaaggcccaagactctctccccagggaagaatggggtcgtcaaagacgtttttgcctttgggggtgccgtggagaaccccgagtacttgacaccccagggaggagctgcccctcagccccaccctcctcctgccttcagcccagccttcgacaacctctattactgggaccaggacccaccagagcggggggctccacccagcaccttcaaagggacacctacggcagagaacccagagtacctgggtctggacgtgccagtgtgaaccagaaggccaagtccgcagaagccctgatgtgtcctcagggagcagggaaggcctgacttctgctggcatcaagaggtgggagggccctccgaccacttccaggggaacctgccatgccaggaacctgtcctaaggaaccttccttcctgcttgagttcccagatggctggaaggggtccagcctcgttggaagaggaacagcactggggagtctttgtggattctgaggccctgcccaatgagactctagggtccagtggatgccacagcccagcttggccctttccttccagatcctgggtactgaaagccttagggaagctggcctgagaggggaagcggccctaagggagtgtctaagaacaaaagcgacccattcagagactgtccctgaaacctagtactgccccccatgaggaaggaacagcaatggtgtcagtatccaggctttgtacagagtgcttttctgtttagtttttactttttttgttttgtttttttaaagatgaaataaagacccagggggagaatgggtgttgtatggggaggcaagtgtggggggtccttctccacacccactttgtccatttgcaaatatattttggaaaacagct

SEQ ID NO: 4358 - protein, 1255 aa, Homosapiens [sequence omitted]

SEQ ID NO: 4359 - DNA, 4879 bp, Homosapiens
ccccgggcagccgcgcgccccttcccacggggccctttactgcgccgcgcgcccggcccccacccctcgcagcaccccgcgccccgcgccctcccagccgggtccagccggagccatggggccggagccgcagtgagcaccatggagctggcggccttgtgccgctgggggctcctcctcgccctcttgccccccggagccgcgagcacccaagtgtgcaccggcacagacatgaagctgcggctccctgccagtcccgagacccacctggacatgctccgccacctctaccagggctgccaggtggtgcagggaaacctggaactcacctacctgcccaccaatgccagcctgtccttcctgcaggatatccaggaggtgcagggctacgtgctcatcgctcacaaccaagtgaggcaggtcccactgcagaggctgcggattgtgcgaggcacccagctctttgaggacaactatgccctggccgtgctagacaatggagacccgctgaacaataccacccctgtcacaggggcctccccaggaggcctgcgggagctgcagcttcgaagcctcacagagatcttgaaaggaggggtcttgatccagcggaacccccagctctgctaccaggacacgattttgtggaaggacatcttccacaagaacaaccagctggctctcacactgatagacaccaaccgctctcgggcctgccacccctgttctccgatgtgtaagggctcccgctgctggggagagagttctgaggattgtcagagcctgacgcgcactgtctgtgccggtggctgtgcccgctgcaaggggccactgcccactgactgctgccatgagcagtgtgctgccggctgcacgggccccaagcactctgactgcctggcctgcctccacttcaaccacagtggcatctgtgagctgcactgcccagccctggtcacctacaacacagacacgtttgagtccatgcccaatcccgagggccggtatacattcggcgccagctgtgtgactgcctgtccctacaactacctttctacggacgtgggatcctgcaccctcgtctgccccctgcacaaccaagaggtgacagcagaggatggaacacagcggtgtgagaagtgcagcaagccctgtgcccgagtgtgctatggtctgggcatggagcacttgcgagaggtgagggcagttaccagtgccaatatccaggagtttgctggctgcaagaagatctttgggagcctggcatttctgccggagagctttgatggggacccagcctccaacactgccccgctccagccagagcagctccaagtgtttgagactctggaagagatcacaggttacctatacatctcagcatggccggacagcctgcctgacctcagcgtcttccagaacctgcaagtaatccggggacgaattctgcacaatggcgcctactcgctgaccctgcaagggctgggcatcagctggctggggctgcgctcactgagggaactgggcagtggactggccctcatccaccataacacccacctctgcttcgtgcacacggtgccctgggaccagctctttcggaacccgcaccaagctctgctccacactgccaaccggccagaggacgagtgtgtgggcgagggcctggcctgccaccagctgtgcgcccgagggcactgctggggtccagggcccacccagtgtgtcaactgcagccagttccttcggggccaggagtgcgtggaggaatgccgagtactgcaggggctccccagggagtatgtgaatgccaggcactgtttgccgtgccaccctgagtgtcagccccagaatggctcagtgacctgttttggaccggaggctgaccagtgtgtggcctgtgcccactataaggaccctcccttctgcgtggcccgctgccccagcggtgtgaaacctgacctctcctacatgcccatctggaagtttccagatgaggagggcgcatgccagccttgccccatcaactgcacccactcctgtgtggacctggatgacaagggctgccccgccgagcagagagccagccctctgacgtccatcatctctgcggtggttggcattctgctggtcgtggtcttgggggtggtctttgggatcctcatcaagcgacggcagcagaagatccggaagtacacgatgcggagactgctgcaggaaacggagctggtggagccgctgacacctagcggagcgatgcccaaccaggcgcagatgcggatcctgaaagagacggagctgaggaaggtgaaggtgcttggatctggcgcttttggcacagtctacaagggcatctggatccctgatggggagaatgtgaaaattccagtggccatcaaagtgttgagggaaaacacatcccccaaagccaacaaagaaatcttagacgaagcatacgtgatggctggtgtgggctccccatatgtctcccgccttctgggcatctgcctgacatccacggtgcagctggtgacacagcttatgccctatggctgcctcttagaccatgtccgggaaaaccgcggacgcctgggctcccaggacctgctgaactggtgtatgcagattgccaaggggatgagctacctggaggatgtgcggctcgtacacagggacttggccgctcggaacgtgctggtcaagagtcccaaccatgtcaaaattacagacttcgggctggctcggctgctggacattgacgagacagagtaccatgcagatgggggcaaggtgcccatcaagtggatggcgctggagtccattctccgccggcggttcacccaccagagtgatgtgtggagttatggtgtgactgtgtgggagctgatgacttttggggccaaaccttacgatgggatcccagcccgggagatccctgacctgctggaaaagggggagcggctgccccagccccccatctgcaccattgatgtctacatgatcatggtcaaatgttggatgattgactctgaatgtcggccaagattccgggagttggtgtctgaattctcccgcatggccagggacccccagcgctttgtggtcatccagaatgaggacttgggcccagccagtcccttggacagcaccttctaccgctcactgctggaggacgatgacatgggggacctggtggatgctgaggagtatctggtaccccagcagggcttcttctgtccagaccctgccccgggcgctgggggcatggtccaccacaggcaccgcagctcatctaccaggagtggcggtggggacctgacactagggctggagccctctgaagaggaggcccccaggtctccactggcaccctccgaaggggctggctccgatgtatttgatggtgacctgggaatgggggcagccaaggggctgcaaagcctccccacacatgaccccagccctctacagcggtacagtgaggaccccacagtacccctgccctctgagactgatggctacgttgcccccctgacctgcagcccccagcctgaatatgtgaaccagccagatgttcggccccagcccccttcgccccgagagggccctctgcctgctgcccgacctgctggtgccactctggaaaggcccaagactctctccccagggaagaatggggtcgtcaaagacgtttttgcctttgggggtgccgtggagaaccccgagtacttgacaccccagggaggagctgcccctcagccccaccctcctcctgccttcagcccagccttcgacaacctctattactgggaccaggacccaccagagcggggggctccacccagcaccttcaaagggacacctacggcagagaacccagagtacctgggtctggacgtgccagtgtgaaccagaaggccaagtccgcagaagccctgatgtgtcctcagggagcagggaaggcctgacttctgctggcatcaagaggtgggagggccctccgaccacttccaggggaacctgccatgccaggaacctgtcctaaggaaccttccttcctgcttgagttcccagatggctggaaggggtccagcctcgttggaagaggaacagcactggggagtctttgtggattctgaggccctgcccaatgagactctagggtccagtggatgccacagcccagcttggccctttccttccagatcctgggtactgaaagccttagggaagctggcctgagaggggaagcggccctaagggagtgtctaagaacaaaagcgacccattcagagactgtccctgaaacctagtactgccccccatgaggaaggaacagcaatggtgtcagtatccaggctttgtacagagtgcttttctgtttagtttttactttttttgttttgtttttttaaagatgaaataaagacccagggggagaatgggtgttgtatggggaggcaagtgtggggggtccttctccacacccactttgtccatttgcaaatatattttggaaaacagctaggcaccggcctatgtctgggggtggctctgtgccatcccttcctgctcaccttacactcaattcctcttttcctggagggagtggctgggaatcttcagaaagcttggatgaggagccagacatccagttctccagcttcagggttgggggagatcgggaagctggattcagatctgagagccctttgacgaccagatcattcttatttagaacgaactaattcctaaggccactcaccagaatggggttatttcctccttgtgagtgaggagagtggtgggtagggtgggggaaagacgaggcagggtctactgtgggactcattttccttgccttggctatgccagagga

SEQ ID NO: 4360 - protein, 1255 aa, Homosapiens [sequence omitted]

SEQ ID NO: 4361 - DNA, 1316 bp, Homosapiens
gcagtgagcaccatggagctggcggccttgtgccgctgggggctcctcctcgccctcttgccccccggagccgcgagcacccaagtgtgcaccggcacagacatgaagctgcggctccctgccagtcccgagacccacctggacatgctccgccacctctaccagggctgccaggtggtgcagggaaacctggaactcacctacctgcccaccaatgccagcctgtccttcctgcaggatatccaggaggtgcagggctacgtgctcatcgctcacaaccaagtgaggcaggtcccactgcagaggctgcggattgtgcgaggcacccagctctttgaggacaactatgccctggccgtgctagacaatggagacccgctgaacaataccacccctgtcacaggggcctccccaggaggcctgcgggagctgcagcttcgaagcctcacagagatcttgaaaggaggggtcttgatccagcggaacccccagctctgctaccaggacacgattttgtggaaggacatcttccacaagaacaaccagctggctctcacactgatagacaccaaccgctctcgggcctgccacccctgttctccgatgtgtaagggctcccgctgctggggagagagttctgaggattgtcagagcctgacgcgcactgtctgtgccggtggctgtgcccgctgcaaggggccactgcccactgactgctgccatgagcagtgtgctgccggctgcacgggccccaagcactctgactgcctggcctgcctccacttcaaccacagtggcatctgtgagctgcactgcccagccctggtcacctacaacacagacacgtttgagtccatgcccaatcccgagggccggtatacattcggcgccagctgtgtgactgcctgtccctacaactacctttctacggacgtgggatcctgcaccctcgtctgccccctgcacaaccaagaggtgacagcagaggatggaacacagcggtgtgagaagtgcagcaagccctgtgcccgaggtacccactcactgcccccgaggccagctgcagttcctgtccctctgcgcatgcagcctggcccagcccaccctgtcctatccttcctcagaccctcttgggacctagtctctgccttctactctctacccctggcccccctcagccctacaagtgtccctatatcccctgtcagtgtggggaggggcccggaccctgatgctcatgtggctgttgacctgtcccggtatgaaggctgagacggccccttccccacccacccccacctcctcagtgtgctatg

SEQ ID NO: 4362 - protein, 419 aa, Homosapiens
MELAALCRWGLLLALLPPGAASTQVCTGTDMKLRLPASPETHLDMLRHLYQGCQVVQGNLELTYLPTNASLSFLQDIQEVQGYVLIAHNQVRQVPLQRLRIVRGTQLFEDNYALAVLDNGDPLNNTTPVTGASPGGLRELQLRSLTEILKGGVLIQRNPQLCYQDTILWKDIFHKNNQLALTLIDTNRSRACHPCSPMCKGSRCWGESSEDCQSLTRTVCAGGCARCKGPLPTDCCHEQCAAGCTGPKHSDCLACLHFNHSGICELHCPALVTYNTDTFESMPNPEGRYTFGASCVTACPYNYLSTDVGSCTLVCPLHNQEVTAEDGTQRCEKCSKPCARGTHSLPPRPAAVPVPLRMQPGPAHPVLSFLRPSWDLVSAFYSLPLAPLSPTSVPISPVSVGRGPDPDAHVAVDLSRYEG

SEQ ID NO: 4363 - DNA, 356 bp, Homosapiens
atataagtgtgcagaaaagagcctggaagggtgaacacacaagtcaatgcggtggttctcccagcagacaggagagactgggtggacagggagttgagtgaaagggcacgttggctttgtaacatttatacttttatgttactgaaaatgtttatcacaaggattttgatgagttttgacaaatggattcgctcatgtatccactaccccaatcactatacagagcatttctattaccccagaaatgtccttgtgtgcctcccttttgaagccccccaccctggggcaaccaccgttctgatctctcccaccacagagtggttttttcggttcagagcctcacataaaggggatca

SEQ ID NO: 4364 - protein, 72 aa, Homosapiens
MLLKMFITRILMSFDKWIRSCIHYPNHYTEHFYYPRNVLVCLPFEAPHPGATTVLISPTTEWFFRFRASHKG

SEQ ID NO: 4365 - DNA, 1267 bp, Homosapiens
ggaagatgagaatagcctttgctgaccgggaaggggtccgtggtaaggtgcccacctttctcccatagtggcgcctactcgctgaccctgcaagggctgggcatcagctggctggggctgcgctcactgagggaactgggcagtggactggccctcatccaccataacacccacctctgcttcgtgcacacggtgccctgggaccagctctttcggaacccgcaccaagctctgctccacactgccaaccggccagaggacgagtgtggtaagacagggagcccagtgtgcgcactccccatctgccagcacacagcagtgcccagggggccctggcagcagcgttcttggacttgtgcagactgcccgtctctgtgcacccttcttgactcagcacagctctggctggcttggcctcttggcatggcttctctagctgggtcctacctgccttggcatccttccctccccctctgtttctgaaatctcagaactcttcctctccctacatcggccccacctgtccccacccctccagcccacagccatgcccacagccagttccctggttcacttggacctggggcctcccctaaaagtcccctgcggtcccttcctcctcactgcagtgggcgagggcctggcctgccaccagctgtgcgcccgagggcactgctggggtccagggcccacccagtgtgtcaactgcagccagttccttcggggccaggagtgcgtggaggaatgccgagtactgcaggggtatgaggggcggaggagagggtggctggaggggtgcatggggctcctctcagaccccctcaccactgtcccttctctcaggctccccagggagtatgtgaatgccaggcactgtttgccgtgccaccctgagtgtcagccccagaatggctcagtgacctgttttggaccggaggctgaccagtgtgtggcctgtgcccactataaggaccctcccttctgcgtggcccgctgccccagcggtgtgaaacctgacctctcctacatgcccatctggaagtttccagatgaggagggcgcatgccagccttgccccatcaactgcacccactcgtgagtccaacggtcttttctgcagaaaggaggactttcctttcaggggtctttctggggctcttactataaaaggggaccaactctccctttgtcatatcttgtttctgatgacaaaaataacacattgttaaaattgtaaaattaaaacatgaaatataaattaatgccc

SEQ ID NO: 4366 - protein, 183 aa, Homosapiens
MPTASSLVHLDLGPPLKVPCGPFLLTAVGEGLACHQLCARGHCWGPGPTQCVNCSQFLRGQECVEECRVLQGYEGRRRGWLEGCMGLLSDPLTTVPSLRLPREYVNARHCLPCHPECQPQNGSVTCFGPEADQCVACAHYKDPPFCVARCPSGVKPDLSYMPIWKFPDEEGACQPCPINCTHS

SEQ ID NO: 4367 - DNA, 1130 bp, Homosapiens
tctaccacctgagggctttgggctgtcccttgggactgtctagaccagactggagggggagtgggaggggagaggcagcaagcacacagggcctgggactagcatgctgacctccctcctgccccaggttggatgattgactctgaatgtcggccaagattccgggagttggtgtctgaattctcccgcatggccagggacccccagcgctttgtggtcatccaggtactgggcctctgtgccccatccctgcctgtggctaagagcaccctcctgcagagggtgggaaggagagatgagtccagtatgccaggcccctcacggaaggctgcatgctgggctggggaggggccaccatcctgcctctccttcctccacagaatgaggacttgggcccagccagtcccttggacagcaccttctaccgctcactgctggaggacgatgacatgggggacctggtggatgctgaggagtatctggtaccccagcagggcttcttctgtccagaccctttccttccagatcctgggtactgaaagccttagggaagctggcctgagaggggaagcggccctaagggagtgtctaagaacaaaagcgacccattcagagactgtccctgaaacctagtactgccccccatgaggaaggaacagcaatggtgtcagtatccaggctttgtacagagtgcttttctgtttagtttttactttttttgttttgtttttttaaagatgaaataaagacccagggggagaatgggtgttgtatggggaggcaagtgtggggggtccttctccacacccactttgtccatttgcaaatatattttggaaaacagctaggcaccggcctatgtctgggggtggctctgtgccatcccttcctgctcaccttacactcaattcctcttttcctggagggagtggctgggaatcttcagaaagcttggatgaggagccagacatccagttctccagcttcagggttgggggagatcgggaagctggattcagatctgagagccctttgacgaccagatcattcttatttagaacgaactaattcctaaggccactcaccagaatggggttatttcctccttgtgagtgaggagagtggtgggt

SEQ ID NO: 4368 - protein, 166 aa, Homosapiens
MIDSECRPRFRELVSEFSRMARDPQRFVVIQVLGLCAPSLPVAKSTLLQRVGRRDESSMPGPSRKAACWAGEGPPSCLSFLHRMRTWAQPVPWTAPSTAHCWRTMTWGTWWMLRSIWYPSRASSVQTLSFQILGTESLREAGLRGEAALRECLRTKATHSETVPET

SEQ ID NO: 4369 - DNA, 1061 bp, Homosapiens
gggctggctccgatgtatttgatggtgacctgggaatgggggcagccaaggggctgcaaagcctccccacacatgaccccagccctctacagcggtacagtgaggaccccacagtacccctgccctctgagactgatggctacgttgcccccctgacctgcagcccccagcctgaatatgtgaaccagccagatgttcggccccagcccccttcgccccgagagggccctctgcctgctgcccgacctgctggtgccactctggaaaggcccaagactctctccccagggaagaatggggtcgtcaaagacgtttttgcctttgggggtgccgtggagaaccccgagtacttgacaccccagggaggagctgcccctcagccccaccctcctcctgccttcagcccagccttcgacaacctctattactgggaccaggacccaccagagcggggggctccacccagcaccttcaaagggacacctacggcagagaacccagagtacctgggtctggacgtgccagtgtgaaccagaaggccaagtccgcagaagccctgatgtgtcctcagggagcagggaaggcctgacttctgctggcatcaagaggtgggagggccctccgaccacttccaggggaacctgccatgccaggaacctgtcctaaggaaccttccttcctgcttgagttcccagatggctggaaggggtccagcctcgttggaagaggaacagcactggggagtctttgtggattctgaggccctgcccaatgagactctagggtccagtggatgccacagcccagcttggccctttccttccagatcctgggtactgaaagccttagggaagctggcctgagaggggaagcggccctaagggagtgtctaagaacaaaagcgacccattcagagactgtccctgaaacctagtactgccccccatgaggaaggaacagcaatggtgtcagtatccaggctttgtacagagtgcttttctgtttagtttttactttttttgttttgtttttttaaagatgaaataaagacccagggggag

SEQ ID NO: 4370 - protein, 164 aa, Homosapiens [sequence omitted]

SEQ ID NO: 4371 - DNA, 1147 bp, Homosapiens
gggctggctccgatgtatttgatggtgacctgggaatgggggcagccaaggggctgcaaagcctccccacacatgaccccagccctctacagcggtacagtgaggaccccacagtacccctgccctctgagactgatggctacgttgcccccctgacctgcagcccccagcctgaatatgtgaaccagccagatgttcggccccagcccccttcgccccgagagggccctctgcctgctgcccgacctgctggtgccactctggaaaggcccaagactctctccccagggaagaatggggtcgtcaaagacgtttttgcctttgggggtgccgtggagaaccccgagtacttgacaccccagggaggagctgcccctcagccccaccctcctcctgccttcagcccagccttcgacaacctctattactgggaccaggacccaccagagcggggggctccacccagcaccttcaaagggacacctacggcagagaacccagagtacctgggtctggacgtgccagtgtgaaccagaaggccaagtccgcagaagccctgatgtgtcctcagggagcagggaaggcctgacttctgctggcatcaagaggtgggagggccctccgaccacttccaggggaacctgccatgccaggaacctgtcctaaggaaccttccttcctgcttgagttcccagatggctggaaggggtccagcctcgttggaagaggaacagcactggggagtctttgtggattctgaggccctgcccaatgagactctagggtccagtggatgccacagcccagcttggccctttccttccagatcctgggtactgaaagccttagggaagctggcctgagaggggaagcggccctaagggagtgtctaagaacaaaagcgacccattcagagactgtccctgaaacctagtactgccccccatgaggaaggaacagcaatggtgtcagtatccaggctttgtacagagtgcttttctgtttagtttttactttttttgttttgtttttttaaagatgaaataaagacccagggggagaatgggtgttgtatggggaggcaagtgtggggggtccttctccacacccactttgtccatttgcaaatatattttggaaaacagct

SEQ ID NO: 4372 - protein, 164 aa, Homosapiens [sequence omitted]

SEQ ID NO: 4373 - DNA, 621 bp, Homosapiens
gggctggctccgatgtatttgatggtgacctgggaatgggggcagccaaggggctgcaaagcctccccacacatgaccccagccctctacagcggtacagtgaggaccccacagtacccctgccctctgagactgatggctacgttgcccccctgacctgcagcccccaatggctggaaggggtccagcctcgttggaagaggaacagcactggggagtctttgtggattctgaggccctgcccaatgagactctagggtccagtggatgccacagcccagcttggccctttccttccagatcctgggtactgaaagccttagggaagctggcctgagaggggaagcggccctaagggagtgtctaagaacaaaagcgacccattcagagactgtccctgaaacctagtactgccccccatgaggaaggaacagcaatggtgtcagtatccaggctttgtacagagtgcttttctgtttagtttttactttttttgttttgtttttttaaagatgaaataaagacccagggggagaatgggtgttgtatggggaggcaagtgtggggggtccttctccacacccactttgtccatttgcaaatatattttggaaaacagct

SEQ ID NO: 4374 - protein, 73 aa, Homosapiens
MGAAKGLQSLPTHDPSPLQRYSEDPTVPLPSETDGYVAPLTCSPQWLEGVQPRWKRNSTGESLWILRPCPMRL

SEQ ID NO: 4375 - DNA, 1500 bp, Homosapiens
gggctggctccgatgtatttgatggtgacctgggaatgggggcagccaaggggctgcaaagcctccccacacatgaccccagccctctacagcggtacagtgaggaccccacagtacccctgccctctgagactgatggctacgttgcccccctgacctgcagcccccagcctgaatatgtgaaccagccagatgttcggccccagcccccttcgccccgagagggccctctgcctgctgcccgacctgctggtgccactctggaaaggcccaagactctctccccagggaagaatggggtcgtcaaagacgtttttgcctttgggggtgccgtggagaaccccgagtacttgacaccccagggaggagctgcccctcagccccaccctcctcctgccttcagcccagccttcgacaacctctattactgggaccaggacccaccagagcggggggctccacccagcaccttcaaagggacacctacggcagagaacccagagtacctgggtctggacgtgccagtgtgaaccagaaggccaagtccgcagaagccctgatgtgtcctcagggagcagggaaggcctgacttctgctggcatcaagaggtgggagggccctccgaccacttccaggggaacctgccatgccaggaacctgtcctaaggaaccttccttcctgcttgagttcccagatggctggaaggggtccagcctcgttggaagaggaacagcactggggagtctttgtggattctgaggccctgcccaatgagactctagggtccagtggatgccacagcccagcttggccctttccttccagatcctgggtactgaaagccttagggaagctggcctgagaggggaagcggccctaagggagtgtctaagaacaaaagcgacccattcagagactgtccctgaaacctagtactgccccccatgaggaaggaacagcaatggtgtcagtatccaggctttgtacagagtgcttttctgtttagtttttactttttttgttttgtttttttaaagatgaaataaagacccagggggagaatgggtgttgtatggggaggcaagtgtggggggtccttctccacacccactttgtccatttgcaaatatattttggaaaacagctaggcaccggcctatgtctgggggtggctctgtgccatcccttcctgctcaccttacactcaattcctcttttcctggagggagtggctgggaatcttcagaaagcttggatgaggagccagacatccagttctccagcttcagggttgggggagatcgggaagctggattcagatctgagagccctttgacgaccagatcattcttatttagaacgaactaattcctaaggccactcaccagaatggggttatttcctccttgtgagtgaggagagtggtgggtagggtgggggaaagacgaggcagggtctactgtgggactcattttccttgccttggctatgccagagga

SEQ ID NO: 4376 - protein, 164 aa, Homosapiens [sequence omitted]

SEQ ID NO: 4377 - DNA, 974 bp, Homosapiens
gggctggctccgatgtatttgatggtgacctgggaatgggggcagccaaggggctgcaaagcctccccacacatgaccccagccctctacagcggtacagtgaggaccccacagtacccctgccctctgagactgatggctacgttgcccccctgacctgcagcccccaatggctggaaggggtccagcctcgttggaagaggaacagcactggggagtctttgtggattctgaggccctgcccaatgagactctagggtccagtggatgccacagcccagcttggccctttccttccagatcctgggtactgaaagccttagggaagctggcctgagaggggaagcggccctaagggagtgtctaagaacaaaagcgacccattcagagactgtccctgaaacctagtactgccccccatgaggaaggaacagcaatggtgtcagtatccaggctttgtacagagtgcttttctgtttagtttttactttttttgttttgtttttttaaagatgaaataaagacccagggggagaatgggtgttgtatggggaggcaagtgtggggggtccttctccacacccactttgtccatttgcaaatatattttggaaaacagctaggcaccggcctatgtctgggggtggctctgtgccatcccttcctgctcaccttacactcaattcctcttttcctggagggagtggctgggaatcttcagaaagcttggatgaggagccagacatccagttctccagcttcagggttgggggagatcgggaagctggattcagatctgagagccctttgacgaccagatcattcttatttagaacgaactaattcctaaggccactcaccagaatggggttatttcctccttgtgagtgaggagagtggtgggtagggtgggggaaagacgaggcagggtctactgtgggactcattttccttgccttggctatgccagagga

SEQ ID NO: 4378 - protein, 73 aa, Homosapiens; identical to SEQ ID NO: 4374

SEQ ID NO: 4379 - DNA, 1091 bp, Homosapiens
ctccccagggaagaatggggtcgtcaaagacgtttttgcctttgggggtgccgtggagaaccccgagtacttgacaccccagggaggagctgcccctcagccccaccctcctcctgccttcagcccagccttcgacaacctctattactgggaccaggacccaccagagcggggggctccacccagcaccttcaaagggacacctacggcagagaacccagagtacctgggtctggacgtgccagtgtgaaccagaaggccaagtccgcagaagccctgatgtgtcctcagggagcagggaaggcctgacttctgctggcatcaagaggtgggagggccctccgaccacttccaggggaacctgccatgccaggaacctgtcctaaggaaccttccttcctgcttgagttcccagatggctggaaggggtccagcctcgttggaagaggaacagcactggggagtctttgtggattctgaggccctgcccaatgagactctagggtccagtggatgccacagcccagcttggccctttccttccagatcctgggtactgaaagccttagggaagctggcctgagaggggaagcggccctaagggagtgtctaagaacaaaagcgacccattcagagactgtccctgaaacctagtactgccccccatgaggaaggaacagcaatggtgcctctgtgacaccccctgacctatggaagggaactcatgttggccggacattttaccatgtgccaggcactgcgggcactttacataaagcagccaatgtcagaactagaaagcgggagagctgggattcagagcacagactgacccagcaggtgttctgcgagcctcacctgtgcccccgaggcgcgactcgatctcgatgcccggatactgctccttcacagcactggccagctccaggtaggtcgcctcgaagccgcagggttcactggggagtcaagagatggggctgggctggggattcgggggtggggcctcccgtggacccacctccgtccggcccgcgggaccagggtgcgggtcctccagccggggccgctcaccagtactccaccacgatgcg

SEQ ID NO: 4380 - protein, 55 aa, Homosapiens
MAGRGPASLEEEQHWGVFVDSEALPNETLGSSGCHSPAWPFPSRSWVLKALGKLA

SEQ ID NO: 4381 - DNA, 905 bp, Homosapiens
gggagccggggcagacgtccgtagcgccccctcccgaggaggtcgagccgggcagtggggtccgcatcgtggtggagtactggtgagcggccccggctggaggacccgcaccctggtcccgcgggccggacggaggtgggtccacgggaggccccacccccgaatccccagcccagccccatctcttgactccccagtgaaccctgcggcttcgaggcgacctacctggagctggccagtgctgtgaaggagcagtatccgggcatcgagatcgagtcgcgcctcgggggcacaggtgcctttgagatagagataaatggacagctggtgttctccaagctggagaatgggggctttccctatgagaaagatgtgagtatttacagcgttgggaggacctcttggtcaccctaccccaacagtgcatcatcctgtcattccactcctctagctcattgaggccatccgaagagccagtaatggagaaaccctagaaaagatcaccaacagccgtcctccctgcgtcatcctgtgactgcacaggactctgggttcctgctctgttctggggtccaaaccttggtctccctttggtcctgctgggagctccccctgcctctttcccctacttagctccttagcaaagagaccctggcctccactttgccctttgggtacaaagaaggaatagaagattccgtggccttgggggcaggagagagacactctccatgaacacttctccagccacctcatacccccttcccagggtaagtgcccacgaaagcccagtccactcttcgcctcggtaatacctgtctgatgccacagattttatttattctcccctaacccagggcaatgtcagctattggcagtaaagtggcgctacaaacactaatgct

SEQ ID NO: 4382 - protein, 89 aa, Homosapiens
LPSEPCGFEATYLELASAVKEQYPGIEIESRLGGTGAFEIEINGQLVFSKLENGGFPYEKDVSIYSVGRTSWSPYPNSASSCHSTPLAH

SEQ ID NO: 4383 - DNA, 829 bp, Homosapiens
gcggggagccggggcagacgtccgtagcgccccctcccgaggaggtcgagccgggcagtggggtccgcatcgtggtggagtactggtgagcggccccggctggaggacccgcaccctggtcccgcgggccggacggaggtgggtccacgggaggccccacccccgaatccccagcccagccccatctcttgactccccagtgaaccctgcggcttcgaggcgacctacctggagctggccagtgctgtgaaggagcagtatccgggcatcgagatcgagtcgcgcctcgggggcacaggtgcctttgagatagagataaatggacagctggtgttctccaagctggagaatgggggctttccctatgagaaagatctcattgaggccatccgaagagccagtaatggagaaaccctagaaaagatcaccaacagccgtcctccctgcgtcatcctgtgactgcacaggactctgggttcctgctctgttctggggtccaaaccttggtctccctttggtcctgctgggagctccccctgcctctttcccctacttagctccttagcaaagagaccctggcctccactttgccctttgggtacaaagaaggaatagaagattccgtggccttgggggcaggagagagacactctccatgaacacttctccagccacctcatacccccttcccagggtaagtgcccacgaaagcccagtccactcttcgcctcggtaatacctgtctgatgccacagattttatttattctcccctaacccagggcaatgtcagctattggcagtaaagtggcgctacaaacactaatgct

SEQ ID NO: 4384 - protein, 32 aa, Homosapiens
MDSWCSPSWRMGAFPMRKISLRPSEEPVMEKP

SEQ ID NO: 4385 - DNA, 793 bp, Homosapiens
gcggggagccggggcagacgtccgtagcgccccctcccgaggaggtcgagccgggcagtggggtccgcatcgtggtggagtactgtgaaccctgcggcttcgaggcgacctacctggagctggccagtgctgtgaaggagcagtatccgggcatcgagatcgagtcgcgcctcgggggcacaggtgcctttgagatagagataaatggacagctggtgttctccaagctggagaatgggggctttccctatgagaaagatgtgagtatttacagcgttgggaggacctcttggtcaccctaccccaacagtgcatcatcctgtcattccactcctctagctcattgaggccatccgaagagccagtaatggagaaaccctagaaaagatcaccaacagccgtcctccctgcgtcatcctgtgactgcacaggactctgggttcctgctctgttctggggtccaaaccttggtctccctttggtcctgctgggagctccccctgcctctttcccctacttagctccttagcaaagagaccctggcctccactttgccctttgggtacaaagaaggaatagaagattccgtggccttgggggcaggagagagacactctccatgaacacttctccagccacctcatacccccttcccagggtaagtgcccacgaaagcccagtccactcttcgcctcggtaatacctgtctgatgccacagattttatttattctcccctaacccagggcaatgtcagctattggcagtaaagtggcgctacaaacactaatgct

SEQ ID NO: 4386 - protein, 114 aa, Homosapiens
GEPGQTSVAPPPEEVEPGSGVRIVVEYCEPCGFEATYLELASAVKEQYPGIEIESRLGGTGAFEIEINGQLVFSKLENGGFPYEKDVSIYSVGRTSWSPYPNSASSCHSTPLAH

SEQ ID NO: 4387 - DNA, 710 bp, Homosapiens
acacccggaagcaggggcccgagcggagccggccgcgatgagcggggagccggggcagacgtccgtagcgccccctcccgaggaggtcgagccgggcagtggggtccgcatcgtggtggagtactggtgagcggccccggctggaggacccgcaccctggtcccgcgggccggacggaggtgcctttgagatagagataaatggacagctggtgttctccaagctggagaatgggggctttccctatgagaaagatctcattgaggccatccgaagagccagtaatggagaaaccctagaaaagatcaccaacagccgtcctccctgcgtcatcctgtgactgcacaggactctgggttcctgctctgttctggggtccaaaccttggtctccctttggtcctgctgggagctccccctgcctctttcccctacttagctccttagcaaagagaccctggcctccactttgccctttgggtacaaagaaggaatagaagattccgtggccttgggggcaggagagagacactctccatgaacacttctccagccacctcatacccccttcccagggtaagtgcccacgaaagcccagtccactcttcgcctcggtaatacctgtctgatgccacagattttatttattctcccctaacccagggcaatgtcagctattggcagtaaagtggcgctacaaacactaatgct

SEQ ID NO: 4388 - protein, 32 aa, Homosapiens; identical to SEQ ID NO: 4384

SEQ ID NO: 4389 - DNA, 1010 bp, Homosapiens
cattagagtaaatgaagccatgaagtccagcggacaccgggagtggggagtggggaagcccggcactccgggagaccgggccagggaaggagggtctggaccggacccagcccctgcccggggagcgagctccggagctgccctacgaggtcaaaacgtagcagtggcggagacccgcagggggcgcccgaacgccaccctcggcccctccccgctccagaggccccgccccgtcacgtgcccgcggttcgcgtcacacccggaagcaggggcccgagcggagccggccgcgatgagcggggagccggggcagacgtccgtagcgccccctcccgaggaggtcgagccgggcagtggggtccgcatcgtggtggagtactgtgaaccctgcggcttcgaggcgacctacctggagctggccagtgctgtgaaggagcagtatccgggcatcgagatcgagtcgcgcctcgggggcacaggtgcctttgagatagagataaatggacagctggtgttctccaagctggagaatgggggctttccctatgagaaagatctcattgaggccatccgaagagccagtaatggagaaaccctagaaaagatcaccaacagccgtcctccctgcgtcatcctgtgactgcacaggactctgggttcctgctctgttctggggtccaaaccttggtctccctttggtcctgctgggagctccccctgcctctttcccctacttagctccttagcaaagagaccctggcctccactttgccctttgggtacaaagaaggaatagaagattccgtggccttgggggcaggagagagacactctccatgaacacttctccagccacctcatacccccttcccagggtaagtgcccacgaaagcccagtccactcttcgcctcggtaatacctgtctgatgccacagattttatttattctcccctaacccagggcaatgtcagctattggcagtaaagtggcgctacaaacactaatgct

SEQ ID NO: 4390 - protein, 206 aa, Homosapiens [sequence omitted]

SEQ ID NO: 4391 - DNA, 2527 bp, Homosapiens
ctggctggcgtccctctcggcagggtgctctttgccccatggggtgggatccagagctgcagacaggcccccaggcttggccaatgaacagaccaggttcggggagggtgttggaaaagagtggatggggtggttccccttaccttgcagcccccaggccctcccccctccctcccaggtggtcgggactcttgatcttcgctcgtggtactgtctgttcggctgtcttccccgcctctccccaggcacctgcatcctcccttggcacctgctgccaggctaggaagggcaaaaacaatcccagttggcgtagtcagggagtctccgccctcctcccaggtttcctcctcccaggcgcctcccctggacccgcccccatctgcccaagataattttagtttccttgggcctggaatctggacacacagggctcccccccgcctctgacttctctgtccgaagtcgggacaccctcctaccacctgtagagaagcgggagtggatctgaaataaaatccaggaatctgggggttcctagacggagccagacttcggaacgggtgtcctgctactcctgctggggctcctccaggacaagggcacacaactggttccgttaagcccctctcttgctcagacgccatggagctggatctgtctccacctcatcttagcagctctccggaagacctttgcccagcccctgggacccctcctgggactccccggccccctgatacccctctgcctgaggaggtaaagaggtcccagcctctcctcagcccaattctcgggggcccctccagtgcaagggggctgctcccccgcgatgccagccgcccccatgtagtaaaggtgtacagtgaggatggggcctgcaggtctgtggaggtggcagcaggtgccacagctcgccacgtgtgtgaaatgctggtgcagcgagctcacgccttgagcgacgagacctgggggctggtggagtgccacccccacctagcactggagcggggtttggaggaccacgagtccgtggtggaagtgcaggctgcctggcccgtgggcggagatagccgcttcgtcttccggaaaaacttcgccaagtacgaactgttcaagagctccccacactccctgttcccagaaaaaatggtctccagctgtctcgatgcacacactggtatatcccatgaagacctcatccagaacttcctgaatgctggcagctttcctgagatccagggctttctgcagctgcggggttcaggacggaagctttggaaacgctttttctgcttcttgcgccgatctggcctctattactccaccaagggcacctctaaggatccgaggcacctgcagtacgtggcagatgtgaacgagtccaacgtgtacgtggtgacgcagggccgcaagctctacgggatgcccactgacttcggtttctgtgtcaagcccaacaagcttcgaaatggccacaaggggcttcggatcttctgcagtgaagatgagcagagccgcacctgctggctggctgccttccgcctcttcaagtacggggtgcagctgtacaagaattaccagcaggcacagtctcgccatctgcatccatcttgtttgggctccccacccttgagaagtgcctcagataataccctggtggccatggacttctctggccatgctgggcgtgtcattgagaacccccgggaggctctgagtgtggccctggaggaggcccaggcctggaggaagaagacaaaccaccgcctcagcctgcccatgccagcctccggcacgagcctcagtgcagccatccaccgcacccaactctggttccacgggcgcatttcccgtgaggagagccagcggcttattggacagcagggcttggtagacggcctgttcctggtccgggagagtcagcggaacccccagggctttgtcctctctttgtgccacctgcagaaagtgaagcattatctcatcctgccgagcgaggaggagggccgcctgtacttcagcatggatgatggccagacccgcttcactgacctgctgcagctcgtggagttccaccagctgaaccgcggcatcctgccgtgcttgctgcgccattgctgcacgcgggtggccctctgaccaggccgtggactggctcatgcctcagcccgccttcaggctgcccgccgcccctccacccatccagtggactctggggcgcggccacaggggacgggatgaggagcgggagggttccgccactccagttttctcctctgcttctttgcctccctcagatagaaaacagcccccactccagtccactcctgacccctctcctcaagggaaggccttgggtggccccctctccttctcctagctctggaggtgctgctctagggcagggaattatgggagaagtgggggcagcccaggcggtttcacgccccacactttgtacagaccgagaggccagttgatctgctctgttttatactagtgacaataaagattattttttgataca

SEQ ID NO: 4392 - protein, 498 aa, Homosapiens
MELDLSPPHLSSSPEDLCPAPGTPPGTPRPPDTPLPEEVKRSQPLLSPILGGPSSARGLLPRDASRPHVVKVYSEDGACRSVEVAAGATARHVCEMLVQRAHALSDETWGLVECHPHLALERGLEDHESVVEVQAAWPVGGDSRFVFRKNFAKYELFKSSPHSLFPEKMVSSCLDAHTGISHEDLIQNFLNAGSFPEIQGFLQLRGSGRKLWKRFFCFLRRSGLYYSTKGTSKDPRHLQYVADVNESNVYVVTQGRKLYGMPTDFGFCVKPNKLRNGHKGLRIFCSEDEQSRTCWLAAFRLFKYGVQLYKNYQQAQSRHLHPSCLGSPPLRSASDNTLVAMDFSGHAGRVIENPREALSVALEEAQAWRKKTNHRLSLPMPASGTSLSAAIHRTQLWFHGRISREESQRLIGQQGLVDGLFLVRESQRNPQGFVLSLCHLQKVKHYLILPSEEEGRLYFSMDDGQTRFTDLLQLVEFHQLNRGILPCLLRHCCTRVAL

SEQ ID NO: 4393 - DNA, 2218 bp, Homosapiens
ggaatctggacacacagggctcccccccgcctctgacttctctgtccgaagtcgggacaccctcctaccacctgtagagaagcgggagtggatctgaaataaaatccaggaatctgggggttcctagacggagccagacttcggaacgggtgtcctgctactcctgctggggctcctccaggacaagggcacacaactggttccgttaagcccctctcttgctcagacgccatggagctggatctgtctccacctcatcttagcagctctccggaagacctttgcccagcccctgggacccctcctgggactccccggccccctgatacccctctgcctgaggaggtaaagaggtcccagcctctcctcatcccaaccaccggcaggaaacttcgagaggaggagaggcgtgccacctccctcccctctatccccaaccccttccctgagctctgcagtcctccctcacagagcccaattctcgggggcccctccagtgcaagggggctgctcccccgcgatgccagccgcccccatgtagtaaaggtgtacagtgaggatggggcctgcaggtctgtggaggtggcagcaggtgccacagctcgccacgtgtgtgaaatgctggtgcagcgagctcacgccttgagcgacgagacctgggggctggtggagtgccacccccacctagcactggagcggggtttggaggaccacgagtccgtggtggaagtgcaggctgcctggcccgtgggcggagatagccgcttcgtcttccggaaaaacttcgccaagtacgaactgttcaagagctccccacactccctgttcccagaaaaaatggtctccagctgtctcgatgcacacactggtatatcccatgaagacctcatccagaacttcctgaatgctggcagctttcctgagatccagggctttctgcagctgcggggttcaggacggaagctttggaaacgctttttctgcttcttgcgccgatctggcctctattactccaccaagggcacctctaaggatccgaggcacctgcagtacgtggcagatgtgaacgagtccaacgtgtacgtggtgacgcagggccgcaagctctacgggatgcccactgacttcggtttctgtgtcaagcccaacaagcttcgaaatggccacaaggggcttcggatcttctgcagtgaagatgagcagagccgcacctgctggctggctgccttccgcctcttcaagtacggggtgcagctgtacaagaattaccagcaggcacagtctcgccatctgcatccatcttgtttgggctccccacccttgagaagtgcctcagataataccctggtggccatggacttctctggccatgctgggcgtgtcattgagaacccccgggaggctctgagtgtggccctggaggaggcccaggcctggaggaagaagacaaaccaccgcctcagcctgcccatgccagcctccggcacgagcctcagtgcagccatccaccgcacccaactctggttccacgggcgcatttcccgtgaggagagccagcggcttattggacagcagggcttggtagacggcctgttcctggtccgggagagtcagcggaacccccagggctttgtcctctctttgtgccacctgcagaaagtgaagcattatctcatcctgccgagcgaggaggagggccgcctgtacttcagcatggatgatggccagacccgcttcactgacctgctgcagctcgtggagttccaccagctgaaccgcggcatcctgccgtgcttgctgcgccattgctgcacgcgggtggccctctgaccaggccgtggactggctcatgcctcagcccgccttcaggctgcccgccgcccctccacccatccagtggactctggggcgcggccacaggggacgggatgaggagcgggagggttccgccactccagttttctcctctgcttctttgcctccctcagatagaaaacagcccccactccagtccactcctgacccctctcctcaagggaaggccttgggtggccccctctccttctcctagctctggaggtgctgctctagggcagggaattatgggagaagtgggggcagcccaggcggtttcacgccccacactttgtacagaccgagaggccagttgatctgctctgttttatactagtgacaataaagattattttttgataca

SEQ ID NO: 4394 - protein, 532 aa, Homosapiens; identical to SEQ ID NO: 656

SEQ ID NO: 4395 - DNA, 956 bp, Homosapiens
ggacacacagggctcccccccgcctctgacttctctgtccgaagtcgggacaccctcctaccacctgtagagaagcgggagtggatctgaaataaaatccaggaatctgggggttcctagacggagccagacttcggaacgggtgtcctgctactcctgctggggctcctccaggacaagggcacacaactggttccgttaagcccctctcttgctcagacgccatggagctggatctgtctccacctcatcttagcagctctccggaagacctttgcccagcccctgggacccctcctgggactccccggccccctgatacccctctgcctgaggaggtaaagaggtcccagcctctcctcatcccaaccaccggcaggaaacttcgagaggaggagaggcgtgccacctccctcccctctatccccaaccccttccctgagctctgcagtcctccctcacagagcccaattctcgggggcccctccagtgcaagggggctgctcccccgcgatgccagccgcccccatgtgagttgtccctcagaagggaagggagggatgcacgggttctgggtctgtgggagatacacagccgcttccatggaggcaggggatcttggttaggagtccctgagggtctagcaggtgcggaaagggaatgaatcaccctttgcctcccctcaagtcgtgtgcaattcctggggcgcaggtagtaaaggtgtacagtgaggatggggcctgcaggtctgtggaggtggcagcaggtgccacagctcgccacgtgtgtgaaatgctggtgcagcgagctcacgccttgagcgacgagacctgggggctggtggagtgccacccccacctagcactgggtaagtcaggtgcatggaactatccgggctgggagatgatgccttgcatcttgggctaggcatgtggctcatccaggagatctggttg

SEQ ID NO: 4396 - protein, 133 aa, Homosapiens
MELDLSPPHLSSSPEDLCPAPGTPPGTPRPPDTPLPEEVKRSQPLLIPTTGRKLREEERRATSLPSIPNPFPELCSPPSQSPILGGPSSARGLLPRDASRPHVSCPSEGKGGMHGFWVCGRYTAASMEAGDLG

SEQ ID NO: 4397 - DNA, 2107 bp, Homosapiens
agttaagggcctggcgtctccctccctgaagacgtggtcccagccgggtgtcctgacgctcggggttcaggacaagggcacacaactggttccgttaagcccctctcttgctcagacgccatggagctggatctgtctccacctcatcttagcagctctccggaagacctttgcccagcccctgggacccctcctgggactccccggccccctgatacccctctgcctgaggaggtaaagaggtcccagcctctcctcatcccaaccaccggcaggaaacttcgagaggaggagaggcgtgccacctccctcccctctatccccaaccccttccctgagctctgcagtcctccctcacagagcccaattctcgggggcccctccagtgcaagggggctgctcccccgcgatgccagccgcccccatgtagtaaaggtgtacagtgaggatggggcctgcaggtctgtggaggtggcagcaggtgccacagctcgccacgtgtgtgaaatgctggtgcagcgagctcacgccttgagcgacgagacctgggggctggtggagtgccacccccacctagcactggagcggggtttggaggaccacgagtccgtggtggaagtgcaggctgcctggcccgtgggcggagatagccgcttcgtcttccggaaaaacttcgccaagtacgaactgttcaagagctccccacactccctgttcccagaaaaaatggtctccagctgtctcgatgcacacactggtatatcccatgaagacctcatccagaacttcctgaatgctggcagctttcctgagatccagggctttctgcagctgcggggttcaggacggaagctttggaaacgctttttctgcttcttgcgccgatctggcctctattactccaccaagggcacctctaaggatccgaggcacctgcagtacgtggcagatgtgaacgagtccaacgtgtacgtggtgacgcagggccgcaagctctacgggatgcccactgacttcggtttctgtgtcaagcccaacaagcttcgaaatggccacaaggggcttcggatcttctgcagtgaagatgagcagagccgcacctgctggctggctgccttccgcctcttcaagtacggggtgcagctgtacaagaattaccagcaggcacagtctcgccatctgcatccatcttgtttgggctccccacccttgagaagtgcctcagataataccctggtggccatggacttctctggccatgctgggcgtgtcattgagaacccccgggaggctctgagtgtggccctggaggaggcccaggcctggaggaagaagacaaaccaccgcctcagcctgcccatgccagcctccggcacgagcctcagtgcagccatccaccgcacccaactctggttccacgggcgcatttcccgtgaggagagccagcggcttattggacagcagggcttggtagacggcctgttcctggtccgggagagtcagcggaacccccagggctttgtcctctctttgtgccacctgcagaaagtgaagcattatctcatcctgccgagcgaggaggagggccgcctgtacttcagcatggatgatggccagacccgcttcactgacctgctgcagctcgtggagttccaccagctgaaccgcggcatcctgccgtgcttgctgcgccattgctgcacgcgggtggccctctgaccaggccgtggactggctcatgcctcagcccgccttcaggctgcccgccgcccctccacccatccagtggactctggggcgcggccacaggggacgggatgaggagcgggagggttccgccactccagttttctcctctgcttctttgcctccctcagatagaaaacagcccccactccagtccactcctgacccctctcctcaagggaaggccttgggtggccccctctccttctcctagctctggaggtgctgctctagggcagggaattatgggagaagtgggggcagcccaggcggtttcacgccccacactttgtacagaccgagaggccagttgatctgctctgttttatactagtgacaataaagattattttttgataca

SEQ ID NO: 4398 - protein, 532 aa, Homosapiens; identical to SEQ ID NO: 656

SEQ ID NO: 4399 - DNA, 2197 bp, Homosapiens
tgcgggctgcggggagatgtggggagggccccctccactttggagggcagtgaaggagagggatcctctaaattgtcgaggcttcatctctccagattgtatgcccttctcagcaacaccgcctccggccctccgatgggaaagtggaggccgggacaagggcacacaactggttccgttaagcccctctcttgctcagacgccatggagctggatctgtctccacctcatcttagcagctctccggaagacctttgcccagcccctgggacccctcctgggactccccggccccctgatacccctctgcctgaggaggtaaagaggtcccagcctctcctcatcccaaccaccggcaggaaacttcgagaggaggagaggcgtgccacctccctcccctctatccccaaccccttccctgagctctgcagtcctccctcacagagcccaattctcgggggcccctccagtgcaagggggctgctcccccgcgatgccagccgcccccatgtagtaaaggtgtacagtgaggatggggcctgcaggtctgtggaggtggcagcaggtgccacagctcgccacgtgtgtgaaatgctggtgcagcgagctcacgccttgagcgacgagacctgggggctggtggagtgccacccccacctagcactggagcggggtttggaggaccacgagtccgtggtggaagtgcaggctgcctggcccgtgggcggagatagccgcttcgtcttccggaaaaacttcgccaagtacgaactgttcaagagctccccacactccctgttcccagaaaaaatggtctccagctgtctcgatgcacacactggtatatcccatgaagacctcatccagaacttcctgaatgctggcagctttcctgagatccagggctttctgcagctgcggggttcaggacggaagctttggaaacgctttttctgcttcttgcgccgatctggcctctattactccaccaagggcacctctaaggatccgaggcacctgcagtacgtggcagatgtgaacgagtccaacgtgtacgtggtgacgcagggccgcaagctctacgggatgcccactgacttcggtttctgtgtcaagcccaacaagcttcgaaatggccacaaggggcttcggatcttctgcagtgaagatgagcagagccgcacctgctggctggctgccttccgcctcttcaagtacggggtgcagctgtacaagaattaccagcaggcacagtctcgccatctgcatccatcttgtttgggctccccacccttgagaagtgcctcagataataccctggtggccatggacttctctggccatgctgggcgtgtcattgagaacccccgggaggctctgagtgtggccctggaggaggcccaggcctggaggaagaagacaaaccaccgcctcagcctgcccatgccagcctccggcacgagcctcagtgcagccatccaccgcacccaactctggttccacgggcgcatttcccgtgaggagagccagcggcttattggacagcagggcttggtagacggcctgttcctggtccgggagagtcagcggaacccccagggctttgtcctctctttgtgccacctgcagaaagtgaagcattatctcatcctgccgagcgaggaggagggccgcctgtacttcagcatggatgatggccagacccgcttcactgacctgctgcagctcgtggagttccaccagctgaaccgcggcatcctgccgtgcttgctgcgccattgctgcacgcgggtggccctctgaccaggccgtggactggctcatgcctcagcccgccttcaggctgcccgccgcccctccacccatccagtggactctggggcgcggccacaggggacgggatgaggagcgggagggttccgccactccagttttctcctctgcttctttgcctccctcagatagaaaacagcccccactccagtccactcctgacccctctcctcaagggaaggccttgggtggccccctctccttctcctagctctggaggtgctgctctagggcagggaattatgggagaagtgggggcagcccaggcggtttcacgccccacactttgtacagaccgagaggccagttgatctgctctgttttatactagtgacaataaagattattttttgatacacctatg

SEQ ID NO: 4400 - protein, 555 aa, Homosapiens
MGKWRPGQGHTTGSVKPLSCSDAMELDLSPPHLSSSPEDLCPAPGTPPGTPRPPDTPLPEEVKRSQPLLIPTTGRKLREEERRATSLPSIPNPFPELCSPPSQSPILGGPSSARGLLPRDASRPHVVKVYSEDGACRSVEVAAGATARHVCEMLVQRAHALSDETWGLVECHPHLALERGLEDHESVVEVQAAWPVGGDSRFVFRKNFAKYELFKSSPHSLFPEKMVSSCLDAHTGISHEDLIQNFLNAGSFPEIQGFLQLRGSGRKLWKRFFCFLRRSGLYYSTKGTSKDPRHLQYVADVNESNVYVVTQGRKLYGMPTDFGFCVKPNKLRNGHKGLRIFCSEDEQSRTCWLAAFRLFKYGVQLYKNYQQAQSRHLHPSCLGSPPLRSASDNTLVAMDFSGHAGRVIENPREALSVALEEAQAWRKKTNHRLSLPMPASGTSLSAAIHRTQLWFHGRISREESQRLIGQQGLVDGLFLVRESQRNPQGFVLSLCHLQKVKHYLILPSEEEGRLYFSMDDGQTRFTDLLQLVEFHQLNRGILPCLLRHCCTRVAL

SEQ ID NO: 4401 - DNA, 332 bp, Homosapiens
atctgtctccacctcatcttagcagctctccggaagacctttgcccagcccctgggacccctcctgggactccccggccccctgataccccttcagatagaaaacagcccccactccagtccactcctgacccctctcctcaagggaaggccttgggtggccccctctccttctcctagctctggaggtgctgctctagggcagggaattatgggagaagtgggggcagcccaggcggtttcacgccccacactttgtacagaccgagaggccagttgatctgctctgttttatactagtgacaataaagattattttttgatacacctatg

SEQ ID NO: 4402 - protein, 58 aa, Homosapiens
LSPPHLSSSPEDLCPAPGTPPGTPRPPDTPSDRKQPPLQSTPDPSPQGKALGGPLSFS

SEQ ID NO: 4403 - DNA, 3141 bp, Homosapiens
ggaaactctgcatccttaagtcttgaagttgaaccagatatgcagtggttaccatcacacagataaacgctgccttctgtacataccccttatgctgtactaattaacaaaccccttgccagggctggggaggtgagggtgaaggagaatcttagcagaagggcagagtcaggacttgcatctgccactgctgggcactgaagccctggagcagcttcagatagtacctgtactttctcatgcagactccctctgaacaagagccttgtaggcccctctccttcatttcccaccagcctcttatcaggcgggctttccaccatacacccaggaggccacggtctgaggaacaaccaaacccatgcaaagggccgggcgcgatagctcacgcctgtaatgccagcattaggaggctgaggcaggagaatcgcttgaacccaggaggaggaggttgtggtgagccgagatcgtgccattgcactccagcctgggtgacagagtgagactccatctcgaaaaaaaaaatacaaaaattagctgggtgtggtggtgcacacctgtaatcccagctactcgggaggctgacgcaggagaattgcttgaacctgggaggtggaggttgcagtgagccgagatcgcgccattgcaatccagcctggacaacagagtgagactccatctcaaaaaaaaaaaaaaaaagaatgttttaaggaaaaaaatagtactgttacatataatcccaggtgataagaccacaatggaaatgtttaagtcctcactttaaagagtaccccactgagaagaggtatgttggactctagcagagatttggaaactctgggacactcaagatgtgaaagagcctggctatctgaggactcaaagagtcagcatcgggacttgtgagctcaagaagagaaaagggagtggtgaaactttgtcctaaaagttagcaccaggaacagaagaaaaaaacccgatatatagtgatacctcatcttttagagaatgggaagctatttttgtgttcacacagaaagtatagttcaaaaaacctctatatccagagttcagacaaggagaatgatttgagatataagtgccgatgaaggaggtcaattttgatctgaaaccagcagctggacctgggccacctcaggaaaaggactctgttctccaaggcagcacgactgaatggttctgagaataagccagggttcaggactcctgaccctttaggaccatggactcagaagagcctgaaggacaattgtgggctttaaacttctgagagcttgtaaagtaacacaagactgtgcctctcccttgccccagctgtagatagtctttgccccaccattgttatgaagatacacagggttttgcagtttgaataaattggatacaagtttcctctttttttttttctttttgagacaaagtctcgctctgtttccccaggctgagtgcagtggcacaatcaaggcttacttgccgcctcaacctcctgggctcaagcaacgagccatcctcccgtcttagcctcccaactagctgagactacaggcgtgggtcaccacacccagctaatttttgtactttttgtagagacagggtctcaccatgttgcccaggctggtcctgaactcctgggctcaagtaatctgcccacctcagcctcccaaagtgttggggttacaggcgtgaggcaccgcggctggcctgagtttcttcttaatactgtatcacaattgtgggctgtcttatgtgttgatatcgattgagctatttgaaataggaatgttaatgggtgtattaaatttttgtaaggatataacaatatctaccttccaaggatgttgtgaggttttccatgattttgtatatgagctaatgttacctttgaggggtggtgtgcattatgttggatgattgtaaattttcagtggaaaatgtaccgtgtcctaaatttaaagacatgaaaaatatcccaagatcatactagatcataatagcaattcctttacaaatgaattatggaggtaactgatctctaacagtttccttcatgttgttttaatgcacaagggcagaggatctgctgacccttggaaccagcgtgagctaaccacgtgctatagacacttcatggtgtcgcacccagggaagtcaaagcgctttgctccctcactgtctgtgagtcctcagccattagtaccccaccccccgctgctccaaaacttgagttatttcaaatgtttctcactgttcatctctccactgaccccactccagaaagcctggagagagtcccaagatgccacccaccttccccaatccctcgccacagatctgtgtctatctcacactctgtaagtgccgctttgcttcttcctctcttgaaaagactgagaacacacattttaacatgttaggaaaatggggcagcctaaaaaatgactgatcccaccgccagtgactcatgtatactccaggctagcagacaaggccctttttggtgggcctgcttctgtgggttcacagaaaccaaattactgtgggttgcaaagaattagcaggtcatttacaaagcagacatcccttcacccagactgtggttttgcatgctcaggttctcagtctatgagctttggtgcaggatcattttggctactggaaaaaccatagcttattttaaatttctggttgccaaagccaccacacgtgtggtctgtggatgaccattgtctgcagaatgacgaggaaggaacagaatgtggtttggggctcagggtggccttcccactgggagggaaggcgggagggagcccttgccctgggttttgacacagcctgtgctcacagcctctcctctcatctgcatttctcagaaatgccctccctgcccagtggtgactttccctcgtcactcctatggagttctacctggagcccagccatgtgtggaactgtgaagtttactcctctgtaaagatggtttaaagaaagtcagcttctgaaatgtaacaatgctaacccttgctggaaccctgtaagaaatagccctgctgatagttttctaggtttatcatgtttgatttttacactgaaaaataaaaaaatcctggtatgtttgaaatt

SEQ ID NO: 4404 - protein, 87 aa, Homosapiens
MQTPSEQEPCRPLSFISHQPLIRRAFHHTPRRPRSEEQPNPCKGPGAIAHACNASIRRLRQENRLNPGGGGCGEPRSCHCTPAWVTE

SEQ ID NO: 4405 - DNA, 931 bp, Homosapiens
tttcaatgttctcttaggtcccttctagctttaattcatatgtgattatgcagtaaccacaaggtattttttaaacctcctaatgtatggatattaagcagaagagtatttatatgaatacatgtttcacattcctttggtatgaaaatggtgtgttaagtttttcctttaaccactgagttgtgaatgtgaagaaggtggtggagaggaacaaaaaacagaaaggtattttgatcttgccacaaagcatacacacaaattggcacatgcagctgtttgccaaagccttctttttttttttactttttaagaaattatgttagggaaaataaattctgcttccagggacaacttcatggagcctatttacaaattaagagtcagcttaatttgtaacatttctaccagagccaagaatcccaaattcctggtagattagtgttttatttctaaggggcttatgcattcggctccaactcaactcgtctatgtgctgccagtaattaaaatgttccacctcagactgcacaaatggcttatccttctttgtggcatggcgtctgtctcaggaaaaaaggttttatgaaattccatggcaacagtcccaacatgtttgagacttcagctaaaggaatggatgtattttggtgtgtagtcttcagtatatcactgtatttccgtaatactagactccaagctatgccagattgcttattccctttgtgaaagaggattctacctggagcccagccatgtgtggaactgtgaagtttactcctctgtaaagatggtttaaagaaagtcagcttctgaaatgtaacaatgctaacccttgctggaaccctgtaagaaatagccctgctgatagttttctaggtttatcatgtttgatttttacactgaaaaataaaaaaatcctggtatgtttgaa

SEQ ID NO: 4406 - protein, 64 aa, Homosapiens
MAYPSLWHGVCLRKKGFMKFHGNSPNMFETSAKGMDVFWCVVFSISLYFRNTRLQAMPDCLFPL

SEQ ID NO: 4407 - DNA, 1133 bp, Homosapiens
caatgttctcttaggtcccttctagctttaattcatatgtgattatgcagtaaccacaaggtattttttaaacctcctaatgtatggatattaagcagaagagtatttatatgaatacatgtttcacattcctttggtatgaaaatggtgtgttaagtttttcctttaaccactgagttgtgaatgtgaagaaggtggtggagaggaacaaaaaacagaaaggtattttgatcttgccacaaagcatacacacaaattggcacatgcagctgtttgccaaagccttctttttttttttactttttaagaaattatgttagggaaaataaattctgcttccagggacaacttcatggagcctatttacaaattaagagtcagcttaatttgtaacatttctaccagagccaagaatcccaaattcctggtagattagtgttttatttctaaggggcttatgcattcggctccaactcaactcgtctatgtgctgccagtaattaaaatgttccacctcagactgcacaaatggcttatccttctttgtggcatggcgtctgtctcaggaaaaaaggttttatgaaattccatggcaacagtcccaacatgtttgagacttcagctaaaggaatggatgtattttggtgtgtagtcttcagtatatcactgtatttccgtaatactagactccaagctatgccagattgcttattccctttgtgaaagaggagttgctcattacgttcttgaaatatcgcacatcctgttggttcttcaagggacaagagaaagagaatttggaagcagggattagtagaagagaaaacgagggaaaggaagcctttccaccagattagtgttcaagtctttgcagaagtgagactccatctcgaaaaaaaaaatacaaaaattagctgggtgtggtggtgcacacctgtaatcccagctactcgggaggctgacgcaggagaattgcttgaacctgggaggtggaggttgcagtgagccgagatcgcgccattgcaatccagcctggacaacagagtgagactccatctcaaaaaaaaaaaaaaaaagaatgttttaaggaaaaaaatagtactgttacatataatcccaggtgataagaccac

SEQ ID NO: 4408 - protein, 64 aa, Homosapiens; identical to SEQ ID NO: 4406

SEQ ID NO: 4409 - DNA, 1236 bp, Homosapiens
tgagaccctgtctcaaacaaaacaaaacaaaaacaaacaaacaaaaacaaaaaaaactcagtttcctcatccataaaataggaattagatttcaatgttctcttaggtcccttctagctttaattcatatgtgattatgcagtaaccacaaggtattttttaaacctcctaatgtatggatattaagcagaagagtatttatatgaatacatgtttcacattcctttggtatgaaaatggtgtgttaagtttttcctttaaccactgagttgtgaatgtgaagaaggtggtggagaggaacaaaaaacagaaaggtattttgatcttgccacaaagcatacacacaaattggcacatgcagctgtttgccaaagccttctttttttttttactttttaagaaattatgttagggaaaataaattctgcttccagggacaacttcatggagcctatttacaaattaagagtcagcttaatttgtaacatttctaccagagccaagaatcccaaattcctggtagattagtgttttatttctaaggggcttatgcattcggctccaactcaactcgtctatgtgctgccagtaattaaaatgttccacctcagactgcacaaatggcttatccttctttgtggcatggcgtctgtctcaggaaaaaaggttttatgaaattccatggcaacagtcccaacatgtttgagacttcagctaaaggaatggatgtattttggtgtgtagtcttcagtatatcactgtatttccgtaatactagactccaagctatgccagattgcttattccctttgtgaaagaggagttgctcattacgttcttgaaatatcgcacatcctgttggttcttcaagggacaagagaaagagaatttggaagcagggattagtagaagagaaaacgagggaaaggaagcctttccaccagattagtgttcaagtctttgcagaggagaccaactttttttgttttcttttgttttgagacagtcttccagcctgggtgacagagtgagactccatctcgaaaaaaaaaatacaaaaattagctgggtgtggtggtgcacacctgtaatcccagctactcgggaggctgacgcaggagaattgcttgaacctgggaggtggaggttgcagtgagccgagatcgcgccattgcaatccagcctggacaacagagtgagactccatctcaaaaaaaaaaaaaaaaagaatgtttt

SEQ ID NO: 4410 - protein, 64 aa, Homosapiens; identical to SEQ ID NO: 4406

SEQ ID NO: 4411 - DNA, 786 bp, Homosapiens
cctgacacagcttctgactttgtcagtgacaaaatttctcaccttttaaatgcagtgcttaacattttgttaggcccatactcaaaatcggccagatataaaatgacctcagattttgatctcctaggctcaaacaatcctcctacctcagcctcccaagtagctgggactataggcacaccaccatgcacagctaattttttttgtatttttctgcagagatggcgtttcgccatactgcccaggctagtctcaaaatcctgggctcaagcaatctgcccacctcagcctcccaaagtgctggaactacaggcaagagccactgcgcccagccacaacctcagatttctttggcaaacagaaatgtttaaaaacacaaaattttgctcaggtgaaacactgtgttactatcaaatctcacatccacataaagtttttcttttcggctttgtttcgtgaggaacagacagaacaaagtttttccaggtagcatctgtatcactattattctcctatttcctgtaccacccccacctccccaagccctactgaatgtgaggtttagaatgttttaaggagggtcaggtgcggtggctcacgcctgtaatcccagcactttgggaggccaaggcgggcggatcacctgagtttgggagttcgagaccagcctgaccaacatggagaaaccctgtctctactaaaaatacaaaattagccaggcgtggtggcacatgcctgtaatcccagctactcgggaggctgacgcaggagaattgcttgaacctg

SEQ ID NO: 4412 - protein, 118 aa, Homosapiens
MTSDFDLLGSNNPPTSASQVAGTIGTPPCTANFFCIFLQRWRFAILPRLVSKSWAQAICPPQPPKVLELQARATAPSHNLRFLWQTEMFKNTKFCSGETLCYYQISHPHKVFLFGFVS

SEQ ID NO: 4413 - DNA, 1075 bp, Homosapiens
cctttaaccactgagttgtgaatgtgaagaaggtggtggagaggaacaaaaaacagaaaggtattttgatcttgccacaaagcatacacacaaattggcacatgcagctgtttgccaaagccttctttttttttttactttttaagaaattatgttagggaaaataaattctgcttccagggacaacttcatggagcctatttacaaattaagagtcagcttaatttgtaacatttctaccagagccaagaatcccaaattcctggtagattagtgttttatttctaaggggcttatgcattcggctccaactcaactcgtctatgtgctgccagtaattaaaatgttccacctcagactgcacaaatggcttatccttctttgtggcatggcgtctgtctcaggaaaaaaggttttatgaaattccatggcaacagtcccaacatgtttgagacttcagctaaaggaatggatgtattttggtgtgtagtcttcagtatatcactgtatttccgtaatactagactccaagctatgccagattgcttattccctttgtgaaagaggagttgctcattacgttcttgaaatatcgcacatcctgttggttcttcaagggacaagagaaagagaatttggaagcagggattagtagaagagaaaacgagggaaaggaagcctttccaccagattagtgttcaagtctttgcagaggagaccaactttttttgttttcttttgttttgagacagtctctcggcttgaacccgggaggcggaggttgcggtgagccgagatggcaccactgcactccagcctcggcaacaagagcgaaactctgtctaaaacaaaaacaaacaaacaaacaaaaaaacccaggcaaagtttccttgcagccaaggtgacagaactgggctgagggtggaaaagaaacagaaccagtgctccaggtgttttttaattttttaatttatttttattttttttgtatatgtatatatatgtatgtatattttagaggaccagggtctcactatgttgcctaggccagactcaaactcctgtgctcaagcaa

SEQ ID NO: 4414 - protein, 64 aa, Homosapiens; identical to SEQ ID NO: 4406

SEQ ID NO: 4415 - DNA, 2208 bp, Homosapiens
gcaggagcacgtggagaggccgagtagccacagcggcagctccagcccggcccggcagcgacatggaagatatacaaacaaatgcggaactgaaaagcactcaggagcagtctgtgcccgcagaaagtgcagcggttttgaatgactacagtttaaccaaatctcatgaaatggaaaatgtggacagtggagaaggcccagccaatgaagatgaagacataggagatgattcaatgaaagtgaaagatgaatacagtgaaagagatgagaatgttttaaagtcagaacccatgggaaatgcagaagagcctgaaatcccttacagctattcaagagaatataatgaatatgaaaacattaagttggagagacatgttgtctcattcgatagtagcaggccaaccagtggaaagatgaactgcgatgtgtgtggattatcctgcatcagcttcaatgtcttaatggttcataagcgaagccatactggtgaacgcccattccagtgtaatcagtgtggggcatcttttactcagaaaggtaacctcctccgccacattaaactgcacacaggggaaaaaccttttaagtgtcacctctgcaactatgcatgccaaagaagagatgcgctcacggggcatcttaggacacattctggtgagaagcgccactgctttgatgtcaactataattcaagttacatgtatgagaaagagagtgagctcatacagacccgcatgatggaccaagccatcaataacgccatcagctatcttggcgccgaagccctgcgccccttggtccagacaccgcctgctcccacctcggagatggttccagttatcagcagcatgtatcccatagccctcacccgggctgagatgtcaaacggtgcccctcaagagctggaaaagaaaagcatccaccttccagagaagagcgtgccttctgagagaggcctctctcccaacaatagtggccacgactccacggacactgacagcaaccatgaagaacgccagaatcacatctatcagcaaaatcacatggtcctgtctcgggcccgcaatgggatgccacttctgaaggaggttccccgctcttacgaactcctcaagcccccgcccatctgcccaagagactccgtcaaagtgatcaacaaggaaggggaggtgatggatgtgtatcggtgtgaccactgccgcgtcctcttcctggactatgtgatgttcacgattcacatgggctgccacggcttccgtgaccctttcgagtgtaacatgtgtggatatcgaagccatgatcggtatgagttctcgtctcacatagccagaggagaacacagagccctgctgaagtgaatatctggtctcagggattgctcctatgtattcagcatcgtttctaaaaaccaatgacctcgcctaacagattgctctcaaaacatactcagttccaaacttcttttcataccatttttagctgtgttcacaggggtagccagggaaacactgtcttccttcagaaattattcgcaggtctagcatattattacttttgtgaaacctttgttttcccatcagggacttgaattttatggaatttaaaagccaaaaaggtatttggtcattatcttctacagcagtggaatgagtggtcccggagatgtgctatatgaaacattctttctgagatatatcaaccacacgtggaaaagcctttcagtcatacatgcaaatccacaaagaggaagagctgaccagctgaccttgctgggaagcctcacccttctgcccttcacaggctgaagggttaagatctaatctccctaatctaaatgacagtctaagagtaagtaaaagaacagccataaaataagtatctgttacgagtaactgaagaccccattctccaagcatcagatccatttcctatcacaacatttttaaaaaatgtcatctgatggcacttctgcttctgtcctttaccttcccatctccagtgaaaagctgagctgctttgggctaaaccagttgtctatagaagaaaatctatgccagaagaactcatggttttaaatatagaccatcatcgaaactccagaaatttatccactgtggatgatgacatcgctttcctttggtcaaggttggcagagcaagggtataaagggggaaattgtttggcagcaccaacagaaaacaaacaaac

SEQ ID NO: 4416 - protein, 431 aa, Homosapiens; identical to SEQ ID NO: 670

SEQ ID NO: 4417 - DNA, 2274 bp, Homosapiens
gcaggagcacgtggagaggccgagtagccacagcggcagctccagcccggcccggcagcgacatggaagatatacaaacaaatgcggaactgaaaagcactcaggagcagtctgtgcccgcagaaagtgcagcggttttgaatgactacagtttaaccaaatctcatgaaatggaaaatgtggacagtggagaaggcccagccaatgaagatgaagacataggagatgattcaatgaaagtgaaagatgaatacagtgaaagagatgagaatgttttaaagtcagaacccatgggaaatgcagaagagcctgaaatcccttacagctattcaagagaatataatgaatatgaaaacattaagttggagagacatgttgtctcattcgatagtagcaggccaaccagtggaaagatgaactgcgatgtgtgtggattatcctgcatcagcttcaatgtcttaatggttcataagcgaagccatactgtggagaaaccctacaaatgtgagttttgtggaaggagttacaagcagagaagttcccttgaggagcacaaggagcgctgccgtacatttcttcagagcactgacccaggggacactgcaagtgcggaggcaagacacatcaaagcagagatgggaagtgaaagagctctcgtactggacagattagcaagcaatgtggcaaaacgaaaaagctcaatgcctcagaaattcattggtgagaagcgccactgctttgatgtcaactataattcaagttacatgtatgagaaagagagtgagctcatacagacccgcatgatggaccaagccatcaataacgccatcagctatcttggcgccgaagccctgcgccccttggtccagacaccgcctgctcccacctcggagatggttccagttatcagcagcatgtatcccatagccctcacccgggctgagatgtcaaacggtgcccctcaagagctggaaaagaaaagcatccaccttccagagaagagcgtgccttctgagagaggcctctctcccaacaatagtggccacgactccacggacactgacagcaaccatgaagaacgccagaatcacatctatcagcaaaatcacatggtcctgtctcgggcccgcaatgggatgccacttctgaaggaggttccccgctcttacgaactcctcaagcccccgcccatctgcccaagagactccgtcaaagtgatcaacaaggaaggggaggtgatggatgtgtatcggtgtgaccactgccgcgtcctcttcctggactatgtgatgttcacgattcacatgggctgccacggcttccgtgaccctttcgagtgtaacatgtgtggatatcgaagccatgatcggtatgagttctcgtctcacatagccagaggagaacacagagccctgctgaagtgaatatctggtctcagggattgctcctatgtattcagcatcgtttctaaaaaccaatgacctcgcctaacagattgctctcaaaacatactcagttccaaacttcttttcataccatttttagctgtgttcacaggggtagccagggaaacactgtcttccttcagaaattattcgcaggtctagcatattattacttttgtgaaacctttgttttcccatcagggacttgaattttatggaatttaaaagccaaaaaggtatttggtcattatcttctacagcagtggaatgagtggtcccggagatgtgctatatgaaacattctttctgagatatatcaaccacacgtggaaaagcctttcagtcatacatgcaaatccacaaagaggaagagctgaccagctgaccttgctgggaagcctcacccttctgcccttcacaggctgaagggttaagatctaatctccctaatctaaatgacagtctaagagtaagtaaaagaacagccataaaataagtatctgttacgagtaactgaagaccccattctccaagcatcagatccatttcctatcacaacatttttaaaaaatgtcatctgatggcacttctgcttctgtcctttaccttcccatctccagtgaaaagctgagctgctttgggctaaaccagttgtctatagaagaaaatctatgccagaagaactcatggttttaaatatagaccatcatcgaaactccagaaatttatccactgtggatgatgacatcgctttcctttggtcaaggttggcagagcaagggtataaagggggaaattgtttggcagcaccaacagaaaacaaacaaac

SEQ ID NO: 4418 - protein, 453 aa, Homosapiens; identical to SEQ ID NO: 662

SEQ ID NO: 4419 - DNA, 2442 bp, Homosapiens
gcaggagcacgtggagaggccgagtagccacagcggcagctccagcccggcccggcagcgacatggaagatatacaaacaaatgcggaactgaaaagcactcaggagcagtctgtgcccgcagaaagtgcagcggttttgaatgactacagtttaaccaaatctcatgaaatggaaaatgtggacagtggagaaggcccagccaatgaagatgaagacataggagatgattcaatgaaagtgaaagatgaatacagtgaaagagatgagaatgttttaaagtcagaacccatgggaaatgcagaagagcctgaaatcccttacagctattcaagagaatataatgaatatgaaaacattaagttggagagacatgttgtctcattcgatagtagcaggccaaccagtggaaagatgaactgcgatgtgtgtggattatcctgcatcagcttcaatgtcttaatggttcataagcgaagccatactggtgaacgcccattccagtgtaatcagtgtggggcatcttttactcagaaaggtaacctcctccgccacattaaactgcacacaggggaaaaaccttttaagtgtcacctctgcaactatgcatgccaaagaagagatgcgctcacggggcatcttaggacacattctgtggagaaaccctacaaatgtgagttttgtggaaggagttacaagcagagaagttcccttgaggagcacaaggagcgctgccgtacatttcttcagagcactgacccaggggacactgcaagtgcggaggcaagacacatcaaagcagagatgggaagtgaaagagctctcgtactggacagattagcaagcaatgtggcaaaacgaaaaagctcaatgcctcagaaattcattggtgagaagcgccactgctttgatgtcaactataattcaagttacatgtatgagaaagagagtgagctcatacagacccgcatgatggaccaagccatcaataacgccatcagctatcttggcgccgaagccctgcgccccttggtccagacaccgcctgctcccacctcggagatggttccagttatcagcagcatgtatcccatagccctcacccgggctgagatgtcaaacggtgcccctcaagagctggaaaagaaaagcatccaccttccagagaagagcgtgccttctgagagaggcctctctcccaacaatagtggccacgactccacggacactgacagcaaccatgaagaacgccagaatcacatctatcagcaaaatcacatggtcctgtctcgggcccgcaatgggatgccacttctgaaggaggttccccgctcttacgaactcctcaagcccccgcccatctgcccaagagactccgtcaaagtgatcaacaaggaaggggaggtgatggatgtgtatcggtgtgaccactgccgcgtcctcttcctggactatgtgatgttcacgattcacatgggctgccacggcttccgtgaccctttcgagtgtaacatgtgtggatatcgaagccatgatcggtatgagttctcgtctcacatagccagaggagaacacagagccctgctgaagtgaatatctggtctcagggattgctcctatgtattcagcatcgtttctaaaaaccaatgacctcgcctaacagattgctctcaaaacatactcagttccaaacttcttttcataccatttttagctgtgttcacaggggtagccagggaaacactgtcttccttcagaaattattcgcaggtctagcatattattacttttgtgaaacctttgttttcccatcagggacttgaattttatggaatttaaaagccaaaaaggtatttggtcattatcttctacagcagtggaatgagtggtcccggagatgtgctatatgaaacattctttctgagatatatcaaccacacgtggaaaagcctttcagtcatacatgcaaatccacaaagaggaagagctgaccagctgaccttgctgggaagcctcacccttctgcccttcacaggctgaagggttaagatctaatctccctaatctaaatgacagtctaagagtaagtaaaagaacagccataaaataagtatctgttacgagtaactgaagaccccattctccaagcatcagatccatttcctatcacaacatttttaaaaaatgtcatctgatggcacttctgcttctgtcctttaccttcccatctccagtgaaaagctgagctgctttgggctaaaccagttgtctatagaagaaaatctatgccagaagaactcatggttttaaatatagaccatcatcgaaactccagaaatttatccactgtggatgatgacatcgctttcctttggtcaaggttggcagagcaagggtataaagggggaaattgtttggcagcaccaacagaaaacaaacaaac

SEQ ID NO: 4420 - protein, 509 aa, Homosapiens; identical to SEQ ID NO: 660

SEQ ID NO: 4421 - DNA, 2325 bp, Homosapiens
gcaggagcacgtggagaggccgagtagccacagcggcagctccagcccggcccggcagcgacatggaagatatacaaacaaatgcggaactgaaaagcactcaggagcagtctgtgcccgcagaaagtgcagcggttttgaatgactacagtttaaccaaatctcatgaaatggaaaatgtggacagtggagaaggcccagccaatgaagatgaagacataggagatgattcaatgaaagtgaaagatgaatacagtgaaagagatgagaatgttttaaagtcagaacccatgggaaatgcagaagagcctgaaatcccttacagctattcaagagaatataatgaatatgaaaacattaagttggagagacatgttgtctcattcgatagtagcaggccaaccagtggaaagatgaactgcgatgtgtgtggattatcctgcatcagcttcaatgtcttaatggttcataagcgaagccatactggtgaacgcccattccagtgtaatcagtgtggggcatcttttactcagaaaggtaacctcctccgccacattaaactgcacacaggggaaaaaccttttaagtgtcacctctgcaactatgcatgccaaagaagagatgcgctcacggggcatcttaggacacattctgcaagtgcggaggcaagacacatcaaagcagagatgggaagtgaaagagctctcgtactggacagattagcaagcaatgtggcaaaacgaaaaagctcaatgcctcagaaattcattggtgagaagcgccactgctttgatgtcaactataattcaagttacatgtatgagaaagagagtgagctcatacagacccgcatgatggaccaagccatcaataacgccatcagctatcttggcgccgaagccctgcgccccttggtccagacaccgcctgctcccacctcggagatggttccagttatcagcagcatgtatcccatagccctcacccgggctgagatgtcaaacggtgcccctcaagagctggaaaagaaaagcatccaccttccagagaagagcgtgccttctgagagaggcctctctcccaacaatagtggccacgactccacggacactgacagcaaccatgaagaacgccagaatcacatctatcagcaaaatcacatggtcctgtctcgggcccgcaatgggatgccacttctgaaggaggttccccgctcttacgaactcctcaagcccccgcccatctgcccaagagactccgtcaaagtgatcaacaaggaaggggaggtgatggatgtgtatcggtgtgaccactgccgcgtcctcttcctggactatgtgatgttcacgattcacatgggctgccacggcttccgtgaccctttcgagtgtaacatgtgtggatatcgaagccatgatcggtatgagttctcgtctcacatagccagaggagaacacagagccctgctgaagtgaatatctggtctcagggattgctcctatgtattcagcatcgtttctaaaaaccaatgacctcgcctaacagattgctctcaaaacatactcagttccaaacttcttttcataccatttttagctgtgttcacaggggtagccagggaaacactgtcttccttcagaaattattcgcaggtctagcatattattacttttgtgaaacctttgttttcccatcagggacttgaattttatggaatttaaaagccaaaaaggtatttggtcattatcttctacagcagtggaatgagtggtcccggagatgtgctatatgaaacattctttctgagatatatcaaccacacgtggaaaagcctttcagtcatacatgcaaatccacaaagaggaagagctgaccagctgaccttgctgggaagcctcacccttctgcccttcacaggctgaagggttaagatctaatctccctaatctaaatgacagtctaagagtaagtaaaagaacagccataaaataagtatctgttacgagtaactgaagaccccattctccaagcatcagatccatttcctatcacaacatttttaaaaaatgtcatctgatggcacttctgcttctgtcctttaccttcccatctccagtgaaaagctgagctgctttgggctaaaccagttgtctatagaagaaaatctatgccagaagaactcatggttttaaatatagaccatcatcgaaactccagaaatttatccactgtggatgatgacatcgctttcctttggtcaaggttggcagagcaagggtataaagggggaaattgtttggcagcaccaacagaaaacaaacaaac

SEQ ID NO: 4422 - protein, 470 aa, Homosapiens; identical to SEQ ID NO: 664

SEQ ID NO: 4423 - DNA, 2325 bp, Homosapiens
gcaggagcacgtggagaggccgagtagccacagcggcagctccagcccggcccggcagcgacatggaagatatacaaacaaatgcggaactgaaaagcactcaggagcagtctgtgcccgcagaaagtgcagcggttttgaatgactacagtttaaccaaatctcatgaaatggaaaatgtggacagtggagaaggcccagccaatgaagatgaagacataggagatgattcaatgaaagtgaaagatgaatacagtgaaagagatgagaatgttttaaagtcagaacccatgggaaatgcagaagagcctgaaatcccttacagctattcaagagaatataatgaatatgaaaacattaagttggagagacatgttgtctcattcgatagtagcaggccaaccagtggaaagatgaactgcgatgtgtgtggattatcctgcatcagcttcaatgtcttaatggttcataagcgaagccatactggtgaacgcccattccagtgtaatcagtgtggggcatcttttactcagaaaggtaacctcctccgccacattaaactgcacacaggggaaaaaccttttaagtgtcacctctgcaactatgcatgccaaagaagagatgcgctcacggggcatcttaggacacattctgtggagaaaccctacaaatgtgagttttgtggaaggagttacaagcagagaagttcccttgaggagcacaaggagcgctgccgtacatttcttcagagcactgacccaggggacactggtgagaagcgccactgctttgatgtcaactataattcaagttacatgtatgagaaagagagtgagctcatacagacccgcatgatggaccaagccatcaataacgccatcagctatcttggcgccgaagccctgcgccccttggtccagacaccgcctgctcccacctcggagatggttccagttatcagcagcatgtatcccatagccctcacccgggctgagatgtcaaacggtgcccctcaagagctggaaaagaaaagcatccaccttccagagaagagcgtgccttctgagagaggcctctctcccaacaatagtggccacgactccacggacactgacagcaaccatgaagaacgccagaatcacatctatcagcaaaatcacatggtcctgtctcgggcccgcaatgggatgccacttctgaaggaggttccccgctcttacgaactcctcaagcccccgcccatctgcccaagagactccgtcaaagtgatcaacaaggaaggggaggtgatggatgtgtatcggtgtgaccactgccgcgtcctcttcctggactatgtgatgttcacgattcacatgggctgccacggcttccgtgaccctttcgagtgtaacatgtgtggatatcgaagccatgatcggtatgagttctcgtctcacatagccagaggagaacacagagccctgctgaagtgaatatctggtctcagggattgctcctatgtattcagcatcgtttctaaaaaccaatgacctcgcctaacagattgctctcaaaacatactcagttccaaacttcttttcataccatttttagctgtgttcacaggggtagccagggaaacactgtcttccttcagaaattattcgcaggtctagcatattattacttttgtgaaacctttgttttcccatcagggacttgaattttatggaatttaaaagccaaaaaggtatttggtcattatcttctacagcagtggaatgagtggtcccggagatgtgctatatgaaacattctttctgagatatatcaaccacacgtggaaaagcctttcagtcatacatgcaaatccacaaagaggaagagctgaccagctgaccttgctgggaagcctcacccttctgcccttcacaggctgaagggttaagatctaatctccctaatctaaatgacagtctaagagtaagtaaaagaacagccataaaataagtatctgttacgagtaactgaagaccccattctccaagcatcagatccatttcctatcacaacatttttaaaaaatgtcatctgatggcacttctgcttctgtcctttaccttcccatctccagtgaaaagctgagctgctttgggctaaaccagttgtctatagaagaaaatctatgccagaagaactcatggttttaaatatagaccatcatcgaaactccagaaatttatccactgtggatgatgacatcgctttcctttggtcaaggttggcagagcaagggtataaagggggaaattgtttggcagcaccaacagaaaacaaacaaac

SEQ ID NO: 4424 - protein, 470 aa, Homosapiens; identical to SEQ ID NO: 666

SEQ ID NO: 4425 - DNA, 2157 bp, Homosapiens
gcaggagcacgtggagaggccgagtagccacagcggcagctccagcccggcccggcagcgacatggaagatatacaaacaaatgcggaactgaaaagcactcaggagcagtctgtgcccgcagaaagtgcagcggttttgaatgactacagtttaaccaaatctcatgaaatggaaaatgtggacagtggagaaggcccagccaatgaagatgaagacataggagatgattcaatgaaagtgaaagatgaatacagtgaaagagatgagaatgttttaaagtcagaacccatgggaaatgcagaagagcctgaaatcccttacagctattcaagagaatataatgaatatgaaaacattaagttggagagacatgttgtctcattcgatagtagcaggccaaccagtggaaagatgaactgcgatgtgtgtggattatcctgcatcagcttcaatgtcttaatggttcataagcgaagccatactgcaagtgcggaggcaagacacatcaaagcagagatgggaagtgaaagagctctcgtactggacagattagcaagcaatgtggcaaaacgaaaaagctcaatgcctcagaaattcattggtgagaagcgccactgctttgatgtcaactataattcaagttacatgtatgagaaagagagtgagctcatacagacccgcatgatggaccaagccatcaataacgccatcagctatcttggcgccgaagccctgcgccccttggtccagacaccgcctgctcccacctcggagatggttccagttatcagcagcatgtatcccatagccctcacccgggctgagatgtcaaacggtgcccctcaagagctggaaaagaaaagcatccaccttccagagaagagcgtgccttctgagagaggcctctctcccaacaatagtggccacgactccacggacactgacagcaaccatgaagaacgccagaatcacatctatcagcaaaatcacatggtcctgtctcgggcccgcaatgggatgccacttctgaaggaggttccccgctcttacgaactcctcaagcccccgcccatctgcccaagagactccgtcaaagtgatcaacaaggaaggggaggtgatggatgtgtatcggtgtgaccactgccgcgtcctcttcctggactatgtgatgttcacgattcacatgggctgccacggcttccgtgaccctttcgagtgtaacatgtgtggatatcgaagccatgatcggtatgagttctcgtctcacatagccagaggagaacacagagccctgctgaagtgaatatctggtctcagggattgctcctatgtattcagcatcgtttctaaaaaccaatgacctcgcctaacagattgctctcaaaacatactcagttccaaacttcttttcataccatttttagctgtgttcacaggggtagccagggaaacactgtcttccttcagaaattattcgcaggtctagcatattattacttttgtgaaacctttgttttcccatcagggacttgaattttatggaatttaaaagccaaaaaggtatttggtcattatcttctacagcagtggaatgagtggtcccggagatgtgctatatgaaacattctttctgagatatatcaaccacacgtggaaaagcctttcagtcatacatgcaaatccacaaagaggaagagctgaccagctgaccttgctgggaagcctcacccttctgcccttcacaggctgaagggttaagatctaatctccctaatctaaatgacagtctaagagtaagtaaaagaacagccataaaataagtatctgttacgagtaactgaagaccccattctccaagcatcagatccatttcctatcacaacatttttaaaaaatgtcatctgatggcacttctgcttctgtcctttaccttcccatctccagtgaaaagctgagctgctttgggctaaaccagttgtctatagaagaaaatctatgccagaagaactcatggttttaaatatagaccatcatcgaaactccagaaatttatccactgtggatgatgacatcgctttcctttggtcaaggttggcagagcaagggtataaagggggaaattgtttggcagcaccaacagaaaacaaacaaac

SEQ ID NO: 4426 - protein, 414 aa, Homosapiens; identical to SEQ ID NO: 668

SEQ ID NO: 4427 - DNA, 733 bp, Homosapiens
actcagaatcagaaagaaggctgatcgggggttagatctccatctatctatctttttgcaaccaaccacgtccaggctgtttatttaatacttcctcttgctaatgaaggtactggttggggatgggtcgagctttcccatctcggcataagactgcaagatttgaatgtgccctggtgtcggcttcactgaccacagcaggtaccccaggcaagaatctgagcagttataacagcaagtgcggaggcaagacacatcaaagcagagatgggaagtgaaagagctctcgtactggacagattagcaagcaatgtggcaaaacgaaaaagctcaatgcctcagaaattcattggtgagaagcgccactgctttgatgtcaactataattcaagttacatgtatgagaaagagagtgagctcatacagacccgcatgatggaccaagccatcaataacgccatcagctatcttggcgccgaagccctgcgccccttggtccagacaccgcctgctcccacctcggagatggttccagttatcagcagcatgtatcccatagccctcacccgggctgagatgtcaaacggtgcccctcaagagctggaaaagaaaagcatccaccttccagagaagagcgtgccttctgagagaggcctctctcccaacaatagtggccacgactccacggacactgacagcaaccatgaagaacgccagaatcacatctatcagc

SEQ ID NO: 4428 - protein, 154 aa, Homosapiens
MGSERALVLDRLASNVAKRKSSMPQKFIGEKRHCFDVNYNSSYMYEKESELIQTRMMDQAINNAISYLGAEALRPLVQTPPAPTSEMVPVISSMYPIALTRAEMSNGAPQELEKKSIHLPEKSVPSERGLSPNNSGHDSTDTDSNHEERQNHIY

SEQ ID NO: 4429 - DNA, 2188 bp, Homosapiens
gcgtccgctcccgccgttgcgacggacgggtaggggaggcgaccccggcgttctgctccgcactgtggaggaggtggggaggtgttgggccagggctgaggtaggagggagtctgtccctcgacgcctcctgcgacgccagcccctgagcgatgatgcgaacgtgcgtcctactctccgcggtgctctggtgcctcacaggagacaaaatatatgtagagttacatcaaaatagtccagtccttatctgtatggattttaagctttctaaaaaagaaatagtggaccccacctacttatggattgggcctaatgaaaagacgttaacaggaaataatagaataaatataactgaaactggacagctgatggtgaaagattttttggagcctttgtctggactttacacatgtactctttcttataagactgttaaagcagaaactcaagaagaaaaaacagtcaaaaagagatatgactttatggtctttgcctatcgggaacctgattattcatatcagatggctgtacgttttaccacaaggtcttgtatagggagatacaatgatgtattctttagagtgctgaagaaaatcttggatagtctaatttctgatttgtcatgccatgtcatagagccatcatataaatgccattctgttgaaattccagaacatggcctcatacatgagctatttatagcatttcaagttaatccttttgcgccggggtggaaaggtgcttgcaatggatctgttgactgtgaagataccactaatcataatatcctccaggcaagagatcgaatagaagacttttttcggagccaagcatatattttctaccataactttaataaaactctaccagcaatgcattttgtggaccacagtttgcaagtagtacgtctggatagctgtcgaccaggctttggaaaaaatgaacgtctacacagtaattgcgctagctgttgtgtggtttgtagtcctgcgacttttagtcctgatgttaatgtaacttgtcagacctgcgtttccgtccttacctatggagctaaatcttgcccacaaacttcaaacaaaaatcagcaatatgaagattagaggtgaaagcattgttacttacttgtggaagtcggggacataagatgattttcacatcccagagcatcatagatagttccattaagtaaaatcagtaagaccaaaccactggaaaacatgcattttggaaactttaaaataaatggttaacatggcatttctaagaaggcatttaatccagtatctctagtgtacaaaggaaacttgaagttttaatggattatttttaatgaaatgttttattgtttacaaacggtatgttgctgtgtacctaagagtatagtaaggtcaagaagagtatcaaagtataataaaataaaaattgtatactctccatatatttatttgtttggaatcactcttgtgtgatataaaggcgtgtatattatctttgtattagaaccaaaaaagttatttattttggtccctatgattttattttttaagataaattaatatactgtattttttaaagtataggtttaggtttacagaataatagagcagataatatatagagttccatacacccactgcaccccataccctcattcctccttacacaatttctcctattattaagatggtgcattagtgtggcacatttgttacaaatgatgaaccaatattaatttattattaattatagcccatagttcacattaagattcattgtgttgtaaggttatgtgggttttgacaaattcataatggcatgtgtgcaccattgcagtctcatacagaatagtttcaccaccctcaaaatcctgtgcttcacttatttatccctcccgccgtgccctggcaaccactgatctttttactgtctctacagttttgccttttccaaaatgtcatgtagttggttggagttatgcagtatgtagactttttagactggcttctttcacttagcaatatgcatttaaggttcctccatgtctttttgtgacttgatagctcattttttattgctgaataatgttcattgtatggatatagcatagtatgtttatccattcgcccattaaaggaaatcttgattgcttccagttttcagtgattaaaaataaagccgctataaac

SEQ ID NO: 4430 - protein, 316 aa, Homosapiens; identical to SEQ ID NO: 672

SEQ ID NO: 4431 - DNA, 1493 bp, Homosapiens
gttgcgacggacgggtaggggaggcgaccccggcgttctgctccgcactgtggaggaggtggggaggtgttgggccagggctgaggtaggagggagtctgtccctcgacgcctcctgcgacgccagcccctgagcgatgatgcgaacgtgcgtcctactctccgcggtgctctggtgcctcacaggagtccaatgcccgcgttttaccttattcaataagaagggcttcatttatggcaagacaggacagccagacaaaatatatgtagagttacatcaaaatagtccagtccttatctgtatggattttaagctttctaaaaaagaaatagtggaccccacctacttatggattgggcctaatgaaaagacgttaacaggaaataatagaataaatataactgaaactggacagctgatggtgaaagattttttggagcctttgtctggactttacacatgtactctttcttataagactgttaaagcagaaactcaagaagaaaaaacagtcaaaaagagatatgactttatggtctttgcctatcgggaacctgattattcatatcagatggctgtacgttttaccacaaggtcttgtatagggagatacaatgatgtattctttagagtgctgaagaaaatcttggatagtctaatttctgatttgtcatgccatgtcatagagccatcatataaatgccattctgttgaaattccagaacatggcctcatacatgagctatttatagcatttcaagttaatccttttgcgccggggtggaaaggtgcttgcaatggatctgttgactgtgaagataccactaatcataatatcctccaggcaagagatcgaatagaagacttttttcggagccaagcatatattttctaccataactttaataaaactctaccagcaatgcattttgtggaccacagtttgcaagtagtacgtctggatagctgtcgaccaggctttggaaaaaatgaacgtctacacagtaattgcgctagctgttgtgtggtttgtagtcctgcgacttttagtcctgatgttaatgtaacttgtcagacctgcgtttccgtccttacctatggagctaaatcttgcccacaaacttcaaacaaaaatcagcaatatgaagattagaggtgaaagcattgttacttacttgtggaagtcggggacataagatgattttcacatcccagagcatcatagatagttccattaagtaaaatcagtaagaccaaaccactggaaaacatgcattttggaaactttaaaataaatggttaacatggcatttctaagaaggcatttaatccagtatctctagtgtacaaaggaaacttgaagttttaatggattatttttaatgaaatgttttattgtttacaaacggtatgttgctgtgtacctaagagtatagtaaggtcaagaagagtatcaaagtataataaaataaaaattgtatactctccatata

SEQ ID NO: 4432 - protein, 338 aa, Homosapiens; identical to SEQ ID NO: 674

SEQ ID NO: 4433 - DNA, 1135 bp, Homosapiens
cgacggacgggtaggggaggcgaccccggcgttctgctccgcactgtggaggaggtggggaggtgttgggccagggctgaggtaggagggagtctgtccctcgacgcctcctgcgacgccagcccctgagcgatgatgcgaacgtgcgtcctactctccgcggtgctctggtgcctcacaggagcctatcgggaacctgattattcatatcagatggctgtacgttttaccacaaggtcttgtatagggagatacaatgatgtattctttagagtgctgaagaaaatcttggatagtctaatttctgatttgtcatgccatgtcatagagccatcatataaatgccattctgttgaaattccagaacatggcctcatacatgagctatttatagcatttcaagttaatccttttgcgccggggtggaaaggtgcttgcaatggatctgttgactgtgaagataccactaatcataatatcctccaggcaagagatcgaatagaagacttttttcggagccaagcatatattttctaccataactttaataaaactctaccagcaatgcattttgtggaccacagtttgcaagtagtacgtctggatagctgtcgaccaggctttggaaaaaatgaacgtctacacagtaattgcgctagctgttgtgtggtttgtagtcctgcgacttttagtcctgatgttaatgtaacttgtcagacctgcgtttccgtccttacctatggagctaaatcttgcccacaaacttcaaacaaaaatcagcaatatgaagattagaggtgaaagcattgttacttacttgtggaagtcggggacataagatgattttcacatcccagagcatcatagatagttccattaagtaaaatcagtaagaccaaaccactggaaaacatgcattttggaaactttaaaataaatggttaacatggcatttctaagaaggcatttaatccagtatctctagtgtacaaaggaaacttgaagttttaatggattatttttaatgaaatgttttattgtttacaaacggtatgttgctgtgtacctaagagtatagtaaggtcaagaagagtatcaaagtataataaaataaaaattgtatactctccatata

SEQ ID NO: 4434 - protein, 220 aa, Homosapiens
MMRTCVLLSAVLWCLTGAYREPDYSYQMAVRFTTRSCIGRYNDVFFRVLKKILDSLISDLSCHVIEPSYKCHSVEIPEHGLIHELFIAFQVNPFAPGWKGACNGSVDCEDTTNHNILQARDRIEDFFRSQAYIFYHNFNKTLPAMHFVDHSLQVVRLDSCRPGFGKNERLHSNCASCCVVCSPATFSPDVNVTCQTCVSVLTYGAKSCPQTSNKNQQYED

SEQ ID NO: 4435 - DNA, 2209 bp, Homosapiens
tttaatttttttgagacagagtcttgctctgtcgcccaggctggagtgcagtggtgtgatctcagctcactgcaacctctacctcctgggttcaagcgattctcctgcctcagcctcccaagtagctgggaatacaggtgccctccaccacgccaagttaagtttggttttttttgtttttcttttttttgtatttttagtagagacagggtttcactatatgttggcaggctgctctcaaactcctgaactcaggtgatccacccactgcagcctcccaaagtgctgggattacaggcgtgagccaccatgcccagcctttcctgactttaaactaaaggagtgagactagaaggtccctgtgattctgaattatgtggcttcctctggaatttctaggttttccccttgatcccagcagggttgtactgcctaagagagcttggaaagggatagagaagtctgacccaaatttgcggagcgactgagtgtatgctgccccctttctgggccttggcttcttcctcaatcatctaggcacagtcctatgactgcctgtttttgaggatgtgggaagggtctgcaaatacagtgctttcccattgacacacgctggtgaggatgcaggctccctggcaccagcagtgagggctcagattgcaagagtaaaaacttccatcactgggaagagaagtctgcaggggactggaggtgatctgaagattctgaaataactcttcctctctctgcagagaaggatggtgcttcatcctgtttaggtaagggtgatagccaagtgtgttcagggtggctgcaccaacccaccctgagtccatgtggctcaagactgctgctcaggtggggtcagctgagtgggtaggaagtcgggaggcactgcctagcaggtttcaactttagtctggaggctgcatctgtctcctctaaacacagtggttctcattggttataccccaaaatcacaccaggaaactttaaaactagtgacgactgagtcccgtctccagaaactctgacttaattgtgggggtgtggcctggacatcaggatttgtaataactcctcaggtgattctcatgtagtcaaggttgagaaccactgctttaactttctccaaatcctaattacttctagtgtggcctgaggactgcactttgaatggcaagggccaaataaccaagtttttgtttttttccaggaagtggagaagaatttggggttgggactagactgggggtgagctggggagatggaagatggaagtggggtcagtgggaggcaatgatggtaggtatcttggaagaaggatgcttaattttaacacggaaagactggaagaagggaagatacaaagaggtggtctccagaagacagtcagacaaataacagagccttagaaataaaaccttttgggctgggtggcccaggttctcaattgctgcctctacaggaaagtctttgggttcggaggattccagaaacatgaaggagaagttggaggacatggagagtgtcctcaaggacctgacagaggagaagagaaaagatgtgctaaactccctcgctaagtgcctcggcaaggaggatattcggcaggatctagagcaaagagtatctgaggtcctgatttccggggagctacacatggaggacccagacaagcctctcctaagcagcctttttaatgctgctggggtcttggtagaagcgcgtgcaaaagccattctggacttcctggatgccctgctagagctgtctgaagagcagcagtttgtggctgaggccctggagaaggggacccttcctctgttgaaggaccaggtgaaatctgtcatggagcagaactgggatgagctggccagcagtcctcctgacatggactatgaccctgaggcacgaattctctgtgcgctgtatgttgttgtctctatcctgctggagctggctgaggggcctacctctgtctcttcctaactacaaaagccctttctccccacaagcctctgggttttccctttaccagtctgtcctcactgccatcgccactaccatcctgtcaccagtgggacctctttaaaacaagcagccaaccattctttgatgtatcccattcgctccatgttaacatccaaaaccagcctggatttcatacatggacttctgattaaaagtggcaggttgtgcatgttaa

SEQ ID NO: 4436 - protein, 163 aa, Homosapiens
MKEKLEDMESVLKDLTEEKRKDVLNSLAKCLGKEDIRQDLEQRVSEVLISGELHMEDPDKPLLSSLFNAAGVLVEARAKAILDFLDALLELSEEQQFVAEALEKGTLPLLKDQVKSVMEQNWDELASSPPDMDYDPEARILCALYVVVSILLELAEGPTSVSS

SEQ ID NO: 4437 - DNA, 1665 bp, Homosapiens
gtggaatgtcatcagttaaggctattttcatttcttttgtggatcttcagttgcttcaggccatctggatgtatacatgcaggtcacagggaatatgatggcttagcttgggttcagaggcctgacacctcaggctgccaaatgtggaagatttaaatacttgaaccaataccctcctcccaaaaactgaaattggcttctgtttctgagttggtccaggcgcaatgttcagcgtatttgaggaaatcacaagaattgtagttaaggagatggatgctggaggggatatgattgccgttagaagccttgttgatgctgatagattccgctgcttccatctggtgggggagaagagaactttctttggatgccggcactacacaacaggcctcaccctgatggacattctggacacagatggggacaagtggttagatgaactggattctgggctccaaggtcaaaaggctgagtttcaaattctggataatgtagactcaacgggagagttgatagtgagattacccaaagaaataacaatttcaggcagtttccagggcttccaccatcagaaaatcaagatatcggagaaccggatatcccagcagtatctggctacccttgaaaacaggaagctgaagagggaactacccttttcattccgatcaattaatacgagagaaaacctgtatctggtgacagaaactctggagacggtaaaggaggaaaccctgaaaagcgaccggcaatataaattttggagccagatctctcagggccatctcagctataaacacaagggccaaagggaagtgaccatccccccaaatcgggtcctgagctatcgagtaaagcagcttgtcttccccaacaaggagacgatgaatattcatttcaggggcaaaacaaaatcctttccagaaggaaagtctttgggttcggaggattccagaaacatgaaggagaagttggaggacatggagagtgtcctcaaggacctgacagaggagaagagaaaagatgtgctaaactccctcgctaagtgcctcggcaaggaggatattcggcaggatctagagcaaagagtatctgaggtcctgatttccggggagctacacatggaggacccagacaagcctctcctaagcagcctttttaatgctgctggggtcttggtagaagcgcgtgcaaaagccattctggacttcctggatgccctgctagagctgtctgaagagcagcagtttgtggctgaggccctggagaaggggacccttcctctgttgaaggaccaggtgaaatctgtcatggagcagaactgggatgagctggccagcagtcctcctgacatggactatgaccctgaggcacgaattctctgtgcgctgtatgttgttgtctctatcctgctggagctggctgaggggcctacctctgtctcttcctaactacaaaagccctttctccccacaagcctctgggttttccctttaccagtctgtcctcactgccatcgccactaccatcctgtcaccagtgggacctctttaaaacaagcagccaaccattctttgatgtatcccattcgctccatgttaacatccaaaaccagcctggatttcatacatggacttctgattaaaagtggcaggttgtgcatgttaa

SEQ ID NO: 4438 - protein, 407 aa, Homosapiens
MFSVFEEITRIVVKEMDAGGDMIAVRSLVDADRFRCFHLVGEKRTFFGCRHYTTGLTLMDILDTDGDKWLDELDSGLQGQKAEFQILDNVDSTGELIVRLPKEITISGSFQGFHHQKIKISENRISQQYLATLENRKLKRELPFSFRSINTRENLYLVTETLETVKEETLKSDRQYKFWSQISQGHLSYKHKGQREVTIPPNRVLSYRVKQLVFPNKETMNIHFRGKTKSFPEGKSLGSEDSRNMKEKLEDMESVLKDLTEEKRKDVLNSLAKCLGKEDIRQDLEQRVSEVLISGELHMEDPDKPLLSSLFNAAGVLVEARAKAILDFLDALLELSEEQQFVAEALEKGTLPLLKDQVKSVMEQNWDELASSPPDMDYDPEARILCALYVVVSILLELAEGPTSVSS

SEQ ID NO: 4439 - DNA, 2109 bp, Homosapiens
gggtctcactttctctatttggggcaatagctgctacttttttcctccagatgggtaccatgaggggcagaggagaatctgggatctgtgatgtttagccctctttactgagtcatggctgcctcacgttctagaagtaaggcaggcaaatcattccaggtactgattgtcctggaacctttggctcttccttgacctcatgtcacgtgcgtccatgtgaagagagtccacgaaacgggctttatatgagcaacaaggctgggtgcaggcaagctgagtccaaaaaaggggtcagcaaagggtggtggcattatcattagttcttatatgtttgggataggcttacaaagtacattctcaagggtggagaaatattacaaagtaccttcttaagggcaggggagaatattacaaagtaccttcttaagggcggcggcggggagactatattgtatcagggtggggcaggaacaaatcacaatggtggaatgtcatcagttaaggctattttcatttcttttgtggatcttcagttgcttcaggccatctggatgtatacatgcaggtcacagggaatatgatggcttagcttgggttcagaggcctgacacctcaggctgccaaatgtggaagatttaaatacttgaaccaataccctcctcccaaaaactgaaattggcttctgtttctgagttggtccaggcgcaatgttcagcgtatttgaggaaatcacaagaattgtagttaaggagatggatgctggaggggatatgattgccgttagaagccttgttgatgctgatagattccgctgcttccatctggtgggggagaagagaactttctttggatgccggcactacacaacaggcctcaccctgatggacattctggacacagatggggacaagtggttagatgaactggattctgggctccaaggtcaaaaggctgagtttcaaattctggataatgtagactcaacgggagagttgatagtgagattacccaaagaaataacaatttcaggcagtttccagggcttccaccatcagaaaatcaagatatcggagaaccggatatcccagcagtatctggctacccttgaaaacaggaagctgaagagggaactacccttttcattccgatcaattaatacgagagaaaacctgtatctggtgacagaaactctggagacggtaaaggaggaaaccctgaaaagcgaccggcaatataaattttggagccagatctctcagggccatctcagctataaacacaagggccaaagggaagtgaccatccccccaaatcgggtcctgagctatcgagtaaagcagcttgtcttccccaacaaggagacgatgagaaagtctttgggttcggaggattccagaaacatgaaggagaagttggaggacatggagagtgtcctcaaggacctgacagaggagaagagaaaagatgtgctaaactccctcgctaagtgcctcggcaaggaggatattcggcaggatctagagcaaagagtatctgaggtcctgatttccggggagctacacatggaggacccagacaagcctctcctaagcagcctttttaatgctgctggggtcttggtagaagcgcgtgcaaaagccattctggacttcctggatgccctgctagagctgtctgaagagcagcagtttgtggctgaggccctggagaaggggacccttcctctgttgaaggaccaggtgaaatctgtcatggagcagaactgggatgagctggccagcagtcctcctgacatggactatgaccctgaggcacgaattctctgtgcgctgtatgttgttgtctctatcctgctggagctggctgaggggcctacctctgtctcttcctaactacaaaagccctttctccccacaagcctctgggttttccctttaccagtctgtcctcactgccatcgccactaccatcctgtcaccagtgggacctctttaaaacaagcagccaaccattctttgatgtatcccattcgctccatgttaacatccaaaaccagcctggatttcatacatggacttctgattaaaagtggcaggttgtgcatgttaa

SEQ ID NO: 4440 - protein, 394 aa, Homosapiens
MFSVFEEITRIVVKEMDAGGDMIAVRSLVDADRFRCFHLVGEKRTFFGCRHYTTGLTLMDILDTDGDKWLDELDSGLQGQKAEFQILDNVDSTGELIVRLPKEITISGSFQGFHHQKIKISENRISQQYLATLENRKLKRELPFSFRSINTRENLYLVTETLETVKEETLKSDRQYKFWSQISQGHLSYKHKGQREVTIPPNRVLSYRVKQLVFPNKETMRKSLGSEDSRNMKEKLEDMESVLKDLTEEKRKDVLNSLAKCLGKEDIRQDLEQRVSEVLISGELHMEDPDKPLLSSLFNAAGVLVEARAKAILDFLDALLELSEEQQFVAEALEKGTLPLLKDQVKSVMEQNWDELASSPPDMDYDPEARILCALYVVVSILLELAEGPTSVSS

SEQ ID NO: 4441 - DNA, 1560 bp, Homosapiens
acaactttcagtttcattattttagcttcctgagattcagaggccaggaactgtgcagagatctgtggggattctcacaacttccatttctggtgaacagctgaggtcagagaggagttggtccaggcgcaatgttcagcgtatttgaggaaatcacaagaattgtagttaaggagatggatgctggaggggatatgattgccgttagaagccttgttgatgctgatagattccgctgcttccatctggtgggggagaagagaactttctttggatgccggcactacacaacaggcctcaccctgatggacattctggacacagatggggacaagtggttagatgaactggattctgggctccaaggtcaaaaggctgagtttcaaattctggataatgtagactcaacgggagagttgatagtgagattacccaaagaaataacaatttcaggcagtttccagggcttccaccatcagaaaatcaagatatcggagaaccggatatcccagcagtatctggctacccttgaaaacaggaagctgaagagggaactacccttttcattccgatcaattaatacgagagaaaacctgtatctggtgacagaaactctggagacggtaaaggaggaaaccctgaaaagcgaccggcaatataaattttggagccagatctctcagggccatctcagctataaacacaagggccaaagggaagtgaccatccccccaaatcgggtcctgagctatcgagtaaagcagcttgtcttccccaacaaggagacgatgaagaaggatggtgcttcatcctgtttaggaaagtctttgggttcggaggattccagaaacatgaaggagaagttggaggacatggagagtgtcctcaaggacctgacagaggagaagagaaaagatgtgctaaactccctcgctaagtgcctcggcaaggaggatattcggcaggatctagagcaaagagtatctgaggtcctgatttccggggagctacacatggaggacccagacaagcctctcctaagcagcctttttaatgctgctggggtcttggtagaagcgcgtgcaaaagccattctggacttcctggatgccctgctagagctgtctgaagagcagcagtttgtggctgaggccctggagaaggggacccttcctctgttgaaggaccaggtgaaatctgtcatggagcagaactgggatgagctggccagcagtcctcctgacatggactatgaccctgaggcacgaattctctgtgcgctgtatgttgttgtctctatcctgctggagctggctgaggggcctacctctgtctcttcctaactacaaaagccctttctccccacaagcctctgggttttccctttaccagtctgtcctcactgccatcgccactaccatcctgtcaccagtgggacctctttaaaacaagcagccaaccattctttgatgtatcccattcgctccatgttaacatccaaaaccagcctggatttcatacatggacttctgattaaaagtggcaggttgtgcatgttaa

SEQ ID NO: 4442 - protein, 403 aa, Homosapiens
MFSVFEEITRIVVKEMDAGGDMIAVRSLVDADRFRCFHLVGEKRTFFGCRHYTTGLTLMDILDTDGDKWLDELDSGLQGQKAEFQILDNVDSTGELIVRLPKEITISGSFQGFHHQKIKISENRISQQYLATLENRKLKRELPFSFRSINTRENLYLVTETLETVKEETLKSDRQYKFWSQISQGHLSYKHKGQREVTIPPNRVLSYRVKQLVFPNKETMKKDGASSCLGKSLGSEDSRNMKEKLEDMESVLKDLTEEKRKDVLNSLAKCLGKEDIRQDLEQRVSEVLISGELHMEDPDKPLLSSLFNAAGVLVEARAKAILDFLDALLELSEEQQFVAEALEKGTLPLLKDQVKSVMEQNWDELASSPPDMDYDPEARILCALYVVVSILLELAEGPTSVSS

SEQ ID NO: 4443 - DNA, 6421 bp, Homosapiens
atggggtagagtgtagatggcttggttccagaggtgagggggccagggctgctgccatcctggcctggtggaggttggggagctgtaggagagctagtgagtcgagacttagaagaatggggccacatagcagcagaggactggtgtaagggagggaggggtagggacagaagctagacccaatctcctttgggatgtgggcagggagggaagcaggcttggagggttaatttacccacagaatgtgatagtaataggggagggaggctgctgtgggtttaactcctgggttggctgttgggtagacaggtggggaaaaggcccgtgagtcattgtaagcacaggtccaacttggccctgactcctgcgggggtatggggaagctgtgacagaaacgatgggtgctgtggtcctctgcaggccctcaccccttaacttcctcatacagactggcactgggcagggcctctcatgtggcagccacatgtggcgttgtgaggccaccccatgtggggtctgtggtgagagtcctgtaggatccctgctcaagcagcacagaggaaggggcaagacgtggcctgtaggcactgtctcagcctgcagagaagaaagtgaggccgggagcctgagcctgggctggagccttctcccctccccagttggactaggggcagtgttaattttgaaaaggtgtgggtccctgtgtcctcttccaggggtccaagggaacgggagaggtcactgggcctgttttctccctcctgaccctgcatctcccaccccgtgtatcatagggaactttcaccttaaaatctttctaagcaaagtgtgaataggatttttactccctttgtacagtattctgagaaacgcaaataaaagggcaacatgtttctgtttccctgtgtctggccttcgcttcctggaaggctgaggggagggggcaggggtgtgggcagcggctcccgctgaggtgctggtggggcatcagtgcagctctgacggtggcaggaggggcgctgggactgctgggctttctgctggcttcagcagggaaatcccccaagggggctgtgagggaactggcggcggcagcggtagtcagagagcaaaattctctgtgcttttgcctggctgttctccgacaggtcttgcgccttggccccagaggctggggtgacctgtgccatggccaaggagggggacactccagcaatggtttacacgtggagccagggtcccaagtggtgctcagtccttcccagtgaatccccagcccttctccagtttctcacttctctccccaaggcctttccccagtcacctctcccttgggagcgctgcgtttccttctggcctttcagtggaggggacttttcatacttcctcctcccaccataagcctgagtggcaggggaagaggttctggggactttctgaggccaacatggctaggagagagaggagtcctatagcaaggaatccttatctcacgagggcactgaccttccagcgtgttctggggagtatcagctgctattcccaggagaggcacaaagtcccaggtagaagggaggagctgtccccagcagcctggggtctctagccccggtccaccatcacagcacccttggagtgagtgtcagggagtgtgggatatttgcccaagtccagccaccacccctgtccgagtagagcccacacagtattggaaagagaaatatagccactgctttcactcctgggagtaggggtgccctggctggagtgcagtggcaccatcttggctcactgcaacctccgcctcccaggttcaagcaattctcatgcctcagcctcctgagtagctgggattacaggtgtgtgccaaaacatctggctaattttttttttttttttttttttggtagagacggggtttcgccatgttggccaggctggtcttgaactcctggcctcaagtgatctgcctgcttcggcctctgaaagtgttgggattacaggcatgaaccaccacgcctggcctgtcatcccttcaaatgttctttcagaactgaggcatgcagaggctggaagacaggctgggctcaccggggtggttatctctgagagaggacatgggtgaggtcagaggcctctccctggagaaggaggtaggtggagaagccagatggcatccagataaggaagaccagcatctccttgagagtgtacacgggagcacgagatggggagggaggctgagtgctccttacaggcccaccctgttgcctccaggtgttagctgctgttgtcctgggtcttcagtgttgaccgtcgcatggcatttgggcagctggttctgctgggttatggtcctcatgtccctggcacagacacagccattgcctgctggcacttgatacctactcatattccatttctctattccaaacacactggattgcatggcccagggcgccacggtgtgcaccattgtctggcccacactcacctagaatacataccaggatctcctacccactccttaggtacaagaagaagaaggggttctggccgggcatggtggctcacacctgtaatcccagcactttgagaggccgaggtgggtgggtcacaaggtcaggagattgagaccatcctggctaacacggtgaaaccccgtctctactaaaaaacacacacaaaaaaattagctgggcgtggtggcaggcacctgtagtcccagctactcgggaggctgaggcaggagaatggcgtgaacttgggaggcggagcttgcagtgagccgagattgcgccattgcactccagcctcggcgatagagcaagactccgtctcaaaaaaaaaaaaaaaaggggggttctggccttaatctgcctccagctcagttataaggtggcttatctaaaggcttgggaggtggggcacccagccctacccacccgtccaggaagttccacacctggacaactttcagtttcattattttagcttcctgagattcagaggccaggaactgtgcagagatctgtggggattctcacaacttccatttctggtgaacagctgaggtcagagaggaggtgggtaccacttgagatgggcctgtggttcccgggtactgtctttccagacacctagaattcccaggttggtagtgaactgagagtcaaccaccatgatggggccagagacagaggaggaagcagtgagtggataagtgcctgtgctgggcagaagggatataggggaaggtggccaaaggtaggatggggaagtggatcccaggaagcttttgtttcttctgaggccaatttaccaccacctcattgggaaattgttggtagggaggcacccatccaattgccttgcagaatacagcaaggcagggagcccaagaatcagagccaagggaagaaacgaccagttgaggttagtaatgtgaagtctggcaaccgtgcccgtcattcctccctggttcctctgttcatcaacgttggggctagtctggctggggcatggtgggcctgcctttccatcccttgggccccttggaacaagggggcaactctgctgtgggagatgtagaaaatgggtctcactttctctatttggggcaatagctgctacttttttcctccagatgggtaccatgaggggcagaggagaatctgggatctgtgatgtttagccctctttactgagtcatggctgcctcacgttctagaagtaaggcaggcaaatcattccaggtactgattgtcctggaacctttggctcttccttgacctcatgtcacgtgcgtccatgtgaagagagtccacgaaacgggctttatatgagcaacaaggctgggtgcaggcaagctgagtccaaaaaaggggtcagcaaagggtggtggcattatcattagttcttatatgtttgggataggcttacaaagtacattctcaagggtggagaaatattacaaagtaccttcttaagggcaggggagaatattacaaagtaccttcttaagggcggcggcggggagactatattgtatcagggtggggcaggaacaaatcacaatggtggaatgtcatcagttaaggctattttcatttcttttgtggatcttcagttgcttcaggccatctggatgtatacatgcaggtcacagggaatatgatggcttagcttgggttcagaggcctgacacctcaggctgccaaatgtggaagatttaaatacttgaaccaataccctcctcccaaaaactgaaattggcttctgtttctgagttggtccaggcgcaatgttcagcgtatttgaggaaatcacaagaattgtagttaaggagatggatgctggaggggatatgattgccgttagaagccttgttgatgctgatagattccgctgcttccatctggtgggggagaagagaactttctttggatgccggcactacacaacaggcctcaccctgatggacattctggacacagatggggacaagtggttagatgaactggattctgggctccaaggtcaaaaggctgagtttcaaattctggataatgtagactcaacgggagagttgatagtgagattacccaaagaaataacaatttcaggcagtttccagggcttccaccatcagaaaatcaagatatcggagaaccggatatcccagcagtatctggctacccttgaaaacaggaagctgaagagggaactacccttttcattccgatcaattaatacgagagaaaacctgtatctggtgacagaaactctggagacggtaaaggaggaaaccctgaaaagcgaccggcaatataaattttggagccagatctctcagggccatctcagctataaacacaagggccaaagggaagtgaccatccccccaaatcgggtcctgagctatcgagtaaagcagcttgtcttccccaacaaggagacgatgaagaaggatggtgcttcatcctgtttaggtaagggtgatagccaagtgtgttcagggtggctgcaccaacccaccctgagtccatgtggctcaagactgctgctcaggtggggtcagctgagtgggtaggaagtcgggaggcactgcctagcaggtttcaactttagtctggaggctgcatctgtctcctctaaacacagtggttctcattggttataccccaaaatcacaccaggaaactttaaaactagtgacgactgagtcccgtctccagaaactctgacttaattgtgggggtgtggcctggacatcaggatttgtaataactcctcaggtgattctcatgtagtcaaggttgagaaccactgctttaactttctccaaatcctaattacttctagtgtggcctgaggactgcactttgaatggcaagggccaaataaccaagtttttgtttttttccaggaagtggagaagaatttggggttgggactagactgggggtgagctggggagatggaagatggaagtggggtcagtgggaggcaatgatggtaggtatcttggaagaaggatgcttaattttaacacggaaagactggaagaagggaagatacaaagaggtggtctccagaagacagtcagacaaataacagagccttagaaataaaaccttttgggctgggtggcccaggttctcaattgctgcctctacaggaaagtctttgggttcggaggattccagaaacatgaaggagaagttggaggacatggagagtgtcctcaaggacctgacagaggagaagagaaaagatgtgctaaactccctcgctaagtgcctcggcaaggaggatattcggcaggatctagagcaaagagtatctgaggtcctgatttccggggagctacacatggaggacccagacaagcctctcctaagcagcctttttaatgctgctggggtcttggtagaagcgcgtgcaaaagccattctggacttcctggatgccctgctagagctgtctgaagagcagcagtttgtggctgaggccctggagaaggggacccttcctctgttgaaggaccaggtgaaatctgtcatggagcagaactgggatgagctggccagcagtcctcctgacatggactatgaccctgaggcacgaattctctgtgcgctgtatgttgttgtctctatcctgctggagctggctgaggggcctacctctgtctcttcctaactacaaaagccctttctccccacaagcctctgggttttccctttaccagtctgtcctcactgccatcgccactaccatcctgtcaccagtgggacctctttaaaacaagcagccaaccattctttgatgtatcccattcgctccatgttaacatccaaaaccagcctggatttcatacatggacttctgattaaaagtggcaggttgtgcatgttaa

SEQ ID NO: 4444 - protein, 262 aa, Homosapiens
MFSVFEEITRIVVKEMDAGGDMIAVRSLVDADRFRCFHLVGEKRTFFGCRHYTTGLTLMDILDTDGDKWLDELDSGLQGQKAEFQILDNVDSTGELIVRLPKEITISGSFQGFHHQKIKISENRISQQYLATLENRKLKRELPFSFRSINTRENLYLVTETLETVKEETLKSDRQYKFWSQISQGHLSYKHKGQREVTIPPNRVLSYRVKQLVFPNKETMKKDGASSCLGKGDSQVCSGWLHQPTLSPCGSRLLLRWGQLSG

SEQ ID NO: 4445 - DNA, 2027 bp, Homosapiens
tttttgaatagagactccatggagttggtcatggaatgggctgggctcctgggctgaacatggaccacgcagttgcgacaggaggccaggggaaaaacccctgctcacttgtttgccctcaggcagccaaagcactttaacccctgcatagggagcagagggcggtacggcttctggattgtttcactgtgattcctaggttttttcgatgccacgcagtgtgtgcttttgtgtatggaagcaagtgtgggatgggtctttgcctttctgggtagggagctgtctaatccaagtcccaggcttttggcagcttctctgcaacccaccgtgggtcctggttgggagtggggagggtcaggttggggaaagatggggtagagtgtagatggcttggttccagaggtgagggggccagggctgctgccatcctggcctggtggaggttggggagctgtaggagagctagtgagtcgagacttagaagaatggggccacatagcagcagaggactggtgtaagggagggaggggtagggacagaagctagacccaatctcctttgggatgtgggcagggagggaagcaggcttggagggttaatttacccacagaatgtgatagtaataggggagggaggctgctcctgggctggagccttctcccctccccagttggactaggggcagtgttaattttgaaaaggtgtgggtccctgtgtcctcttccaggggtccaagggaacgggagaggtcactgggcctgttttctccctcctgaccctgcatctcccaccccgtgtatcatagggaactttcaccttaaaatctttctaagcaaagtgtgaataggatttttactccctttgtacagtattctgagaaacgcaaataaaagggcaacatgtttctgtttccctgtgtctggccttcgcttcctggaaggctgaggggagggggcaggggtgtgggcagcggctcccgctgaggtgctggtggggcatcagtgcagctctgacggtggcaggaggggcgctgggactgctgggctttctgctggcttcagcagggaaatcccccaagggggctgtgagggaactggcggcggcagcggtagtcagagagcaaaattctctgtgcttttgcctggctgttctccgacaggtcttgcgccttggccccagaggctggggtgacctgtgccatggccaaggagggggacactccagcaatggtttacacgtggagccagggtcccaagtggtgctcagtccttcccagtgaatccccagcccttctccagtttctcacttctctccccaaggcctttccccagtcacctctcccttgggagcgctgcgtttccttctggcctttcagtggaggggacttttcatacttcctcctcccaccataagcctgagtggcaggggaagaggttctggggactttctgaggccaacatggctaggagagagaggagtcctatagcaaggaatccttatctcacgagggcactgaccttccagcgtgttctggggagtatcagctgctattcccaggagaggcacaaagtcccaggtagaagggaggagctgtccccagcagcctggggtctctagccccggtccaccatcacagcacccttggagtgagtgtcagggagtgtgggatatttgcccaagtccagccaccacccctgtccgagtagagcccacacagtattggaaagagaaatatagccactgctttcactcctgggagtaggggtgccctggttgctttcaccagcctgcaagagtatagtcagggtgaggtgctggagaacatcaacaacgatctgggttcaaatcccagctttgccacttattagccatgttgctgtgtcaacttctctgagcttcagtttattccactgttgtgtaaagataatgcctcttagggctgttgtgagcattagcacagtgcctggcatatagtaaatactcaatatatggtagccatattattataattgtaattgttactacca

SEQ ID NO: 4446 - protein, 70 aa, Homosapiens
MAKEGDTPAMVYTWSQGPKWCSVLPSESPALLQFLTSLPKAFPQSPLPWERCVSFWPFSGGDFSYFLLPP

SEQ ID NO: 4447 - DNA, 2645 bp, Homosapiens
ccaagctgccccagctccacggagtccggatttttggaatcaataagtactgagagtgcagccccttcccctgcccagggtggcaggggaggggtagggtaaaaggcatgtgctgcaacactgaagacagaaagaagaagcctctggacactgccagagatgggggttgagcctctggcctaatttcccccctcgcttcccccagtagccaacttggagtagcttgtagtggggttggggtaggccccctgggctctgaccttttctgaattttttgatcttttccttttgctttttgaatagagactccatggagttggtcatggaatgggctgggctcctgggctgaacatggaccacgcagttgcgacaggaggccaggggaaaaacccctgctcacttgtttgccctcaggcagccaaagcactttaacccctgcatagggagcagagggcggtacggcttctggattgtttcactgtgattcctaggttttttcgatgccacgcagtgtgtgcttttgtgtatggaagcaagtgtgggatgggtctttgcctttctgggtagggagctgtctaatccaagtcccaggcttttggcagcttctctgcaacccaccgtgggtcctggttgggagtggggagggtcaggttggggaaagatggggtagagtgtagatggcttggttccagaggtgagggggccagggctgctgccatcctggcctggtggaggttggggagctgtaggagagctagtgagtcgagacttagaagaatggggccacatagcagcagaggactggtgtaagggagggaggggtagggacagaagctagacccaatctcctttgggatgtgggcagggagggaagcaggcttggagggttaatttacccacagaatgtgatagtaataggggagggaggctgctgtgggtttaactcctgggttggctgttgggtagacaggtggggaaaaggcccgtgagtcattgtaagcacaggtccaacttggccctgactcctgcgggggtatggggaagctgtgacagaaacgatgggtgctgtggtcctctgcaggccctcaccccttaacttcctcatacagactggcactgggcagggcctctcatgtggcagccacatgtggcgttgtgaggccaccccatgtggggtctgtggtgagagtcctgtaggatccctgctcaagcagcacagaggaaggggcaagacgtggcctgtaggcactgtctcagcctgcagagaagaaagtgaggccgggagcctgagcctgggctggagccttctcccctccccagttggactaggggcagtgttaattttgaaaaggtgtgggtccctgtgtcctcttccaggggtccaagggaacgggagaggtcactgggcctgttttctccctcctgacctttcaccttaaaatctttctaagcaaagtgtgaataggatttttactccctttgtacagtattctgagaaacgcaaataaaagggcaacatgtttctgtttccctgtgtctggccttcgcttcctggaaggctgaggggagggggcaggggtgtgggcagcggctcccgctgaggtgctggtggggcatcagtgcagctctgacggtggcaggaggggcgctgggactgctgggctttctgctggcttcagcagggaaatcccccaagggggctgtgagggaactggcggcggcagcggtagtcagagagcaaaattctctgtgcttttgcctggctgttctccgacaggtcttgcgccttggccccagaggctggggtgacctgtgccatggccaaggagggggacactccagcaatggtttacacgtggagccagggtcccaagtggtgctcagtccttcccagtgaatccccagcccttctccagtttctcacttctctccccaaggcctttccccagtcacctctcccttgggagcgctgcgtttccttctggcctttcagtggaggggacttttcatacttcctcctcccaccataagcctgagtggcaggggaagaggttctggggactttctgaggccaacatggctaggagagagaggagtcctatagcaaggaatccttatctcacgagggcactgaccttccagcgtgttctggggagtatcagctgctattcccaggagaggcacaaagtcccaggtagaagggaggagctgtccccagcagcctggggtctctagccccggtccaccatcacagcacccttggagtgagtgtcagggagtgtgggatatttgcccaagtccagccaccacccctgtccgagtagagcccacacagtattggaaagagaaatatagccactgctttcactcctgggagtaggggtgccctggttgctttcaccagcctgcaagagtatagtcagggtgaggtgctggagaacatcaacaacgatctgggttcaaatcccagctttgccacttattagccatgttgctgtgtcaacttctctgagcttcagtttattccactgttgtgtaaagataatgcctcttagggctgttgtgagcattagcacagtgcctggcatatagtaaatactcaatatatggtagccatattattataattgtaattgttactacca

SEQ ID NO: 4448 - protein, 126 aa, Homosapiens
MGAVVLCRPSPLNFLIQTGTGQGLSCGSHMWRCEATPCGVCGESPVGSLLKQHRGRGKTWPVGTVSACREESEAGSLSLGWSLLPSPVGLGAVLILKRCGSLCPLPGVQGNGRGHWACFLPPDLSP

SEQ ID NO: 4449 - DNA, 2552 bp, Homosapiens
gcttatccccaagctgccccagctccacggagtccggatttttggaatcaataagtactgagagtgcagccccttcccctgcccagggtggcaggggaggggtagggtaaaaggcatgtgctgcaacactgaagacagaaagaagaagcctctggacactgccagagatgggggttgagcctctggcctaatttcccccctcgcttcccccagtagccaacttggagtagcttgtagtggggttggggtaggccccctgggctctgaccttttctgaattttttgatcttttccttttgctttttgaatagagactccatggagttggtcatggaatgggctgggctcctgggctgaacatggaccacgcagttgcgacaggaggccaggggaaaaacccctgctcacttgtttgccctcaggcagccaaagcactttaacccctgcatagggagcagagggcggtacggcttctggattgtttcactgtgattcctaggttttttcgatgccacgcagtgtgtgcttttgtgtatggaagcaagtgtgggatgggtctttgcctttctgggtagggagctgtctaatccaagtcccaggcttttggcagcttctctgcaacccaccgtgggtcctggttgggagtggggagggtcaggttggggaaagatggggtagagtgtagatggcttggttccagaggtgagggggccagggctgctgccatcctggcctggtggaggttggggagctgtaggagagctagtgagtcgagacttagaagaatggggccacatagcagcagaggactggtgtaagggagggaggggtagggacagaagctagacccaatctcctttgggatgtgggcagggagggaagcaggcttggagggttaatttacccacagaatgtgatagtaataggggagggaggctgctgtgggtttaactcctgggttggctgttgggtagacaggtggggaaaaggcccgtgagtcattgtaagcacaggtccaacttggccctgactcctgcgggggtatggggaagctgtgacagaaacgatgggtgctgtggtcctctgcaggccctcaccccttaacttcctcatacagactggcactgggcagggcctctcatgtggcagccacatgtggcgttgtgaggccaccccatccttctcccctccccagttggactaggggcagtgttaattttgaaaaggtgtgggtccctgtgtcctcttccaggggtccaagggaacgggagaggtcactgggcctgttttctccctcctgaccctgcatctcccaccccgtgtatcatagggaactttcaccttaaaatctttctaagcaaagtgtgaataggatttttactccctttgtacagtattctgagaaacgcaaataaaagggcaacatgtttctgtttccctgtgtctggccttcgcttcctggaaggctgaggggagggggcaggggtgtgggcagcggctcccgctgaggtgctggtggggcatcagtgcagctctgacggtggcaggaggggcgctgggactgctgggctttctgctggcttcagcagggaaatcccccaagggggctgtgagggaactggcggcggcagcggtagtcagagagcaaaattctctgtgcttttgcctggctgttctccgacaggtcttgcgccttggccccagaggctggggtgacctgtgccatggccaaggagggggacactccagcaatggtttacacgtggagccagggtcccaagtggtgctcagtccttcccagtgaatccccagcccttctccagtttctcacttctctccccaaggcctttccccagtcacctctcccttgggagcgctgcgtttccttctggcctttcagtggaggggacttttcatacttcctcctcccaccataagcctgagtggcaggggaagaggttctggggactttctgaggccaacatggctaggagagagaggagtcctatagcaaggaatccttatctcacgagggcactgaccttccagcgtgttctggggagtatcagctgctattcccaggagaggcacaaagtcccaggtagaagggaggagctgtccccagcagcctggggtctctagccccggtccaccatcacagcacccttggagtgagtgtcagggagtgtgggatatttgcccaagtccagccaccacccctgtccgagtagagcccacacagtattggaaagagaaatatagccactgctttcactcctgggagtaggggtgccctggttgctttcaccagcctgcaagagtatagtcagggtgaggtgctggagaacatcaacaacgatctgggttcaaatcccagctttgccacttattagccatgttgctgtgtcaacttctctgagcttcagtttattccactgttgtgtaaagataatgcctcttagggctgttgtgagcattagcacagtgcctggcatatagtaaatactcaatatatggtagccatattattataattgtaattgttactacca

SEQ ID NO: 4450 - protein, 45 aa, Homosapiens
MGAVVLCRPSPLNFLIQTGTGQGLSCGSHMWRCEATPSFSPPQLD

SEQ ID NO: 4451 - DNA, 1898 bp, Homosapiens
ccattttgtgctcaacaccgtgtccctgatgagcgtgcttatccccaagctgccccagctccacggagtccggatttttggaatcaataagtactgagagtgcagccccttcccctgcccagggtggcaggggaggggtagggtaaaaggcatgtgctgcaacactgaagacagaaagaagaagcctctggacactgccagagatgggggttgagcctctggcctaatttcccccctcgcttcccccagtagccaacttggagtagcttgtagtggggttggggtaggccccctgggctctgaccttttctgaattttttgatcttttccttttgctttttgaatagagactccatggagttggtcatggaatgggctgggctcctgggctgaacatggaccacgcagttgcgacaggaggccaggggaaaaacccctgctcacttgtttgccctcaggcagccaaagcactttaacccctgcatagggagcagagggcggtacggcttctggattgtttcactgtgattcctaggttttttcgatgccacgcagtgtgtgcttttgtgtatggaagcaagtgtgggatgggtctttgcctttctgggtagggagctgtctaatccaagtcccaggcttttggcagcttctctgcaacccaccccgtgtatcatagggaactttcaccttaaaatctttctaagcaaagtgtgaataggatttttactccctttgtacagtattctgagaaacgcaaataaaagggcaacatgtttctgtttccctgtgtctggccttcgcttcctggaaggctgaggggagggggcaggggtgtgggcagcggctcccgctgaggtgctggtggggcatcagtgcagctctgacggtggcaggaggggcgctgggactgctgggctttctgctggcttcagcagggaaatcccccaagggggctgtgagggaactggcggcggcagcggtagtcagagagcaaaattctctgtgcttttgcctggctgttctccgacaggtcttgcgccttggccccagaggctggggtgacctgtgccatggccaaggagggggacactccagcaatggtttacacgtggagccagggtcccaagtggtgctcagtccttcccagtgaatccccagcccttctccagtttctcacttctctccccaaggcctttccccagtcacctctcccttgggagcgctgcgtttccttctggcctttcagtggaggggacttttcatacttcctcctcccaccataagcctgagtggcaggggaagaggttctggggactttctgaggccaacatggctaggagagagaggagtcctatagcaaggaatccttatctcacgagggcactgaccttccagcgtgttctggggagtatcagctgctattcccaggagaggcacaaagtcccaggtagaagggaggagctgtccccagcagcctggggtctctagccccggtccaccatcacagcacccttggagtgagtgtcagggagtgtgggatatttgcccaagtccagccaccacccctgtccgagtagagcccacacagtattggaaagagaaatatagccactgctttcactcctgggagtaggggtgccctggttgctttcaccagcctgcaagagtatagtcagggtgaggtgctggagaacatcaacaacgatctgggttcaaatcccagctttgccacttattagccatgttgctgtgtcaacttctctgagcttcagtttattccactgttgtgtaaagataatgcctcttagggctgttgtgagcattagcacagtgcctggcatatagtaaatactcaatatatggtagccatattattataattgtaattgttactacca

SEQ ID NO: 4452 - protein, 47 aa, Homosapiens
MEASVGWVFAFLGRELSNPSPRLLAASLQPTPCIIGNFHLKIFLSKV

SEQ ID NO: 4453 - DNA, 4581 bp, Homosapiens
gtgctcctcttccagaagacaggaggtttgctgttgtgagggctgctctttcctgggggagggaatgggaagggctcacctggtggctgccctggtggtgctcagccttggcttgagtgtctggcatactggctgggcccggatatttgtatgtggagccaagagggtggggcgggaaggagggggaaagagctaccagcaaaaaagtggttaacacaacagagttgctgcaggctctggtttgaggcaggttatgaaaccacatcagggcccagcactaagcagccacctgccagctatggcagcagaagttttcggctcaactcctgtagacctagtcgacctctgccagcctcttctctctgtttctccccatctagggtaggggccagttggttgttttactaatggaagtgatatgtatccatagtcacacgaaagtctcaagagtgtttcctcattgccagtctttttgttagtttattgatctcttctttttcaggggtctctggtggtttcctgctctcagggcacctagtgtttaggcttcaggaagaagcttctgagggtgttggctaggacctaggtctaggcttttcctaggctcatcaagttttgttggctgccctgtgaaagccagaaaggcgtatggggtcctgtgatctgggattccccaaggcttttggcactcctggacaaatactaggaagggttagtggactttctataccagcacccctgtaggtgcgggttacagagaggtgatggggtggcagtttcaggtcagacttgggaagctctttccctctccttagtcagagttaagtccttcagagccctcacttgtcagccacatgccgccctcccctctcaggtggaggcttttgcgtagcagctgtcccaggggctgctagagtaactgaagccccaaggccctgggaagataaacaatctgagccagctctggctttctagatacttgaatttctgttaggctcaattatccagcctagtgggctgcgctgatgggtcccaggagcatctcttcaatcagaatgcgccccaggctggcgcacgggtgtttgcttgttgggatggcgtgttgtgggtcacattttctctgaggtctctaagcttggagctgtctgagaagaggaaacttgctcctgttatcctggaagtaaataactggcccctgaggactcagtctcctgtgcagggccctcagggatctggggacagccaaactctggataaggggcagatcattccaccccttccttctctacttccctctgctcactgtgggttgcggccacctcctggttcctcctgctgcaggactcctaccgttggtgctgggcaggggaaggcatggtgctaatatacacctggaaacaggtgctgagaggggagactgagtcctcctaagttggggtttggggagatccagaattgaaaaaatcagaggagaacagcagagaggggcagcaggatgaatgtgggcacagcgcacagcgaggtgaaccccaacacgcgggtgatgaacagccgtggcatctggctctcctacgtgctggccatcggtctcctccacatcgtgctgctgagcatcccgtttgtgagtgtccctgtcgtctggaccctcaccaacctcattcacaacatgggcatgtatatcttcctgcacacggtgaaggggacaccctttgagaccccggaccagggcaaggcgaggctgctaacccactgggagcagatggattatggggtccagttcacggcctctcggaagttcttgaccatcacacccatcgtgctgtacttcctcaccagcttctacactaagtacgaccagatccattttgtgctcaacaccgtgtccctgatgagcgtgcttatccccaagctgccccagctccacggagtccggatttttggaatcaataagtactgagagtgcagccccttcccctgcccagggtggcaggggaggggtagggtaaaaggcatgtgctgcaacactgaagacagaaagaagaagcctctggacactgccagagatgggggttgagcctctggcctaatttcccccctcgcttcccccagtagccaacttggagtagcttgtagtggggttggggtaggccccctgggctctgaccttttctgaattttttgatcttttccttttgctttttgaatagagactccatggagttggtcatggaatgggctgggctcctgggctgaacatggaccacgcagttgcgacaggaggccaggggaaaaacccctgctcacttgtttgccctcaggcagccaaagcactttaacccctgcatagggagcagagggcggtacggcttctggattgtttcactgtgattcctaggttttttcgatgccacgcagtgtgtgcttttgtgtatggaagcaagtgtgggatgggtctttgcctttctgggtagggagctgtctaatccaagtcccaggcttttggcagcttctctgcaacccaccgtgggtcctggttgggagtggggagggtcaggttggggaaagatggggtagagtgtagatggcttggttccagaggtgagggggccagggctgctgccatcctggcctggtggaggttggggagctgtaggagagctagtgagtcgagacttagaagaatggggccacatagcagcagaggactggtgtaagggagggaggggtagggacagaagctagacccaatctcctttgggatgtgggcagggagggaagcaggcttggagggttaatttacccacagaatgtgatagtaataggggagggaggctgctgtgggtttaactcctgggttggctgttgggtagacaggtggggaaaaggcccgtgagtcattgtaagcacaggtccaacttggccctgactcctgcgggggtatggggaagctgtgacagaaacgatgggtgctgtggtcctctgcaggccctcaccccttaacttcctcatacagactggcactgggcagggcctctcatgtggcagccacatgtggcgttgtgaggccaccccatgtggggtctgtggtgagagtcctgtaggatccctgctcaagcagcacagaggaaggggcaagacgtggcctgtaggcactgtctcagcctgcagagaagaaagtgaggccgggagcctgagcctgggctggagccttctcccctccccagttggactaggggcagtgttaattttgaaaaggtgtgggtccctgtgtcctcttccaggggtccaagggaacgggagaggtcactgggcctgttttctccctcctgaccctgcatctcccaccccgtgtatcatagggaactttcaccttaaaatctttctaagcaaagtgtgaataggatttttactccctttgtacagtattctgagaaacgcaaataaaagggcaacatgtttctgtttccctgtgtctggccttcgcttcctggaaggctgaggggagggggcaggggtgtgggcagcggctcccgctgaggtgctggtggggcatcagtgcagctctgacggtggcaggaggggcgctgggactgctgggctttctgctggcttcagcagggaaatcccccaagggggctgtgagggaactggcggcggcagcggtagtcagagagcaaaattctctgtgcttttgcctggctgttctccgacaggtcttgcgccttggccccagaggctggggtgacctgtgccatggccaaggagggggacactccagcaatggtttacacgtggagccagggtcccaagtggtgctcagtccttcccagtgaatccccagcccttctccagtttctcacttctctccccaaggcctttccccagtcacctctcccttgggagcgctgcgtttccttctggcctttcagtggaggggacttttcatacttcctcctcccaccataagcctgagtggcaggggaagaggttctggggactttctgaggccaacatggctaggagagagaggagtcctatagcaaggaatccttatctcacgagggcactgaccttccagcgtgttctggggagtatcagctgctattcccaggagaggcacaaagtcccaggtagaagggaggagctgtccccagcagcctggggtctctagccccggtccaccatcacagcacccttggagtgagtgtcagggagtgtgggatatttgcccaagtccagccaccacccctgtccgagtagagcccacacagtattggaaagagaaatatagccactgctttcactcctgggagtaggggtgccctggttgctttcaccagcctgcaagagtatagtcagggtgaggtgctggagaacatcaacaacgatctgggttcaaatcccagctttgccacttattagccatgttgctgtgtcaacttctctgagcttcagtttattccactgttgtgtaaagataatgcctcttagggctgttgtgagcattagcacagtgcctggcatatagtaaatactcaatatatggtagccatattattataattgtaattgttactacca

SEQ ID NO: 4454 - protein, 153 aa, Homosapiens; identical to SEQ ID NO: 678

SEQ ID NO: 4455 - DNA, 3227 bp, Homosapiens
tgattcggccggagctgccagcggggaggctgcagccgcgggttgttacagctgctggagcagcagcggcccccgctcccgggaaccgttcccgggccgttgatcttcggccccacacgaacagcagagaggggcagcaggatgaatgtgggcacagcgcacagcgaggtgaaccccaacacgcgggtgatgaacagccgtggcatctggctctcctacgtgctggccatcggtctcctccacatcgtgctgctgagcatcccgtttgtgagtgtccctgtcgtctggaccctcaccaacctcattcacaacatgggcatgtatatcttcctgcacacggtgaaggggacaccctttgagaccccggaccagggcaaggcgaggctgctaacccactgggagcagatggattatggggtccagttcacggcctctcggaagttcttgaccatcacacccatcgtgctgtacttcctcaccagcttctacactaagtacgaccagatccattttgtgctcaacaccgtgtccctgatgagcgtgcttatccccaagctgccccagctccacggagtccggatttttggaatcaataagtactgagagtgcagccccttcccctgcccagggtggcaggggaggggtagggtaaaaggcatgtgctgcaacactgaagacagaaagaagaagcctctggacactgccagagatgggggttgagcctctggcctaatttcccccctcgcttcccccagtagccaacttggagtagcttgtagtggggttggggtaggccccctgggctctgaccttttctgaattttttgatcttttccttttgctttttgaatagagactccatggagttggtcatggaatgggctgggctcctgggctgaacatggaccacgcagttgcgacaggaggccaggggaaaaacccctgctcacttgtttgccctcaggcagccaaagcactttaacccctgcatagggagcagagggcggtacggcttctggattgtttcactgtgattcctaggttttttcgatgccacgcagtgtgtgcttttgtgtatggaagcaagtgtgggatgggtctttgcctttctgggtagggagctgtctaatccaagtcccaggcttttggcagcttctctgcaacccaccgtgggtcctggttgggagtggggagggtcaggttggggaaagatggggtagagtgtagatggcttggttccagaggtgagggggccagggctgctgccatcctggcctggtggaggttggggagctgtaggagagctagtgagtcgagacttagaagaatggggccacatagcagcagaggactggtgtaagggagggaggggtagggacagaagctagacccaatctcctttgggatgtgggcagggagggaagcaggcttggagggttaatttacccacagaatgtgatagtaataggggagggaggctgctgtgggtttaactcctgggttggctgttgggtagacaggtggggaaaaggcccgtgagtcattgtaagcacaggtccaacttggccctgactcctgcgggggtatggggaagctgtgacagaaacgatgggtgctgtggtcctctgcaggccctcaccccttaacttcctcatacagactggcactgggcagggcctctcatgtggcagccacatgtggcgttgtgaggccaccccatgtggggtctgtggtgagagtcctgtaggatccctgctcaagcagcacagaggaaggggcaagacgtggcctgtaggcactgtctcagcctgcagagaagaaagtgaggccgggagcctgagcctgggctggagccttctcccctccccagttggactaggggcagtgttaattttgaaaaggtgtgggtccctgtgtcctcttccaggggtccaagggaacgggagaggtcactgggcctgttttctccctcctgaccctgcatctcccaccccgtgtatcatagggaactttcaccttaaaatctttctaagcaaagtgtgaataggatttttactccctttgtacagtattctgagaaacgcaaataaaagggcaacatgtttctgtttccctgtgtctggccttcgcttcctggaaggctgaggggagggggcaggggtgtgggcagcggctcccgctgaggtgctggtggggcatcagtgcagctctgacggtggcaggaggggcgctgggactgctgggctttctgctggcttcagcagggaaatcccccaagggggctgtgagggaactggcggcggcagcggtagtcagagagcaaaattctctgtgcttttgcctggctgttctccgacaggtcttgcgccttggccccagaggctggggtgacctgtgccatggccaaggagggggacactccagcaatggtttacacgtggagccagggtcccaagtggtgctcagtccttcccagtgaatccccagcccttctccagtttctcacttctctccccaaggcctttccccagtcacctctcccttgggagcgctgcgtttccttctggcctttcagtggaggggacttttcatacttcctcctcccaccataagcctgagtggcaggggaagaggttctggggactttctgaggccaacatggctaggagagagaggagtcctatagcaaggaatccttatctcacgagggcactgaccttccagcgtgttctggggagtatcagctgctattcccaggagaggcacaaagtcccaggtagaagggaggagctgtccccagcagcctggggtctctagccccggtccaccatcacagcacccttggagtgagtgtcagggagtgtgggatatttgcccaagtccagccaccacccctgtccgagtagagcccacacagtattggaaagagaaatatagccactgctttcactcctgggagtaggggtgccctggttgctttcaccagcctgcaagagtatagtcagggtgaggtgctggagaacatcaacaacgatctgggttcaaatcccagctttgccacttattagccatgttgctgtgtcaacttctctgagcttcagtttattccactgttgtgtaaagataatgcctcttagggctgttgtgagcattagcacagtgcctggcatatagtaaatactcaatatatggtagccatattattataattgtaattgttactacca

SEQ ID NO: 4456 - protein, 153 aa, Homosapiens; identical to SEQ ID NO: 678

SEQ ID NO: 4457 - DNA, 912 bp, Homosapiens
tttttgaatagagactccatggagttggtcatggaatgggctgggctcctgggctgaacatggaccacgcagttgcgacaggaggccaggggaaaaacccctgctcacttgtttgccctcaggcagccaaagcactttaacccctgcatagggagcagagggcggtacggcttctggattgtttcactgtgattcctaggttttttcgatgccacgcagtgtgtgcttttgtgtatggaagcaagtgtgggatgggtctttgcctttctgggtagggagctgtctaatccaagtcccaggcttttggcagcttctctgcaacccaccgtgggtcctggttgggagtggggagggtcaggttggggaaagatggggtagagtgtagatggcttggttccagaggtgagggggccagggctgctgccatcctggcctggtggaggttggggagctgtaggagagctagtgagtcgagacttagaagaatggggccacatagcagcagaggactggtgtaagggagggaggggtagggacagaagctagacccaatctcctttgggatgtgggcagggagggaagcaggcttggagggttaatttacccacagaatgtgatagtaataggggagggaggctgctcctgggctggagccttctcccctccccagttggactaggggcagtgttaattttgaaaaggtgtgggtccctgtgtcctcttccaggggtccaagggaacgggagaggtcactgggcctgttttctccctcctgaccctgcatctcccaccccgtgtatcatagggaactttcaccttaaaatctttctaagcaaagtgtgaataggatttttactccctttgtacagtattctgagaaacgcaaataaaagggcaacatgtttctgtttc

SEQ ID NO: 4458 - protein, 58 aa, Homosapiens
MPRSVCFCVWKQVWDGSLPFWVGSCLIQVPGFWQLLCNPPWVLVGSGEGQVGERWGRV

SEQ ID NO: 4459 - DNA, 1437 bp, Homosapiens
gcttatccccaagctgccccagctccacggagtccggatttttggaatcaataagtactgagagtgcagccccttcccctgcccagggtggcaggggaggggtagggtaaaaggcatgtgctgcaacactgaagacagaaagaagaagcctctggacactgccagagatgggggttgagcctctggcctaatttcccccctcgcttcccccagtagccaacttggagtagcttgtagtggggttggggtaggccccctgggctctgaccttttctgaattttttgatcttttccttttgctttttgaatagagactccatggagttggtcatggaatgggctgggctcctgggctgaacatggaccacgcagttgcgacaggaggccaggggaaaaacccctgctcacttgtttgccctcaggcagccaaagcactttaacccctgcatagggagcagagggcggtacggcttctggattgtttcactgtgattcctaggttttttcgatgccacgcagtgtgtgcttttgtgtatggaagcaagtgtgggatgggtctttgcctttctgggtagggagctgtctaatccaagtcccaggcttttggcagcttctctgcaacccaccgtgggtcctggttgggagtggggagggtcaggttggggaaagatggggtagagtgtagatggcttggttccagaggtgagggggccagggctgctgccatcctggcctggtggaggttggggagctgtaggagagctagtgagtcgagacttagaagaatggggccacatagcagcagaggactggtgtaagggagggaggggtagggacagaagctagacccaatctcctttgggatgtgggcagggagggaagcaggcttggagggttaatttacccacagaatgtgatagtaataggggagggaggctgctgtgggtttaactcctgggttggctgttgggtagacaggtggggaaaaggcccgtgagtcattgtaagcacaggtccaacttggccctgactcctgcgggggtatggggaagctgtgacagaaacgatgggtgctgtggtcctctgcaggccctcaccccttaacttcctcatacagactggcactgggcagggcctctcatgtggcagccacatgtggcgttgtgaggccaccccatccttctcccctccccagttggactaggggcagtgttaattttgaaaaggtgtgggtccctgtgtcctcttccaggggtccaagggaacgggagaggtcactgggcctgttttctccctcctgaccctgcatctcccaccccgtgtatcatagggaactttcaccttaaaatctttctaagcaaagtgtgaataggatttttactccctttgtacagtattctgagaaacgcaaataaaagggcaacatgtttctgtttc

SEQ ID NO: 4460 - protein, 45 aa, Homosapiens; identical to SEQ ID NO: 4450

SEQ ID NO: 4461 - DNA, 3466 bp, Homosapiens
gtgctcctcttccagaagacaggaggtttgctgttgtgagggctgctctttcctgggggagggaatgggaagggctcacctggtggctgccctggtggtgctcagccttggcttgagtgtctggcatactggctgggcccggatatttgtatgtggagccaagagggtggggcgggaaggagggggaaagagctaccagcaaaaaagtggttaacacaacagagttgctgcaggctctggtttgaggcaggttatgaaaccacatcagggcccagcactaagcagccacctgccagctatggcagcagaagttttcggctcaactcctgtagacctagtcgacctctgccagcctcttctctctgtttctccccatctagggtaggggccagttggttgttttactaatggaagtgatatgtatccatagtcacacgaaagtctcaagagtgtttcctcattgccagtctttttgttagtttattgatctcttctttttcaggggtctctggtggtttcctgctctcagggcacctagtgtttaggcttcaggaagaagcttctgagggtgttggctaggacctaggtctaggcttttcctaggctcatcaagttttgttggctgccctgtgaaagccagaaaggcgtatggggtcctgtgatctgggattccccaaggcttttggcactcctggacaaatactaggaagggttagtggactttctataccagcacccctgtaggtgcgggttacagagaggtgatggggtggcagtttcaggtcagacttgggaagctctttccctctccttagtcagagttaagtccttcagagccctcacttgtcagccacatgccgccctcccctctcaggtggaggcttttgcgtagcagctgtcccaggggctgctagagtaactgaagccccaaggccctgggaagataaacaatctgagccagctctggctttctagatacttgaatttctgttaggctcaattatccagcctagtgggctgcgctgatgggtcccaggagcatctcttcaatcagaatgcgccccaggctggcgcacgggtgtttgcttgttgggatggcgtgttgtgggtcacattttctctgaggtctctaagcttggagctgtctgagaagaggaaacttgctcctgttatcctggaagtaaataactggcccctgaggactcagtctcctgtgcagggccctcagggatctggggacagccaaactctggataaggggcagatcattccaccccttccttctctacttccctctgctcactgtgggttgcggccacctcctggttcctcctgctgcaggactcctaccgttggtgctgggcaggggaaggcatggtgctaatatacacctggaaacaggtgctgagaggggagactgagtcctcctaagttggggtttggggagatccagaattgaaaaaatcagaggagaacagcagagaggggcagcaggatgaatgtgggcacagcgcacagcgaggtgaaccccaacacgcgggtgatgaacagccgtggcatctggctctcctacgtgctggccatcggtctcctccacatcgtgctgctgagcatcccgtttgtgagtgtccctgtcgtctggaccctcaccaacctcattcacaacatgggcatgtatatcttcctgcacacggtgaaggggacaccctttgagaccccggaccagggcaaggcgaggctgctaacccactgggagcagatggattatggggtccagttcacggcctctcggaagttcttgaccatcacacccatcgtgctgtacttcctcaccagcttctacactaagtacgaccagatccattttgtgctcaacaccgtgtccctgatgagcgtgcttatccccaagctgccccagctccacggagtccggatttttggaatcaataagtactgagagtgcagccccttcccctgcccagggtggcaggggaggggtagggtaaaaggcatgtgctgcaacactgaagacagaaagaagaagcctctggacactgccagagatgggggttgagcctctggcctaatttcccccctcgcttcccccagtagccaacttggagtagcttgtagtggggttggggtaggccccctgggctctgaccttttctgaattttttgatcttttccttttgctttttgaatagagactccatggagttggtcatggaatgggctgggctcctgggctgaacatggaccacgcagttgcgacaggaggccaggggaaaaacccctgctcacttgtttgccctcaggcagccaaagcactttaacccctgcatagggagcagagggcggtacggcttctggattgtttcactgtgattcctaggttttttcgatgccacgcagtgtgtgcttttgtgtatggaagcaagtgtgggatgggtctttgcctttctgggtagggagctgtctaatccaagtcccaggcttttggcagcttctctgcaacccaccgtgggtcctggttgggagtggggagggtcaggttggggaaagatggggtagagtgtagatggcttggttccagaggtgagggggccagggctgctgccatcctggcctggtggaggttggggagctgtaggagagctagtgagtcgagacttagaagaatggggccacatagcagcagaggactggtgtaagggagggaggggtagggacagaagctagacccaatctcctttgggatgtgggcagggagggaagcaggcttggagggttaatttacccacagaatgtgatagtaataggggagggaggctgctgtgggtttaactcctgggttggctgttgggtagacaggtggggaaaaggcccgtgagtcattgtaagcacaggtccaacttggccctgactcctgcgggggtatggggaagctgtgacagaaacgatgggtgctgtggtcctctgcaggccctcaccccttaacttcctcatacagactggcactgggcagggcctctcatgtggcagccacatgtggcgttgtgaggccaccccatgtggggtctgtggtgagagtcctgtaggatccctgctcaagcagcacagaggaaggggcaagacgtggcctgtaggcactgtctcagcctgcagagaagaaagtgaggccgggagcctgagcctgggctggagccttctcccctccccagttggactaggggcagtgttaattttgaaaaggtgtgggtccctgtgtcctcttccaggggtccaagggaacgggagaggtcactgggcctgttttctccctcctgaccctgcatctcccaccccgtgtatcatagggaactttcaccttaaaatctttctaagcaaagtgtgaataggatttttactccctttgtacagtattctgagaaacgcaaataaaagggcaacatgtttctgtttc

SEQ ID NO: 4462 - protein, 153 aa, Homosapiens; identical to SEQ ID NO: 678

SEQ ID NO: 4463 - DNA, 2112 bp, Homosapiens
tgattcggccggagctgccagcggggaggctgcagccgcgggttgttacagctgctggagcagcagcggcccccgctcccgggaaccgttcccgggccgttgatcttcggccccacacgaacagcagagaggggcagcaggatgaatgtgggcacagcgcacagcgaggtgaaccccaacacgcgggtgatgaacagccgtggcatctggctctcctacgtgctggccatcggtctcctccacatcgtgctgctgagcatcccgtttgtgagtgtccctgtcgtctggaccctcaccaacctcattcacaacatgggcatgtatatcttcctgcacacggtgaaggggacaccctttgagaccccggaccagggcaaggcgaggctgctaacccactgggagcagatggattatggggtccagttcacggcctctcggaagttcttgaccatcacacccatcgtgctgtacttcctcaccagcttctacactaagtacgaccagatccattttgtgctcaacaccgtgtccctgatgagcgtgcttatccccaagctgccccagctccacggagtccggatttttggaatcaataagtactgagagtgcagccccttcccctgcccagggtggcaggggaggggtagggtaaaaggcatgtgctgcaacactgaagacagaaagaagaagcctctggacactgccagagatgggggttgagcctctggcctaatttcccccctcgcttcccccagtagccaacttggagtagcttgtagtggggttggggtaggccccctgggctctgaccttttctgaattttttgatcttttccttttgctttttgaatagagactccatggagttggtcatggaatgggctgggctcctgggctgaacatggaccacgcagttgcgacaggaggccaggggaaaaacccctgctcacttgtttgccctcaggcagccaaagcactttaacccctgcatagggagcagagggcggtacggcttctggattgtttcactgtgattcctaggttttttcgatgccacgcagtgtgtgcttttgtgtatggaagcaagtgtgggatgggtctttgcctttctgggtagggagctgtctaatccaagtcccaggcttttggcagcttctctgcaacccaccgtgggtcctggttgggagtggggagggtcaggttggggaaagatggggtagagtgtagatggcttggttccagaggtgagggggccagggctgctgccatcctggcctggtggaggttggggagctgtaggagagctagtgagtcgagacttagaagaatggggccacatagcagcagaggactggtgtaagggagggaggggtagggacagaagctagacccaatctcctttgggatgtgggcagggagggaagcaggcttggagggttaatttacccacagaatgtgatagtaataggggagggaggctgctgtgggtttaactcctgggttggctgttgggtagacaggtggggaaaaggcccgtgagtcattgtaagcacaggtccaacttggccctgactcctgcgggggtatggggaagctgtgacagaaacgatgggtgctgtggtcctctgcaggccctcaccccttaacttcctcatacagactggcactgggcagggcctctcatgtggcagccacatgtggcgttgtgaggccaccccatgtggggtctgtggtgagagtcctgtaggatccctgctcaagcagcacagaggaaggggcaagacgtggcctgtaggcactgtctcagcctgcagagaagaaagtgaggccgggagcctgagcctgggctggagccttctcccctccccagttggactaggggcagtgttaattttgaaaaggtgtgggtccctgtgtcctcttccaggggtccaagggaacgggagaggtcactgggcctgttttctccctcctgaccctgcatctcccaccccgtgtatcatagggaactttcaccttaaaatctttctaagcaaagtgtgaataggatttttactccctttgtacagtattctgagaaacgcaaataaaagggcaacatgtttctgtttc

SEQ ID NO: 4464 - protein, 153 aa, Homosapiens; identical to SEQ ID NO: 678

SEQ ID NO: 4465 - DNA, 409 bp, Homosapiens
gattagacagctccctacccagaaaggcaaagacccatcccacacttgcttccatacacaaaagcacacactgcgtggcatcgaaaaaacctaggaatcacagtgaaacaatccagaagccgtaccgccctctgctccctatgcaggggttaaagtgctttggctgcctgagggcaaacaagtgagcaggggtttttcccctggcctcctgtcgcaactgcgtggtccatgttcagcccaggagcccagcccattccatgaccaaccccatctctggcagtgtccagaggcttcttctttctgtcttcagtgttgcagcacatgccttttaccctacccctcccctgccaccctgggcaggggaaggggctgcactctcagtacttattgattccaaaaatccggactc

SEQ ID NO: 4466 - protein, 49 aa, Homosapiens
MTNPISGSVQRLLLSVFSVAAHAFYPTPPLPPWAGEGAALSVLIDSKNP

SEQ ID NO: 4467 - DNA, 2230 bp, Homosapiens
gtgctcctcttccagaagacaggaggtttgctgttgtgagggctgctctttcctgggggagggaatgggaagggctcacctggtggctgccctggtggtgctcagccttggcttgagtgtctggcatactggctgggcccggatatttgtatgtggagccaagagggtggggcgggaaggagggggaaagagctaccagcaaaaaagtggttaacacaacagagttgctgcaggctctggtttgaggcaggttatgaaaccacatcagggcccagcactaagcagccacctgccagctatggcagcagaagttttcggctcaactcctgtagacctagtcgacctctgccagcctcttctctctgtttctccccatctagggtaggggccagttggttgttttactaatggaagtgatatgtatccatagtcacacgaaagtctcaagagtgtttcctcattgccagtctttttgttagtttattgatctcttctttttcaggggtctctggtggtttcctgctctcagggcacctagtgtttaggcttcaggaagaagcttctgagggtgttggctaggacctaggtctaggcttttcctaggctcatcaagttttgttggctgccctgtgaaagccagaaaggcgtatggggtcctgtgatctgggattccccaaggcttttggcactcctggacaaatactaggaagggttagtggactttctataccagcacccctgtaggtgcgggttacagagaggtgatggggtggcagtttcaggtcagacttgggaagctctttccctctccttagtcagagttaagtccttcagagccctcacttgtcagccacatgccgccctcccctctcaggtggaggcttttgcgtagcagctgtcccaggggctgctagagtaactgaagccccaaggccctgggaagataaacaatctgagccagctctggctttctagatacttgaatttctgttaggctcaattatccagcctagtgggctgcgctgatgggtcccaggagcatctcttcaatcagaatgcgccccaggctggcgcacgggtgtttgcttgttgggatggcgtgttgtgggtcacattttctctgaggtctctaagcttggagctgtctgagaagaggaaacttgctcctgttatcctggaagtaaataactggcccctgaggactcagtctcctgtgcagggccctcagggatctggggacagccaaactctggataaggggcagatcattccaccccttccttctctacttccctctgctcactgtgggttgcggccacctcctggttcctcctgctgcaggactcctaccgttggtgctgggcaggggaaggcatggtgctaatatacacctggaaacaggtgctgagaggggagactgagtcctcctaagttggggtttggggagatccagaattgaaaaaatcagaggagaacagcagagaggggcagcaggatgaatgtgggcacagcgcacagcgaggtgaaccccaacacgcgggtgatgaacagccgtggcatctggctctcctacgtgctggccatcggtctcctccacatcgtgctgctgagcatcccgtttgtgagtgtccctgtcgtctggaccctcaccaacctcattcacaacatgggcatgtatatcttcctgcacacggtgaaggggacaccctttgagaccccggaccagggcaaggcgaggctgctaacccactgggagcagatggattatggggtccagttcacggcctctcggaagttcttgaccatcacacccatcgtgctgtacttcctcaccagcttctacactaagtacgaccagatccattttgtgctcaacaccgtgtccctgatgagcgtgcttatccccaagctgccccagctccacggagtccggatttttggaatcaataagtactgagagtgcagccccttcccctgcccagggtggcaggggaggggtagggtaaaaggcatgtgctgcaacactgaagacagaaagaagaagcctctggacactgccagagatgggggttgagcctctggcctaatttcccccctcgcttcccccagtagccaacttggagtagcttgtagtggggttggggtaggccccctgggctctgaccttttctgaattttttgatcttttccttttgctttttgaatagagactccatggagttggtcatgg

SEQ ID NO: 4468 - protein, 153 aa, Homosapiens; identical to SEQ ID NO: 678

SEQ ID NO: 4469 - DNA, 876 bp, Homosapiens
tgattcggccggagctgccagcggggaggctgcagccgcgggttgttacagctgctggagcagcagcggcccccgctcccgggaaccgttcccgggccgttgatcttcggccccacacgaacagcagagaggggcagcaggatgaatgtgggcacagcgcacagcgaggtgaaccccaacacgcgggtgatgaacagccgtggcatctggctctcctacgtgctggccatcggtctcctccacatcgtgctgctgagcatcccgtttgtgagtgtccctgtcgtctggaccctcaccaacctcattcacaacatgggcatgtatatcttcctgcacacggtgaaggggacaccctttgagaccccggaccagggcaaggcgaggctgctaacccactgggagcagatggattatggggtccagttcacggcctctcggaagttcttgaccatcacacccatcgtgctgtacttcctcaccagcttctacactaagtacgaccagatccattttgtgctcaacaccgtgtccctgatgagcgtgcttatccccaagctgccccagctccacggagtccggatttttggaatcaataagtactgagagtgcagccccttcccctgcccagggtggcaggggaggggtagggtaaaaggcatgtgctgcaacactgaagacagaaagaagaagcctctggacactgccagagatgggggttgagcctctggcctaatttcccccctcgcttcccccagtagccaacttggagtagcttgtagtggggttggggtaggccccctgggctctgaccttttctgaattttttgatcttttccttttgctttttgaatagagactccatggagttggtcatgg

SEQ ID NO: 4470 - protein, 153 aa, Homosapiens; identical to SEQ ID NO: 678

SEQ ID NO: 4471 - DNA, 693 bp, Homosapiens
aaacctccccagcattaaggcaagaaaggtgtctctgttttttccgaagtgtgcctgcttgactcctttgatttttctctgggattcttcatcctccatcaagttgatcgatccctctggatcttgagtgaattctcaataaatgttaactgaactatgtaacggaactgttaccagaaaggggtcccgatccagacaccaagagagggttcttggatctcacgcaagaaagaattcaggggaacaacaatagcagaggcctttgttgccctctccgcgaaactgcccagtaacctggcattagacgggtccctggctgacctgataaagaagctccctgtacaaacatcaattaatgcaggcagcacatcaaagcattgtggagacatgtctgtgcctccctccagaccatcaattctcaactcaggctgctcgttagacatacctgaggagctttcgaaagaaaccagtgcctagaccccatgcacagagattttaatgtaattggtccagatgaagccccagcataactaatctgtaaaagctccccaagtgatttgaatgtgcagggtgttttgagaaccctgccatagacccagcaccttaagaaccctgtctatgtccccttcaactagcacataaggctcacaggaaatcctcactgaatgaataaacaaataaatggatggcaga

SEQ ID NO: 4472 - protein, 36 aa, Homosapiens
MLTELCNGTVTRKGSRSRHQERVLGSHARKNSGEQQ

SEQ ID NO: 4473 - DNA, 918 bp, Homosapiens
atggctcaggtatccgacacctgggcccagagtcacatgccaggaaacccaacactcttgggtcccagcccccaacttccagcagctacgagcaaacagggcttctggaggaggaagcgggtctccagagcccagcagcagggagcctacgtccagggacagggcatctgcactggagaaggctctgccaccaacaggggcacagggggtactgtgcccagcccccaggtgcctccccggggctgttatgtggcaaaggaagcaggtgaacggacgttccgctgcagccaggcaggcctcagtgctgtgccctccggcatccccaatgacacccgcaagctctacctggatgccaaccagctggcatcggtgcctgctggtgccttccagcacctgcctgtcctggaggagttggatctgtcccataatgcccttgcccacctctcaggggcggctttccagggcctggagggcacattgcgccacctcgacctctctgccaaccagctggcctcagtgcccgtggaggcctttgtggggctacagatccaagtgaacctatccgcaaacccatggcactgtgactgcgccctccaggaagtgctccggcaggtgaggctggtgccgggcactgggacaggcatcgtgtgtggctcaggagcccgaccggacctcgtggggcaggagttcctgctgctggcaggggaggaagagctgtgtgggtcggggtggggtggggcccggaggagcaccgatgtggccctgctggtcaccatggggggctggctgacactcatggtggcttatctggtgcattatgtgtggcagaaccgagatgagaccaggcgctccctcaagcgggccccagtgctgcccgtgcgttccgaggactcctccatcctcagcacagtggtctga

SEQ ID NO: 4474 - protein, 305 aa, Homosapiens
MAQVSDTWAQSHMPGNPTLLGPSPQLPAATSKQGFWRRKRVSRAQQQGAYVQGQGICTGEGSATNRGTGGTVPSPQVPPRGCYVAKEAGERTFRCSQAGLSAVPSGIPNDTRKLYLDANQLASVPAGAFQHLPVLEELDLSHNALAHLSGAAFQGLEGTLRHLDLSANQLASVPVEAFVGLQIQVNLSANPWHCDCALQEVLRQVRLVPGTGTGIVCGSGARPDLVGQEFLLLAGEEELCGSGWGGARRSTDVALLVTMGGWLTLMVAYLVHYVWQNRDETRRSLKRAPVLPVRSEDSSILSTVV

SEQ ID NO: 4475 - DNA, 2164 bp, Homosapiens
ataaagcagcctgtcctggcaagggatggtcatcctctcaacctacagacccagtgagccctaggccctcaccccagacccagctgctggataggacccagccccgctcccagagacaatgaccatgtttgaaaatgtcacccgggccctggccagacagctaaaccctcgaggggacctgacaccacttgacagcctcatcgacttcaagcgcttccatcccttctgcctggtgctgaggaagaggaagagcacgctcttctggggggcccggtacgtccgcaccgactacacgctgctggatgtgcttgagcccggcagctcaccttcagacccaacagacactgggaattttggctttaagaatatgctggacacccgagtggagggagatgtggatgtaccaaagacggtgaaggtgaagggaacggcagggctctcgcagaacagcactctggaggtccagacactcagtgtggctcccaaggccctggagaccgtgcaggagaggaagctggcagcagaccacccattcctgaaggagatgcaagatcaaggggagaacctgtatgtggtgatggaggtggtggagacggtgcaggaggtcacactggagcgagccggcaaggcagaggcctgcttctccctccccttcttcgccccattggggctacagggatccataaatcacaaggaggctgtaaccatccccaagggctgcgtcctggcctttcgagtgagacagctgatggtcaaaggcaaagatgagtgggatattccacatatctgcaatgataacatgcaaaccttccctcctggagaaaagtcaggagaggagaaggtcatccttatccaggcatctgatgttggggacgtacacgaaggcttcaggacactaaaagaagaagttcagagagagacccaacaagtggagaagctgagccgagtagggcaaagctccctgctcagctccctcagcaaacttctagggaagaaaaaggagctacaagaccttgagctcgcacttgaaggggctctagacaagggacatgaagtgaccctggaggcactcccaaaagatgtcctgctatcaaaggaggccgtgggcgccatcctctatttcgttggagccctaacagagctaagtgaagcccaacagaagctgctggtgaaatccatggagaaaaagatcctacccgtgcagctaaagctggtggagagcacgatggaacagaacttcctgctggataaagagggtgttttccccctgcaacctgagctgctctcctcccttggggacgaggagctgaccctcacggaggctctagtcgggctgagtggcctggaagtgcagagatcgggcccccaatatatgtgggacccagacaccctccctcgcctctgtgctctttatgcaggcctctctctccttcagcagcttaccaaggcctcctaatttgccttttacgtctgcttcatgactccctaatgccttcccaacctcgtggtgctgtgtccttaccacctaagggcatttcagagccatcagctgaagacatctgaaatctcagctggtcacccatgataaccaacttccacctgcccaaccatatatcaccccctacccctccagctccgcaacccactaagcccatctgctgatgcttaaattttctttacttttcttttctttttttttttttttttgagatggaggctcactctgtcacccaggctggagtgcagtggcttgatcttggctcactgcaacctccgcctcccaggttcaagcaattctcctgcctcagcctctcgagcagctggaattacaggcacgtgccacgacacccagctaatttttgtatttttagtagagacggggtttcaccatgttgcccaggttggtctcgaactcctggcctcaagtgatctgcccgcctcggcctcccaaagtgctgggattacaggcgtgagccaccgtgcccggcctgtgcttaaatattctaggagtagaagcactcagacttttaaaactatgagccgtttcagcaaaactgagaaaaaaagaagattaattaatttcctatcctaatccctcctacttatacttccccaaaaaacaagctttactggaattaatggaaaatattatgtcaatcttagg

SEQ ID NO: 4476 - protein, 445 aa, Homosapiens
MTMFENVTRALARQLNPRGDLTPLDSLIDFKRFHPFCLVLRKRKSTLFWGARYVRTDYTLLDVLEPGSSPSDPTDTGNFGFKNMLDTRVEGDVDVPKTVKVKGTAGLSQNSTLEVQTLSVAPKALETVQERKLAADHPFLKEMQDQGENLYVVMEVVETVQEVTLERAGKAEACFSLPFFAPLGLQGSINHKEAVTIPKGCVLAFRVRQLMVKGKDEWDIPHICNDNMQTFPPGEKSGEEKVILIQASDVGDVHEGFRTLKEEVQRETQQVEKLSRVGQSSLLSSLSKLLGKKKELQDLELALEGALDKGHEVTLEALPKDVLLSKEAVGAILYFVGALTELSEAQQKLLVKSMEKKILPVQLKLVESTMEQNFLLDKEGVFPLQPELLSSLGDEELTLTEALVGLSGLEVQRSGPQYMWDPDTLPRLCALYAGLSLLQQLTKAS

SEQ ID NO: 4477 - DNA, 2316 bp, Homosapiens
gaggaacataaaagcatcacacttaagcgctcgaaagaaagccccacgaacccataaaggctcctccccgctccttcctcgaagctcctccttcatcctgcacctcggctgtggatttatttcccctttgttgactcggccatcggcctgccgggcctggcgtttcccagaaggcccagcgccgggaaggggtttgcagctgctccgtcatcgtgcggcccgacgctatctcgcgctcgtgtgcaggcccggctcggctcctggtccccggtgcgagggttaacgcgaggccccggcctcggtccccggactaggccgtgaccccgggtgccatgaagcaggagggctcggcgcggcgccgcggcgcggacaaggcgaaaccgccgcccggcggaggagaacaagaacccccaccgccgccggccccccaggatgtggagatgaaagaggaggcagcgacgggtggcgggtcgacgggggaggcagacggcaagacggcggcggcagcggctgagcactcccagcgagagctggacacagtcaccttggaggacatcaaggagcacgtgaaacagctagagaaagcggtttcaggcaaggagccgagattcgtgctgcgggccctgcggatgctgccttccacatcacgccgcctcaaccactatgttctgtataaggctgtgcagggcttcttcacttcaaataatgccactcgagactttttgctccccttcctggaagagcccatggacacagaggctgatttacagttccgtccccgcacgggaaaagctgcgtcgacacccctcctgcctgaagtggaagcctatctccaactcctcgtggtcatcttcatgatgaacagcaagcgctacaaagaggcacagaagatctctgatgatctgatgcagaagatcagtactcagaaccgccgggccctagaccttgtagccgcaaagtgttactattatcacgcccgggtctatgagttcctggacaagctggatgtggtgcgcagcttcttgcatgctcggctccggacagctacgcttcggcatgacgcagacgggcaggccaccctgttgaacctcctgctgcggaattacctacactacagcttgtacgaccaggctgagaagctggtgtccaagtctgtgttcccagagcaggccaacaacaatgagtgggccaggtacctctactacacagggcgaatcaaagccatccagctggagtactcagaggcccggagaacgatgaccaacgcccttcgcaaggcccctcagcacacagctgtcggcttcaaacagacggtgcacaagcttctcatcgtggtggagctgttgctgggggagatccctgaccggctgcagttccgccagccctccctcaagcgctcactcatgccctatttccttctgactcaagctgtcaggacaggaaacctagccaagttcaaccaggtcctggatcagtttggggagaagtttcaagcagatgggacctacaccctaattatccggctgcggcacaacgtgattaagacaggtgtacgcatgatcagcctctcctattcccgaatctccttggctgacatcgcccagaagctgcagttggatagccccgaagatgcagagttcattgttgccaaggccatccgggatggtgtcattgaggccagcatcaaccacgagaagggctatgtccaatccaaggagatgattgacatctattccacccgagagccccagctagccttccaccagcgcatctccttctgcctagatatccacaacatgtctgtcaaggccatgaggtttcctcccaaatcgtacaacaaggacttggagtctgcagaggaacggcgtgagcgagaacagcaggacttggagtttgccaaggagatggcagaagatgatgatgacagcttcccttgagctggggggctggggaggggtagggggaatggggacaggctctttcccccttgggggtcccctgcccagggcactgtccccattttcccacacacagctcatatgctgcattcgtgcagggggtgggggtgctgggagccagccaccctgacctcccccagggctcctccccagccggtgacttactgtacagcaggcaggagggtgggcaggcaacctccccgggcagggtcctggccagcagtgtgggagcaggaggggaaggatagttctgtgtactcctttagggagtgggggactagaactgggatgtcttggcttgtatgttttttgaagcttcgattatgatttttaaacaataaaaagttctccacagtgc

SEQ ID NO: 4478 - protein, 534 aa, Homosapiens; identical to SEQ ID NO: 682

SEQ ID NO: 4479 - DNA, 625 bp, Homosapiens
ctcagcctcccaaagtcctgggattacaggcgtgagccaccgctccaggccaggtatttcttattattagagtatttcaaagactctgtttctccatctctgaagctgatagggaggtgttacctgtcttgcttgcttcacagggttggtaagattaaaagaagtccctgtattgaggcacttagcgaagtctaaattgtaaaaaagatggcgctggtatctagctccacaaaagggtgagcccttatcctcagttaagcactgagtttggcgctgttactatttgcttgccatgtttttttctggtctcctccgaggaaactaggatattgctgccttgcttaaaatctggctaagccctactccacgtgacatgcaaggccctttgtgacctggtcccttaggtcaagcctcccctcccactcctgccccaccacccagcagcaggagggtgggcaggcaacctccccgggcagggtcctggccagcagtgtgggagcaggaggggaaggatagttctgtgtactcctttagggagtgggggactagaactgggatgtcttggcttgtatgttttttgaagcttcgattatgatttttaaacaataaaaagttctccacagtg

SEQ ID NO: 4480 - protein, 64 aa, Homosapiens
LSLPKSWDYRREPPLQARYFLLLEYFKDSVSPSLKLIGRCYLSCLLHRVGKIKRSPCIEALSEV

SEQ ID NO: 4481 - DNA, 2888 bp, Homosapiens
ccgttactctgctggcactgccaccgcaaggtcccacagacttggcggcttaaacaaccgaaattgatttcatcacaattctggaggctctaagtccaacagcaaagtgtgacacgattggtttcttctgagggcctctctcgtctgcttgtcgatggccgtctcctggtgttttcacatggtcttccctctgtgcgtgtctgtgtcctgcttttgtcttagaaggacaatagtcatgtaggattagggtccacccatatgacctcactttaccataattacctctttaaaggccctgtgtccaaatagagtcccattctgaggtactggggtttaggtctctaacatgaacttgagggggatgcagtttagcccataacactaactctgacccctctcacgagcatcaggcctgcagatccagctccccctcccactccccatgtctctctctacagcgtgtcccaaagagatccctcctggcccccttaccattccttcctcctgctttcccgatccagatcagggccttgggatcatctctgactctcccccatcctccttcccatcacttggtcgtctgttgaattgtctgcacatcttctgtgtttgcctgttccttcatattgccagtgccatggtttgagccactaacattcccagacacttctgcctggtcatcttcctctccagcagcccagcttacattcacttgccttactaagcagagctccagctctgtccttcccttgcctgggaagcttccattgctccccactgctgtagggtatcataacggtcttgtgaggtagacaggctaggtattgttattgttatttggtagttttagagatgaggaactaaggacccagttgctcagtgtttcctagctagtgaatagagactagacaccaagtgttctacgtgcagactttatactgctcagcctggcacacaaaatggcaatggcatagtccccagactgcggtcccaactgtctctttcctaacagctccccaggcacccacacttttctgcctctttttcaatctgtacccttgaccctcctcctttttctgctttgtcagactccttaaggcacttcataaattaaccatttccagggatttcccctcacacatgagttattccagtggacagggcagcctcatgggtgcctgtggagggtgaagggtctgcctggccgtaggtgtgatcacacactcccgttgtaacccctgtctcctgtgacacttgctgccccacgatttagctgctttgtgttccgtgcctcctgtttgctggtgaactcctgagttggggggcgtcattccctccactgtagttcttccgcgatgctgactccacccacggtcagcaccactcggaaatacttcacagtcctgtagaggaagacaggtccaggtttccagttacccttctatgtctggatactctgctcattcactgaagccaggccccttcctgcacttatgcctctacccagataatgagttctacccactgatgacctcctctcctctagtaacagtccgcctccctaatgagcatctctggctgacacacgttccgttctccaggcctgtgagccctggtccctcgctgttgctgagccacagcacccgcccttctggcctcactttagagcactgtcatttcagagcagactacgcgcggggtggccaggtgaaatgcagctgacggctctgcgaccaaatgtgaccaaagggccacattcccagcacccggctccaaaggcagagcttggattctatgcccagcacaggttttcagggcttcctcctctctctgggcctaaacagtgatccctttccctgtttcccactacatctggcagaatttaggccacatttcattttcttcttccgcccatggggctccctgcccactgtgttcccctgtcactctgtccaggtgcacaagcttctcatcgtggtggagctgttgctgggggagatccctgaccggctgcagttccgccagccctccctcaagcgctcactcatgccctatttccttctgactcaagctgtcaggacaggaaacctagccaagttcaaccaggtcctggatcagtttggggagaagtttcaagcagatgggacctacaccctaattatccggctgcggcacaacgtgattaagacaggtgtacgcatgatcagcctctcctattcccgaatctccttggctgacatcgcccagaagctgcagttggatagccccgaagatgcagagttcattgttgccaaggtggggctggttcaggaaccacagtgaccaggttgtcactttcctgccaatctcaggaggcaggagtgggaggagtttggccaaggaggggaataggtaaagcaatggcatagtcatttcagggcgtgcccgtcatttgcagtgaagccaagaagttgccagagagagcatggatgtgcatgtgagtgtgtgagtgtaggtgtgtgcacatgttgagtttatgatagtgcctgtgagtgtgagaatataaggagggcagaggaatgggatggaacaagatgttctctgacttagaagatgggcgtgctgggccaggcgcagtggctcatgcctgtaatcccagcactttgggaggctgacatgggcagatcacctgaggtcaggagtttgagacaagcctggccaacttggcgaaaccccatctctactgaaaatacaaaaattagccaggcctggtggcaggttcctgtaatcccagctacttgggaggctgaggcaggagaatcgcttgaacccgggaggtaaaggttgcagtgagctgagatcgcaccaccgcactctcctgcctgggtgacagagcgagactccatctc

SEQ ID NO: 4482 - protein, 175 aa, Homosapiens
MPSTGFQGFLLSLGLNSDPFPCFPLHLAEFRPHFIFFFRPWGSLPTVFPCHSVQVHKLLIVVELLLGEIPDRLQFRQPSLKRSLMPYFLLTQAVRTGNLAKFNQVLDQFGEKFQADGTYTLIIRLRHNVIKTGVRMISLSYSRISLADIAQKLQLDSPEDAEFIVAKVGLVQEPQ

SEQ ID NO: 4483 - DNA, 1545 bp, Homosapiens
ccagcgcatctccttctgcctagatatccacaacatgtctgtcaaggtgagaagcccgtggctgcagagtcacgcctggcagcagcacacccctccctccacactcatggattcctcagagaagactggcttaatttgtggcccacgtcccagccaatctctgtaaaatcactgagctgcagcacagggggcccagaatggggaggggacttggccatagttccatagccagttgccctctcctattgcgtttaagggatgatgtggtcaccagggaggaccaggcagggattcagagggcggggttctacatttggttccaaatttgaggcatttaacttctcaaagctctgtttctccatctctgaagctgatagggaggtgttacctgtcttgcttgcttcacagggttggtaagattaaaagaagtccctgtattgaggcacttagcgaagtctaaattgtaaaaaagatggcgctggtatctagctccacaaaagggtgagcccttatcctcagttaagcactgagtttggcgctgttactatttgcttgccatgtttttttctggtctcctccgaggaaactaggatattgctgccttgcttaaaatctggctaagccctactccacgtgacatgcaaggccctttgtgacctggtcccttaggtcaagcctcccctcccactcctgccccaccacccagcagccagcccactgggtgcaggccaggcccctcccacatggaatcctccaccgggaaggcctctccccgttgccacatccactgtgttcctccttttcctcctccctgcccagtcaagagagttggtcgtttattcctcttttttcagcatttcccacagggcactgtaataattcctttgatgcctagccccccactagactaactggagaggggcccgccgcttcctgcctggtgtctagctcacagaggggacgcagggagtgcaggttgcgtgagtgcctcacctgcttccttccctcgctcatctcctctctttgctgtgccccaggccatgaggtttcctcccaaatcgtacaacaaggacttggagtctgcagaggaacggcgtgagcgagaacagcaggacttggagtttgccaaggagatggcagaagatgatgatgacagcttcccttgagctggggggctggggaggggtagggggaatggggacaggctctttcccccttgggggtcccctgcccagggcactgtccccattttcccacacacagctcatatgctgcattcgtgcagggggtgggggtgctgggagccagccaccctgacctcccccagggctcctccccagccggtgacttactgtacagcaggcaggagggtgggcaggcaacctccccgggcagggtcctggccagcagtgtgggagcaggaggggaaggatagttctgtgtactcctttagggagtgggggactagaactgggatgtcttggcttgtatgttttttgaagcttcgattatgatttttaaacaataaaaagttctccacagtgc

SEQ ID NO: 4484 - protein, 41 aa, Homosapiens
MRFPPKSYNKDLESAEERREREQQDLEFAKEMAEDDDDSFP

SEQ ID NO: 4485 - DNA, 705 bp, Homosapiens
cccaagggctttggaactgcgggattgggacacgtgacttccctggtcattcaccttgaagtggacacgggctggggtgagagaggggaaactgccccatcttctcatcttagaaccatgcagcgttaatgctggaagggaccttggagtcgattccaaccccgtgaactgggccagggaaggaagtgccttgcccaaggtcatgagagggcatttcatcatgttgcccaggctgatctcaaactcctgggcttgtgtccgaaactggtgagtgcttggtctcactgacttcaagaaggaagccgcggaccctcgcagtgagtgttacagctcttaaggtggtgcatctggagtttgttccttctgatgttcagatgtgttcgcagtttcttccttctggtgggttcgtggtctcgctggctgaggagtgaagctgcagaccttcgcggtgagtgttatagctcttaaggcagcgcggccggagttgttcattcctcccggtgggctcgtggtcttagtggcttcaggagtgaagctgcagaccttcgtggtgagtgttacagctcataaaagcagtgtggacccaaaaagcgagcagtagcaagatttatcgcaaacagcaaaagaacaaagctgccatattgtggatggggacctgtgcccgttgccactgctggctcgggcagcctgcttttattctcttat

SEQ ID NO: 4486 - protein, 33 aa, Homosapiens
MFRCVRSFFLLVGSWSRWLRSEAADLRGECYSS

SEQ ID NO: 4487 - DNA, 1474 bp, Homosapiens
agtcgtggccccaggtaatttcctcccaggcctccatggggttatgtataaaggcccccctagagctgggccccaaaacagcccggagcctgcagcccagccccacccagacccatggctggacctgccacccagagccccatgaagctgatggccctgcagctgctgctgtggcacagtgcactctggacagtgcaggaagccacccccctgggccctgccagctccctgccccagagcttcctgctcaagtgcttagagcaagtgaggaagatccagggcgatggcgcagcgctccaggagaagctggcaggctgcttgagccaactccatagcggccttttcctctaccaggggctcctgcaggccctggaagggatctcccccgagttgggtcccaccttggacacactgcagctggacgtcgccgactttgccaccaccatctggcagcagatggaagaactgggaatggcccctgccctgcagcccacccagggtgccatgccggccttcgcctctgctttccagcgccgggcaggaggggtcctggttgcctcccatctgcagagcttcctggaggtgtcgtaccgcgttctacgccaccttgcccagccctgagccaagccctccccatcccatgtatttatctctatttaatatttatgtctatttaagcctcatatttaaagacagggaagagcagaacggagccccaggcctctgtgtccttccctgcatttctgagtttcattctcctgcctgtagcagtgagaaaaagctcctgtcctcccatcccctggactgggaggtagataggtaaataccaagtatttattactatgactgctccccagccctggctctgcaatgggcactgggatgagccgctgtgagcccctggtcctgagggtccccacctgggacccttgagagtatcaggtctcccacgtgggagacaagaaatccctgtttaatatttaaacagcagtgttccccatctgggtccttgcacccctcactctggcctcagccgactgcacagcggcccctgcatccccttggctgtgaggcccctggacaagcagaggtggccagagctgggaggcatggccctggggtcccacgaatttgctggggaatctcgtttttcttcttaagacttttgggacatggtttgactcccgaacatcaccgacgcgtctcctgtttttctgggtggcctcgggacacctgccctgcccccacgagggtcaggactgtgactctttttagggccaggcaggtgcctggacatttgccttgctggacggggactggggatgtgggagggagcagacaggaggaatcatgtcaggcctgtgtgtgaaaggaagctccactgtcaccctccacctcttcaccccccactcaccagtgtcccctccactgtcacattgtaactgaacttcaggataataaagtgtttgcctcc

SEQ ID NO: 4488 - protein, 168 aa, Homosapiens
MAGPATQSPMKLMALQLLLWHSALWTVQEATPLGPASSLPQSFLLKCLEQVRKIQGDGAALQEKLAGCLSQLHSGLFLYQGLLQALEGISPELGPTLDTLQLDVADFATTIWQQMEELGMAPALQPTQGAMPAFASAFQRRAGGVLVASHLQSFLEVSYRVLRHLAQP

SEQ ID NO: 4489 - DNA, 1523 bp, Homosapiens
tagagctgggccccaaaacagcccggagcctgcagcccagccccacccagacccatggctggacctgccacccagagccccatgaagctgatggccctgcagctgctgctgtggcacagtgcactctggacagtgcaggaagccacccccctgggccctgccagctccctgccccagagcttcctgctcaagtgcttagagcaagtgaggaagatccagggcgatggcgcagcgctccaggagaagctgtgtgccacctacaagctgtgccaccccgaggagctggtgctgctcggacactctctgggcatcccctgggctcccctgagcagctgccccagccaggccctgcagctggcaggctgcttgagccaactccatagcggccttttcctctaccaggggctcctgcaggccctggaagggatctcccccgagttgggtcccaccttggacacactgcagctggacgtcgccgactttgccaccaccatctggcagcagatggaagaactgggaatggcccctgccctgcagcccacccagggtgccatgccggccttcgcctctgctttccagcgccgggcaggaggggtcctggttgcctcccatctgcagagcttcctggaggtgtcgtaccgcgttctacgccaccttgcccagccctgagccaagccctccccatcccatgtatttatctctatttaatatttatgtctatttaagcctcatatttaaagacagggaagagcagaacggagccccaggcctctgtgtccttccctgcatttctgagtttcattctcctgcctgtagcagtgagaaaaagctcctgtcctcccatcccctggactgggaggtagataggtaaataccaagtatttattactatgactgctccccagccctggctctgcaatgggcactgggatgagccgctgtgagcccctggtcctgagggtccccacctgggacccttgagagtatcaggtctcccacgtgggagacaagaaatccctgtttaatatttaaacagcagtgttccccatctgggtccttgcacccctcactctggcctcagccgactgcacagcggcccctgcatccccttggctgtgaggcccctggacaagcagaggtggccagagctgggaggcatggccctggggtcccacgaatttgctggggaatctcgtttttcttcttaagacttttgggacatggtttgactcccgaacatcaccgacgcgtctcctgtttttctgggtggcctcgggacacctgccctgcccccacgagggtcaggactgtgactctttttagggccaggcaggtgcctggacatttgccttgctggacggggactggggatgtgggagggagcagacaggaggaatcatgtcaggcctgtgtgtgaaaggaagctccactgtcaccctccacctcttcaccccccactcaccagtgtcccctccactgtcacattgtaactgaacttcaggataataaagtgtttgcctcca

SEQ ID NO: 4490 - protein, 204 aa, Homosapiens; identical to SEQ ID NO: 686

SEQ ID NO: 4491 - DNA, 1684 bp, Homosapiens
aaaacagcccggagcctgcagcccagccccacccagacccatggctggacctgccacccagagccccatgaagctgatgggtgagtgtcttggcccaggatgggagagccgcctgccctggcatgggagggaggctggtgtgacagaggggctggggatccccgttctgggaatggggattaaaggcacccagtgtccccgagagggcctcaggtggtagggaacagcatgtctcctgagcccgctctgtccccagccctgcagctgctgctgtggcacagtgcactctggacagtgcaggaagccacccccctgggccctgccagctccctgccccagagcttcctgctcaagtgcttagagcaagtgaggaagatccagggcgatggcgcagcgctccaggagaagctgtgtgccacctacaagctgtgccaccccgaggagctggtgctgctcggacactctctgggcatcccctgggctcccctgagcagctgccccagccaggccctgcagctggcaggctgcttgagccaactccatagcggccttttcctctaccaggggctcctgcaggccctggaagggatctcccccgagttgggtcccaccttggacacactgcagctggacgtcgccgactttgccaccaccatctggcagcagatggaagaactgggaatggcccctgccctgcagcccacccagggtgccatgccggccttcgcctctgctttccagcgccgggcaggaggggtcctggttgcctcccatctgcagagcttcctggaggtgtcgtaccgcgttctacgccaccttgcccagccctgagccaagccctccccatcccatgtatttatctctatttaatatttatgtctatttaagcctcatatttaaagacagggaagagcagaacggagccccaggcctctgtgtccttccctgcatttctgagtttcattctcctgcctgtagcagtgagaaaaagctcctgtcctcccatcccctggactgggaggtagataggtaaataccaagtatttattactatgactgctccccagccctggctctgcaatgggcactgggatgagccgctgtgagcccctggtcctgagggtccccacctgggacccttgagagtatcaggtctcccacgtgggagacaagaaatccctgtttaatatttaaacagcagtgttccccatctgggtccttgcacccctcactctggcctcagccgactgcacagcggcccctgcatccccttggctgtgaggcccctggacaagcagaggtggccagagctgggaggcatggccctggggtcccacgaatttgctggggaatctcgtttttcttcttaagacttttgggacatggtttgactcccgaacatcaccgacgcgtctcctgtttttctgggtggcctcgggacacctgccctgcccccacgagggtcaggactgtgactctttttagggccaggcaggtgcctggacatttgccttgctggacggggactggggatgtgggagggagcagacaggaggaatcatgtcaggcctgtgtgtgaaaggaagctccactgtcaccctccacctcttcaccccccactcaccagtgtcccctccactgtcacattgtaactgaacttcaggataataaagtgtttgcctcc

SEQ ID NO: 4492 - protein, 200 aa, Homosapiens; identical to SEQ ID NO: 688

SEQ ID NO: 4493 - DNA, 1816 bp, Homosapiens
agcctgcagcccagccccacccagacccatggctggacctgccacccagagccccatgaagctgatgggtgagtgtcttggcccaggatgggagagccgcctgccctggcatgggagggaggctggtgtgacagaggggctggggatccccgttctgggaatggggattaaaggcacccagtgtccccgagagggcctcaggtggtagggaacagcatgtctcctgagcccgctctgtccccagccctgcagctgctgctgtggcacagtgcactctggacagtgcaggaagccacccccctgggccctgccagctccctgccccagagcttcctgctcaagtgcttagagcaagtgaggaagatccagggcgatggcgcagcgctccaggagaagctgtgtgccacctacaagctgtgccaccccgaggagctggtgctgctcggacactctctgggcatcccctgggctcccctgagcagctgccccagccaggccctgcagctggtgagtgtcaggaaaggataaggctaatgaggagggggaaggagaggaggaacacccatgggctcccccatgtctccaggttccaagctgggggcctgacgtatctcaggcagcaccccctaactcttccgctctgtctcacaggcaggctgcttgagccaactccatagcggccttttcctctaccaggggctcctgcaggccctggaagggatctcccccgagttgggtcccaccttggacacactgcagctggacgtcgccgactttgccaccaccatctggcagcagatggaagaactgggaatggcccctgccctgcagcccacccagggtgccatgccggccttcgcctctgctttccagcgccgggcaggaggggtcctggttgcctcccatctgcagagcttcctggaggtgtcgtaccgcgttctacgccaccttgcccagccctgagccaagccctccccatcccatgtatttatctctatttaatatttatgtctatttaagcctcatatttaaagacagggaagagcagaacggagccccaggcctctgtgtccttccctgcatttctgagtttcattctcctgcctgtagcagtgagaaaaagctcctgtcctcccatcccctggactgggaggtagataggtaaataccaagtatttattactatgactgctccccagccctggctctgcaatgggcactgggatgagccgctgtgagcccctggtcctgagggtccccacctgggacccttgagagtatcaggtctcccacgtgggagacaagaaatccctgtttaatatttaaacagcagtgttccccatctgggtccttgcacccctcactctggcctcagccgactgcacagcggcccctgcatccccttggctgtgaggcccctggacaagcagaggtggccagagctgggaggcatggccctggggtcccacgaatttgctggggaatctcgtttttcttcttaagacttttgggacatggtttgactcccgaacatcaccgacgcgtctcctgtttttctgggtggcctcgggacacctgccctgcccccacgagggtcaggactgtgactctttttagggccaggcaggtgcctggacatttgccttgctggacggggactggggatgtgggagggagcagacaggaggaatcatgtcaggcctgtgtgtgaaaggaagctccactgtcaccctccacctcttcaccccccactcaccagtgtcccctccactgtcacattgtaactgaacttcaggataataaagtgtttgcctcc

SEQ ID NO: 4494 - protein, 103 aa, Homosapiens
MSPEPALSPALQLLLWHSALWTVQEATPLGPASSLPQSFLLKCLEQVRKIQGDGAALQEKLCATYKLCHPEELVLLGHSLGIPWAPLSSCPSQALQLVSVRKG

SEQ ID NO: 4495 - DNA, 1544 bp, Homosapiens
ccagacccatggctggacctgccacccagagccccatgaagctgatgggtgagtgtcttggcccaggatgggagagccgcctgccctggcatgggagggaggctggtgtgacagaggggctggggatccccgttctgggaatggggattaaaggcacccagtgtccccgagagggcctcaggtggtagggaacagcatgtctcctgagcccgctctgtccccagccctgcagctgctgctgtggcacagtgcactctggacagtgcaggaagccacccccctgggccctgccagctccctgccccagagcttcctgctcaagtgcttagagcaagtgaggaagatccagggcgatggcgcagcgctccaggagaagctggcaggctgcttgagccaactccatagcggccttttcctctaccaggggctcctgcaggccctggaagggatctcccccgagttgggtcccaccttggacacactgcagctggacgtcgccgactttgccaccaccatctggcagcagatggaagaactgggaatggcccctgccctgcagcccacccagggtgccatgccggccttcgcctctgctttccagcgccgggcaggaggggtcctggttgcctcccatctgcagagcttcctggaggtgtcgtaccgcgttctacgccaccttgcccagccctgagccaagccctccccatcccatgtatttatctctatttaatatttatgtctatttaagcctcatatttaaagacagggaagagcagaacggagccccaggcctctgtgtccttccctgcatttctgagtttcattctcctgcctgtagcagtgagaaaaagctcctgtcctcccatcccctggactgggaggtagataggtaaataccaagtatttattactatgactgctccccagccctggctctgcaatgggcactgggatgagccgctgtgagcccctggtcctgagggtccccacctgggacccttgagagtatcaggtctcccacgtgggagacaagaaatccctgtttaatatttaaacagcagtgttccccatctgggtccttgcacccctcactctggcctcagccgactgcacagcggcccctgcatccccttggctgtgaggcccctggacaagcagaggtggccagagctgggaggcatggccctggggtcccacgaatttgctggggaatctcgtttttcttcttaagacttttgggacatggtttgactcccgaacatcaccgacgcgtctcctgtttttctgggtggcctcgggacacctgccctgcccccacgagggtcaggactgtgactctttttagggccaggcaggtgcctggacatttgccttgctggacggggactggggatgtgggagggagcagacaggaggaatcatgtcaggcctgtgtgtgaaaggaagctccactgtcaccctccacctcttcaccccccactcaccagtgtcccctccactgtcacattgtaactgaacttcaggataataaagtgtttgcctcc

SEQ ID NO: 4496 - protein, 164 aa, Homosapiens
MSPEPALSPALQLLLWHSALWTVQEATPLGPASSLPQSFLLKCLEQVRKIQGDGAALQEKLAGCLSQLHSGLFLYQGLLQALEGISPELGPTLDTLQLDVADFATTIWQQMEELGMAPALQPTQGAMPAFASAFQRRAGGVLVASHLQSFLEVSYRVLRHLAQP

SEQ ID NO: 4497 - DNA, 1374 bp, Homosapiens
gaccttggtggggacagtgctcgggagggctggctgggatgggagtggaggagcggcgacccggccatggcgagtctcactcagcatccttccatccccagtgtgccacctacaagctgtgccaccccgaggagctggtgctgctcggacactctctgggcatcccctgggctcccctgagcagctgccccagccaggccctgcagctggcaggctgcttgagccaactccatagcggccttttcctctaccaggggctcctgcaggccctggaagggatctcccccgagttgggtcccaccttggacacactgcagctggacgtcgccgactttgccaccaccatctggcagcagatggaagaactgggaatggcccctgccctgcagcccacccagggtgccatgccggccttcgcctctgctttccagcgccgggcaggaggggtcctggttgcctcccatctgcagagcttcctggaggtgtcgtaccgcgttctacgccaccttgcccagccctgagccaagccctccccatcccatgtatttatctctatttaatatttatgtctatttaagcctcatatttaaagacagggaagagcagaacggagccccaggcctctgtgtccttccctgcatttctgagtttcattctcctgcctgtagcagtgagaaaaagctcctgtcctcccatcccctggactgggaggtagataggtaaataccaagtatttattactatgactgctccccagccctggctctgcaatgggcactgggatgagccgctgtgagcccctggtcctgagggtccccacctgggacccttgagagtatcaggtctcccacgtgggagacaagaaatccctgtttaatatttaaacagcagtgttccccatctgggtccttgcacccctcactctggcctcagccgactgcacagcggcccctgcatccccttggctgtgaggcccctggacaagcagaggtggccagagctgggaggcatggccctggggtcccacgaatttgctggggaatctcgtttttcttcttaagacttttgggacatggtttgactcccgaacatcaccgacgcgtctcctgtttttctgggtggcctcgggacacctgccctgcccccacgagggtcaggactgtgactctttttagggccaggcaggtgcctggacatttgccttgctggacggggactggggatgtgggagggagcagacaggaggaatcatgtcaggcctgtgtgtgaaaggaagctccactgtcaccctccacctcttcaccccccactcaccagtgtcccctccactgtcacattgtaactgaacttcaggataataaagtgtttgcctcc

SEQ ID NO: 4498 - protein, 160 aa, Homosapiens
MGVEERRPGHGESHSASFHPQCATYKLCHPEELVLLGHSLGIPWAPLSSCPSQALQLAGCLSQLHSGLFLYQGLLQALEGISPELGPTLDTLQLDVADFATTIWQQMEELGMAPALQPTQGAMPAFASAFQRRAGGVLVASHLQSFLEVSYRVLRHLAQP

SEQ ID NO: 4499 - DNA, 1113 bp, Homosapiens
ctgtttccagagatttctcctgagcctgaacttttctctgaagccttttaggaactaggggaccaactatacacttgatcagaagaaagatgctaggtttgccagctacaagtgctgtgacctttagctagcgactgagccagcccccgtctgggtctcctcatctgtaaatggggtgttgtgaggagtaagcagcttaggaagtaccaagatcggcccctggccctgtgtgctcaccacatagatgaggtctcgctagttgccaaggctggtctcaaactcctggactcaagcgatcctcctgcctcggcctcccaaaatgctgggattacagcagaccgatccatgagcagctccctctcagcctctcagctccacacggtcaacatgcgggaccctctgaaccgagtcctggccaacctgttcctgctcatctcctccatcctggggtctcgcaccgctggcccccacacccagttcgtgcagtggttcatggaggagtgtgtggactgcctggagcagggtggccgtggcagcgtcctgcagttcatgcccttcaccaccgtgtcggaactggtgaaggtgtcagccatgtccagccccaaggtggttctggccatcacggacctcagcctgcccctgggccgccaggtggctgctaaagccattgctgcactctgaggggcttggcatggccgcagtgggggctggggactggcgcagccccaggcgcctccaagggaagcagtgaggaaagatgaggcatcgtgcctcacatccgctccacatggtgcaagagcctctagcggcttccagttccccgctcctgactcctgacctccaggatgtctcccggtttcttctttcaaaatttcctctccatctgctggcacctgaggagagtgagcagcctggaccacaagcccagtggtcacccctgtgtgcgcccgccccagcccaggagtagtcttacctctgaggaactttctagatgcaaagtgtgtatgtgtgtgtgtgtgtgtgtgtgtgtgtgtttgtgtgtattttgtaatatgtgagggaaatctaccttcgttcatgtataaataaagctcctcgtggctccctttgtga

SEQ ID NO: 4500 - protein, 111 aa, Homosapiens [sequence omitted]

SEQ ID NO: 4501 - DNA, 4130 bp, Homosapiens
ggaaattgggaggtatagttacagggctggagaaggtggaggaaatgagggagcaaatctggacttggaatggtggtggccaagggacgcttttagagctaagggcgtaattaggcaaccaggactgccttaactccttgatgccctgtttaatctattagtccctttgatacttctttattcatttatttgagagacggagttttgctcttgttgcccaggctggagtgcaatggtgcgatctcggctcaccccaacaacctccgcctcccgggttcaagcgattctactgcctcagcctcccgagtagctgggattacaggcatgcaccaccaagcccggctaattttgtatttttagtggagacgaggtttctccatgttggtcaggctagtctcgaactcctgacctccggtgattcgcccgcctctgcctcccgaagtgctgggattacaggtgcgagccactgcgctcggccgatactttcttagtgccccagtttaaggaagggcggttcaggaggagagagtctgacaggatcttactttatccctttagctctttttctttcaaattcctctgtctcgcttaaatcttcccgcatcttctcctttctatttaattctgccttccccggttctccttagaacctcatgtccttttctttagctccatttctttcacctcaaagctggccgccaccgctgccacctgctcagagtgaaataatgaaggtggtcaacctgaagcaagccattttgcaagcctggaaggagcgctggagtgactaccaatgggcaatcaacatgaagaaattctttcctaaaggagccacctgggatattctcaacctggcagatgcgttactagagcaggccatgattggaccatcccccaatcctctcatcttgtcctacctgaagtatgccattagttcccagatggtgtcctactcttctgtcctcacagccatcagtaagtttgatgacttttctcgggacctgtgtgtccaggcattgctggacatcatggacatgttttgtgaccgtctgagctgtcacggcaaagcagaggaatgcatcggactgtgccgagcccttcttagcgccctccactggctgctgcgctgcacggcagcctctgcagagcggctgcgggaggggctggaggccggcactccagccgctggggagaagcagcttgccatgtgccttcagcgcctggagaaaaccctcagcagcaccaagaaccgggccctgctgcacatcgccaaactagaggaggcctcttcttggactgccatcgagcattctctcttgaaacttggagagatcctggccaatctcagcaacccgcagctccggagtcaggccgagcagtgtggcaccctcattaggagcatccccacgatgctgtctgtgcatgcggagcagatgcacaagaccggcttccccactgtccacgccgtgatcctgctcgagggcaccatgaacctgacaggcgagacgcagtccctggtggagcagctgacgatggtgaagcgcatgcagcatatccccaccccactttttgtcctggagatctggaaagcttgcttcgtggggctcattgagtctcccgagggtacggaggagctcaagtggacagctttcactttcctcaagattccacaggttttggtgaagttgaagaagtactctcatggagacaaggacttcactgaggatgtcaactgtgcttttgagttcctgctgaagctcacccccttgttggacaaagctgaccagcgctgcaactgtgactgtacaaacttcctgctccaagaatgtggcaagcaggggcttctgtctgaggccagcgtcaacaaccttatggctaagcgcaaagcggaccgagagcacgcaccccagcagaaatcgggagagaatgccaacatccagcccaacatccagctgatcctccgggcggagcccactgtcacaaacatcctcaagacgatggatgcagaccactctaagtcaccggagggactgctgggagtcctgggccacatgctgtccgggaagagtctggacttgctgctggctgccgccgccgccactggaaagctgaaatccttcgcccggaaattcatcaatttgaatgaattcacaacctatggcagcgaagaaagcaccaaaccggcctccgtccgggccctgctgtttgacatctccttcctcatgctgtgccatgtggcccagacctatggttcagaggtgattctgtccgagtcgcgcacaggagctgaggtgcccttcttcgagacctggatgcagacctgcatgcctgaggagggcaagatcctgaaccctgaccacccctgcttccgccccgactccaccaaagtggagtccctggtggccctgctcaacaactcctcggagatgaagctagtgcagatgaagtggcatgaggcctgtctcagcatctcagccgccatcttggaaatcctcaatgcctgggagaatggggtcctggccttcgagtccatccagaaaatcactgataacatcaaagggaaggtatgcagtctggcggtgtgtgctgtggcttggcttgtggcccacgtccggatgctggggctggatgagcgtgagaagtcgctgcagatgatccgccagctggcagggccactgtttagtgagaacaccctgcagttctacaatgagagggtggtgatcatgaactcgatcctggagcgcatgtgtgccgacgtgctgcagcagacagccacgcagatcaagtttccctccaccggggtggacacaatgccctactggaacctgctgccccccaagcggcccatcaaagaggtgctgacggacatttttgccaaggtgctggagaagggctgggtggacagccgctccatccacatctttgacaccctgctgcacatgggcggcgtctactggttctgcaacaacctgattaaggagctgctgaaggagacgcggaaggagcacacgctgcgggcagtggagctgctctactccatcttctgcctggacatgcagcaagtgaccctggtcctgctgggccacatcctacctggcctgctcactgactcctccaagtggcacagcctcatggaccccccgggcactgctcttgccaagctggccgtgtggtgtgccctcagttcctactcctcccacaagggacaggcgtccacccgccagaagaagagacaccgcgaagacattgaggattatatcagcctcttccccctggacgatgtgcagccttcgaagttgatgcgactgctgagctctaatgaggacgatgccaacatcctttcgagccccacagaccgatccatgagcagctccctctcagcctctcagctccacacggtcaacatgcgggaccctctgaaccgagtcctggccaacctgttcctgctcatctcctccatcctggggtctcgcaccgctggcccccacacccagttcgtgcagtggttcatggaggagtgtgtggactgcctggagcagggtggccgtggcagcgtcctgcagttcatgcccttcaccaccgtgtcggaactggtgaaggtgtcagccatgtccagccccaaggtggttctggccatcacggacctcagcctgcccctgggccgccaggtggctgctaaagccattgctgcactctgaggggcttggcatggccgcagtgggggctggggactggcgcagccccaggcgcctccaagggaagcagtgaggaaagatgaggcatcgtgcctcacatccgctccacatggtgcaagagcctctagcggcttccagttccccgctcctgactcctgacctccaggatgtctcccggtttcttctttcaaaatttcctctccatctgctggcacctgaggagagtgagcagcctggaccacaagcccagtggtcacccctgtgtgcgcccgccccagcccaggagtagtcttacctctgaggaactttctagatgcaaagtgtgtatgtgtgtgtgtgtgtgtgtgtgtgtgtgtttgtgtgtattttgtaatatgtgagggaaatctaccttcgttcatgtataaataaagctcctcgtggctccctttgtga

SEQ ID NO: 4502 - protein, 1014 aa, Homosapiens
MSFSLAPFLSPQSWPPPLPPAQSEIMKVVNLKQAILQAWKERWSDYQWAINMKKFFPKGATWDILNLADALLEQAMIGPSPNPLILSYLKYAISSQMVSYSSVLTAISKFDDFSRDLCVQALLDIMDMFCDRLSCHGKAEECIGLCRALLSALHWLLRCTAASAERLREGLEAGTPAAGEKQLAMCLQRLEKTLSSTKNRALLHIAKLEEASSWTAIEHSLLKLGEILANLSNPQLRSQAEQCGTLIRSIPTMLSVHAEQMHKTGFPTVHAVILLEGTMNLTGETQSLVEQLTMVKRMQHIPTPLFVLEIWKACFVGLIESPEGTEELKWTAFTFLKIPQVLVKLKKYSHGDKDFTEDVNCAFEFLLKLTPLLDKADQRCNCDCTNFLLQECGKQGLLSEASVNNLMAKRKADREHAPQQKSGENANIQPNIQLILRAEPTVTNILKTMDADHSKSPEGLLGVLGHMLSGKSLDLLLAAAAATGKLKSFARKFINLNEFTTYGSEESTKPASVRALLFDISFLMLCHVAQTYGSEVILSESRTGAEVPFFETWMQTCMPEEGKILNPDHPCFRPDSTKVESLVALLNNSSEMKLVQMKWHEACLSISAAILEILNAWENGVLAFESIQKITDNIKGKVCSLAVCAVAWLVAHVRMLGLDEREKSLQMIRQLAGPLFSENTLQFYNERVVIMNSILERMCADVLQQTATQIKFPSTGVDTMPYWNLLPPKRPIKEVLTDIFAKVLEKGWVDSRSIHIFDTLLHMGGVYWFCNNLIKELLKETRKEHTLRAVELLYSIFCLDMQQVTLVLLGHILPGLLTDSSKWHSLMDPPGTALAKLAVWCALSSYSSHKGQASTRQKKRHREDIEDYISLFPLDDVQPSKLMRLLSSNEDDANILSSPTDRSMSSSLSASQLHTVNMRDPLNRVLANLFLLISSILGSRTAGPHTQFVQWFMEECVDCLEQGGRGSVLQFMPFTTVSELVKVSAMSSPKVVLAITDLSLPLGRQVAAKAIAAL

SEQ ID NO: 4503 - DNA, 3470 bp, Homosapiens
gacaagtgccaaaatggcgatgcctaccacctagaactggattgtgcgctccatttctttcacctcaaagctggccgccaccgctgccacctgctcagagtgaaataatgaaggtggtcaacctgaagcaagccattttgcaagcctggaaggagcgctggagtgactaccaatgggcaatcaacatgaagaaattctttcctaaaggagccacctgggatattctcaacctggcagatgcgttactagagcaggccatgattggaccatcccccaatcctctcatcttgtcctacctgaagtatgccattagttcccagtttgatgacttttctcgggacctgtgtgtccaggcattgctggacatcatggacatgttttgtgaccgtctgagctgtcacggcaaagcagaggaatgcatcggactgtgccgagcccttcttagcgccctccactggctgctgcgctgcacggcagcctctgcagagcggctgcgggaggggctggaggccggcactccagccgctggggagaagcagcttgccatgtgccttcagcgcctggagaaaaccctcagcagcaccaagaaccgggccctgctgcacatcgccaaactagaggaggcctcttcttggactgccatcgagcattctctcttgaaacttggagagatcctggccaatctcagcaacccgcagctccggagtcaggccgagcagtgtggcaccctcattaggagcatccccacgatgctgtctgtgcatgcggagcagatgcacaagaccggcttccccactgtccacgccgtgatcctgctcgagggcaccatgaacctgacaggcgagacgcagtccctggtggagcagctgacgatggtgaagcgcatgcagcatatccccaccccactttttgtcctggagatctggaaagcttgcttcgtggggctcattgagtctcccgagggtacggaggagctcaagtggacagctttcactttcctcaagattccacaggttttggtgaagttgaagaagtactctcatggagacaaggacttcactgaggatgtcaactgtgcttttgagttcctgctgaagctcacccccttgttggacaaagctgaccagcgctgcaactgtgactgtacaaacttcctgctccaagaatgtggcaagcaggggcttctgtctgaggccagcgtcaacaaccttatggctaagcgcaaagcggaccgagagcacgcaccccagcagaaatcgggagagaatgccaacatccagcccaacatccagctgatcctccgggcggagcccactgtcacaaacatcctcaagacgatggatgcagaccactctaagtcaccggagggactgctgggagtcctgggccacatgctgtccgggaagagtctggacttgctgctggctgccgccgccgccactggaaagctgaaatccttcgcccggaaattcatcaatttgaatgaattcacaacctatggcagcgaagaaagcaccaaaccggcctccgtccgggccctgctgtttgacatctccttcctcatgctgtgccatgtggcccagacctatggttcagaggtgattctgtccgagtcgcgcacaggagctgaggtgcccttcttcgagacctggatgcagacctgcatgcctgaggagggcaagatcctgaaccctgaccacccctgcttccgccccgactccaccaaagtggagtccctggtggccctgctcaacaactcctcggagatgaagctagtgcagatgaagtggcatgaggcctgtctcagcatctcagccgccatcttggaaatcctcaatgcctgggagaatggggtcctggccttcgagtccatccagaaaatcactgataacatcaaagggaaggtatgcagtctggcggtgtgtgctgtggcttggcttgtggcccacgtccggatgctggggctggatgagcgtgagaagtcgctgcagatgatccgccagctggcagggccactgtttagtgagaacaccctgcagttctacaatgagagggtggtgatcatgaactcgatcctggagcgcatgtgtgccgacgtgctgcagcagacagccacgcagatcaagtttccctccaccggggtggacacaatgccctactggaacctgctgccccccaagcggcccatcaaagaggtgctgacggacatttttgccaaggtgctggagaagggctgggtggacagccgctccatccacatctttgacaccctgctgcacatgggcggcgtctactggttctgcaacaacctgattaaggagctgctgaaggagacgcggaaggagcacacgctgcgggcagtggagctgctctactccatcttctgcctggacatgcagcaagtgaccctggtcctgctgggccacatcctacctggcctgctcactgactcctccaagtggcacagcctcatggaccccccgggcactgctcttgccaagctggccgtgtggtgtgccctcagttcctactcctcccacaagggacaggcgtccacccgccagaagaagagacaccgcgaagacattgaggattatatcagcctcttccccctggacgatgtgcagccttcgaagttgatgcgactgctgagctctaatgaggacgatgccaacatcctttcgagccccacagaccgatccatgagcagctccctctcagcctctcagctccacacggtcaacatgcgggaccctctgaaccgagtcctggccaacctgttcctgctcatctcctccatcctggggtctcgcaccgctggcccccacacccagttcgtgcagtggttcatggaggagtgtgtggactgcctggagcagggtggccgtggcagcgtcctgcagttcatgcccttcaccaccgtgtcggaactggtgaaggtgtcagccatgtccagccccaaggtggttctggccatcacggacctcagcctgcccctgggccgccaggtggctgctaaagccattgctgcactctgaggggcttggcatggccgcagtgggggctggggactggcgcagccccaggcgcctccaagggaagcagtgaggaaagatgaggcatcgtgcctcacatccgctccacatggtgcaagagcctctagcggcttccagttccccgctcctgactcctgacctccaggatgtctcccggtttcttctttcaaaatttcctctccatctgctggcacctgaggagagtgagcagcctggaccacaagcccagtggtcacccctgtgtgcgcccgccccagcccaggagtagtcttacctctgaggaactttctagatgcaaagtgtgtatgtgtgtgtgtgtgtgtgtgtgtgtgtgtttgtgtgtattttgtaatatgtgagggaaatctaccttcgttcatgtataaataaagctcctcgtggctccctttgtga

SEQ ID NO: 4504 - protein, 976 aa, Homosapiens
MKVVNLKQAILQAWKERWSDYQWAINMKKFFPKGATWDILNLADALLEQAMIGPSPNPLILSYLKYAISSQFDDFSRDLCVQALLDIMDMFCDRLSCHGKAEECIGLCRALLSALHWLLRCTAASAERLREGLEAGTPAAGEKQLAMCLQRLEKTLSSTKNRALLHIAKLEEASSWTAIEHSLLKLGEILANLSNPQLRSQAEQCGTLIRSIPTMLSVHAEQMHKTGFPTVHAVILLEGTMNLTGETQSLVEQLTMVKRMQHIPTPLFVLEIWKACFVGLIESPEGTEELKWTAFTFLKIPQVLVKLKKYSHGDKDFTEDVNCAFEFLLKLTPLLDKADQRCNCDCTNFLLQECGKQGLLSEASVNNLMAKRKADREHAPQQKSGENANIQPNIQLILRAEPTVTNILKTMDADHSKSPEGLLGVLGHMLSGKSLDLLLAAAAATGKLKSFARKFINLNEFTTYGSEESTKPASVRALLFDISFLMLCHVAQTYGSEVILSESRTGAEVPFFETWMQTCMPEEGKILNPDHPCFRPDSTKVESLVALLNNSSEMKLVQMKWHEACLSISAAILEILNAWENGVLAFESIQKITDNIKGKVCSLAVCAVAWLVAHVRMLGLDEREKSLQMIRQLAGPLFSENTLQFYNERVVIMNSILERMCADVLQQTATQIKFPSTGVDTMPYWNLLPPKRPIKEVLTDIFAKVLEKGWVDSRSIHIFDTLLHMGGVYWFCNNLIKELLKETRKEHTLRAVELLYSIFCLDMQQVTLVLLGHILPGLLTDSSKWHSLMDPPGTALAKLAVWCALSSYSSHKGQASTRQKKRHREDIEDYISLFPLDDVQPSKLMRLLSSNEDDANILSSPTDRSMSSSLSASQLHTVNMRDPLNRVLANLFLLISSILGSRTAGPHTQFVQWFMEECVDCLEQGGRGSVLQFMPFTTVSELVKVSAMSSPKVVLAITDLSLPLGRQVAAKAIAAL

SEQ ID NO: 4505 - DNA, 3532 bp, Homosapiens
agccaatagaaagtgagcttcttgacaagtgccaaaatggcgatgcctaccacctagaactggattgtgcgctccatttctttcacctcaaagctggccgccaccgctgccacctgctcagagtgaaataatgaaggtggtcaacctgaagcaagccattttgcaagcctggaaggagcgctggagtgactaccaatgggcaatcaacatgaagaaattctttcctaaaggagccacctgggatattctcaacctggcagatgcgttactagagcaggccatgattggaccatcccccaatcctctcatcttgtcctacctgaagtatgccattagttcccagatggtgtcctactcttctgtcctcacagccatcagtaagtttgatgacttttctcgggacctgtgtgtccaggcattgctggacatcatggacatgttttgtgaccgtctgagctgtcacggcaaagcagaggaatgcatcggactgtgccgagcccttcttagcgccctccactggctgctgcgctgcacggcagcctctgcagagcggctgcgggaggggctggaggccggcactccagccgctggggagaagcagcttgccatgtgccttcagcgcctggagaaaaccctcagcagcaccaagaaccgggccctgctgcacatcgccaaactagaggaggcctcttcttggactgccatcgagcattctctcttgaaacttggagagatcctggccaatctcagcaacccgcagctccggagtcaggccgagcagtgtggcaccctcattaggagcatccccacgatgctgtctgtgcatgcggagcagatgcacaagaccggcttccccactgtccacgccgtgatcctgctcgagggcaccatgaacctgacaggcgagacgcagtccctggtggagcagctgacgatggtgaagcgcatgcagcatatccccaccccactttttgtcctggagatctggaaagcttgcttcgtggggctcattgagtctcccgagggtacggaggagctcaagtggacagctttcactttcctcaagattccacaggttttggtgaagttgaagaagtactctcatggagacaaggacttcactgaggatgtcaactgtgcttttgagttcctgctgaagctcacccccttgttggacaaagctgaccagcgctgcaactgtgactgtacaaacttcctgctccaagaatgtggcaagcaggggcttctgtctgaggccagcgtcaacaaccttatggctaagcgcaaagcggaccgagagcacgcaccccagcagaaatcgggagagaatgccaacatccagcccaacatccagctgatcctccgggcggagcccactgtcacaaacatcctcaagacgatggatgcagaccactctaagtcaccggagggactgctgggagtcctgggccacatgctgtccgggaagagtctggacttgctgctggctgccgccgccgccactggaaagctgaaatccttcgcccggaaattcatcaatttgaatgaattcacaacctatggcagcgaagaaagcaccaaaccggcctccgtccgggccctgctgtttgacatctccttcctcatgctgtgccatgtggcccagacctatggttcagaggtgattctgtccgagtcgcgcacaggagctgaggtgcccttcttcgagacctggatgcagacctgcatgcctgaggagggcaagatcctgaaccctgaccacccctgcttccgccccgactccaccaaagtggagtccctggtggccctgctcaacaactcctcggagatgaagctagtgcagatgaagtggcatgaggcctgtctcagcatctcagccgccatcttggaaatcctcaatgcctgggagaatggggtcctggccttcgagtccatccagaaaatcactgataacatcaaagggaaggtatgcagtctggcggtgtgtgctgtggcttggcttgtggcccacgtccggatgctggggctggatgagcgtgagaagtcgctgcagatgatccgccagctggcagggccactgtttagtgagaacaccctgcagttctacaatgagagggtggtgatcatgaactcgatcctggagcgcatgtgtgccgacgtgctgcagcagacagccacgcagatcaagtttccctccaccggggtggacacaatgccctactggaacctgctgccccccaagcggcccatcaaagaggtgctgacggacatttttgccaaggtgctggagaagggctgggtggacagccgctccatccacatctttgacaccctgctgcacatgggcggcgtctactggttctgcaacaacctgattaaggagctgctgaaggagacgcggaaggagcacacgctgcgggcagtggagctgctctactccatcttctgcctggacatgcagcaagtgaccctggtcctgctgggccacatcctacctggcctgctcactgactcctccaagtggcacagcctcatggaccccccgggcactgctcttgccaagctggccgtgtggtgtgccctcagttcctactcctcccacaagggacaggcgtccacccgccagaagaagagacaccgcgaagacattgaggattatatcagcctcttccccctggacgatgtgcagccttcgaagttgatgcgactgctgagctctaatgaggacgatgccaacatcctttcgagccccacagaccgatccatgagcagctccctctcagcctctcagctccacacggtcaacatgcgggaccctctgaaccgagtcctggccaacctgttcctgctcatctcctccatcctggggtctcgcaccgctggcccccacacccagttcgtgcagtggttcatggaggagtgtgtggactgcctggagcagggtggccgtggcagcgtcctgcagttcatgcccttcaccaccgtgtcggaactggtgaaggtgtcagccatgtccagccccaaggtggttctggccatcacggacctcagcctgcccctgggccgccaggtggctgctaaagccattgctgcactctgaggggcttggcatggccgcagtgggggctggggactggcgcagccccaggcgcctccaagggaagcagtgaggaaagatgaggcatcgtgcctcacatccgctccacatggtgcaagagcctctagcggcttccagttccccgctcctgactcctgacctccaggatgtctcccggtttcttctttcaaaatttcctctccatctgctggcacctgaggagagtgagcagcctggaccacaagcccagtggtcacccctgtgtgcgcccgccccagcccaggagtagtcttacctctgaggaactttctagatgcaaagtgtgtatgtgtgtgtgtgtgtgtgtgtgtgtgtgtttgtgtgtattttgtaatatgtgagggaaatctaccttcgttcatgtataaataaagctcctcgtggctccctttgtga

SEQ ID NO: 4506 - protein, 989 aa, Homosapiens; identical to SEQ ID NO: 690

SEQ ID NO: 4507 - DNA, 593 bp, Homosapiens
tatggaggtggggcatggcctgtaaaatctacagacaggttcctagctcctagacagtcacacagctttgttcttttgggagctagttgtctagaacttgagtctctgcgggcagaccctgtttagggtctgcatttctgacaacacagcaggtgctggcatataaacgcttctgccacagagacacagtacatgtttgctgagtcagatgagtgaatgcatgaataggaaagtgagtgagtgatcaagtagcgtgtttgcgaaggtcagaaaagagaggggtgcttgttattggatgtgctgacttctcacaacacacttgaagggtctgagaagggaaggcaggttaccgacctctcattgtagaactgcagggtgttctcactaaacagtggccctgccagctggcggatcatctgcagcgacttctcacgctcatccagccccagcatccggacgtgggccacaagccaagccacagcacacaccgccagactgcataccttccctttgatgttatcagtgattttctaggggagacggaaaggtgatgggctaccatctatctccctttcttgagccaacatcacctt

SEQ ID NO: 4508 - protein, 41 aa, Homosapiens
YGGGAWPVKSTDRFLAPRQSHSFVLLGASCLELESLRADPV

SEQ ID NO: 4509 - DNA, 633 bp, Homosapiens
gacaagtgccaaaatggcgatgcctaccacctagaactggattgtgcgctccatttctttcacctcaaagctggccgccaccgctgccacctgctcagagtgaaataatgaaggtggtcaacctgaagcaagccattttgcaagcctggaaggagcgctggagtgactaccaatgggcaatcaacatgaagaaattctttcctaaaggagccacctgggatattctcaacctggcagatgcgttactagagcaggccatgattggaccatcccccaatcctctcatcttgtcctacctgaagtatgccattagttcccaggtaagcttcccgcaaacccccaccaagaagtgagagttctgggggtaaaaaacttggagtgcatttgggccccggtggttcatggctgtaatcccagcattgtgggaggctgaggcaggcggattgcttgagcccaggagttcaagaccagcctgcgtaacatggcaaaacccagtctctacccaaaaatacaaagagttacccctgcgtggtggtgcccctgtagtcccagctacttggaaggctgaggtgggaggatcacctgagccctgggaggtcgagactgcaatgagccatgatcctgccactgccc

SEQ ID NO: 4510 - protein, 81 aa, Homosapiens
MKVVNLKQAILQAWKERWSDYQWAINMKKFFPKGATWDILNLADALLEQAMIGPSPNPLILSYLKYAISSQVSFPQTPTKK

SEQ ID NO: 4511 - DNA, 5020 bp, Homosapiens
gggggcgggcggcggcgaggcggcctgcagggagcagccgcgagccggccgggcgcgccgagcccgagccccagccggagcggggcgggggagggaggagccagagcggccgccgcctctgccggaggagccgcggggccgccacactcgccccccgccccccccgcgctcactcgcactcacacccgggcgcaggaggcgggcggcccgggccccaccggccccccatggacgcccccagcacggggcgctgagacccccgcgtcgctgcccagcccggtccggcgcgccacgccgagggatctctggacaggacaagactccgaagctactcccccagcacacagcccgggacccacaaacccagcttgcccccagccctcccacctgccactccctggcccctcccaccgcccgccccccttggggcgcagggcatggtgtgaaaggccaagtgctgaggcgggtatcatgggtgctgtgccctagggcctgggtggcagggggtgggtggcctgtgggtgtgccgggggggccagtgtgcccaccccagtctcttggcgtgctggagggcatcctggatggaattgaagtgaatggaacagaagccaagcaaggtggagtgtgggtcagacccagaggagaacagtgccaggtcaccagatggaaagcgaaaaagaaagaacggccaatgttccctgaaaaccagcatgtcagggtatatccctagttacctggacaaagacgagcagtgtgtcgtgtgtggggacaaggcaactggttatcactaccgctgtatcacttgtgagggctgcaagggcttctttcgccgcacaatccagaagaacctccatcccacctattcctgcaaatatgacagctgctgtgtcattgacaagatcacccgcaatcagtgccagctgtgccgcttcaagaagtgcatcgccgtgggcatggccatggacttggttctagatgactcgaagcgggtggccaagcgtaagctgattgagcagaaccgggagcggcggcggaaggaggagatgatccgatcactgcagcagcgaccagagcccactcctgaagagtgggatctgatccacattgccacagaggcccatcgcagcaccaatgcccagggcagccattggaaacagaggcggaaattcctgcccgatgacattggccagtcacccattgtctccatgccggacggagacaaggtggacctggaagccttcagcgagtttaccaagatcatcaccccggccatcacccgtgtggtggactttgccaaaaaactgcccatgttctccgagctgccttgcgaagaccagatcatcctcctgaaggggtgctgcatggagatcatgtccctgcgggcggctgtccgctacgaccctgagagcgacaccctgacgctgagtggggagatggctgtcaagcgggagcagctcaagaatggcggcctgggcgtagtctccgacgccatctttgaactgggcaagtcactctctgcctttaacctggatgacacggaagtggctctgctgcaggctgtgctgctaatgtcaacagaccgctcgggcctgctgtgtgtggacaagatcgagaagagtcaggaggcgtacctgctggcgttcgagcactacgtcaaccaccgcaaacacaacattccgcacttctggcccaagctgctgatgaaggtgactgacctccgcatgatcggggcctgccacgccagccgcttcctccacatgaaagtcgagtgccccaccgaactcttccccccactcttcctcgaggtctttgaggatcaggaagtctaaagcctcaggcggccagagggtgtgcggagctggtggggaggagcctggagagaaggggcagagctgggggctgagggagacccccccacaccccttctctccttcctctcgtccttggatagattcagctcccacacacacacccgcactgcccaggtccctcctcagacctccagccctgggacagggcaaacaactgaacttgctatggaaaggacagtgtgggaggctgggggagctgtgtcctgcagttcccaggaccccatcctctcagaaggtaggggaagggcgggaggattgagaagggacaagccaccttgaccgtaggggaaggaggaatgtgggctgggggaagatgccctcaactcaccccctacacacacatgagagagagcccccacccagttccttggcctaggtctcccctccaggctgagggcctctctacttccccagatgcctgggtgcaaagaacggcttggcttggctcctcctctggaggttaaaatttatagtcattctaactgcactttggaaaccaagcaaggggagaagacaaatgaagaaaaactagacagagagaaaaatacaaaaaagagagagcgagcgatagagagagatgatattaagttattaactgaggctgaccagaggggaggaccccccctttaccaccccatgcactttgcgagctgccccttcttcccccacatcagagagaaatgcccccacaccagagccccaagggtagggctgccgatcagagctgtgagttaacacaacagggtcctggccaccccccttgccataccccgccctctgtgcccctttggcaccccccaaccctagtatgtcctctgctttctgccactcgtgcccgctgagttccatctacctctcatgctggatgccagctggcccctcaccagcctgccctgctgcccacacagctcccctttaagtgcccagccctaggggcctctccccatccacctcctccttccacaccttggcacccacccaggaaaaaactgtggctccaactcctaccctccttatatcctgcagtattagctagaaaccggatgctgctgcattggttgggtcgggggtaggagggctgtgcgtgagcgtctcccagaaccctccacccctttagcactctgtttccctgtttcccatctgtcttctgggctctctctaacctctgccctcctccccagctcctactcactgcactaactctgggcgggcaggtaccagaatgggggtgtttagataagtgacacttagttggggccccaggggaggggtggtcggtgctcctttttctttaaagctcttttggccagctgcccctctgccccgggaccccttcccctcttcttttctctaattcagggactttggcttgagcccctctcgccctcctggtgagggtgctctgttggtctgcacttgggtgagctgtcctcctccccctccctgtggctgccgcccactcctcaggggagagagggagagaggaggtggtcctcccatgggagcaggaggtggggtgggacagagcagaccagagggtgctgggctcagggctgcatgtcggcagggatggatgggtggacacagatgcccccggaagccatggggattggggcagggggtggggggaggggtgccagggcttcctgcgctttgcactattggggcaaaaatgtcttaagcagtggggaacctgccaccccaccctgaccctcagcctgccacagccccctacacacacacacacacacacacacacacacacacacacacggacatgcacacacggacatgggaaggcaatgctatgctgcccgtcagggcactgtccttccccaatcgttcaggtgttccaacaggggtggagggcctggaggagcacccgctgtcacctgtgcatgtgcctgtcccaccctgctggggcctcgggctgcccgcgctgtctttgtctctatcctctctctctctcctggagtactgaatcctgtattactccagtcccatgggtaggccctcttgtaccttcctaccacgcctgggggcccagtggaattcctgacctgtctgctgtcttccccatccctccatccccaccccaacccctccatccccattctcagccatggacacggcagagaaaaggccttgaagagccttagcctcttataggcacttgggactcccccaccctccccaatcatatgagctgtgatcccatcctccccggacccctcccttccccctcggtgatgtggggtgtatgtgtgcgttcctctgcgtgaatgtgtgagtgagtacacatggtaggggaggagccagggcgactcaggagtgccacgcacctgctctagagcggcagctgtcccagtccctgctgtggaagtgggggacagggccctctcctgggggccattggtgctaatgagggggatggccttgatgtgggtgctcagcatgcctcccccagtattggcccggggcactagggcaggcagggtggagcagcaggtgcagtatcggtgggaggacgggttgctgggaataggacgagggggccaggccaggacaaggggttgccagagccatgaccactaccccgcccccaccacccgcctctccatctcagtattgcccctcccatcactcataacacacatacctcatccagcctcctccctgctcagacttggggagggtgggggaggagcccctaccccttctcctggtggcgggtctgcagggctgggagagggcagggcgttgtgagagagagaccgtccataaggaggacagtaactcctgccctgggaactcctgggcgggggggagggggacactgcccagaggcgctactgaatgtatgagaagctggtgctgggctggggggaggggggttgtggccagaaacagggaaggaggtaggtctcttccccagggaggggtgggaccggcaggggtgacttgaggggctcctactcctgccccacgttgacaatcagtatgtctgttatgtgcgatttttcaccccgttgtgttttgggtcaggattttaaagaaagatatttttatggtaattgttgctcgtctattttactatatatttatgtaataaatatatgatgaaaataacccccttgggcacccccctt

SEQ ID NO: 4512 - protein, 410 aa, Homosapiens; identical to SEQ ID NO: 694

SEQ ID NO: 4513 - DNA, 2440 bp, Homosapiens
gggggcgggcggcggcgaggcggcctgcagggagcagccgcgagccggccgggcgcgccgagcccgagccccagccggagcggggcgggggagggaggagccagagcggccgccgcctctgccggaggagccgcggggccgccacactcgccccccgccccccccgcgctcactcgcactcacacccgggcgcaggaggcgggcggcccgggccccaccggccccccatggacgcccccagcacggggcgctgagacccccgcgtcgctgcccagcccggtccggcgcgccacgccgagggatctctggacaggacaagactccgaagctactcccccagcacacagcccgggacccacaaacccagcttgcccccagccctcccacctgccactccctggcccctcccaccgcccgccccccttggggcgcagggcatggtgtgaaaggccaagtgctgaggcgggtatcatgggtgctgtgccctagggcctgggtggcagggggtgggtggcctgtgggtgtgccgggggggccagtgtgcccaccccagtctcttggcgtgctggagggcatcctggatggaattgaagtgaatggaacagaagccaagcaaggtggagtgtgggtcagacccagaggagaacagtgccaggtcaccagatggaaagcgaaaaagaaagaacggccaatgttccctgaaaaccagcatgtcagggtatatccctagttacctggacaaagacgagcagtgtgtcgtgtgtggggacaaggcaactggttatcactaccgctgtatcacttgtgagggctgcaagggcttctttcgccgcacaatccagaagaacctccatcccacctattcctgcaaatatgacagctgctgtgtcattgacaagatcacccgcaatcagtgccagctgtgccgcttcaagaagtgcatcgccgtgggcatggccatggacttggttctagatgactcgaagcgggtggccaagcgtaagctgattgagcagaaccgggagcggcggcggaaggaggagatgatccgatcactgcagcagcgaccagagcccactcctgaagagtgggatctgatccacattgccacagaggcccatcgcagcaccaatgcccagggcagccattggaaacagaggcggaaattcctgcccgatgacattggccagtcacccattgtctccatgccggacggagacaaggtggacctggaagccttcagcgagtttaccaagatcatcaccccggccatcacccgtgtggtggactttgccaaaaaactgcccatgttctccgagctgccttgcgaagaccagatcatcctcctgaaggggtgctgcatggagatcatgtccctgcgggcggctgtccgctacgaccctgagagcgacaccctgacgctgagtggggagatggctgtcaagcgggagcagctcaagaatggcggcctgggcgtagtctccgacgccatctttgaactgggcaagtcactctctgcctttaacctggatgacacggaagtggctctgctgcaggctgtgctgctaatgtcaacagaccgctcgggcctgctgtgtgtggacaagatcgagaagagtcaggaggcgtacctgctggcgttcgagcactacgtcaaccaccgcaaacacaacattccgcacttctggcccaagctgctgatgaagggtccgcaggtccggcagcttgagcagcagcttggtgaagcgggaagtctccaagggccggttcttcagcaccagagcccgaagagcccgcagcagcgtctcctggagctgctccaccgaagcggaattctccatgcccgagcggtctgtggggaagacgacagcagtgaggcggactccccgagctcctctgaggaggaaccggaggtctgcgaggacctggcaggcaatgcagcctctccctgaagccccccagaaggccgatggggaaggagaaggagtgccataccttctcccaggcctctgccccaagagcaggaggtgcctgaaagctgggagcgtgggctcagcagggctggtcacctcccatcccgtaagaccaccttcccttcctcagcaggccaaacatggccagactcccttgctttttgctgtgtagttccctctgcctgggatgcccttccccctttctctgcctggcaacatcttacttgtcctttgaggccccaactcaagtgtcacctccttccccagctcccccaggcagaaatagttgtctgtgcttccttggttcatgcttctactgtgacacttatctcactgttttataattagtcgggcatgagtctgtttcccaagctagactgtgtctgaatcatgtctgtatccccagtgcccggtgcagggcctggcatagagtaggtactccataaaaggtgtgttgaattgaactg

SEQ ID NO: 4514 - protein, 451 aa, Homosapiens
MEQKPSKVECGSDPEENSARSPDGKRKRKNGQCSLKTSMSGYIPSYLDKDEQCVVCGDKATGYHYRCITCEGCKGFFRRTIQKNLHPTYSCKYDSCCVIDKITRNQCQLCRFKKCIAVGMAMDLVLDDSKRVAKRKLIEQNRERRRKEEMIRSLQQRPEPTPEEWDLIHIATEAHRSTNAQGSHWKQRRKFLPDDIGQSPIVSMPDGDKVDLEAFSEFTKIITPAITRVVDFAKKLPMFSELPCEDQIILLKGCCMEIMSLRAAVRYDPESDTLTLSGEMAVKREQLKNGGLGVVSDAIFELGKSLSAFNLDDTEVALLQAVLLMSTDRSGLLCVDKIEKSQEAYLLAFEHYVNHRKHNIPHFWPKLLMKGPQVRQLEQQLGEAGSLQGPVLQHQSPKSPQQRLLELLHRSGILHARAVCGEDDSSEADSPSSSEEEPEVCEDLAGNAASP

SEQ ID NO: 4515 - DNA, 2557 bp, Homosapiens
gggggcgggcggcggcgaggcggcctgcagggagcagccgcgagccggccgggcgcgccgagcccgagccccagccggagcggggcgggggagggaggagccagagcggccgccgcctctgccggaggagccgcggggccgccacactcgccccccgccccccccgcgctcactcgcactcacacccgggcgcaggaggcgggcggcccgggccccaccggccccccatggacgcccccagcacggggcgctgagacccccgcgtcgctgcccagcccggtccggcgcgccacgccgagggatctctggacaggacaagactccgaagctactcccccagcacacagcccgggacccacaaacccagcttgcccccagccctcccacctgccactccctggcccctcccaccgcccgccccccttggggcgcagggcatggtgtgaaaggccaagtgctgaggcgggtatcatgggtgctgtgccctagggcctgggtggcagggggtgggtggcctgtgggtgtgccgggggggccagtgtgcccaccccagtctcttggcgtgctggagggcatcctggatggaattgaagtgaatggaacagaagccaagcaaggtggagtgtgggtcagacccagaggagaacagtgccaggtcaccagatggaaagcgaaaaagaaagaacggccaatgttccctgaaaaccagcatgtcagggtatatccctagttacctggacaaagacgagcagtgtgtcgtgtgtggggacaaggcaactggttatcactaccgctgtatcacttgtgagggctgcaagggcttctttcgccgcacaatccagaagaacctccatcccacctattcctgcaaatatgacagctgctgtgtcattgacaagatcacccgcaatcagtgccagctgtgccgcttcaagaagtgcatcgccgtgggcatggccatggacttggttctagatgactcgaagcgggtggccaagcgtaagctgattgagcagaaccgggagcggcggcggaaggaggagatgatccgatcactgcagcagcgaccagagcccactcctgaagagtgggatctgatccacattgccacagaggcccatcgcagcaccaatgcccagggcagccattggaaacagaggcggaaattcctgcccgatgacattggccagtcacccattgtctccatgccggacggagacaaggtggacctggaagccttcagcgagtttaccaagatcatcaccccggccatcacccgtgtggtggactttgccaaaaaactgcccatgttctccgagctgccttgcgaagaccagatcatcctcctgaaggggtgctgcatggagatcatgtccctgcgggcggctgtccgctacgaccctgagagcgacaccctgacgctgagtggggagatggctgtcaagcgggagcagctcaagaatggcggcctgggcgtagtctccgacgccatctttgaactgggcaagtcactctctgcctttaacctggatgacacggaagtggctctgctgcaggctgtgctgctaatgtcaacagaccgctcgggcctgctgtgtgtggacaagatcgagaagagtcaggaggcgtacctgctggcgttcgagcactacgtcaaccaccgcaaacacaacattccgcacttctggcccaagctgctgatgaaggagagagaagtgcagagttcgattctgtacaagggggcagcggcagaaggccggccgggcgggtcactgggcgtccacccggaaggacagcagcttctcggaatgcatgttgttcagggtccgcaggtccggcagcttgagcagcagcttggtgaagcgggaagtctccaagggccggttcttcagcaccagagcccgaagagcccgcagcagcgtctcctggagctgctccaccgaagcggaattctccatgcccgagcggtctgtggggaagacgacagcagtgaggcggactccccgagctcctctgaggaggaaccggaggtctgcgaggacctggcaggcaatgcagcctctccctgaagccccccagaaggccgatggggaaggagaaggagtgccataccttctcccaggcctctgccccaagagcaggaggtgcctgaaagctgggagcgtgggctcagcagggctggtcacctcccatcccgtaagaccaccttcccttcctcagcaggccaaacatggccagactcccttgctttttgctgtgtagttccctctgcctgggatgcccttccccctttctctgcctggcaacatcttacttgtcctttgaggccccaactcaagtgtcacctccttccccagctcccccaggcagaaatagttgtctgtgcttccttggttcatgcttctactgtgacacttatctcactgttttataattagtcgggcatgagtctgtttcccaagctagactgtgtctgaatcatgtctgtatccccagtgcccggtgcagggcctggcatagagtaggtactccataaaaggtgtgttgaattgaactg

SEQ ID NO: 4516 - protein, 490 aa, Homosapiens; identical to SEQ ID NO: 692

SEQ ID NO: 4517 - DNA, 6243 bp, Homosapiens
gggggcgggcggcggcgaggcggcctgcagggagcagccgcgagccggccgggcgcgccgagcccgagccccagccggagcggggcgggggagggaggagccagagcggccgccgcctctgccggaggagccgcggggccgccacactcgccccccgccccccccgcgctcactcgcactcacacccgggcgcaggaggcgggcggcccgggccccaccggccccccatggacgcccccagcacggggcgctgagacccccgcgtcgctgcccagcccggtccggcgcgccacgccgagggatctctggacaggacaagactccgaagctactcccccagcacacagcccgggacccacaaacccagcttgcccccagccctcccacctgccactccctggcccctcccaccgcccgccccccttggggcgcagggcatggtgtgaaaggccaagtgctgaggcgggtatcatgggtgctgtgccctagggcctgggtggcagggggtgggtggcctgtgggtgtgccgggggggccagtgtgcccaccccagtctcttggcgtgctggagggcatcctggatggaattgaagtgaatggaacagaagccaagcaaggtggagtgtgggtcagacccagaggagaacagtgccaggtcaccagatggaaagcgaaaaagaaagaacggccaatgttccctgaaaaccagcatgtcagggtatatccctagttacctggacaaagacgagcagtgtgtcgtgtgtggggacaaggcaactggttatcactaccgctgtatcacttgtgagggctgcaagggcttctttcgccgcacaatccagaagaacctccatcccacctattcctgcaaatatgacagctgctgtgtcattgacaagatcacccgcaatcagtgccagctgtgccgcttcaagaagtgcatcgccgtgggcatggccatggacttggttctagatgactcgaagcgggtggccaagcgtaagctgattgagcagaaccgggagcggcggcggaaggaggagatgatccgatcactgcagcagcgaccagagcccactcctgaagagtgggatctgatccacattgccacagaggcccatcgcagcaccaatgcccagggcagccattggaaacagaggcggaaattcctgcccgatgacattggccagtcacccattgtctccatgccggacggagacaaggtggacctggaagccttcagcgagtttaccaagatcatcaccccggccatcacccgtgtggtggactttgccaaaaaactgcccatgttctccgagctgccttgcgaagaccagatcatcctcctgaaggggtgctgcatggagatcatgtccctgcgggcggctgtccgctacgaccctgagagcgacaccctgacgctgagtggggagatggctgtcaagcgggagcagctcaagaatggcggcctgggcgtagtctccgacgccatctttgaactgggcaagtcactctctgcctttaacctggatgacacggaagtggctctgctgcaggctgtgctgctaatgtcaacagaccgctcgggcctgctgtgtgtggacaagatcgagaagagtcaggaggcgtacctgctggcgttcgagcactacgtcaaccaccgcaaacacaacattccgcacttctggcccaagctgctgatgaaggtgactgacctccgcatgatcggggcctgccacgccagccgcttcctccacatgaaagtcgagtgccccaccgaactcttccccccactcttcctcgaggtctttgaggatcaggaagtctaaagcctcaggcggccagagggtgtgcggagctggtggggaggagcctggagagaaggggcagagctgggggctgagggagacccccccacaccccttctctccttcctctcgtccttggatagattcagctcccacacacacacccgcactgcccaggtccctcctcagacctccagccctgggacagggcaaacaactgaacttgctatggaaaggacagtgtgggaggctgggggagctgtgtcctgcagttcccaggaccccatcctctcagaaggtaggggaagggcgggaggattgagaagggacaagccaccttgaccgtaggggaaggaggaatgtgggctgggggaagatgccctcaactcaccccctacacacacatgagagagagcccccacccagttccttggcctaggtctcccctccaggctgagggcctctctacttccccagatgcctgggtgcaaagaacggcttggcttggctcctcctctggaggttaaaatttatagtcattctaactgcactttggaaaccaagcaaggggagaagacaaatgaagaaaaactagacagagagaaaaatacaaaaaagagagagcgagcgatagagagagatgatattaagttattaactgaggctgaccagaggggaggaccccccctttaccaccccatgcactttgcgagctgccccttcttcccccacatcagagagaaatgcccccacaccagagccccaagggtagggctgccgatcagagctgtgagttaacacaacagggtcctggccaccccccttgccataccccgccctctgtgcccctttggcaccccccaaccctagtatgtcctctgctttctgccactcgtgcccgctgagttccatctacctctcatgctggatgccagctggcccctcaccagcctgccctgctgcccacacagctcccctttaagtgcccagccctaggggcctctccccatccacctcctccttccacaccttggcacccacccaggaaaaaactgtggctccaactcctaccctccttatatcctgcagtattagctagaaaccggatgctgctgcattggttgggtcgggggtaggagggctgtgcgtgagcgtctcccagaaccctccacccctttagcactctgtttccctgtttcccatctgtcttctgggctctctctaacctctgccctcctccccagctcctactcactgcactaactctgggcgggcaggtaccagaatgggggtgtttagataagtgacacttagttggggccccaggggaggggtggtcggtgctcctttttctttaaagctcttttggccagctgcccctctgccccgggaccccttcccctcttcttttctctaattcagggactttggcttgagcccctctcgccctcctggtgagggtgctctgttggtctgcacttgggtgagctgtcctcctccccctccctgtggctgccgcccactcctcaggggagagagggagagaggaggtggtcctcccatgggagcaggaggtggggtgggacagagcagaccagagggtgctgggctcagggctgcatgtcggcagggatggatgggtggacacagatgcccccggaagccatggggattggggcagggggtggggggaggggtgccagggcttcctgcgctttgcactattggggcaaaaatgtcttaagcagtggggaacctgccaccccaccctgaccctcagcctgccacagccccctacacacacacacacacacacacacacacacacacacacacggacatgcacacacggacatgggaaggcaatgctatgctgcccgtcagggcactgtccttccccaatcgttcaggtgttccaacaggggtggagggcctggaggagcacccgctgtcacctgtgcatgtgcctgtcccaccctgctggggcctcgggctgcccgcgctgtctttgtctctatcctctctctctctcctggagtactgaatcctgtattactccagtcccatgggtaggccctcttgtaccttcctaccacgcctgggggcccagtggaattcctgacctgtctgctgtcttccccatccctccatccccaccccaacccctccatccccattctcagccatggacacggcagagaaaaggccttgaagagccttagcctcttataggcacttgggactcccccaccctccccaatcatatgagctgtgatcccatcctccccggacccctcccttccccctcggtgatgtggggtgtatgtgtgcgttcctctgcgtgaatgtgtgagtgagtacacatggtaggggaggagccagggcgactcaggagtgccacgcacctgctctagagcggcagctgtcccagtccctgctgtggaagtgggggacagggccctctcctgggggccattggtgctaatgagggggatggccttgatgtgggtgctcagcatgcctcccccagtattggcccggggcactagggcaggcagggtggagcagcaggtgcagtatcggtgggaggacgggttgctgggaataggacgagggggccaggccaggacaaggggttgccagagccatgaccactaccccgcccccaccacccgcctctccatctcagtattgcccctcccatcactcataacacacatacctcatccagcctcctccctgctcagacttggggagggtgggggaggagcccctaccccttctcctggtggcgggtctgcagggctgggagagggcagggcgttgtgagagagagaccgtccataaggaggacagtaactcctgccctgggaactcctgggcgggggggagggggacactgcccagaggcgctactgaatgtatgagaagctggtgctgggctggggggaggggggttgtggccagaaacagggaaggaggtaggtctcttccccagggaggggtgggaccggcaggggtgacttgaggggctcctactcctgccccacgttgacaatcagtatgtctgttatgtgcgatttttcaccccgttgtgttttgggtcaggattttaaagaaagatatttttatggtaattgttgctcgtctattttactatatatttatgtaataaatatatgatgaaaataacccccttgggcaccccccttagacttgtgtgctgtttccctatatcctcccatctgctggcagagtacccaccccacaaactgaccagatggagaggtggccccccccagccttggcagtatttccaccccaccccccaaacgagcacacaccacagaagccagctcagctgtgaactattggatttgagacaggaacagaacaaatcagagggccaggggagggttgtgggggagacagagtggtttaaataggggaggaggggaagttcggtgatgggggagggaggcaggtatttacaagaaggctcagggggccagaggctcatcttggaatattttataacaatataaataagattctggtttgcttttccttttcgtctcgtaaaggagagagaagtgcagagttcgattctgtacaagggggcagcggcagaaggccggccgggcgggtcactgggcgtccacccggaaggacagcagcttctcggaatgcatgttgttcagggtccgcaggtccggcagcttgagcagcagcttggtgaagcgggaagtctccaagggccggttcttcagcaccagagcccgaagagcccgcagcagcgtctcctggagctgctccaccgaagcggaattctccatgcccgagcggtctgtggggaagacgacagcagtgaggcggactccccgagctcctctgaggaggaaccggaggtctgcgaggacctggcaggcaatgcagcctctccctgaagccccccagaaggccgatggggaaggagaaggagtgccataccttctcccaggcctctgccccaagagcaggaggtgcctgaaagctgggagcgtgggctcagcagggctggtcacctcccatcccgtaagaccaccttcccttcctcagcaggccaaacatggccagactcccttgctttttgctgtgtagttccctctgcctgggatgcccttccccctttctctgcctggcaacatcttacttgtcctttgaggccccaactcaagtgtcacctccttccccagctcccccaggcagaaatagttgtctgtgcttccttggttcatgcttctactgtgacacttatctcactgttttataattagtcgggcatgagtctgtttcccaagctagactgtgtctgaatcatgtctgtatccccagtgcccggtgcagggcctggcatagagtaggtactccataaaaggtgtgttgaattgaactg

SEQ ID NO: 4518 - protein, 410 aa, Homosapiens; identical to SEQ ID NO: 694

SEQ ID NO: 4519 - DNA, 3666 bp, Homosapiens
ccacgtcatcgagcagctccccctccccttgctacaagtcgcacgcgcggaagtaaacacctctacgtcatcagggcgcgtcctcgtctttcccctcccatctcctcagatcggtggacgtgctcgcctccactcggggccaggtctatgtcccggtttcccgcagtcgcgggcagggcgccaaggcggcaggaggagggtgagcggtcaagagacctccaggaagagcggctctcggctgtttgcatcgccgatagagaagagaaaggatgcacgtcccaggagggaggaactactccaacttttcctattcagaaacaaagaaaaaagattattcaagctgtgagggacaattcattccttattgttactggaaatacaggaagtggtaaaacaactcaactcccaaaatatctatatgaagcagggttttcacaacatggtatgattggtgtaactcaaccacgaaaagtagctgctatatcagttgctcagagagtagctgaagaaatgaaatgcactttgggatccaaagtaggataccaagttcgttttgatgattgcagttctaaggagacagcaatcaaatatatgactgatggatgtttactgaaacatattctgggagacccaaatcttaccaaattcagtgtcattattttggatgaagcccatgaaagaactctaactacagatatcttatttggtttattgaagaagctatttcaggagaagtctcctaataggaaggagcatttaaaagtggtggtaatgtcagcaactatggaattagccaagctctctgcattctttggaaattgtccaatatttgatatacctggaaggctttatccagtcagagagaaattctgcaatttgattggtccacgagacagagaaaatactgcgtatattcaagcgattgtgaaagtcaccatggatatccatttgaatgaaatggctggagacatcttggtttttctgactggccagtttgaaatagaaaaaagttgtgagttactttttcagatggcagagtctgttgattatgattatgatgttcaagataccaccctcgatggcttgttaatattgccgtgttatggatcaatgacaacagatcaacagaggaggatatttttgccaccaccacctggaattagaaaatgtgtcatatccaccaatatttctgcaacgtctttgacaatagatggaatcagatatgtggtagatggtggcttcgtgaagcagttaaatcacaaccccagattagggttggacatcctggaggtggttccaatttcaaagagcgaggcattacagcgaagtggccgagctggcaggacttcttcaggaaaatgctttcggatctatagtaaagatttttggaaccagtgtatgcctgaccatgtgatccctgaaattaagagaactagtttgacatctgtagttctgaccttaaagtgccttgccatacacgatgtcataaggtttccctatttggatccacctaatgagagacttattttagaagctcttaaacaactttaccagtgtgatgctattgacaggagtggccatgtcaccagattgggtttgtctatggtggagtttcctttgcctccacatctgacatgtgcagtaataaaagctgcttccctggattgtgaagatctactacttccaatagcagcaatgttgtctgtggaaaacgtcttcattagacctgttgatccagagtaccagaaggaagcagaacagagacatcgagaattggcagctaaagctggaggatttaatgactttgcaactttagctgtcatctttgaacaatgcaaatcaagtggagctccagcttcatggtgccaaaaacactggattcattggaggtgcttattttctgcatttcgtgtggaagctcaacttcgagaactaatcaggaagcttaaacagcaaagtgatttcccaaaagagacctttgaaggccctaaacatgaagtactacgaagatgtctttgtgcgggctatttcaaaaatgtagctcgaagatctgttgggagaacgttttgcacaatggatggtcgtggaagcccagttcacattcatccttcctcagcacttcatgaacaggaaaccaaacttgaatggatcatttttcatgaggtattggttaccaccaaagtctacgcaagaattgtatgcccaatccgttatgaatgggtaagagacttgttacccaagttgcatgaatttaatgcacatgatttgagcagtgtggcccgacgtgaagtgagagaagatgcaagaaggagatggacaaataaggaaaatgtaaagcagctaaaggatggaatatcgaaagacgtcttaaagaaaatgcaaagaagaaatgatgacaaatccatatctgatgcacgggctcgtttccttgagagaaagcagcagaggacccaggaccacagtgacacacgaaaggaaacaggctaaggtggtgaaccctccaattcaggaagtgggaaaaggagccaggaaatgtgcttctactttgccagttatttcagacagcactaccaagaggaggtggtcagcacttgttattggcctatgaactaaaagcaaatcaaagctcataaatcaaagctcatcagttcccataaatgcagttgtcaaagaaaagatttggttgccatagtcataagcaatgatacatgaaaccaatgaaagacagtacatgtaataatattttcctcagtacaattttgctggccttaactggtatcaaacgctgtcattgagatgttttcaaagaacattgagttgtatttaatcagcgtgtactccatttgcattgaagcattaaaaattatttttcttaaaatctctttaaggccttcttgttgctgttagaatagtgctatatatcaggtatgtgaccatttatttcagaaggctgaacataagaggtttctactcagcaatacttagatgtctaactgtttaattgctacagagctttatagatatttagagaaaagacttaatcaattagtaaataaaattgcctatggcaggattctttcttgaattaatattaatccttaaattgatttttctgggattatacaaattcctttttatataaaagtatattgtttaaaacagtagctatagccattaaccaaaggacagatgatatatatatatatgatatatatatatatataagttcttttttagctgtacctacgtacttatatcagcaccatgtatgtaggtgtgatagtactttcaaacagcgcctccacctggcctactctgttatttccacctgtttgggtagggccatttaacttccattatgccaaacttgggatgggattttcgaagcagacaacactatttcatcgtgtttcaaattggaaccttgaggctagttagtatcacactcaggccacactcagcacttgcccactcttgtttactgccttgtattctagttatttgtgtatttgtctccctcactagattatacgctccttgtgggcagggactgtgtcttttttcatctttgtatctttcatgcacctagcatagtgctttgcacatagtagtcactcagtgtttgttaaataaagctattagtgtcattaaaattcaaaagacagt

SEQ ID NO: 4520 - protein, 779 aa, Homosapiens
MSRFPAVAGRAPRRQEEGERSRDLQEERLSAVCIADREEKGCTSQEGGTTPTFPIQKQRKKIIQAVRDNSFLIVTGNTGSGKTTQLPKYLYEAGFSQHGMIGVTQPRKVAAISVAQRVAEEMKCTLGSKVGYQVRFDDCSSKETAIKYMTDGCLLKHILGDPNLTKFSVIILDEAHERTLTTDILFGLLKKLFQEKSPNRKEHLKVVVMSATMELAKLSAFFGNCPIFDIPGRLYPVREKFCNLIGPRDRENTAYIQAIVKVTMDIHLNEMAGDILVFLTGQFEIEKSCELLFQMAESVDYDYDVQDTTLDGLLILPCYGSMTTDQQRRIFLPPPPGIRKCVISTNISATSLTIDGIRYVVDGGFVKQLNHNPRLGLDILEVVPISKSEALQRSGRAGRTSSGKCFRIYSKDFWNQCMPDHVIPEIKRTSLTSVVLTLKCLAIHDVIRFPYLDPPNERLILEALKQLYQCDAIDRSGHVTRLGLSMVEFPLPPHLTCAVIKAASLDCEDLLLPIAAMLSVENVFIRPVDPEYQKEAEQRHRELAAKAGGFNDFATLAVIFEQCKSSGAPASWCQKHWIHWRCLFSAFRVEAQLRELIRKLKQQSDFPKETFEGPKHEVLRRCLCAGYFKNVARRSVGRTFCTMDGRGSPVHIHPSSALHEQETKLEWIIFHEVLVTTKVYARIVCPIRYEWVRDLLPKLHEFNAHDLSSVARREVREDARRRWTNKENVKQLKDGISKDVLKKMQRRNDDKSISDARARFLERKQQRTQDHSDTRKETG

SEQ ID NO: 4521 - DNA, 3877 bp, Homosapiens
ccacgtcatcgagcagctccccctccccttgctacaagtcgcacgcgcggaagtaaacacctctacgtcatcagggcgcgtcctcgtctttcccctcccatctcctcagatcggtggacgtgctcgcctccactcggggccaggtctatgtcccggtttcccgcagtcgcgggcagggcgccaaggcggcaggaggagggtgagcggtcaagagacctccaggaagagcggctctcggctgtttgcatcgccgatagagaagagaaaggatgcacgtcccaggagggaggaactactccaacttttcctattcagaaacaaagaaaaaagattattcaagctgtgagggacaattcattccttattgttactggaaatacaggaagtggtaaaacaactcaactcccaaaatatctatatgaagcagggttttcacaacatggtatgattggtgtaactcaaccacgaaaagtagctgctatatcagttgctcagagagtagctgaagaaatgaaatgcactttgggatccaaagtaggataccaagttcgttttgatgattgcagttctaaggagacagcaatcaaatatatgactgatggatgtttactgaaacatattctgggagacccaaatcttaccaaattcagtgtcattattttggatgaagcccatgaaagaactctaactacagatatcttatttggtttattgaagaagctatttcaggagaagtctcctaataggaaggagcatttaaaagtggtggtaatgtcagcaactatggaattagccaagctctctgcattctttggaaattgtccaatatttgatatacctggaaggctttatccagtcagagagaaattctgcaatttgattggtccacgagacagagaaaatactgcgtatattcaagcgattgtgaaagtcaccatggatatccatttgaatgaaatggctggagacatcttggtttttctgactggccagtttgaaatagaaaaaagttgtgagttactttttcagatggcagagtctgttgattatgattatgatgttcaagataccaccctcgatggcttgttaatattgccgtgttatggatcaatgacaacagatcaacagaggaggatatttttgccaccaccacctggaattagaaaatgtgtcatatccaccaatatttctgcaacgtctttgacaatagatggaatcagatatgtggtagatggtggcttcgtgaagcagttaaatcacaaccccagattagggttggacatcctggaggtggttccaatttcaaagagcgaggcattacagcgaagtggccgagctggcaggacttcttcaggaaaatgctttcggatctatagtaaagatttttggaaccagtgtatgcctgaccatgtgatccctgaaattaagagaactagtttgacatctgtagttctgaccttaaagtgccttgccatacacgatgtcataaggtttccctatttggatccacctaatgagagacttattttagaagctcttaaacaactttaccagtgtgatgctattgacaggagtggccatgtcaccagattgggtttgtctatggtggagtttcctttgcctccacatctgacatgtgcagtaataaaagctgcttccctggattgtgaagatctactacttccaatagcagcaatgttgtctgtggaaaacgtcttcattagacctgttgatccagagtaccagaaggaagcagaacagagacatcgagaattggcagctaaagctggaggatttaatgactttgcaactttagctgtcatctttgaacaatgcaaatcaagtggagctccagcttcatggtgccaaaaacactggattcattggaggtgcttattttctgcatttcgtgtggaagctcaacttcgagaactaatcaggaagcttaaacagcaaagtgatttcccaaaagagacctttgaaggccctaaacatgaagtactacgaagatgtctttgtgcgggctatttcaaaaatgtagctcgaagatctgttgggagaacgttttgcacaatggatggtcgtggaagcccagttcacattcatccttcctcagcacttcatgaacaggaaaccaaacttgaatggatcatttttcatgaggtattggttaccaccaaagtctacgcaagaattgtatgcccaatccgttatgaatgggtaagagacttgttacccaagttgcatgaatttaatgcacatgatttgagcagtgtggcccgacgtgaagtgagagaagatgcaagaaggagatggacaaataaggaaaatgtaaagcagctaaaggatggaatatcgaaagacgtcttaaagaaaatgcaaagaagaaatgatgacaaatccatatctgatgcacgggctcgtttccttgagagaaagcagcagaggacccaggaccacagtgacacacgaaaggaaacaggctaaggtggtgaaccctccaattcaggaagtgggaaaaggagccaggaaatgtgcttctactttgccagttatttcagacagcactaccaagaggaggtggtcagcacttgttattggcctatgaactaaaagcaaatcaaagctcataaatcaaagctcatcagttcccataaatgcagttgtcaaagaaaagatttggttgccatagtcataagcaatgatacatgaaaccaatgaaagacagtacatgtaataatattttcctcagtacaattttgctggccttaactggtatcaaacgctgtcattgagatgttttcaaagaacattgagttgtatttaatcagcgtgtactccatttgcattgaagcattaaaaattatttttcttaaaatctctttaaggccttcttgttgctgttagaatagtgctatatatcaggtatgtgaccatttatttcagaaggctgaacataagaggtttctactcagcaatacttagatgtctaactgtttaattgctacagagctttatagatatttagagaaaagacttaatcaattagtaaataaaattgcctatggcaggattctttcttgaattaatattaatccttaaattgatttttctgggattatacaaattcctttttatataaaagtatattgtttaaaacagtagctatagccattaaccaaaggacagatgatatatatatatatgatatatatatatatataagttcttttttagctgtacctacgtacttatatcagcaccatgtatgtaggtgtgatagtactttcaaacagcgcctccacctggcctactctgttatttccacctgtttgggtagggccatttaacttccattatgccaaacttgggatgggattttcgaagcagacaacactatttcatcgtgtttcaaattggaaccttgaggctagttagtatcacactcaggccacactcagcacttgcccactcttgtttactgccttgtattctagttatttgtgtatttgtctccctcactagattatacgctccttgtgggcagggactgtgtcttttttcatctttgtatctttcatgcacctagcatagtgctttgcacatagtagtcactcagtgtttgttaaataaagctattagtgtcattaaaattcaaaagacagtataatgtgtgtttttagatattttgtgtaaaaattaagaatctaaattttttatcggtaactcttctagttatttcctttggaatctagttttatgttcaataatagaaacttgaaatctttatcaaaaatcacaaggacccaaattcatgtatttgtccctaaagtaaggtgagtgatgatggtttctctaaacctttccagtgttttaa

SEQ ID NO: 4522 - protein, 779 aa, Homosapiens; identical to SEQ ID NO: 4520

SEQ ID NO: 4523 - DNA, 2816 bp, Homosapiens
gtcatcagggcgcgtcctcgtctttcccctcccatctcctcagatcggtggacgtgctcgcctccactcggggccaggtctatgtcccggtttcccgcagtcgcgggcagggcgccaaggcggcaggaggagggtgagcggtcaagagacctccaggaagagcggctctcggctgtttgcatcgccgatagagaagagaaaggatgcacgtcccaggagggaggaactactccaacttttcctattcagaaacaaagaaaaaagattattcaagctgtgagggacaattcattccttattgttactggaaatacaggaagtggtaaaacaactcaactcccaaaatatctatatgaagcagggttttcacaacatggtatgattggtgtaactcaaccacgaaaagtagctgctatatcagttgctcagagagtagctgaagaaatgaaatgcactttgggatccaaagtaggataccaagttcgttttgatgattgcagttctaaggagacagcaatcaaatatatgactgatggatgtttactgaaacatattctgggagacccaaatcttaccaaattcagtgtcattattttggatgaagcccatgaaagaactctaactacagatatcttatttggtttattgaagaagctatttcaggagaagtctcctaataggaaggagcatttaaaagtggtggtaatgtcagcaactatggaattagccaagctctctgcattctttggaaattgtccaatatttgatatacctggaaggctttatccagtcagagagaaattctgcaatttgattggtccacgagacagagaaaatactgcgtatattcaagcgattgtgaaagtcaccatggatatccatttgaatgaaatggctggagacatcttggtttttctgactggccagtttgaaatagaaaaaagttgtgagttactttttcagatggcagagtctgttgattatgattatgatgttcaagataccaccctcgatggcttgttaatattgccgtgttatggatcaatgacaacagatcaacagaggaggatatttttgccaccaccacctggaattagaaaatgtgtcatatccaccaatatttctgcaacgtctttgacaatagatggaatcagatatgtggtagatggtggcttcgtgaagcagttaaatcacaaccccagattagggttggacatcctggaggtggttccaatttcaaagagcgaggcattacagcgaagtggccgagctggcaggacttcttcaggaaaatgctttcggatctatagtaaagatttttggaaccagtgtatgcctgaccatgtgatccctgaaattaagagaactagtttgacatctgtagttctgaccttaaagtgccttgccatacacgatgtcataaggtttccctatttggatccacctaatgagagacttattttagaagctcttaaacaactttaccagtgtgatgctattgacaggagtggccatgtcaccagattgggtttgtctatggtggagtttcctttgcctccacatctgacatgtgcagtaataaaagctgcttccctggattgtgaagatctactacttccaatagcagcaatgttgtctgtggaaaacgtcttcattagacctgttgatccagagtaccagaaggaagcagaacagagacatcgagaattggcagctaaagctggaggatttaatgactttgcaactttagctgtcatctttgaacaatgcaaatcaagtggagctccagcttcatggtgccaaaaacactggattcattggaggtgcttattttctgcatttcgtgtggaagctcaacttcgagaactaatcaggaagcttaaacagcaaagtgatttcccaaaagagacctttgaaggccctaaacatgaagtactacgaagatgtctttgtgcgggctatttcaaaaatgtagctcgaagatctgttgggagaacgttttgcacaatggatggtcgtggaagcccagttcacattcatccttcctcagcacttcatgaacaggaaaccaaacttgaatggatcatttttcatgaggtattggttaccaccaaagtctacgcaagaattgtatgcccaatccgttatgaatgggtaagagacttgttacccaagttgcatgaatttaatgcacatgatttgagcagtgtggcccgacgtgaagtgagagaagatgcaagaaggagatggacaaataaggaaaatgtaaagcagctaaaggatggaatatcgaaagacgtcttaaagaaaatgcaaagaagaaatgatgacaaatccatatctgatgcacgggctcgtttccttgagagaaagcagcagaggacccaggaccacagtgacacacgaaaggaaacaggctaaggtggtgaaccctccaattcaggaagtgggaaaaggagccaggaaatgtgcttctactttgccagttatttcagacagcactaccaagaggaggtggtcagcacttgttattggcctatgaactaaaagcaaatcaaagctcataaatcaaagctcatcagttcccataaatgcagttgtcaaagaaaagatttggttgccatagtcataagcaatgatacatgaaaccaatgaaagacagtacatgtaataatattttcctcagtacaattttgctggccttaactggtatcaaacgctgtcattgagatgttttcaaagaacattgagttgtatttaatcagcgtgtactccatttgcattgaagcattaaaaattatttttcttaaaatctc

SEQ ID NO: 4524 - protein, 779 aa, Homosapiens; identical to SEQ ID NO: 4520

SEQ ID NO: 4525 - DNA, 2821 bp, Homosapiens
aatggtgaagggagttagaaatagcgaaagtgagaaaataggaatgatctctgtgctgttggattgaaatttcagtgtatcatgatgaagttatgggtttcattatagatggatgcatggatggacactggaataaaaatagatgttagtgtgtgtatatagaatgtatttgtatgtatgtaaatatttatatgtatatatgccctagctctgagataataacaatgaatagacatagtgcccagatcttgacttgggacatccatctgccacttaaaggagtcaggggtctttggagaaatggggctgggaaaatgcaagatgagcccagaatatcttattttgccagcaagtaaagaagtgattaacaaaggttgaggccacgtcagaagaacataggagccagcatgaagaggccccaagtaatcaaatatgagacactttaagcatcaaaataagtagtgatagtagcggattattatgcacttaataaaatgtgaaatcgtgtctatcgtggtataaataaatgagtaaaagtttattgagaaatggaattgtttacaagcacctctccataaaatttttgttaattacaaaagcaaaaagtaactttacagtggagaatcctggcatatgtgacctaaatcaagcaatcaaagtgaacataatgaaataaataaaaatcatgttcttcctgataggatacaatgagaaaaacacagcattatgtctgtgatattcctgctaaagatgcataacctgaatctaatcatcctgaaacagacaaactcaaactgagggacataccacacagtaactagccttgacatctttaaaggtgccaagatcatgaaagtcaaagactgaggaagtattccagaatgaaggagaccaaagggaaatgaaaaataaaggcaatgtatgattctgaattacatccttttgctataaaggatattattaagacaaattggtgaaatgtcagtggggtctgaggattaattgttagtaatgtatcagtgttaatttcctggttttgatggttatagtcatgtcggagaatgttcttgattgttgattgtaagaagtgcacagtcgagtatttgaggatgatggggtattaggttggcagtttgctgtcaaatgattcaggtaaaaatttttttactctcaacttttctgtaaatttagattgtttcacacttttaaaaatatggtatatcttggttaccctctgtatgccaaacactgggcaggtactaaaaatagaaaagtagagtaacatgagtccttacatcattcttgatgatacctgagtctaatggagggtacagatatgtaagtgaataattacagtgcagtctgatctgggttatactatgaatatatacaaagtactataggaaataaattatgacaaatgaactaggtttatttttttgacaagttttttggaatgacatttaggtagggtaatgtagaagaaaataagggcatgaatcggaaaaatgatagattaattgtcaagttttagagtagtgaaaaaatcatccctttaaaaagagatgcagcatagtataacataaagaaaccatatttaagtcagaagaactgtttaggacttggttttaccatgcgttagcgctggtgatcttgagaagtctagctaatttatttgaattttagttttgactttttaataaagttcctggctctcaaagctcatagattattgttaatatttgtactgattccttatacctaattgtagtgacttatacctaattgtagtgactgtttaacctgtataattaatttaagatgaattggtagagagcttgtagtgacagttgaataaatgtaaacctctgcttataatgctgtttgtagtagaacatattgtaattgttcattgctgaatgtaatgctccatttacttcattgctttactgttgtagtctttatcattttgtttttctgtttatagatctgttgggagaacgttttgcacaatggatggtcgtggaagcccagttcacattcatccttcctcagcacttcatgaacaggaaaccaaacttgaatggatcatttttcatgaggtattggttaccaccaaagtctacgcaagaattgtatgcccaatccgttatgaatgggtaagagacttgttacccaagttgcatgaatttaatgcacatgatttgagcagtgtggcccgacgtgaagtgagagaagatgcaagaaggagatggacaaataaggaaaatgtaaagcagctaaaggatggaatatcgaaagacgtcttaaagaaaatgcaaagaagaaatgatgacaaatccatatctgatgcacgggctcgtttccttgagagaaagcagcagaggacccaggaccacagtgacacacgaaaggaaacaggctaaggtggtgaaccctccaattcaggaagtgggaaaaggagccaggaaatgtgcttctactttgccagttatttcagacagcactaccaagaggaggtggtcagcacttgttattggcctatgaactaaaagcaaatcaaagctcataaatcaaagctcatcagttcccataaatgcagttgtcaaagaaaagatttggttgccatagtcataagcaatgatacatgaaaccaatgaaagacagtacatgtaataatattttcctcagtacaattttgctggccttaactggtatcaaacgctgtcattgagatgttttcaaagaacattgagttgtatttaatcagcgtgtactccatttgcattgaagcattaaaaattatttttcttaaaatctc

SEQ ID NO: 4526 - protein, 137 aa, Homosapiens
MDGRGSPVHIHPSSALHEQETKLEWIIFHEVLVTTKVYARIVCPIRYEWVRDLLPKLHEFNAHDLSSVARREVREDARRRWTNKENVKQLKDGISKDVLKKMQRRNDDKSISDARARFLERKQQRTQDHSDTRKETG

SEQ ID NO: 4527 - DNA, 3605 bp, Homosapiens
aatggtgaagggagttagaaatagcgaaagtgagaaaataggaatgatctctgtgctgttggattgaaatttcagtgtatcatgatgaagttatgggtttcattatagatggatgcatggatggacactggaataaaaatagatgttagtgtgtgtatatagaatgtatttgtatgtatgtaaatatttatatgtatatatgccctagctctgagataataacaatgaatagacatagtgcccagatcttgacttgggacatccatctgccacttaaaggagtcaggggtctttggagaaatggggctgggaaaatgcaagatgagcccagaatatcttattttgccagcaagtaaagaagtgattaacaaaggttgaggccacgtcagaagaacataggagccagcatgaagaggccccaagtaatcaaatatgagacactttaagcatcaaaataagtagtgatagtagcggattattatgcacttaataaaatgtgaaatcgtgtctatcgtggtataaataaatgagtaaaagtttattgagaaatggaattgtttacaagcacctctccataaaatttttgttaattacaaaagcaaaaagtaactttacagtggagaatcctggcatatgtgacctaaatcaagcaatcaaagtgaacataatgaaataaataaaaatcatgttcttcctgataggatacaatgagaaaaacacagcattatgtctgtgatattcctgctaaagatgcataacctgaatctaatcatcctgaaacagacaaactcaaactgagggacataccacacagtaactagccttgacatctttaaaggtgccaagatcatgaaagtcaaagactgaggaagtattccagaatgaaggagaccaaagggaaatgaaaaataaaggcaatgtatgattctgaattacatccttttgctataaaggatattattaagacaaattggtgaaatgtcagtggggtctgaggattaattgttagtaatgtatcagtgttaatttcctggttttgatggttatagtcatgtcggagaatgttcttgattgttgattgtaagaagtgcacagtcgagtatttgaggatgatggggtattaggttggcagtttgctgtcaaatgattcaggtaaaaatttttttactctcaacttttctgtaaatttagattgtttcacacttttaaaaatatggtatatcttggttaccctctgtatgccaaacactgggcaggtactaaaaatagaaaagtagagtaacatgagtccttacatcattcttgatgatacctgagtctaatggagggtacagatatgtaagtgaataattacagtgcagtctgatctgggttatactatgaatatatacaaagtactataggaaataaattatgacaaatgaactaggtttatttttttgacaagttttttggaatgacatttaggtagggtaatgtagaagaaaataagggcatgaatcggaaaaatgatagattaattgtcaagttttagagtagtgaaaaaatcatccctttaaaaagagatgcagcatagtataacataaagaaaccatatttaagtcagaagaactgtttaggacttggttttaccatgcgttagcgctggtgatcttgagaagtctagctaatttatttgaattttagttttgactttttaataaagttcctggctctcaaagctcatagattattgttaatatttgtactgattccttatacctaattgtagtgacttatacctaattgtagtgactgtttaacctgtataattaatttaagatgaattggtagagagcttgtagtgacagttgaataaatgtaaacctctgcttataatgctgtttgtagtagaacatattgtaattgttcattgctgaatgtaatgctccatttacttcattgctttactgttgtagtctttatcattttgtttttctgtttatagatctgttgggagaacgttttgcacaatggatggtcgtggaagcccagttcacattcatccttcctcagcacttcatgaacaggaaaccaaacttgaatggatcatttttcatgaggtattggttaccaccaaagtctacgcaagaattgtatgcccaatccgttatgaatgggtaagagacttgttacccaagttgcatgaatttaatgcacatgatttgagcagtgtggcccgacgtgaagtgagagaagatgcaagaaggagatggacaaataaggaaaatgtaaagcagctaaaggatggaatatcgaaagacgtcttaaagaaaatgcaaagaagaaatgatgacaaatccatatctgatgcacgggctcgtttccttgagagaaagcagcagaggacccaggaccacagtgacacacgaaaggaaacaggctaaggtggtgaaccctccaattcaggaagtgggaaaaggagccaggaaatgtgcttctactttgccagttatttcagacagcactaccaagaggaggtggtcagcacttgttattggcctatgaactaaaagcaaatcaaagctcataaatcaaagctcatcagttcccataaatgcagttgtcaaagaaaagatttggttgccatagtcataagcaatgatacatgaaaccaatgaaagacagtacatgtaataatattttcctcagtacaattttgctggccttaactggtatcaaacgctgtcattgagatgttttcaaagaacattgagttgtatttaatcagcgtgtactccatttgcattgaagcattaaaaattatttttcttaaaatctctttaaggccttcttgttgctgttagaatagtgctatatatcaggtatgtgaccatttatttcagaaggctgaacataagaggtttctactcagcaatacttagatgtctaactgtttaattgctacagagctttatagatatttagagaaaagacttaatcaattagtaaataaaattgcctatggcaggattctttcttgaattaatattaatccttaaattgatttttctgggattatacaaattcctttttatataaaagtatattgtttaaaacagtagctatagccattaaccaaaggacagatgatatatatatatatgatatatatatatatataagttcttttttagctgtacctacgtacttatatcagcaccatgtatgtaggtgtgatagtactttcaaacagcgcctccacctggcctactctgttatttccacctgtttgggtagggccatttaacttccattatgccaaacttgggatgggattttcgaagcagacaacactatttcatcgtgtttcaaattggaaccttgaggctagttagtatcacactcaggccacactcagcacttgcccactcttgtttactgccttgtattctagttatttgtgtatttgtctccctcactagattatacgctccttgtgggcagggactgtgtcttttttcatctttgtatctttcatgcacctagcatagtgctttgcacatagtagtcactcagtgtttgttaaataaagctattagtgtcattaaaattcaaaagacagt

SEQ ID NO: 4528 - protein, 137 aa, Homosapiens; identical to SEQ ID NO: 4526

SEQ ID NO: 4529 - DNA, 3816 bp, Homosapiens
aatggtgaagggagttagaaatagcgaaagtgagaaaataggaatgatctctgtgctgttggattgaaatttcagtgtatcatgatgaagttatgggtttcattatagatggatgcatggatggacactggaataaaaatagatgttagtgtgtgtatatagaatgtatttgtatgtatgtaaatatttatatgtatatatgccctagctctgagataataacaatgaatagacatagtgcccagatcttgacttgggacatccatctgccacttaaaggagtcaggggtctttggagaaatggggctgggaaaatgcaagatgagcccagaatatcttattttgccagcaagtaaagaagtgattaacaaaggttgaggccacgtcagaagaacataggagccagcatgaagaggccccaagtaatcaaatatgagacactttaagcatcaaaataagtagtgatagtagcggattattatgcacttaataaaatgtgaaatcgtgtctatcgtggtataaataaatgagtaaaagtttattgagaaatggaattgtttacaagcacctctccataaaatttttgttaattacaaaagcaaaaagtaactttacagtggagaatcctggcatatgtgacctaaatcaagcaatcaaagtgaacataatgaaataaataaaaatcatgttcttcctgataggatacaatgagaaaaacacagcattatgtctgtgatattcctgctaaagatgcataacctgaatctaatcatcctgaaacagacaaactcaaactgagggacataccacacagtaactagccttgacatctttaaaggtgccaagatcatgaaagtcaaagactgaggaagtattccagaatgaaggagaccaaagggaaatgaaaaataaaggcaatgtatgattctgaattacatccttttgctataaaggatattattaagacaaattggtgaaatgtcagtggggtctgaggattaattgttagtaatgtatcagtgttaatttcctggttttgatggttatagtcatgtcggagaatgttcttgattgttgattgtaagaagtgcacagtcgagtatttgaggatgatggggtattaggttggcagtttgctgtcaaatgattcaggtaaaaatttttttactctcaacttttctgtaaatttagattgtttcacacttttaaaaatatggtatatcttggttaccctctgtatgccaaacactgggcaggtactaaaaatagaaaagtagagtaacatgagtccttacatcattcttgatgatacctgagtctaatggagggtacagatatgtaagtgaataattacagtgcagtctgatctgggttatactatgaatatatacaaagtactataggaaataaattatgacaaatgaactaggtttatttttttgacaagttttttggaatgacatttaggtagggtaatgtagaagaaaataagggcatgaatcggaaaaatgatagattaattgtcaagttttagagtagtgaaaaaatcatccctttaaaaagagatgcagcatagtataacataaagaaaccatatttaagtcagaagaactgtttaggacttggttttaccatgcgttagcgctggtgatcttgagaagtctagctaatttatttgaattttagttttgactttttaataaagttcctggctctcaaagctcatagattattgttaatatttgtactgattccttatacctaattgtagtgacttatacctaattgtagtgactgtttaacctgtataattaatttaagatgaattggtagagagcttgtagtgacagttgaataaatgtaaacctctgcttataatgctgtttgtagtagaacatattgtaattgttcattgctgaatgtaatgctccatttacttcattgctttactgttgtagtctttatcattttgtttttctgtttatagatctgttgggagaacgttttgcacaatggatggtcgtggaagcccagttcacattcatccttcctcagcacttcatgaacaggaaaccaaacttgaatggatcatttttcatgaggtattggttaccaccaaagtctacgcaagaattgtatgcccaatccgttatgaatgggtaagagacttgttacccaagttgcatgaatttaatgcacatgatttgagcagtgtggcccgacgtgaagtgagagaagatgcaagaaggagatggacaaataaggaaaatgtaaagcagctaaaggatggaatatcgaaagacgtcttaaagaaaatgcaaagaagaaatgatgacaaatccatatctgatgcacgggctcgtttccttgagagaaagcagcagaggacccaggaccacagtgacacacgaaaggaaacaggctaaggtggtgaaccctccaattcaggaagtgggaaaaggagccaggaaatgtgcttctactttgccagttatttcagacagcactaccaagaggaggtggtcagcacttgttattggcctatgaactaaaagcaaatcaaagctcataaatcaaagctcatcagttcccataaatgcagttgtcaaagaaaagatttggttgccatagtcataagcaatgatacatgaaaccaatgaaagacagtacatgtaataatattttcctcagtacaattttgctggccttaactggtatcaaacgctgtcattgagatgttttcaaagaacattgagttgtatttaatcagcgtgtactccatttgcattgaagcattaaaaattatttttcttaaaatctctttaaggccttcttgttgctgttagaatagtgctatatatcaggtatgtgaccatttatttcagaaggctgaacataagaggtttctactcagcaatacttagatgtctaactgtttaattgctacagagctttatagatatttagagaaaagacttaatcaattagtaaataaaattgcctatggcaggattctttcttgaattaatattaatccttaaattgatttttctgggattatacaaattcctttttatataaaagtatattgtttaaaacagtagctatagccattaaccaaaggacagatgatatatatatatatgatatatatatatatataagttcttttttagctgtacctacgtacttatatcagcaccatgtatgtaggtgtgatagtactttcaaacagcgcctccacctggcctactctgttatttccacctgtttgggtagggccatttaacttccattatgccaaacttgggatgggattttcgaagcagacaacactatttcatcgtgtttcaaattggaaccttgaggctagttagtatcacactcaggccacactcagcacttgcccactcttgtttactgccttgtattctagttatttgtgtatttgtctccctcactagattatacgctccttgtgggcagggactgtgtcttttttcatctttgtatctttcatgcacctagcatagtgctttgcacatagtagtcactcagtgtttgttaaataaagctattagtgtcattaaaattcaaaagacagtataatgtgtgtttttagatattttgtgtaaaaattaagaatctaaattttttatcggtaactcttctagttatttcctttggaatctagttttatgttcaataatagaaacttgaaatctttatcaaaaatcacaaggacccaaattcatgtatttgtccctaaagtaaggtgagtgatgatggtttctctaaacctttccagtgttttaa

SEQ ID NO: 4530 - protein, 137 aa, Homosapiens; identical to SEQ ID NO: 4526

SEQ ID NO: 4531 - DNA, 433 bp, Homosapiens
gaaagcagcagaggacccaggaccacagtgacacacgaaaggaaacaggctaaggtggttgtggtgggccgagatcacaccattgcagtctggcctgggcgacaagagcaagactccgtctcaaaaaaaaaaaattgttcttgctttgtaaatgctgctttcttttcttcattttggagcggggagccttgccgatagtcagtgacttgtacatttgtttactggcatttgataggctgctccttatcttgcatgaaaaaataaagacctagccagtctaatcctgctgggattcatatcagtggccccagggggttgagatgcttcaaagctactgtttaaatggcaaaaccaagtatcttacttggataatactaaagtatgtcctttatggctttattggaatctgaattgtaaacatttggtacagtgg

SEQ ID NO: 4532 - protein, 72 aa, Homosapiens
GGCGGPRSHHCSLAWATRARLRLKKKKLFLLCKCCFLFFILERGALPIVSDLYICLLAFDRLLLILHEKIKT

SEQ ID NO: 4533 - DNA, 568 bp, Homosapiens
cacaagcccttctgactgttggagaacctgacgcgcggattctaactagaactggcactctcttcgggtgttagataattaactcaaaggacagcgaaggccttttatgatgtctttcaagctggccttatgacagcttttcttaacgtttctgcggacattttggcggacttgtgtcggcctagctcagtgatcagtttcgttaaagaatttgagtatccgaacattaaaggattggacctaaattctagcaggaggatttttagccacatcaaataatttacgttcaaaaaaaaaacaaacaaaaaaaaacctgaaggttcctggaggaaagagatgaactattagccgtgtatttcggtgggaccacctcaacataggttcctgtaggttagcaatgtagaaatgtagcgcttcaaagccggagcatcctgtcttcaaagagcatgaaggtatcaacggcattcattgtcgattaataataacctttctggtactttcttgctaaagtataagccataataatatttcataatcgcaccaatacaataaaggatgaaagacgtta

SEQ ID NO: 4534 - protein, 49 aa, Homosapiens
MTAFLNVSADILADLCRPSSVISFVKEFEYPNIKGLDLNSSRRIFSHIK

SEQ ID NO: 4535 - DNA, 5289 bp, Homosapiens
ggcggagttctgtcgccgggatccttccgctgggctcagccgtttccggagtctgcgctgcgcccggttccgccattgcggctctcctggcccctggagcctccgcccccgacccgagctctttcgtctgcctgccagtttcctgcgtccccggagaggatcctgctgagcccagcctcccccctccccttctcctcctctcccttggagagcccgggcagccactgccccgcagccccagtgacaggaggagaccataacccccgacagcgccatggcccagattctgccaattcgttttcaggagcatctccagctccagaacctgggtatcaacccagcaaacattggcttcagtaccctgactatggagtctgacaaattcatctgcattagagaaaaagtaggagagcaggcccaggtggtaatcattgatatgaatgacccaagtaatccaattcgaagaccaatttcagcagacagcgccatcatgaatccagctagcaaagtaattgcactgaaagctgggaaaactcttcagatttttaacattgaaatgaaaagtaaaatgaaggctcataccatgactgatgatgtcaccttttggaaatggatctctttgaatacggttgctcttgttacggataatgcagtttatcactggagtatggaaggagagtctcagccagtgaaaatgtttgatcgccattctagccttgcagggtgccagattatcaattaccgtacagatgcaaaacaaaagtggttacttctgactggtatatctgcacagcaaaatcgtgtggtgggagctatgcagctatattctgtagataggaaagtgtctcagcccattgaaggacatgcagctagctttgcacagtttaagatggaaggaaatgcagaagaatcaacgttattttgttttgcagttcggggccaagctggagggaagttacatattattgaagttggcacaccacctacagggaaccagccctttccaaagaaggcagtggatgtcttctttcctccagaagcacaaaatgattttcctgttgcaatgcagatcagtgaaaagcatgatgtggtgttcttgataaccaagtatggttatatccacctctatgatcttgagactggtacctgcatctacatgaatagaatcagtggagaaacaatttttgttactgcacctcatgaagccacagctggaataattggagtaaacagaaagggacaagttctgtcagtgtgtgtggaagaagaaaacataattccttacatcaccaatgttctacaaaatcctgatttggctctgagaatggctgtacgtaataacttagccggtgctgaagaactctttgcccggaaatttaatgctctttttgcccagggaaattactcggaggcagcaaaggtggctgctaatgcaccaaagggaattcttcgtactccagacactatccgtcggttccagagtgtcccagcccagccaggtcaaacttctcctctacttcagtactttggtatccttttggaccagggacagctcaacaaatacgaatccttagagctttgtaggcctgtacttcagcaagggcgaaaacagcttttggagaaatggttaaaagaagataagctggaatgttctgaagaactgggtgatcttgtgaaatctgtggaccctacattggcacttagtgtgtacctaagggctaacgtcccaaataaagtcattcagtgctttgcagaaacaggtcaagtccaaaagattgttttatatgctaaaaaagttggatacactccagattggatatttctgctgagaaatgtaatgcgaatcagtccagatcagggacagcagtttgcccaaatgttagttcaagatgaagagcctcttgctgacatcacacagattgtagatgtctttatggaatacaatctaattcagcagtgtactgcattcttgcttgatgctctgaagaataatcgcccatctgaaggtcctttacagacgcggttacttgagatgaaccttatgcatgcgcctcaagttgcagatgctattctaggcaatcagatgttcacacattatgaccgggctcatattgctcaactgtgtgaaaaggctggcctactgcagcgtgcattagaacatttcactgatttatatgatataaaacgtgcagtggttcacacccatcttcttaaccctgagtggttagtcaactactttggttccttatcagtagaagactccctagaatgtctcagagccatgctgtctgccaacatccgtcagaatctgcagatttgtgttcaggtggcttctaaatatcatgaacaactgtcaactcagtctctgattgaactttttgaatctttcaagagttttgaaggtctcttttattttctgggatccattgttaactttagccaggacccagatgtgcactttaaatatattcaggcagcttgcaagactgggcaaatcaaagaagtagaaagaatctgtagagaaagcaactgctacgatcctgagcgagtcaagaattttcttaaggaagcaaaactaacagatcagctaccacttatcattgtgtgtgatcgatttgactttgtccatgatttggtgctctatttatatagaaataatcttcaaaagtatatagagatatatgtacagaaggtgaatccaagtcgacttcctgtagttattggaggattacttgatgttgactgttctgaagatgtcataaaaaacttgattcttgttgtaagaggtcaattctctactgatgagcttgttgctgaggttgaaaaaagaaacagattgaaactgcttctgccttggctagaggccagaattcatgagggctgtgaggagcctgctactcacaatgccttagccaaaatctacatagacagtaataacaacccggagagatttcttcgtgaaaatccctactatgacagtcgcgttgttggaaagtattgtgagaagagagatccacatctggcctgtgttgcttatgaacgtggccaatgtgatctggaacttattaatgtttgcaatgagaattccctcttcaaaagtctttctcgctacctggtacgtcgaaaggatccagaattgtggggcagcgtgctgctggaaagcaatccttacaggagacccctaattgaccaggttgtacaaacagctttgtctgagactcaggaccctgaagaagtgtcagtaactgtaaaggctttcatgactgcagaccttcctaatgaactcattgaactgctggagaaaattgtccttgataactctgtattcagtgaacacaggaatctgcaaaacctccttatcctcactgcaattaaggctgaccgtacacgtgttatggagtatattaaccgcctggataattatgatgccccagatattgccaatatcgccatcagcaatgagctgtttgaagaagcatttgccattttccggaaatttgatgtcaatacttcagcagttcaggtcttaattgagcatattggaaacttggatcgggcatatgagtttgctgaacgttgcaatgaacctgcggtctggagtcaacttgcaaaagcccagttgcagaaaggaatggtgaaagaagccattgattcttatatcaaagcagatgatccttcctcctacatggaagttgttcaggctgccaatactagtggaaactgggaagaactggtgaagtacttgcagatggcccgtaagaaggctcgagagtcctatgtggagacagaactgatattcgcactggctaaaacaaaccgccttgcagagttagaagaatttatcaatggaccaaataatgctcatatccaacaagttggtgaccgttgttatgatgaaaaaatgtatgatgctgctaagttgttgtacaataatgtttccaattttggacgtttggcatctaccctggttcacctgggtgaatatcaggcagctgttgatggggctaggaaagctaacagtactcgaacatggaaagaggtctgcttcgcctgtgtagatgggaaagaattccgtcttgctcagatgtgtggacttcatattgttgtacatgcagatgaattagaagaacttatcaactactatcaggatcgtggctattttgaagagctgatcaccatgttggaagcagcactgggacttgagcgagctcacatgggaatgtttactgaattagctattctatactctaaatttaagcctcagaaaatgagggagcacctggagctgttctggtctagagtgaatattcccaaggtgctaagagctgcagaacaagctcatctttgggcagaactggtgtttttgtatgacaagtatgaagaatatgataatgccataattaccatgatgaatcatccaactgatgcctggaaagaagggcaattcaaagatatcattaccaaggttgccaatgtggaactatactacagagcaatacagttctacttagaattcaagcctctgttgttaaatgatttgctgatggtgctgtctccacggttggatcacactcgtgcagtcaattatttcagcaaggttaaacagctaccactggtgaaaccgtatttgcgttcagttcagaaccataacaacaaatctgtgaatgaatcattgaacaatctttttattacagaagaagattatcaggctctgcgaacatcaatagatgcttatgacaactttgacaatatctcgcttgctcagcgtttggaaaaacatgaactcattgagttcaggagaattgctgcttatctcttcaaaggcaacaatcgctggaaacagagtgtagagctgtgcaagaaagacagcctttacaaggatgcaatgcagtatgcttctgaatctaaagatactgaattggctgaagaactcctgcagtggtttttgcaggaagaaaaaagagagtgctttggagcttgtctgtttacctgttacgatcttttaaggccagatgtcgtcctagaaactgcatggaggcacaatatcatggattttgccatgccctatttcatccaggtcatgaaggagtacttgacaaaggtggataaattagatgcttcagaatcactgagaaaagaagaagaacaagctacagagacacaacccattgtttatggtaatctctctctgtaacctcaaaaaattcattagacaaatatttaattacttagagactgtgcctcaaaatagaatacaacaagcttctaaagtgcaaaaggctttctaag

SEQ ID NO: 4536 - protein, 1639 aa, Homosapiens
MAQILPIRFQEHLQLQNLGINPANIGFSTLTMESDKFICIREKVGEQAQVVIIDMNDPSNPIRRPISADSAIMNPASKVIALKAGKTLQIFNIEMKSKMKAHTMTDDVTFWKWISLNTVALVTDNAVYHWSMEGESQPVKMFDRHSSLAGCQIINYRTDAKQKWLLLTGISAQQNRVVGAMQLYSVDRKVSQPIEGHAASFAQFKMEGNAEESTLFCFAVRGQAGGKLHIIEVGTPPTGNQPFPKKAVDVFFPPEAQNDFPVAMQISEKHDVVFLITKYGYIHLYDLETGTCIYMNRISGETIFVTAPHEATAGIIGVNRKGQVLSVCVEEENIIPYITNVLQNPDLALRMAVRNNLAGAEELFARKFNALFAQGNYSEAAKVAANAPKGILRTPDTIRRFQSVPAQPGQTSPLLQYFGILLDQGQLNKYESLELCRPVLQQGRKQLLEKWLKEDKLECSEELGDLVKSVDPTLALSVYLRANVPNKVIQCFAETGQVQKIVLYAKKVGYTPDWIFLLRNVMRISPDQGQQFAQMLVQDEEPLADITQIVDVFMEYNLIQQCTAFLLDALKNNRPSEGPLQTRLLEMNLMHAPQVADAILGNQMFTHYDRAHIAQLCEKAGLLQRALEHFTDLYDIKRAVVHTHLLNPEWLVNYFGSLSVEDSLECLRAMLSANIRQNLQICVQVASKYHEQLSTQSLIELFESFKSFEGLFYFLGSIVNFSQDPDVHFKYIQAACKTGQIKEVERICRESNCYDPERVKNFLKEAKLTDQLPLIIVCDRFDFVHDLVLYLYRNNLQKYIEIYVQKVNPSRLPVVIGGLLDVDCSEDVIKNLILVVRGQFSTDELVAEVEKRNRLKLLLPWLEARIHEGCEEPATHNALAKIYIDSNNNPERFLRENPYYDSRVVGKYCEKRDPHLACVAYERGQCDLELINVCNENSLFKSLSRYLVRRKDPELWGSVLLESNPYRRPLIDQVVQTALSETQDPEEVSVTVKAFMTADLPNELIELLEKIVLDNSVFSEHRNLQNLLILTAIKADRTRVMEYINRLDNYDAPDIANIAISNELFEEAFAIFRKFDVNTSAVQVLIEHIGNLDRAYEFAERCNEPAVWSQLAKAQLQKGMVKEAIDSYIKADDPSSYMEVVQAANTSGNWEELVKYLQMARKKARESYVETELIFALAKTNRLAELEEFINGPNNAHIQQVGDRCYDEKMYDAAKLLYNNVSNFGRLASTLVHLGEYQAAVDGARKANSTRTWKEVCFACVDGKEFRLAQMCGLHIVVHADELEELINYYQDRGYFEELITMLEAALGLERAHMGMFTELAILYSKFKPQKMREHLELFWSRVNIPKVLRAAEQAHLWAELVFLYDKYEEYDNAIITMMNHPTDAWKEGQFKDIITKVANVELYYRAIQFYLEFKPLLLNDLLMVLSPRLDHTRAVNYFSKVKQLPLVKPYLRSVQNHNNKSVNESLNNLFITEEDYQALRTSIDAYDNFDNISLAQRLEKHELIEFRRIAAYLFKGNNRWKQSVELCKKDSLYKDAMQYASESKDTELAEELLQWFLQEEKRECFGACLFTCYDLLRPDVVLETAWRHNIMDFAMPYFIQVMKEYLTKVDKLDASESLRKEEEQATETQPIVYGNLSL

SEQ ID NO: 4537 - DNA, 6222 bp, Homosapiens
ggcggagttctgtcgccgggatccttccgctgggctcagccgtttccggagtctgcgctgcgcccggttccgccattgcggctctcctggcccctggagcctccgcccccgacccgagctctttcgtctgcctgccagtttcctgcgtccccggagaggatcctgctgagcccagcctcccccctccccttctcctcctctcccttggagagcccgggcagccactgccccgcagccccagtgacaggaggagaccataacccccgacagcgccatggcccagattctgccaattcgttttcaggagcatctccagctccagaacctgggtatcaacccagcaaacattggcttcagtaccctgactatggagtctgacaaattcatctgcattagagaaaaagtaggagagcaggcccaggtggtaatcattgatatgaatgacccaagtaatccaattcgaagaccaatttcagcagacagcgccatcatgaatccagctagcaaagtaattgcactgaaagctgggaaaactcttcagatttttaacattgaaatgaaaagtaaaatgaaggctcataccatgactgatgatgtcaccttttggaaatggatctctttgaatacggttgctcttgttacggataatgcagtttatcactggagtatggaaggagagtctcagccagtgaaaatgtttgatcgccattctagccttgcagggtgccagattatcaattaccgtacagatgcaaaacaaaagtggttacttctgactggtatatctgcacagcaaaatcgtgtggtgggagctatgcagctatattctgtagataggaaagtgtctcagcccattgaaggacatgcagctagctttgcacagtttaagatggaaggaaatgcagaagaatcaacgttattttgttttgcagttcggggccaagctggagggaagttacatattattgaagttggcacaccacctacagggaaccagccctttccaaagaaggcagtggatgtcttctttcctccagaagcacaaaatgattttcctgttgcaatgcagatcagtgaaaagcatgatgtggtgttcttgataaccaagtatggttatatccacctctatgatcttgagactggtacctgcatctacatgaatagaatcagtggagaaacaatttttgttactgcacctcatgaagccacagctggaataattggagtaaacagaaagggacaagttctgtcagtgtgtgtggaagaagaaaacataattccttacatcaccaatgttctacaaaatcctgatttggctctgagaatggctgtacgtaataacttagccggtgctgaagaactctttgcccggaaatttaatgctctttttgcccagggaaattactcggaggcagcaaaggtggctgctaatgcaccaaagggaattcttcgtactccagacactatccgtcggttccagagtgtcccagcccagccaggtcaaacttctcctctacttcagtactttggtatccttttggaccagggacagctcaacaaatacgaatccttagagctttgtaggcctgtacttcagcaagggcgaaaacagcttttggagaaatggttaaaagaagataagctggaatgttctgaagaactgggtgatcttgtgaaatctgtggaccctacattggcacttagtgtgtacctaagggctaacgtcccaaataaagtcattcagtgctttgcagaaacaggtcaagtccaaaagattgttttatatgctaaaaaagttggatacactccagattggatatttctgctgagaaatgtaatgcgaatcagtccagatcagggacagcagtttgcccaaatgttagttcaagatgaagagcctcttgctgacatcacacagattgtagatgtctttatggaatacaatctaattcagcagtgtactgcattcttgcttgatgctctgaagaataatcgcccatctgaaggtcctttacagacgcggttacttgagatgaaccttatgcatgcgcctcaagttgcagatgctattctaggcaatcagatgttcacacattatgaccgggctcatattgctcaactgtgtgaaaaggctggcctactgcagcgtgcattagaacatttcactgatttatatgatataaaacgtgcagtggttcacacccatcttcttaaccctgagtggttagtcaactactttggttccttatcagtagaagactccctagaatgtctcagagccatgctgtctgccaacatccgtcagaatctgcagatttgtgttcaggtggcttctaaatatcatgaacaactgtcaactcagtctctgattgaactttttgaatctttcaagagttttgaaggtctcttttattttctgggatccattgttaactttagccaggacccagatgtgcactttaaatatattcaggcagcttgcaagactgggcaaatcaaagaagtagaaagaatctgtagagaaagcaactgctacgatcctgagcgagtcaagaattttcttaaggaagcaaaactaacagatcagctaccacttatcattgtgtgtgatcgatttgactttgtccatgatttggtgctctatttatatagaaataatcttcaaaagtatatagagatatatgtacagaaggtgaatccaagtcgacttcctgtagttattggaggattacttgatgttgactgttctgaagatgtcataaaaaacttgattcttgttgtaagaggtcaattctctactgatgagcttgttgctgaggttgaaaaaagaaacagattgaaactgcttctgccttggctagaggccagaattcatgagggctgtgaggagcctgctactcacaatgccttagccaaaatctacatagacagtaataacaacccggagagatttcttcgtgaaaatccctactatgacagtcgcgttgttggaaagtattgtgagaagagagatccacatctggcctgtgttgcttatgaacgtggccaatgtgatctggaacttattaatgtttgcaatgagaattccctcttcaaaagtctttctcgctacctggtacgtcgaaaggatccagaattgtggggcagcgtgctgctggaaagcaatccttacaggagacccctaattgaccaggttgtacaaacagctttgtctgagactcaggaccctgaagaagtgtcagtaactgtaaaggctttcatgactgcagaccttcctaatgaactcattgaactgctggagaaaattgtccttgataactctgtattcagtgaacacaggaatctgcaaaacctccttatcctcactgcaattaaggctgaccgtacacgtgttatggagtatattaaccgcctggataattatgatgccccagatattgccaatatcgccatcagcaatgagctgtttgaagaagcatttgccattttccggaaatttgatgtcaatacttcagcagttcaggtcttaattgagcatattggaaacttggatcgggcatatgagtttgctgaacgttgcaatgaacctgcggtctggagtcaacttgcaaaagcccagttgcagaaaggaatggtgaaagaagccattgattcttatatcaaagcagatgatccttcctcctacatggaagttgttcaggctgccaatactagtggaaactgggaagaactggtgaagtacttgcagatggcccgtaagaaggctcgagagtcctatgtggagacagaactgatattcgcactggctaaaacaaaccgccttgcagagttagaagaatttatcaatggaccaaataatgctcatatccaacaagttggtgaccgttgttatgatgaaaaaatgtatgatgctgctaagttgttgtacaataatgtttccaattttggacgtttggcatctaccctggttcacctgggtgaatatcaggcagctgttgatggggctaggaaagctaacagtactcgaacatggaaagaggtctgcttcgcctgtgtagatgggaaagaattccgtcttgctcagatgtgtggacttcatattgttgtacatgcagatgaattagaagaacttatcaactactatcaggatcgtggctattttgaagagctgatcaccatgttggaagcagcactgggacttgagcgagctcacatgggaatgtttactgaattagctattctatactctaaatttaagcctcagaaaatgagggagcacctggagctgttctggtctagagtgaatattcccaaggtgctaagagctgcagaacaagctcatctttgggcagaactggtgtttttgtatgacaagtatgaagaatatgataatgccataattaccatgatgaatcatccaactgatgcctggaaagaagggcaattcaaagatatcattaccaaggttgccaatgtggaactatactacagagcaatacagttctacttagaattcaagcctctgttgttaaatgatttgctgatggtgctgtctccacggttggatcacactcgtgcagtcaattatttcagcaaggttaaacagctaccactggtgaaaccgtatttgcgttcagttcagaaccataacaacaaatctgtgaatgaatcattgaacaatctttttattacagaagaagattatcaggctctgcgaacatcaatagatgcttatgacaactttgacaatatctcgcttgctcagcgtttggaaaaacatgaactcattgagttcaggagaattgctgcttatctcttcaaaggcaacaatcgctggaaacagagtgtagagctgtgcaagaaagacagcctttacaaggatgcaatgcagtatgcttctgaatctaaagatactgaattggctgaagaactcctgcagtggtttttgcaggaagaaaaaagagagtgctttggagcttgtctgtttacctgttacgatcttttaaggccagatgtcgtcctagaaactgcatggaggcacaatatcatggattttgccatgccctatttcatccaggtcatgaaggagtacttgacaaaggtggataaattagatgcttcagaatcactgagaaaagaagaagaacaagctacagagacacaacccattgtttatggtcagccccagttgatgctgacagcaggacccagtgttgccgtccctccccaggcaccttttggttatggttataccgcaccaccgtatggacagccacagcctggctttgggtacagcatgtgagatgaagcgctgatcctgtagtcacctattttcgtactgaaacatcgtctttacccacttctcagtttataatgggggaaaacaggcaacgtgttcttgtaacctttatttcatgaaggacttctttttgtttctaactataaacttggatcacctatgttaaaaccttatttcacattccacatcattttagaatttattttcgaaggggaatagtttcaatgttttattcacttgggctttttttcttccccctctttctttaaagaactgctcaatattcaatctgttgtgaagaacctgatttgcactctgtagtgtttaaagaaacaaagaaactctaatattgaatctcttaaatttagtgtatgtaaacagcttacaaatacgtattgtctaaatgcatttaaatctgttttattcaaagaaaagctaaagcaaaaacactggcatatgaccatgcaagactgtcagtgccaacaaagacaacactaatcagcacatcgtacactggattgcagtgcttcccagattattgaaaaatgttacagacaacttgcctgatttttaaatgagcgtaaaaggccctctaacctatgcaggtttccccattatgcatatagaaaatgctagtatgttttgctcacttcatatgtaacaggtgcccttatgttgtgctgtatcctgtgctttttctgtgggaccattccattcaggagcaaagagcaccatgattccaatcttgtgtgtgtttactaacccttccctgaggtttgtgtatgttggatattgtggtgttttagatcactgagtgtacagaagagagaaattcaaacaaaatattgctgttcttcagttttgtttgtggaatttgaaattactcaaatttaaaataaattactggactgtggaaataacat

SEQ ID NO: 4538 - protein, 1675 aa, Homosapiens; identical to SEQ ID NO: 698

SEQ ID NO: 4539 - DNA, 6256 bp, Homosapiens
ggcggagttctgtcgccgggatccttccgctgggctcagccgtttccggagtctgcgctgcgcccggttccgccattgcggctctcctggcccctggagcctccgcccccgacccgagctctttcgtctgcctgccagtttcctgcgtccccggagaggatcctgctgagcccagcctcccccctccccttctcctcctctcccttggagagcccgggcagccactgccccgcagccccagtgacaggaggagaccataacccccgacagcgccatggcccagattctgccaattcgttttcaggagcatctccagctccagaacctgggtatcaacccagcaaacattggcttcagtaccctgactatggagtctgacaaattcatctgcattagagaaaaagtaggagagcaggcccaggtggtaatcattgatatgaatgacccaagtaatccaattcgaagaccaatttcagcagacagcgccatcatgaatccagctagcaaagtaattgcactgaaagctgggaaaactcttcagatttttaacattgaaatgaaaagtaaaatgaaggctcataccatgactgatgatgtcaccttttggaaatggatctctttgaatacggttgctcttgttacggataatgcagtttatcactggagtatggaaggagagtctcagccagtgaaaatgtttgatcgccattctagccttgcagggtgccagattatcaattaccgtacagatgcaaaacaaaagtggttacttctgactggtatatctgcacagcaaaatcgtgtggtgggagctatgcagctatattctgtagataggaaagtgtctcagcccattgaaggacatgcagctagctttgcacagtttaagatggaaggaaatgcagaagaatcaacgttattttgttttgcagttcggggccaagctggagggaagttacatattattgaagttggcacaccacctacagggaaccagccctttccaaagaaggcagtggatgtcttctttcctccagaagcacaaaatgattttcctgttgcaatgcagatcagtgaaaagcatgatgtggtgttcttgataaccaagtatggttatatccacctctatgatcttgagactggtacctgcatctacatgaatagaatcagtggagaaacaatttttgttactgcacctcatgaagccacagctggaataattggagtaaacagaaagggacaagttctgtcagtgtgtgtggaagaagaaaacataattccttacatcaccaatgttctacaaaatcctgatttggctctgagaatggctgtacgtaataacttagccggtgctgaagaactctttgcccggaaatttaatgctctttttgcccagggaaattactcggaggcagcaaaggtggctgctaatgcaccaaagggaattcttcgtactccagacactatccgtcggttccagagtgtcccagcccagccaggtcaaacttctcctctacttcagtactttggtatccttttggaccagggacagctcaacaaatacgaatccttagagctttgtaggcctgtacttcagcaagggcgaaaacagcttttggagaaatggttaaaagaagataagctggaatgttctgaagaactgggtgatcttgtgaaatctgtggaccctacattggcacttagtgtgtacctaagggctaacgtcccaaataaagtcattcagtgctttgcagaaacaggtcaagtccaaaagattgttttatatgctaaaaaagttggatacactccagattggatatttctgctgagaaatgtaatgcgaatcagtccagatcagggacagcagtttgcccaaatgttagttcaagatgaagagcctcttgctgacatcacacagattgtagatgtctttatggaatacaatctaattcagcagtgtactgcattcttgcttgatgctctgaagaataatcgcccatctgaaggtcctttacagacgcggttacttgagatgaaccttatgcatgcgcctcaagttgcagatgctattctaggcaatcagatgttcacacattatgaccgggctcatattgctcaactgtgtgaaaaggctggcctactgcagcgtgcattagaacatttcactgatttatatgatataaaacgtgcagtggttcacacccatcttcttaaccctgagtggttagtcaactactttggttccttatcagtagaagactccctagaatgtctcagagccatgctgtctgccaacatccgtcagaatctgcagatttgtgttcaggtggcttctaaatatcatgaacaactgtcaactcagtctctgattgaactttttgaatctttcaagagttttgaaggtctcttttattttctgggatccattgttaactttagccaggacccagatgtgcactttaaatatattcaggcagcttgcaagactgggcaaatcaaagaagtagaaagaatctgtagagaaagcaactgctacgatcctgagcgagtcaagaattttcttaaggaagcaaaactaacagatcagctaccacttatcattgtgtgtgatcgatttgactttgtccatgatttggtgctctatttatatagaaataatcttcaaaagtatatagagatatatgtacagaaggtgaatccaagtcgacttcctgtagttattggaggattacttgatgttgactgttctgaagatgtcataaaaaacttgattcttgttgtaagaggtcaattctctactgatgagcttgttgctgaggttgaaaaaagaaacagattgaaactgcttctgccttggctagaggccagaattcatgagggctgtgaggagcctgctactcacaatgccttagccaaaatctacatagacagtaataacaacccggagagatttcttcgtgaaaatccctactatgacagtcgcgttgttggaaagtattgtgagaagagagatccacatctggcctgtgttgcttatgaacgtggccaatgtgatctggaacttattaatgtttgcaatgagaattccctcttcaaaagtctttctcgctacctggtacgtcgaaaggatccagaattgtggggcagcgtgctgctggaaagcaatccttacaggagacccctaattgaccaggttgtacaaacagctttgtctgagactcaggaccctgaagaagtgtcagtaactgtaaaggctttcatgactgcagaccttcctaatgaactcattgaactgctggagaaaattgtccttgataactctgtattcagtgaacacaggaatctgcaaaacctccttatcctcactgcaattaaggctgaccgtacacgtgttatggagtatattaaccgcctggataattatgatgccccagatattgccaatatcgccatcagcaatgagctgtttgaagaagcatttgccattttccggaaatttgatgtcaatacttcagcagttcaggtcttaattgagcatattggaaacttggatcgggcatatgagtttgctgaacgttgcaatgaacctgcggtctggagtcaacttgcaaaagcccagttgcagaaaggaatggtgaaagaagccattgattcttatatcaaagcagatgatccttcctcctacatggaagttgttcaggctgccaatactagtggaaactgggaagaactggtgaagtacttgcagatggcccgtaagaaggctcgagagtcctatgtggagacagaactgatattcgcactggctaaaacaaaccgccttgcagagttagaagaatttatcaatggaccaaataatgctcatatccaacaagttggtgaccgttgttatgatgaaaaaatgtatgatgctgctaagttgttgtacaataatgtttccaattttggacgtttggcatctaccctggttcacctgggtgaatatcaggcagctgttgatggggctaggaaagctaacagtactcgaacatggaaagaggtctgcttcgcctgtgtagatgggaaagaattccgtcttgctcagatgtgtggacttcatattgttgtacatgcagatgaattagaagaacttatcaactactatcaggatcgtggctattttgaagagctgatcaccatgttggaagcagcactgggacttgagcgagctcacatgggaatgtttactgaattagctattctatactctaaatttaagcctcagaaaatgagggagcacctggagctgttctggtctagagtgaatattcccaaggtgctaagagctgcagaacaagctcatctttgggcagaactggtgtttttgtatgacaagtatgaagaatatgataatgccataattaccatgatgaatcatccaactgatgcctggaaagaagggcaattcaaagatatcattaccaaggttgccaatgtggaactatactacagagcaatacagttctacttagaattcaagcctctgttgttaaatgatttgctgatggtgctgtctccacggttggatcacactcgtgcagtcaattatttcagcaaggttaaacagctaccactggtgaaaccgtatttgcgttcagttcagaaccataacaacaaatctgtgaatgaatcattgaacaatctttttattacagaagaagattatcaggctctgcgaacatcaatagatgcttatgacaactttgacaatatctcgcttgctcagcgtttggaaaaacatgaactcattgagttcaggagaattgctgcttatctcttcaaaggcaacaatcgctggaaacagagtgtagagctgtgcaagaaagacagcctttacaaggatgcaatgcagtatgcttctgaatctaaagatactgaattggctgaagaactcctgcagtggtttttgcaggaagaaaaaagagagtgctttggagcttgtctgtttacctgttacgatcttttaaggccagatgtcgtcctagaaactgcatggaggcacaatatcatggattttgccatgccctatttcatccaggtcatgaaggagtacttgacaaaggtggataaattagatgcttcagaatcactgagaaaagaagaagaacaagctacagagacacaacccattgtttatggtcagccccagttgatgctgacagcaggacccagtgttgccgtccctccccaggcaccttttggttatggttataccgcaccaccgtatggacagccacagcctggctttgggtacagcatgtgagatgaagcgctgatcctgtagtcacctattttcgtactgaaacatcgtctttacccacttctcagtttataatgggggaaaacaggcaacgtgttcttgtaacctttatttcatgaaggacttctttttgtttctaactataaacttggatcacctatgttaaaaccttatttcacattccacatcattttagaatttattttcgaaggggaatagtttcaatgttttattcacttgggctttttttcttccccctctttctttaaagaactgctcaatattcaatctgttgtgaagaacctgatttgcactctgtagtgtttaaagaaacaaagaaactctaatattgaatctcttaaatttagtgtatgtaaacagcttacaaatacgtattgtctaaatgcatttaaatctgttttattcaaagaaaagctaaagcaaaaacactggcatatgaccatgcaagactgtcagtgccaacaaagacaacactaatcagcacatcgtacactggattgcagtgcttcccagattattgaaaaatgttacagacaacttgcctgatttttaaatgagcgtaaaaggccctctaacctatgcaggtttccccattatgcatatagaaaatgctagtatgttttgctcacttcatatgtaacaggtgcccttatgttgtgctgtatcctgtgctttttctgtgggaccattccattcaggagcaaagagcaccatgattccaatcttgtgtgtgtttactaacccttccctgaggtttgtgtatgttggatattgtggtgttttagatcactgagtgtacagaagagagaaattcaaacaaaatattgctgttcttcagttttgtttgtggaatttgaaattactcaaatttaaaataaattactggactgtggaaataacatagaattgaagttttaattaaataccactcaaacg

SEQ ID NO: 4540 - protein, 1675 aa, Homosapiens; identical to SEQ ID NO: 698

SEQ ID NO: 4541 - DNA, 6565 bp, Homosapiens
ggcggagttctgtcgccgggatccttccgctgggctcagccgtttccggagtctgcgctgcgcccggttccgccattgcggctctcctggcccctggagcctccgcccccgacccgagctctttcgtctgcctgccagtttcctgcgtccccggagaggatcctgctgagcccagcctcccccctccccttctcctcctctcccttggagagcccgggcagccactgccccgcagccccagtgacaggaggagaccataacccccgacagcgccatggcccagattctgccaattcgttttcaggagcatctccagctccagaacctgggtatcaacccagcaaacattggcttcagtaccctgactatggagtctgacaaattcatctgcattagagaaaaagtaggagagcaggcccaggtggtaatcattgatatgaatgacccaagtaatccaattcgaagaccaatttcagcagacagcgccatcatgaatccagctagcaaagtaattgcactgaaagctgggaaaactcttcagatttttaacattgaaatgaaaagtaaaatgaaggctcataccatgactgatgatgtcaccttttggaaatggatctctttgaatacggttgctcttgttacggataatgcagtttatcactggagtatggaaggagagtctcagccagtgaaaatgtttgatcgccattctagccttgcagggtgccagattatcaattaccgtacagatgcaaaacaaaagtggttacttctgactggtatatctgcacagcaaaatcgtgtggtgggagctatgcagctatattctgtagataggaaagtgtctcagcccattgaaggacatgcagctagctttgcacagtttaagatggaaggaaatgcagaagaatcaacgttattttgttttgcagttcggggccaagctggagggaagttacatattattgaagttggcacaccacctacagggaaccagccctttccaaagaaggcagtggatgtcttctttcctccagaagcacaaaatgattttcctgttgcaatgcagatcagtgaaaagcatgatgtggtgttcttgataaccaagtatggttatatccacctctatgatcttgagactggtacctgcatctacatgaatagaatcagtggagaaacaatttttgttactgcacctcatgaagccacagctggaataattggagtaaacagaaagggacaagttctgtcagtgtgtgtggaagaagaaaacataattccttacatcaccaatgttctacaaaatcctgatttggctctgagaatggctgtacgtaataacttagccggtgctgaagaactctttgcccggaaatttaatgctctttttgcccagggaaattactcggaggcagcaaaggtggctgctaatgcaccaaagggaattcttcgtactccagacactatccgtcggttccagagtgtcccagcccagccaggtcaaacttctcctctacttcagtactttggtatccttttggaccagggacagctcaacaaatacgaatccttagagctttgtaggcctgtacttcagcaagggcgaaaacagcttttggagaaatggttaaaagaagataagctggaatgttctgaagaactgggtgatcttgtgaaatctgtggaccctacattggcacttagtgtgtacctaagggctaacgtcccaaataaagtcattcagtgctttgcagaaacaggtcaagtccaaaagattgttttatatgctaaaaaagttggatacactccagattggatatttctgctgagaaatgtaatgcgaatcagtccagatcagggacagcagtttgcccaaatgttagttcaagatgaagagcctcttgctgacatcacacagattgtagatgtctttatggaatacaatctaattcagcagtgtactgcattcttgcttgatgctctgaagaataatcgcccatctgaaggtcctttacagacgcggttacttgagatgaaccttatgcatgcgcctcaagttgcagatgctattctaggcaatcagatgttcacacattatgaccgggctcatattgctcaactgtgtgaaaaggctggcctactgcagcgtgcattagaacatttcactgatttatatgatataaaacgtgcagtggttcacacccatcttcttaaccctgagtggttagtcaactactttggttccttatcagtagaagactccctagaatgtctcagagccatgctgtctgccaacatccgtcagaatctgcagatttgtgttcaggtggcttctaaatatcatgaacaactgtcaactcagtctctgattgaactttttgaatctttcaagagttttgaaggtctcttttattttctgggatccattgttaactttagccaggacccagatgtgcactttaaatatattcaggcagcttgcaagactgggcaaatcaaagaagtagaaagaatctgtagagaaagcaactgctacgatcctgagcgagtcaagaattttcttaaggaagcaaaactaacagatcagctaccacttatcattgtgtgtgatcgatttgactttgtccatgatttggtgctctatttatatagaaataatcttcaaaagtatatagagatatatgtacagaaggtgaatccaagtcgacttcctgtagttattggaggattacttgatgttgactgttctgaagatgtcataaaaaacttgattcttgttgtaagaggtcaattctctactgatgagcttgttgctgaggttgaaaaaagaaacagattgaaactgcttctgccttggctagaggccagaattcatgagggctgtgaggagcctgctactcacaatgccttagccaaaatctacatagacagtaataacaacccggagagatttcttcgtgaaaatccctactatgacagtcgcgttgttggaaagtattgtgagaagagagatccacatctggcctgtgttgcttatgaacgtggccaatgtgatctggaacttattaatgtttgcaatgagaattccctcttcaaaagtctttctcgctacctggtacgtcgaaaggatccagaattgtggggcagcgtgctgctggaaagcaatccttacaggagacccctaattgaccaggttgtacaaacagctttgtctgagactcaggaccctgaagaagtgtcagtaactgtaaaggctttcatgactgcagaccttcctaatgaactcattgaactgctggagaaaattgtccttgataactctgtattcagtgaacacaggaatctgcaaaacctccttatcctcactgcaattaaggctgaccgtacacgtgttatggagtatattaaccgcctggataattatgatgccccagatattgccaatatcgccatcagcaatgagctgtttgaagaagcatttgccattttccggaaatttgatgtcaatacttcagcagttcaggtcttaattgagcatattggaaacttggatcgggcatatgagtttgctgaacgttgcaatgaacctgcggtctggagtcaacttgcaaaagcccagttgcagaaaggaatggtgaaagaagccattgattcttatatcaaagcagatgatccttcctcctacatggaagttgttcaggctgccaatactagtggaaactgggaagaactggtgaagtacttgcagatggcccgtaagaaggctcgagagtcctatgtggagacagaactgatattcgcactggctaaaacaaaccgccttgcagagttagaagaatttatcaatggaccaaataatgctcatatccaacaagttggtgaccgttgttatgatgaaaaaatgtatgatgctgctaagttgttgtacaataatgtttccaattttggacgtttggcatctaccctggttcacctgggtgaatatcaggcagctgttgatggggctaggaaagctaacagtactcgaacatggaaagaggtctgcttcgcctgtgtagatgggaaagaattccgtcttgctcagatgtgtggacttcatattgttgtacatgcagatgaattagaagaacttatcaactactatcaggatcgtggctattttgaagagctgatcaccatgttggaagcagcactgggacttgagcgagctcacatgggaatgtttactgaattagctattctatactctaaatttaagcctcagaaaatgagggagcacctggagctgttctggtctagagtgaatattcccaaggtgctaagagctgcagaacaagctcatctttgggcagaactggtgtttttgtatgacaagtatgaagaatatgataatgccataattaccatgatgaatcatccaactgatgcctggaaagaagggcaattcaaagatatcattaccaaggttgccaatgtggaactatactacagagcaatacagttctacttagaattcaagcctctgttgttaaatgatttgctgatggtgctgtctccacggttggatcacactcgtgcagtcaattatttcagcaaggttaaacagctaccactggtgaaaccgtatttgcgttcagttcagaaccataacaacaaatctgtgaatgaatcattgaacaatctttttattacagaagaagattatcaggctctgcgaacatcaatagatgcttatgacaactttgacaatatctcgcttgctcagcgtttggaaaaacatgaactcattgagttcaggagaattgctgcttatctcttcaaaggcaacaatcgctggaaacagagtgtagagctgtgcaagaaagacagcctttacaaggatgcaatgcagtatgcttctgaatctaaagatactgaattggctgaagaactcctgcagtggtttttgcaggaagaaaaaagagagtgctttggagcttgtctgtttacctgttacgatcttttaaggccagatgtcgtcctagaaactgcatggaggcacaatatcatggattttgccatgccctatttcatccaggtcatgaaggagtacttgacaaaggtggataaattagatgcttcagaatcactgagaaaagaagaagaacaagctacagagacacaacccattgtttatggtcagccccagttgatgctgacagcaggacccagtgttgccgtccctccccaggcaccttttggttatggttataccgcaccaccgtatggacagccacagcctggctttgggtacagcatgtgagatgaagcgctgatcctgtagtcacctattttcgtactgaaacatcgtctttacccacttctcagtttataatgggggaaaacaggcaacgtgttcttgtaacctttatttcatgaaggacttctttttgtttctaactataaacttggatcacctatgttaaaaccttatttcacattccacatcattttagaatttattttcgaaggggaatagtttcaatgttttattcacttgggctttttttcttccccctctttctttaaagaactgctcaatattcaatctgttgtgaagaacctgatttgcactctgtagtgtttaaagaaacaaagaaactctaatattgaatctcttaaatttagtgtatgtaaacagcttacaaatacgtattgtctaaatgcatttaaatctgttttattcaaagaaaagctaaagcaaaaacactggcatatgaccatgcaagactgtcagtgccaacaaagacaacactaatcagcacatcgtacactggattgcagtgcttcccagattattgaaaaatgttacagacaacttgcctgatttttaaatgagcgtaaaaggccctctaacctatgcaggtttccccattatgcatatagaaaatgctagtatgttttgctcacttcatatgtaacaggtgcccttatgttgtgctgtatcctgtgctttttctgtgggaccattccattcaggagcaaagagcaccatgattccaatcttgtgtgtgtttactaacccttccctgaggtttgtgtatgttggatattgtggtgttttagatcactgagtgtacagaagagagaaattcaaacaaaatattgctgttcttcagttttgtttgtggaatttgaaattactcaaatttaaaataaattactggactgtggaaataacatagaattgaagttttaattaaataccactcaaacgaaaagaacagtagtttttgtagttttatattggatactgaggcattagggaggcatgaaaggaagaggaatgaggattgagacatgtgaagacattgtgcattatatcaatgtgcattcctgtagttcattaacaaggtacatgcaatagtctaaagaaccagagtcactactatagtggcttaacatttaatctgtctccaatattttaaccaagtgacaccgaggtttttatcgaagcatttcacttaaatgaacaaatcatggctgttatattaacttgaaataaaatatatttaaacatgtagtt

SEQ ID NO: 4542 - protein, 1675 aa, Homosapiens; identical to SEQ ID NO: 698

SEQ ID NO: 4543 - DNA, 6859 bp, Homosapiens
ggcggagttctgtcgccgggatccttccgctgggctcagccgtttccggagtctgcgctgcgcccggttccgccattgcggctctcctggcccctggagcctccgcccccgacccgagctctttcgtctgcctgccagtttcctgcgtccccggagaggatcctgctgagcccagcctcccccctccccttctcctcctctcccttggagagcccgggcagccactgccccgcagccccagtgacaggaggagaccataacccccgacagcgccatggcccagattctgccaattcgttttcaggagcatctccagctccagaacctgggtatcaacccagcaaacattggcttcagtaccctgactatggagtctgacaaattcatctgcattagagaaaaagtaggagagcaggcccaggtggtaatcattgatatgaatgacccaagtaatccaattcgaagaccaatttcagcagacagcgccatcatgaatccagctagcaaagtaattgcactgaaagctgggaaaactcttcagatttttaacattgaaatgaaaagtaaaatgaaggctcataccatgactgatgatgtcaccttttggaaatggatctctttgaatacggttgctcttgttacggataatgcagtttatcactggagtatggaaggagagtctcagccagtgaaaatgtttgatcgccattctagccttgcagggtgccagattatcaattaccgtacagatgcaaaacaaaagtggttacttctgactggtatatctgcacagcaaaatcgtgtggtgggagctatgcagctatattctgtagataggaaagtgtctcagcccattgaaggacatgcagctagctttgcacagtttaagatggaaggaaatgcagaagaatcaacgttattttgttttgcagttcggggccaagctggagggaagttacatattattgaagttggcacaccacctacagggaaccagccctttccaaagaaggcagtggatgtcttctttcctccagaagcacaaaatgattttcctgttgcaatgcagatcagtgaaaagcatgatgtggtgttcttgataaccaagtatggttatatccacctctatgatcttgagactggtacctgcatctacatgaatagaatcagtggagaaacaatttttgttactgcacctcatgaagccacagctggaataattggagtaaacagaaagggacaagttctgtcagtgtgtgtggaagaagaaaacataattccttacatcaccaatgttctacaaaatcctgatttggctctgagaatggctgtacgtaataacttagccggtgctgaagaactctttgcccggaaatttaatgctctttttgcccagggaaattactcggaggcagcaaaggtggctgctaatgcaccaaagggaattcttcgtactccagacactatccgtcggttccagagtgtcccagcccagccaggtcaaacttctcctctacttcagtactttggtatccttttggaccagggacagctcaacaaatacgaatccttagagctttgtaggcctgtacttcagcaagggcgaaaacagcttttggagaaatggttaaaagaagataagctggaatgttctgaagaactgggtgatcttgtgaaatctgtggaccctacattggcacttagtgtgtacctaagggctaacgtcccaaataaagtcattcagtgctttgcagaaacaggtcaagtccaaaagattgttttatatgctaaaaaagttggatacactccagattggatatttctgctgagaaatgtaatgcgaatcagtccagatcagggacagcagtttgcccaaatgttagttcaagatgaagagcctcttgctgacatcacacagattgtagatgtctttatggaatacaatctaattcagcagtgtactgcattcttgcttgatgctctgaagaataatcgcccatctgaaggtcctttacagacgcggttacttgagatgaaccttatgcatgcgcctcaagttgcagatgctattctaggcaatcagatgttcacacattatgaccgggctcatattgctcaactgtgtgaaaaggctggcctactgcagcgtgcattagaacatttcactgatttatatgatataaaacgtgcagtggttcacacccatcttcttaaccctgagtggttagtcaactactttggttccttatcagtagaagactccctagaatgtctcagagccatgctgtctgccaacatccgtcagaatctgcagatttgtgttcaggtggcttctaaatatcatgaacaactgtcaactcagtctctgattgaactttttgaatctttcaagagttttgaaggtctcttttattttctgggatccattgttaactttagccaggacccagatgtgcactttaaatatattcaggcagcttgcaagactgggcaaatcaaagaagtagaaagaatctgtagagaaagcaactgctacgatcctgagcgagtcaagaattttcttaaggaagcaaaactaacagatcagctaccacttatcattgtgtgtgatcgatttgactttgtccatgatttggtgctctatttatatagaaataatcttcaaaagtatatagagatatatgtacagaaggtgaatccaagtcgacttcctgtagttattggaggattacttgatgttgactgttctgaagatgtcataaaaaacttgattcttgttgtaagaggtcaattctctactgatgagcttgttgctgaggttgaaaaaagaaacagattgaaactgcttctgccttggctagaggccagaattcatgagggctgtgaggagcctgctactcacaatgccttagccaaaatctacatagacagtaataacaacccggagagatttcttcgtgaaaatccctactatgacagtcgcgttgttggaaagtattgtgagaagagagatccacatctggcctgtgttgcttatgaacgtggccaatgtgatctggaacttattaatgtttgcaatgagaattccctcttcaaaagtctttctcgctacctggtacgtcgaaaggatccagaattgtggggcagcgtgctgctggaaagcaatccttacaggagacccctaattgaccaggttgtacaaacagctttgtctgagactcaggaccctgaagaagtgtcagtaactgtaaaggctttcatgactgcagaccttcctaatgaactcattgaactgctggagaaaattgtccttgataactctgtattcagtgaacacaggaatctgcaaaacctccttatcctcactgcaattaaggctgaccgtacacgtgttatggagtatattaaccgcctggataattatgatgccccagatattgccaatatcgccatcagcaatgagctgtttgaagaagcatttgccattttccggaaatttgatgtcaatacttcagcagttcaggtcttaattgagcatattggaaacttggatcgggcatatgagtttgctgaacgttgcaatgaacctgcggtctggagtcaacttgcaaaagcccagttgcagaaaggaatggtgaaagaagccattgattcttatatcaaagcagatgatccttcctcctacatggaagttgttcaggctgccaatactagtggaaactgggaagaactggtgaagtacttgcagatggcccgtaagaaggctcgagagtcctatgtggagacagaactgatattcgcactggctaaaacaaaccgccttgcagagttagaagaatttatcaatggaccaaataatgctcatatccaacaagttggtgaccgttgttatgatgaaaaaatgtatgatgctgctaagttgttgtacaataatgtttccaattttggacgtttggcatctaccctggttcacctgggtgaatatcaggcagctgttgatggggctaggaaagctaacagtactcgaacatggaaagaggtctgcttcgcctgtgtagatgggaaagaattccgtcttgctcagatgtgtggacttcatattgttgtacatgcagatgaattagaagaacttatcaactactatcaggatcgtggctattttgaagagctgatcaccatgttggaagcagcactgggacttgagcgagctcacatgggaatgtttactgaattagctattctatactctaaatttaagcctcagaaaatgagggagcacctggagctgttctggtctagagtgaatattcccaaggtgctaagagctgcagaacaagctcatctttgggcagaactggtgtttttgtatgacaagtatgaagaatatgataatgccataattaccatgatgaatcatccaactgatgcctggaaagaagggcaattcaaagatatcattaccaaggttgccaatgtggaactatactacagagcaatacagttctacttagaattcaagcctctgttgttaaatgatttgctgatggtgctgtctccacggttggatcacactcgtgcagtcaattatttcagcaaggttaaacagctaccactggtgaaaccgtatttgcgttcagttcagaaccataacaacaaatctgtgaatgaatcattgaacaatctttttattacagaagaagattatcaggctctgcgaacatcaatagatgcttatgacaactttgacaatatctcgcttgctcagcgtttggaaaaacatgaactcattgagttcaggagaattgctgcttatctcttcaaaggcaacaatcgctggaaacagagtgtagagctgtgcaagaaagacagcctttacaaggatgcaatgcagtatgcttctgaatctaaagatactgaattggctgaagaactcctgcagtggtttttgcaggaagaaaaaagagagtgctttggagcttgtctgtttacctgttacgatcttttaaggccagatgtcgtcctagaaactgcatggaggcacaatatcatggattttgccatgccctatttcatccaggtcatgaaggagtacttgacaaaggtggataaattagatgcttcagaatcactgagaaaagaagaagaacaagctacagagacacaacccattgtttatggtcagccccagttgatgctgacagcaggacccagtgttgccgtccctccccaggcaccttttggttatggttataccgcaccaccgtatggacagccacagcctggctttgggtacagcatgtgagatgaagcgctgatcctgtagtcacctattttcgtactgaaacatcgtctttacccacttctcagtttataatgggggaaaacaggcaacgtgttcttgtaacctttatttcatgaaggacttctttttgtttctaactataaacttggatcacctatgttaaaaccttatttcacattccacatcattttagaatttattttcgaaggggaatagtttcaatgttttattcacttgggctttttttcttccccctctttctttaaagaactgctcaatattcaatctgttgtgaagaacctgatttgcactctgtagtgtttaaagaaacaaagaaactctaatattgaatctcttaaatttagtgtatgtaaacagcttacaaatacgtattgtctaaatgcatttaaatctgttttattcaaagaaaagctaaagcaaaaacactggcatatgaccatgcaagactgtcagtgccaacaaagacaacactaatcagcacatcgtacactggattgcagtgcttcccagattattgaaaaatgttacagacaacttgcctgatttttaaatgagcgtaaaaggccctctaacctatgcaggtttccccattatgcatatagaaaatgctagtatgttttgctcacttcatatgtaacaggtgcccttatgttgtgctgtatcctgtgctttttctgtgggaccattccattcaggagcaaagagcaccatgattccaatcttgtgtgtgtttactaacccttccctgaggtttgtgtatgttggatattgtggtgttttagatcactgagtgtacagaagagagaaattcaaacaaaatattgctgttcttcagttttgtttgtggaatttgaaattactcaaatttaaaataaattactggactgtggaaataacatagaattgaagttttaattaaataccactcaaacgaaaagaacagtagtttttgtagttttatattggatactgaggcattagggaggcatgaaaggaagaggaatgaggattgagacatgtgaagacattgtgcattatatcaatgtgcattcctgtagttcattaacaaggtacatgcaatagtctaaagaaccagagtcactactatagtggcttaacatttaatctgtctccaatattttaaccaagtgacaccgaggtttttatcgaagcatttcacttaaatgaacaaatcatggctgttatattaacttgaaataaaatatatttaaacatgtagttaacatgctctttctcatcatgaattataaaggtgcccaaattatgggtatcttgatttttttcaaaaattggttgtgtgaatccagctcttgcttatggctgagaatgttcctaaagttcatttcactatcccttaatcctcaatagctacacatacccccttgcctagttagtcttgcactgctttacaactctcttaggcaaattacctaacataagctccacagaagagttttttaaaacttaaaatccctgtcccaccaggtgtggtggctcatgcctgtaatcccagca

SEQ ID NO: 4544 - protein, 1675 aa, Homosapiens; identical to SEQ ID NO: 698

SEQ ID NO: 4545 - DNA, 1763 bp, Homosapiens
ggcttaccacagcctcaacttcccaggctccagccatcctctcacctcagcctcccaagtagctaggactacaggcgtgtccactgtgcctggcctaattttataattttaaatgtctgtaaagtaagcaaaatgactagttgaattgtacattaaatatatctaatccctaagagtttataatgaaaagggatcaaaactttttcaattgcgataaaactcacataacaaaattaaccattttaaagtgaacaatttagtggtatttagtgcattcacagtgtcgtgcagccaacacctgtatctagttccaagacattttcatctccccaaaaggagaccccatacacgtgaagcagtccctctcccatccccctcctcccatccgctagcaactgctaatttgctttttgtctctatggatttacctgttctggatatttcacataaatggaattatacaataaaggaccgtttgtttctaacttctttcactaagcatccatgttatagcatatatcagacttcattcctttatgactgaataatactttgctgaatggatatatcagtgttttatttgtcctttcatcagttggtggacatttgggttctttctaccttttggctattgtgactagtggtgttgcaaacattcatgtacaagtttttgtttgaatgcctgttgtcagttcttctagatatatacttagaagtggaattgctgggtcatatggtaatttctctgtttcaactttttgagagaccacgaaaccgttttccacagtggtggcaccatttgacatgcccactagaaatatatgagagttccattttcttcacatcttctgacagctttttggggtgttgggatgattcgtctaattgggaaaataagtaccttatttgggcctatatggtatttttaattctgtgtgtctgctcccaaactctgtagccctgccctcccttatattgtgtatcctgtttcagattgtttccgtttcttctgagacactgcatatacccctacatgtatctgtgctaggcatacatccctgtaacttcatggcatttttgtaattgctgtgtacctgttacgtatactgagtgggagtgtctcatttgctgtagaactctctgcattagtgtagtgtctggcacacagtagctgctcaggcattttttaagtatatgattattgggaaaactacagagctagggagagatctgaagaaatactagaaatttttttctgcaaagaaaactttagaaaattgttgacatcatctgtggcatgcagcaaaagttgatgtaaaaggaacagaaagacctatggagataatgggatgtaataacagaaaacatacataaacaattggttctgaaatcagttaagagcagaactggaattcatactctgtggaatgaatcagcaatgtggaaggagtaacaagattttttaaaaagattttgaatttaggctgggtgcagtggctcacgcctgtaaccccatcactttgggaggccagagtaggtggattgcttcaacccaggcattcgagactagcctggacagcatggcaaaaccctatctctacaaaaaataaaaaattagccaggtgtggtggcatgcgcctgtagtcccatctacttgggaggctgaggtggatggatcacctgagcctgggaagtggaggttgcagtaggctgaagtcatgccactgcactcaaacctggcggacagagtgagaccctatctc

SEQ ID NO: 4546 - protein, 99 aa, Homosapiens
MYKFLFECLLSVLLDIYLEVELLGHMVISLFQLFERPRNRFPQWWHHLTCPLEIYESSIFFTSSDSFLGCWDDSSNWENKYLIWAYMVFLILCVCSQTL

SEQ ID NO: 4547 - DNA, 754 bp, Homosapiens
gtagttctatattagtgagattttatagtagaaaaagtctttaaatgctataaaattgaaacttaggagcagcgtttaagtctttgtttgtttataggttggatacactccagattggatatttctgctgagaaatgtaatgcgaatcagtccagatcagggacagcagtttgcccaaatgttagttcaagatgaagagcctcttgctgacatcacacagattgtagatgtctttatggaatacaatctaattcagcagtgtactgcattcttgcttgatgctctgaagaataatcgcccatctgaaggtcctttacagacgcggttacttgagatgaaccttatgcatgcgcctcaagttgcagatgctattctaggcaatcagatgttcacacattatgaccgggctcatattgctcaactgtgtgaaaaggctggcctactgcagcgtgcattagaacatttcactgatttatatgatataaaacgtgcagtggttcacacccatcttcttaaccctgagtggttagtcaactactttggttccttatcagtagaagactccctagaatgtctcagagccatgctgtctgccaacatccgtcagaatctgcagatttgtgttcaggtggcttctaaatatcatgaacaactgtcaactcagtctctgattgaactttttgaatctttcaagagttttgaaggtaattaggagtttttgagtttttaaaaaaagtacttaaggtagccaaga

SEQ ID NO: 4548 - protein, 190 aa, Homosapiens
MRISPDQGQQFAQMLVQDEEPLADITQIVDVFMEYNLIQQCTAFLLDALKNNRPSEGPLQTRLLEMNLMHAPQVADAILGNQMFTHYDRAHIAQLCEKAGLLQRALEHFTDLYDIKRAVVHTHLLNPEWLVNYFGSLSVEDSLECLRAMLSANIRQNLQICVQVASKYHEQLSTQSLIELFESFKSFEGN

SEQ ID NO: 4549 - DNA, 403 bp, Homosapiens
gcccagaagaagggaaggcgcgagtgaggaaaggaggtactgtagccataaacacatttgccaatgttacctggtcaattaggggtctcctgtaaggattgctttccagcagcacgctgccccacaattctggatcctttcgacgtaccaggtagcgagaaagacttttgaagagggaattctcattgcaaacctaaagaagatatgatagattaatttcaagcaacaagctcatcagtagagaattgacctcttacaacaagaatcaagttttttatgacatcttcagaacagtcaacatcaagtaatcctccaataactacaggaagtcgacttggattcacctgtggttaaaaagaagtagaagaatgttattatgttattaaaagcaaagaggaatttt

SEQ ID NO: 4550 - protein, 35 aa, Homosapiens
MLPGQLGVSCKDCFPAARCPTILDPFDVPGSEKDF

SEQ ID NO: 4551 - DNA, 2471 bp, Homosapiens
gagaccagcttttaaatattgaaagacaaatatagtgtaaaaggcgcaatggaatttgtatagtgaaggagattctctagtcccagggttgtaatgtcacttctgtctaattcattacagaattacagaatcaaatcatgttagccctagaagaaactgcagatcattttgttcaatcttctcattatataggaaaggaaatttgagggccagtgcaatggtttgccaaggtcacacaactagttagtggaaggatccaggcattctaattcctttctttcactaatacatttggcctgctctacagaattacttctgtctgatactatccactttgaagagtagctagcatatagtagccatttacttttggctcaattaaaagcaaacatttttgggacaaaatcaggctttcctgattacttcttagataacagagcccacacagtattaaaacatgcagcctttctttatgcaaaaagattgaatatggagccacttgaatcttaaacttcagtctgcagctataaccaatatcatcagaagttatacacaattggcaaaagaatagcttattctgcccaaatacttgtccagtcactaggatcatttcacttttttgaataccatttgctttggggagggaagtattgccagaccatgaattcattattacctctgatcagttttaaacttcatttgaaaagtggttccttctcgttttctccctccctcaggctgcatcctagcatgcccagttttagtctggcatgagcttttatggcattttgaatccctccttcctgagggtttataatgacagtgctgaaaaccacctggactgaagtatgaacattgccattgaatttgagggggactgagaatgttctttctagtctgttttattttgacagaatttaacatactaaggcttttccactttctgccataaacctaggtttataatacttttggggtgctaattaacatgatgtgtttttctccaggtggataaattagatgcttcagaatcactgagaaaagaagaagaacaagctacagagacacaacccattgtttatggtcagccccagttgatgctgacagcaggacccagtgttgccgtccctccccaggcaccttttggttatggttataccgcaccaccgtatggacagccacagcctggctttgggtacagcatgtgagatgaagcgctgatcctgtagtcacctattttcgtactgaaacatcgtctttacccacttctcagtttataatgggggaaaacaggcaacgtgttcttgtaacctttatttcatgaaggacttctttttgtttctaactataaacttggatcacctatgttaaaaccttatttcacattccacatcattttagaatttattttcgaaggggaatagtttcaatgttttattcacttgggctttttttcttccccctctttctttaaagaactgctcaatattcaatctgttgtgaagaacctgatttgcactctgtagtgtttaaagaaacaaagaaactctaatattgaatctcttaaatttagtgtatgtaaacagcttacaaatacgtattgtctaaatgcatttaaatctgttttattcaaagaaaagctaaagcaaaaacactggcatatgaccatgcaagactgtcagtgccaacaaagacaacactaatcagcacatcgtacactggattgcagtgcttcccagattattgaaaaatgttacagacaacttgcctgatttttaaatgagcgtaaaaggccctctaacctatgcaggtttccccattatgcatatagaaaatgctagtatgttttgctcacttcatatgtaacaggtgcccttatgttgtgctgtatcctgtgctttttctgtgggaccattccattcaggagcaaagagcaccatgattccaatcttgtgtgtgtttactaacccttccctgaggtttgtgtatgttggatattgtggtgttttagatcactgagtgtacagaagagagaaattcaaacaaaatattgctgttcttcagttttgtttgtggaatttgaaattactcaaatttaaaataaattactggactgtggaaataacatagaattgaagttttaattaaataccactcaaacgaaaagaacagtagtttttgtagttttatattggatactgaggcattagggaggcatgaaaggaagaggaatgaggattgagacatgtgaagacattgtgcattatatcaatgtgcattcctgtagttcattaacaaggtacatgcaatagtctaaagaaccagagtcactactatagtggcttaacatttaatctgtctccaatattttaaccaagtgacaccgaggtttttatcgaagcatttcacttaaatgaacaaatcatggctgttatattaacttgaaataaaatatatttaaacatgtagtt

SEQ ID NO: 4552 - protein, 37 aa, Homosapiens
MNSLLPLISFKLHLKSGSFSFSPSLRLHPSMPSFSLA

SEQ ID NO: 4553 - DNA, 2765 bp, Homosapiens
gagaccagcttttaaatattgaaagacaaatatagtgtaaaaggcgcaatggaatttgtatagtgaaggagattctctagtcccagggttgtaatgtcacttctgtctaattcattacagaattacagaatcaaatcatgttagccctagaagaaactgcagatcattttgttcaatcttctcattatataggaaaggaaatttgagggccagtgcaatggtttgccaaggtcacacaactagttagtggaaggatccaggcattctaattcctttctttcactaatacatttggcctgctctacagaattacttctgtctgatactatccactttgaagagtagctagcatatagtagccatttacttttggctcaattaaaagcaaacatttttgggacaaaatcaggctttcctgattacttcttagataacagagcccacacagtattaaaacatgcagcctttctttatgcaaaaagattgaatatggagccacttgaatcttaaacttcagtctgcagctataaccaatatcatcagaagttatacacaattggcaaaagaatagcttattctgcccaaatacttgtccagtcactaggatcatttcacttttttgaataccatttgctttggggagggaagtattgccagaccatgaattcattattacctctgatcagttttaaacttcatttgaaaagtggttccttctcgttttctccctccctcaggctgcatcctagcatgcccagttttagtctggcatgagcttttatggcattttgaatccctccttcctgagggtttataatgacagtgctgaaaaccacctggactgaagtatgaacattgccattgaatttgagggggactgagaatgttctttctagtctgttttattttgacagaatttaacatactaaggcttttccactttctgccataaacctaggtttataatacttttggggtgctaattaacatgatgtgtttttctccaggtggataaattagatgcttcagaatcactgagaaaagaagaagaacaagctacagagacacaacccattgtttatggtcagccccagttgatgctgacagcaggacccagtgttgccgtccctccccaggcaccttttggttatggttataccgcaccaccgtatggacagccacagcctggctttgggtacagcatgtgagatgaagcgctgatcctgtagtcacctattttcgtactgaaacatcgtctttacccacttctcagtttataatgggggaaaacaggcaacgtgttcttgtaacctttatttcatgaaggacttctttttgtttctaactataaacttggatcacctatgttaaaaccttatttcacattccacatcattttagaatttattttcgaaggggaatagtttcaatgttttattcacttgggctttttttcttccccctctttctttaaagaactgctcaatattcaatctgttgtgaagaacctgatttgcactctgtagtgtttaaagaaacaaagaaactctaatattgaatctcttaaatttagtgtatgtaaacagcttacaaatacgtattgtctaaatgcatttaaatctgttttattcaaagaaaagctaaagcaaaaacactggcatatgaccatgcaagactgtcagtgccaacaaagacaacactaatcagcacatcgtacactggattgcagtgcttcccagattattgaaaaatgttacagacaacttgcctgatttttaaatgagcgtaaaaggccctctaacctatgcaggtttccccattatgcatatagaaaatgctagtatgttttgctcacttcatatgtaacaggtgcccttatgttgtgctgtatcctgtgctttttctgtgggaccattccattcaggagcaaagagcaccatgattccaatcttgtgtgtgtttactaacccttccctgaggtttgtgtatgttggatattgtggtgttttagatcactgagtgtacagaagagagaaattcaaacaaaatattgctgttcttcagttttgtttgtggaatttgaaattactcaaatttaaaataaattactggactgtggaaataacatagaattgaagttttaattaaataccactcaaacgaaaagaacagtagtttttgtagttttatattggatactgaggcattagggaggcatgaaaggaagaggaatgaggattgagacatgtgaagacattgtgcattatatcaatgtgcattcctgtagttcattaacaaggtacatgcaatagtctaaagaaccagagtcactactatagtggcttaacatttaatctgtctccaatattttaaccaagtgacaccgaggtttttatcgaagcatttcacttaaatgaacaaatcatggctgttatattaacttgaaataaaatatatttaaacatgtagttaacatgctctttctcatcatgaattataaaggtgcccaaattatgggtatcttgatttttttcaaaaattggttgtgtgaatccagctcttgcttatggctgagaatgttcctaaagttcatttcactatcccttaatcctcaatagctacacatacccccttgcctagttagtcttgcactgctttacaactctcttaggcaaattacctaacataagctccacagaagagttttttaaaacttaaaatccctgtcccaccaggtgtggtggctcatgcctgtaatcccagca

SEQ ID NO: 4554 - protein, 47 aa, Homosapiens [sequence omitted]

SEQ ID NO: 4555 - DNA, 626 bp, Homosapiens
aggcaacgtgttcttgtaacctttatttcatgaaggaaaagaaactctaatattgaatctcttaaatttagtgtatgtaaacagcttacaaatacgtattgtctaaatgcatttaaatctgttttattcaaagaaaagctaaagcaaaaacactggcatatgaccatgcaagactgtcagtgccaacaaagacaacactaatcagcacatcgtacactggattgcagtgcttcccagattattgaaaaatgttacagacaacttgcctgatttttaaatgagcgtaaaaggccctctaacctatgcaggtttccccattatgcatatagaaaatgctagtatgttttgctcacttcatatgtaacaggtgcccttatgttgtgctgtatcctgtgctttttctgtgggaccattccattcaggagcaaagagcaccatgattccaatcttgtgtgtgtttactaacccttccctgaggtttgtgtatgttggatattgtggtgttttagatcactgagtgtacagaagagagaaattcaaacaaaatattgctgttcttcagttttgtttgtggaatttgaaattactcaaatttaaaataaattactggactgtggaaataacat

SEQ ID NO: 4556 - protein, 35 aa, Homosapiens
MLVCFAHFICNRCPYVVLYPVLFLWDHSIQEQRAP

SEQ ID NO: 4557 - DNA, 841 bp, Homosapiens
tcgctttgtgattcttgatccggaacttgtcacccaggaaccccggaagaggtagctcacgcgatagaaacgtgttcgctgcccagaagaagggaaggcgcgagtgaggaaaggaggtactgtagatgccctccaaatccttggttatggaatatttggctcatcccagtacactcggcttggctgttggagttgcttgtggcatgtgcctgggctggagccttcgagtatgctttgggatgctccccaaaagcaagacgagcaagacacacacagatactgaaagtgaagcaagcatcttgggagacagcggggagtacaagatgattcttgtggttcgaaatgacttaaagatgggaaaagggaaagtggctgcccagtgctctcatgctgctgtttcagcctacaagcagattcaaagaagaaatcctgaaatgctcaaacaatgggaatactgtggccagcccaaggtggtggtcaaagctcctgatgaagaaaccctgattgcattattggcccatgcaaaaatgctgggactgactgtaagtttaattcaagatgctggacgtactcagattgcaccaggctctcaaactgtcctagggattgggccaggaccagcagacctaattgacaaagtcactggtcacctaaaactttactaggtggactttgatatgacaacaacccctccatcacaagtgtttgaagcctgtcagattctaacaacaaaagctgaatttcttcacccaacttaaatgttcttgagatgaaaataaaacctattcccatgttctatggttggcagttgtcatcttgggcttaaaaacagtactgttgg

SEQ ID NO: 4558 - protein, 179 aa, Homosapiens; identical to SEQ ID NO: 702

SEQ ID NO: 4559 - DNA, 2291 bp, Homosapiens
ctgccccctgagacagcctccagaagggatacgttcctccctcctttcggcgagctcggttgatcctcgcgggatttcagttaggctcttagtgcgggccctgtgggtgtggcaagaggaagaatgactgctcgctttgtgattcttgatccggaacttgtcacccaggaaccccggaagaggtagctcacgcgatagaaacgtgttcgctgcccagaagaagggaaggcgcgagtgaggaaaggaggtactgtagctacacttctggaaaattcagtatggacagtctccgacttaggatttttcaactttaggatggtgtgaaagagacacccattcagtagaaactgtacttcgagttttgcattttgatcttttcctggcctagtgataatgtggtacagtacactcttgtgatgctgggcagcggcagcgagccacagctcccagtcacccatgtgatcacgggaatcaacaacccatcctctaccgtgtactgtgttgtcagcttttttggatattgtgttttgtgttttcacattccatcatgtctacaaaatgtccatcagtgtctcctgtttctggtgagatgaagaagaggaaggcaattactcttgaaatgaaactcaagataattgcccagcatgaaggtggcaagccagtaatggccattgcacgtgagttaggactttggcaatccacgatttcaaccatcttaagggataagaagcaaatcagtgatgcagcgaaatcgtcagcatcagttaaatccactgtcatcacaaagaaaagggctggaccaattgatgatatggaaaaattacttgttatgtggatggaagaccagatacagaagcgtataccacttagcctactgatgatccaggctaaggcaagaagtctttttaatatgctaaaagaccgtgccagtgatcctacatatacacaaatgtttaaagcaagtcatggatggttccagcgcttcaaaaggcgtcataattttcacaatgtaaagatcactggtgaggcagcacgtgctggtaatgaaggtgccatagcttttaaggaacagctgcataggataattatggctaaagatctttgcaataaggagctgattgcactggaggaagaaagaggtaaaggcgttgaggcagtggaagaagttacacccacggcacctagaaagttcacagcaaagaaactggcagaggcatttgctgctatcagcagtggcctacacgttagaagaaatggacgtcaattacgagagattcgccacagttgacaggcgcagatacaggatgctcttgcttgctacagagaaatatatagtgaaaagaagaaacaagctgtacggtcaaaacttggtatcttcctgaagaacaacactatgcttgctaaaccatcaactagtgttgatgtcccaatgccttctaccacctattctcgatgttcatcagaagagagagaaattgaggaccctgttgcatccccatcatccagcaattaattctatttcagtgcttcaaacatttttcaggaccactgtgctttcagctgtgtaaattaatgatgccctccaaatccttggttatggaatatttggctcatcccagtacactcggcttggctgttggagttgcttgtggcatgtgcctgggctggagccttcgagtatgctttgggatgctccccaaaagcaagacgagcaagacacacacagatactgaaagtgaagcaagcatcttgggagacagcggggagtacaagatgattcttgtggttcgaaatgacttaaagatgggaaaagggaaagtggctgcccagtgctctcatgctgctgtttcagcctacaagcagattcaaagaagaaatcctgaaatgctcaaacaatgggaatactgtggccagcccaaggtggtggtcaaagctcctgatgaagaaaccctgattgcattattggcccatgcaaaaatgctgggactgactgtaagtttaattcaagatgctggacgtactcagattgcaccaggctctcaaactgtcctagggattgggccaggaccagcagacctaattgacaaagtcactggtcacctaaaactttactaggtggactttgatatgacaacaacccctccatcacaagtgtttgaagcctgtcagattctaacaacaaaagctgaatttcttcacccaacttaaatgttcttgagatgaaaataaaacctattcccatgttctatggttggcagttgtcatcttgggcttaaaaacagtactgttgg

SEQ ID NO: 4560 - protein, 180 aa, Homosapiens; identical to SEQ ID NO: 700

SEQ ID NO: 4561 - DNA, 797 bp, Homosapiens
tcgctttgtgattcttgatccggaacttgtcacccaggaaccccggaagaggtagctcacgcgatagaaacgtgttcgctgcccagaagaagggaaggcgcgagtgaggaaaggaggtactgtagatgccctccaaatccttggttatggaatatttggctcatcccagtacactcggcttggctgttggagttgcttgtggcatgtgcctgggctggagccttcgagtatgctttgggatgctccccaaaagcaagacgagcaagacacacacagatactgaaagtgaagcaagcatcttgggagacagcggggagtacaagatgattcttgtggttcgaaatgacttaaagatgggaaaagggaaagtggctgcccagtgctctcatgctgctgtttcagcctacaagcagattcaaagaagaaatcctgaaatgctcaaacaatgggaatactgtggccagcccaaggtggtggtcaaagctcctgatgaagaaaccctgattgcattattggcccatgcaaaaatgctgggactgactgtaagtttaattcaagatgctggacgtactcagattgcaccaggctctcaaactgtcctagggattgggccaggaccagcagacctaattgacaaagtcactggtcacctaaaactttactaggtggactttgatatgacaacaacccctccatcacaagtgtttgaagcctgtcagattctaacaacaaaagctgaatttcttcacccaacttaaatgttcttgagatgaaaataaaacctattcccatgttct

SEQ ID NO: 4562 - protein, 179 aa, Homosapiens; identical to SEQ ID NO: 702

SEQ ID NO: 4563 - DNA, 2247 bp, Homosapiens
ctgccccctgagacagcctccagaagggatacgttcctccctcctttcggcgagctcggttgatcctcgcgggatttcagttaggctcttagtgcgggccctgtgggtgtggcaagaggaagaatgactgctcgctttgtgattcttgatccggaacttgtcacccaggaaccccggaagaggtagctcacgcgatagaaacgtgttcgctgcccagaagaagggaaggcgcgagtgaggaaaggaggtactgtagctacacttctggaaaattcagtatggacagtctccgacttaggatttttcaactttaggatggtgtgaaagagacacccattcagtagaaactgtacttcgagttttgcattttgatcttttcctggcctagtgataatgtggtacagtacactcttgtgatgctgggcagcggcagcgagccacagctcccagtcacccatgtgatcacgggaatcaacaacccatcctctaccgtgtactgtgttgtcagcttttttggatattgtgttttgtgttttcacattccatcatgtctacaaaatgtccatcagtgtctcctgtttctggtgagatgaagaagaggaaggcaattactcttgaaatgaaactcaagataattgcccagcatgaaggtggcaagccagtaatggccattgcacgtgagttaggactttggcaatccacgatttcaaccatcttaagggataagaagcaaatcagtgatgcagcgaaatcgtcagcatcagttaaatccactgtcatcacaaagaaaagggctggaccaattgatgatatggaaaaattacttgttatgtggatggaagaccagatacagaagcgtataccacttagcctactgatgatccaggctaaggcaagaagtctttttaatatgctaaaagaccgtgccagtgatcctacatatacacaaatgtttaaagcaagtcatggatggttccagcgcttcaaaaggcgtcataattttcacaatgtaaagatcactggtgaggcagcacgtgctggtaatgaaggtgccatagcttttaaggaacagctgcataggataattatggctaaagatctttgcaataaggagctgattgcactggaggaagaaagaggtaaaggcgttgaggcagtggaagaagttacacccacggcacctagaaagttcacagcaaagaaactggcagaggcatttgctgctatcagcagtggcctacacgttagaagaaatggacgtcaattacgagagattcgccacagttgacaggcgcagatacaggatgctcttgcttgctacagagaaatatatagtgaaaagaagaaacaagctgtacggtcaaaacttggtatcttcctgaagaacaacactatgcttgctaaaccatcaactagtgttgatgtcccaatgccttctaccacctattctcgatgttcatcagaagagagagaaattgaggaccctgttgcatccccatcatccagcaattaattctatttcagtgcttcaaacatttttcaggaccactgtgctttcagctgtgtaaattaatgatgccctccaaatccttggttatggaatatttggctcatcccagtacactcggcttggctgttggagttgcttgtggcatgtgcctgggctggagccttcgagtatgctttgggatgctccccaaaagcaagacgagcaagacacacacagatactgaaagtgaagcaagcatcttgggagacagcggggagtacaagatgattcttgtggttcgaaatgacttaaagatgggaaaagggaaagtggctgcccagtgctctcatgctgctgtttcagcctacaagcagattcaaagaagaaatcctgaaatgctcaaacaatgggaatactgtggccagcccaaggtggtggtcaaagctcctgatgaagaaaccctgattgcattattggcccatgcaaaaatgctgggactgactgtaagtttaattcaagatgctggacgtactcagattgcaccaggctctcaaactgtcctagggattgggccaggaccagcagacctaattgacaaagtcactggtcacctaaaactttactaggtggactttgatatgacaacaacccctccatcacaagtgtttgaagcctgtcagattctaacaacaaaagctgaatttcttcacccaacttaaatgttcttgagatgaaaataaaacctattcccatgttct

SEQ ID NO: 4564 - protein, 180 aa, Homosapiens; identical to SEQ ID NO: 700

SEQ ID NO: 4565 - DNA, 1924 bp, Homosapiens
cttcctcttgccacacccacagggcccgcactaagagcctaactgaaatcccgcgaggatcaaccgagctcgccgaaaggagggaggaacgtatcccttctggaggctgtctcagggggcagagggaccggaccggaagtgacgtgagcgggttccggttgtctggagcccagcggcgggtgtgagagtccgtaaggagcagcttccaggatcctgagatccggagcagccggggtcggagcggctcctcaagagttactgatctatgaaatggcagagaatggaaaaaattgtgaccagagacgtgtagcaatgaacaaggaacatcataatggaaatttcacagacccctcttcagtgaatgaaaagaagaggagggagcgggaagaaaggcagaatattgtcctgtggagacagccgctcattaccttgcagtatttttctctggaaatccttgtaatcttgaaggaatggacctcaaaattatggcatcgtcaaagcattgtggtgtcttttttactgctgcttgctgtgcttatagctacgtattatgttgaaggagtgcatcaacagtatgtgcaacgtatagagaaacagtttcttttgtatgcctactggataggcttaggaattttgtcttctgttgggcttggaacagggctgcacacctttctgctttatctgggtccacatatagcctcagttacattagctgcttatgaatgcaattcagttaattttcccgaaccaccctatcctgatcagattatttgtccagatgaagagggcactgaaggaaccatttctttgtggagtatcatctcaaaagttaggattgaagcctgcatgtggggtatcggtacagcaatcggagagctgcctccatatttcatggccagagcagctcgcctctcaggtgctgaaccagatgatgaagagtatcaggaatttgaagagatgctggaacatgcagagtctgcacaagactttgcctcccgggccaaactggcagttcaaaaactagtacagaaagttggattttttggaattttggcctgtgcttcaattccaaatcctttatttgatctggctggaataacgtgtggacactttctggtacctttttggaccttctttggtgcaaccctaattggaaaagcaataataaaaatgcatatccagaaaatttttgttataataacattcagcaagcacatagtggagcaaatggtggctttcattggtgctgtccccggcataggtccatctctgcagaagccatttcaggagtacctggaggctcaacggcagaagcttcaccacaaaagcgaaatgggcacaccacagggagaaaactggttgtcctggatgtttgaaaagttggtcgttgtcatggtgtgttacttcatcctatctatcattaactccatggcacaaagttatgccaaacgaatccagcagcggttgaactcagaggagaaaactaaataagtagagaaagttttaaactgcagaaattggagtggatgggttctgccttaaattgggaggactccaagccgggaaggaaaattcccttttccaacctgtatcaatttttacaacttttttcctgaaagcagtttagtccatactttgcactgacatactttttccttctgtgctaaggtaaggtatccaccctcgatgcaatccaccttgtgttttcttagggtggaatgtgatgttcagcagcaaacttgcaacagactggccttctgtttgttactttcaaaaggcccacatgatacaattagagaattcccaccgcacaaaaaaagttcctaagtatgttaaatatgtcaagctttttaggcttgtcacaaatgattgctttgttttcctaagtcatcaaaatgtatataaattatctagattggataac

SEQ ID NO: 4566 - protein, 406 aa, Homosapiens; identical to SEQ ID NO: 704

SEQ ID NO: 4567 - DNA, 2169 bp, Homosapiens
cttcctcttgccacacccacagggcccgcactaagagcctaactgaaatcccgcgaggatcaaccgagctcgccgaaaggagggaggaacgtatcccttctggaggctgtctcagggggcagagggaccggaccggaagtgacgtgagcgggttccggttgtctggagcccagcggcgggtgtgagagtccgtaaggagcagcttccaggatcctgagatccggagcagccggggtcggagcggctcctcaagagttactgatctatgaaatggcagagaatggaaaaaattgtgaccagagacgtgtagcaatgaacaaggaacatcataatggaaatttcacagacccctcttcagtgaatgaaaagaagaggagggagcgggaagaaaggcagaatattgtcctgtggagacagccgctcattaccttgcagtatttttctctggaaatccttgtaatcttgaaggaatggacctcaaaattatggcatcgtcaaagcattgtggtgtcttttttactgctgcttgctgtgcttatagctacgtattatgttgaaggagtgcatcaacagtatgtgcaacgtatagagaaacagtttcttttgtatgcctactggataggcttaggaattttgtcttctgttgggcttggaacagggctgcacacctttctgctttatctgggtccacatatagcctcagttacattagctgcttatgaatgcaattcagttaattttcccgaaccaccctatcctgatcagattatttgtccagatgaagagggcactgaaggaaccatttctttgtggagtatcatctcaaaagttaggattgaagcctgcatgtggggtatcggtacagcaatcggagagctgcctccatatttcatggccagagcagctcgcctctcaggtgctgaaccagatgatgaagagtatcaggaatttgaagagatgctggaacatgcagagtctgcacaagactttgcctcccgggccaaactggcagttcaaaaactagtacagaaagttggattttttggaattttggcctgtgcttcaattccaaatcctttatttgatctggctggaataacgtgtggacactttctggtacctttttggaccttctttggtgcaaccctaattggaaaagcaataataaaaatgcatatccagaaaatttttgttataataacattcagcaagcacatagtggagcaaatggtggctttcattggtgctgtccccggcataggtccatctctgcagaagccatttcaggagtacctggaggctcaacggcagaagcttcaccacaaaagcgaaatgggcacaccacagggagaaaactggttgtcctggatgtttgaaaagttggtcgttgtcatggtgtgttacttcatcctatctatcattaactccatggcacaaagttatgccaaacgaatccagcagcggttgaactcagaggagaaaactaaataagtagagaaagttttaaactgcagaaattggagtggatgggttctgccttaaattgggaggactccaagccgggaaggaaaattcccttttccaacctgtatcaatttttacaacttttttcctgaaagcagtttagtccatactttgcactgacatactttttccttctgtgctaaggtaaggtatccaccctcgatgcaatccaccttgtgttttcttagggtggaatgtgatgttcagcagcaaacttgcaacagactggccttctgtttgttactttcaaaaggcccacatgatacaattagagaattcccaccgcacaaaaaaagttcctaagtatgttaaatatgtcaagctttttaggcttgtcacaaatgattgctttgttttcctaagtcatcaaaatgtatataaattatctagattggataacagtcttgcatgtttatcatgttacaatttaatattccatcctgcccaacccttcctctcccatcctcaaaaaagggccattttatgatgcattgcacaccctctggggaaattgatctttaaattttgagacagtataaggaaaatctggttggtgtcttacaagtgagctgacaccattttttattctgtgtatttagaatgaagtcttgaaaaaaactttataaagacatctttaatcattcc

SEQ ID NO: 4568 - protein, 406 aa, Homosapiens; identical to SEQ ID NO: 704

SEQ ID NO: 4569 - DNA, 2673 bp, Homosapiens
cttcctcttgccacacccacagggcccgcactaagagcctaactgaaatcccgcgaggatcaaccgagctcgccgaaaggagggaggaacgtatcccttctggaggctgtctcagggggcagagggaccggaccggaagtgacgtgagcgggttccggttgtctggagcccagcggcgggtgtgagagtccgtaaggagcagcttccaggatcctgagatccggagcagccggggtcggagcggctcctcaagagttactgatctatgaaatggcagagaatggaaaaaattgtgaccagagacgtgtagcaatgaacaaggaacatcataatggaaatttcacagacccctcttcagtgaatgaaaagaagaggagggagcgggaagaaaggcagaatattgtcctgtggagacagccgctcattaccttgcagtatttttctctggaaatccttgtaatcttgaaggaatggacctcaaaattatggcatcgtcaaagcattgtggtgtcttttttactgctgcttgctgtgcttatagctacgtattatgttgaaggagtgcatcaacagtatgtgcaacgtatagagaaacagtttcttttgtatgcctactggataggcttaggaattttgtcttctgttgggcttggaacagggctgcacacctttctgctttatctgggtccacatatagcctcagttacattagctgcttatgaatgcaattcagttaattttcccgaaccaccctatcctgatcagattatttgtccagatgaagagggcactgaaggaaccatttctttgtggagtatcatctcaaaagttaggattgaagcctgcatgtggggtatcggtacagcaatcggagagctgcctccatatttcatggccagagcagctcgcctctcaggtgctgaaccagatgatgaagagtatcaggaatttgaagagatgctggaacatgcagagtctgcacaagactttgcctcccgggccaaactggcagttcaaaaactagtacagaaagttggattttttggaattttggcctgtgcttcaattccaaatcctttatttgatctggctggaataacgtgtggacactttctggtacctttttggaccttctttggtgcaaccctaattggaaaagcaataataaaaatgcatatccagaaaatttttgttataataacattcagcaagcacatagtggagcaaatggtggctttcattggtgctgtccccggcataggtccatctctgcagaagccatttcaggagtacctggaggctcaacggcagaagcttcaccacaaaagcgaaatgggcacaccacagggagaaaactggttgtcctggatgtttgaaaagttggtcgttgtcatggtgtgttacttcatcctatctatcattaactccatggcacaaagttatgccaaacgaatccagcagcggttgaactcagaggagaaaactaaataagtagagaaagttttaaactgcagaaattggagtggatgggttctgccttaaattgggaggactccaagccgggaaggaaaattcccttttccaacctgtatcaatttttacaacttttttcctgaaagcagtttagtccatactttgcactgacatactttttccttctgtgctaaggtaaggtatccaccctcgatgcaatccaccttgtgttttcttagggtggaatgtgatgttcagcagcaaacttgcaacagactggccttctgtttgttactttcaaaaggcccacatgatacaattagagaattcccaccgcacaaaaaaagttcctaagtatgttaaatatgtcaagctttttaggcttgtcacaaatgattgctttgttttcctaagtcatcaaaatgtatataaattatctagattggataacagtcttgcatgtttatcatgttacaatttaatattccatcctgcccaacccttcctctcccatcctcaaaaaagggccattttatgatgcattgcacaccctctggggaaattgatctttaaattttgagacagtataaggaaaatctggttggtgtcttacaagtgagctgacaccattttttattctgtgtatttagaatgaagtcttgaaaaaaactttataaagacatctttaatcattccaaaattgtgtccgttttcttgagcgttttgattttttacttttagcttataccagctgaatggcagccttgcctaatccacctacaacaagaatttcttaagctttcttttatttgcatgagagagccactaccaaggcatgttttgttatgctgaaactgggctgctgcatactgctaaatggcacctctgggattggcctacctggggatttcttggtttgtgaaaacaggagaggagaaatatctcatacaagtgaaaggatactggagagagaaattacccatttctaaaaaaaaaccacactctgtcgtatctgtgttaatgttttctagcatgtactctggtttcaacagacacaaatttatatgttaacccagttttcttgccgttctgtaagtgttttattcttagtgtgatttttttccattgggatgtttttgattgaacttgttcattttgttttgcttgggaggaaaataaacaattttacttttttccttt

SEQ ID NO: 4570 - protein, 406 aa, Homosapiens; identical to SEQ ID NO: 704

SEQ ID NO: 4571 - DNA, 564 bp, Homosapiens
gtgacgtgagcgggttccggttgtctggagcccagcggcgggtgtgagagtccgtaaggagcagcttccaggatcctgagatccggagcagccggggtcggagcggctcctcaagagttactgatctatgaaatggcagagaatggaaaaaattgtgaccagagacgtgtagcaatgaacaaggaacatcataatggaaatttcacagacccctcttcagtgaatgaaaagaagaggagggagcgggaagaaaggcagaatattgtcctgtggagacagccgctcattaccttgcagtatttttctctggaaatccttgtaatcttgaaggaatggacctcaaagtaaagagtcttctcccactaccttttacatacacctcatttactcatttaaaaaatcctcagtaatctcttactttctgccctctactccatcaaaatggattaattacctttagaatattaccataggaacatatttattctcctttctttaggttgaagaaaaatagattagggaaagacattgctatttgctgtttgcttactggattatcacagt

SEQ ID NO: 4572 - protein, 71 aa, Homosapiens
MAENGKNCDQRRVAMNKEHHNGNFTDPSSVNEKKRREREERQNIVLWRQPLITLQYFSLEILVILKEWTSK

SEQ ID NO: 4573 - DNA, 880 bp, Homosapiens
gctgttttgcattgaaattgtgcaattatttaggcattggcttattttgattgttaagaaatgatagtagggaaagttcatggtgatgaaatcactggaaggcaagaactactagctctgttgattaataaaagatttatagctctaaataactggtttttggtatagaccccctgcttttcttcacaaattatctgtaataatagccttgctagcttcataatattcacataccaattgtatacctttgccttattagtcttcttgccagaaataatgtacgttagtctaacctgtccaggttcctgagattcatagtgagtggataaaaagaagactactgttggctgggcacagtggctgacgcctgtaatcccgcactttgggaggctgaggtgggcagatcacgaggtcaggagatcgagaccatcctggctaacacagtgaaaccccatctctactaaaaatacaaaaaattaggccgggcgcaatggctcatgcctgtaatcccagcactttgggaggctgaggcagatggatcacttgagatcaggagttcaagaccagcctgaccaacatggagaaacaccatctctactaaaaatacaaaaaaaaattagctgggcatggtagcgcatccctgtaatcccaggtactttgggaggctgaggcaggagaatcgcttgaacccgggaggcggaggttgcggtgagttgagatcacgccatggcactccagcctgggcaactgggcaataagagtgaaactctgtctcaaaaaaaaaaaaaaaaaaaaaaggaatacaaagttgataacatttgaattaaatgttatcttttattttattttattttatttttgatatggagtctcctcactc

SEQ ID NO: 4574 - protein, 43 aa, Homosapiens
MVAHPCNPRYFGRLRQENRLNPGGGGCGELRSRHGTPAWATGQ

SEQ ID NO: 4575 - DNA, 1052 bp, Homosapiens
acaagcataagtcatttccttattaattggttcaaaccagttcttacaggaactagtggtgataaatgtgggacttctgagaagtcattcattttattctttgtgccataccagagtacagtatcagctgagctgaccttactctgaggactaactcttttgctggaagcggtttctgatttacagctcttggtttctcccagacatgttggtgggagagattttggtttttaaggggttgttagatggagtaaattttctttttttttttttttttttttaactaaaaaggggtcacagaatttcagcagttctctgatttttatattttattcctcttcctatccaatccctgccttttgagtccaggtgtgctgtccccggcataggtccatctctgcagaagccatttcaggagtacctggaggctcaacggcagaagcttcaccacaaaagcgaaatgggcacaccacagggagaaaactggttgtcctggatgtttgaaaagttggtcgttgtcatggtgtgttacttcatcctatctatcattaactccatggcacaaagttatgccaaacgaatccagcagcggttgaactcagaggagaaaactaaataagtagagaaagttttaaactgcagaaattggagtggatgggttctgccttaaattgggaggactccaagccgggaaggaaaattcccttttccaacctgtatcaatttttacaacttttttcctgaaagcagtttagtccatactttgcactgacatactttttccttctgtgctaaggtaaggtatccaccctcgatgcaatccaccttgtgttttcttagggtggaatgtgatgttcagcagcaaacttgcaacagactggccttctgtttgttactttcaaaaggcccacatgatacaattagagaattcccaccgcacaaaaaaagttcctaagtatgttaaatatgtcaagctttttaggcttgtcacaaatgattgctttgttttcctaagtcatcaaaatgtatataaattatctagattggataac

SEQ ID NO: 4576 - protein, 52 aa, Homosapiens
MGTPQGENWLSWMFEKLVVVMVCYFILSIINSMAQSYAKRIQQRLNSEEKTK

SEQ ID NO: 4577 - DNA, 1379 bp, Homosapiens
acaagcataagtcatttccttattaattggttcaaaccagttcttacaggaactagtggtgataaatgtgggacttctgagaagtcattcattttattctttgtgccataccagagtacagtatcagctgagctgaccttactctgaggactaactcttttgctggaagcggtttctgatttacagctcttggtttctcccagacatgttggtgggagagattttggtttttaaggggttgttagatggagtaaattttctttttttttttttttttttttaactaaaaaggggtcacagaatttcagcagttctctgatttttatattttattcctcttcctatccaatccctgccttttgagtccaggtggtaagtacattttctttaacgtttttcctgcttttcttcccaaatgtgtctttttctttgggctactgtaccctgcttccagtgctgtccccggcataggtccatctctgcagaagccatttcaggagtacctggaggctcaacggcagaagcttcaccacaaaagcgaaatgggcacaccacagggagaaaactggttgtcctggatgtttgaaaagttggtcgttgtcatggtgtgttacttcatcctatctatcattaactccatggcacaaagttatgccaaacgaatccagcagcggttgaactcagaggagaaaactaaataagtagagaaagttttaaactgcagaaattggagtggatgggttctgccttaaattgggaggactccaagccgggaaggaaaattcccttttccaacctgtatcaatttttacaacttttttcctgaaagcagtttagtccatactttgcactgacatactttttccttctgtgctaaggtaaggtatccaccctcgatgcaatccaccttgtgttttcttagggtggaatgtgatgttcagcagcaaacttgcaacagactggccttctgtttgttactttcaaaaggcccacatgatacaattagagaattcccaccgcacaaaaaaagttcctaagtatgttaaatatgtcaagctttttaggcttgtcacaaatgattgctttgttttcctaagtcatcaaaatgtatataaattatctagattggataacagtcttgcatgtttatcatgttacaatttaatattccatcctgcccaacccttcctctcccatcctcaaaaaagggccattttatgatgcattgcacaccctctggggaaattgatctttaaattttgagacagtataaggaaaatctggttggtgtcttacaagtgagctgacaccattttttattctgtgtatttagaatgaagtcttgaaaaaaactttataaagacatctttaatcattcc

SEQ ID NO: 4578 - protein, 56 aa, Homosapiens
MCLFLWATVPCFQCCPRHRSISAEAISGVPGGSTAEASPQKRNGHTTGRKLVVLDV

SEQ ID NO: 4579 - DNA, 1297 bp, Homosapiens
acaagcataagtcatttccttattaattggttcaaaccagttcttacaggaactagtggtgataaatgtgggacttctgagaagtcattcattttattctttgtgccataccagagtacagtatcagctgagctgaccttactctgaggactaactcttttgctggaagcggtttctgatttacagctcttggtttctcccagacatgttggtgggagagattttggtttttaaggggttgttagatggagtaaattttctttttttttttttttttttttaactaaaaaggggtcacagaatttcagcagttctctgatttttatattttattcctcttcctatccaatccctgccttttgagtccaggtgtgctgtccccggcataggtccatctctgcagaagccatttcaggagtacctggaggctcaacggcagaagcttcaccacaaaagcgaaatgggcacaccacagggagaaaactggttgtcctggatgtttgaaaagttggtcgttgtcatggtgtgttacttcatcctatctatcattaactccatggcacaaagttatgccaaacgaatccagcagcggttgaactcagaggagaaaactaaataagtagagaaagttttaaactgcagaaattggagtggatgggttctgccttaaattgggaggactccaagccgggaaggaaaattcccttttccaacctgtatcaatttttacaacttttttcctgaaagcagtttagtccatactttgcactgacatactttttccttctgtgctaaggtaaggtatccaccctcgatgcaatccaccttgtgttttcttagggtggaatgtgatgttcagcagcaaacttgcaacagactggccttctgtttgttactttcaaaaggcccacatgatacaattagagaattcccaccgcacaaaaaaagttcctaagtatgttaaatatgtcaagctttttaggcttgtcacaaatgattgctttgttttcctaagtcatcaaaatgtatataaattatctagattggataacagtcttgcatgtttatcatgttacaatttaatattccatcctgcccaacccttcctctcccatcctcaaaaaagggccattttatgatgcattgcacaccctctggggaaattgatctttaaattttgagacagtataaggaaaatctggttggtgtcttacaagtgagctgacaccattttttattctgtgtatttagaatgaagtcttgaaaaaaactttataaagacatctttaatcattcc

SEQ ID NO: 4580 - protein, 52 aa, Homosapiens; identical to SEQ ID NO: 4576

SEQ ID NO: 4581 - DNA, 1883 bp, Homosapiens
acaagcataagtcatttccttattaattggttcaaaccagttcttacaggaactagtggtgataaatgtgggacttctgagaagtcattcattttattctttgtgccataccagagtacagtatcagctgagctgaccttactctgaggactaactcttttgctggaagcggtttctgatttacagctcttggtttctcccagacatgttggtgggagagattttggtttttaaggggttgttagatggagtaaattttctttttttttttttttttttttaactaaaaaggggtcacagaatttcagcagttctctgatttttatattttattcctcttcctatccaatccctgccttttgagtccaggtggtaagtacattttctttaacgtttttcctgcttttcttcccaaatgtgtctttttctttgggctactgtaccctgcttccagtgctgtccccggcataggtccatctctgcagaagccatttcaggagtacctggaggctcaacggcagaagcttcaccacaaaagcgaaatgggcacaccacagggagaaaactggttgtcctggatgtttgaaaagttggtcgttgtcatggtgtgttacttcatcctatctatcattaactccatggcacaaagttatgccaaacgaatccagcagcggttgaactcagaggagaaaactaaataagtagagaaagttttaaactgcagaaattggagtggatgggttctgccttaaattgggaggactccaagccgggaaggaaaattcccttttccaacctgtatcaatttttacaacttttttcctgaaagcagtttagtccatactttgcactgacatactttttccttctgtgctaaggtaaggtatccaccctcgatgcaatccaccttgtgttttcttagggtggaatgtgatgttcagcagcaaacttgcaacagactggccttctgtttgttactttcaaaaggcccacatgatacaattagagaattcccaccgcacaaaaaaagttcctaagtatgttaaatatgtcaagctttttaggcttgtcacaaatgattgctttgttttcctaagtcatcaaaatgtatataaattatctagattggataacagtcttgcatgtttatcatgttacaatttaatattccatcctgcccaacccttcctctcccatcctcaaaaaagggccattttatgatgcattgcacaccctctggggaaattgatctttaaattttgagacagtataaggaaaatctggttggtgtcttacaagtgagctgacaccattttttattctgtgtatttagaatgaagtcttgaaaaaaactttataaagacatctttaatcattccaaaattgtgtccgttttcttgagcgttttgattttttacttttagcttataccagctgaatggcagccttgcctaatccacctacaacaagaatttcttaagctttcttttatttgcatgagagagccactaccaaggcatgttttgttatgctgaaactgggctgctgcatactgctaaatggcacctctgggattggcctacctggggatttcttggtttgtgaaaacaggagaggagaaatatctcatacaagtgaaaggatactggagagagaaattacccatttctaaaaaaaaaccacactctgtcgtatctgtgttaatgttttctagcatgtactctggtttcaacagacacaaatttatatgttaacccagttttcttgccgttctgtaagtgttttattcttagtgtgatttttttccattgggatgtttttgattgaacttgttcattttgttttgcttgggaggaaaataaacaattttacttttttccttt

SEQ ID NO: 4582 - protein, 56 aa, Homosapiens; identical to SEQ ID NO: 4578

SEQ ID NO: 4583 - DNA, 1801 bp, Homosapiens
acaagcataagtcatttccttattaattggttcaaaccagttcttacaggaactagtggtgataaatgtgggacttctgagaagtcattcattttattctttgtgccataccagagtacagtatcagctgagctgaccttactctgaggactaactcttttgctggaagcggtttctgatttacagctcttggtttctcccagacatgttggtgggagagattttggtttttaaggggttgttagatggagtaaattttctttttttttttttttttttttaactaaaaaggggtcacagaatttcagcagttctctgatttttatattttattcctcttcctatccaatccctgccttttgagtccaggtgtgctgtccccggcataggtccatctctgcagaagccatttcaggagtacctggaggctcaacggcagaagcttcaccacaaaagcgaaatgggcacaccacagggagaaaactggttgtcctggatgtttgaaaagttggtcgttgtcatggtgtgttacttcatcctatctatcattaactccatggcacaaagttatgccaaacgaatccagcagcggttgaactcagaggagaaaactaaataagtagagaaagttttaaactgcagaaattggagtggatgggttctgccttaaattgggaggactccaagccgggaaggaaaattcccttttccaacctgtatcaatttttacaacttttttcctgaaagcagtttagtccatactttgcactgacatactttttccttctgtgctaaggtaaggtatccaccctcgatgcaatccaccttgtgttttcttagggtggaatgtgatgttcagcagcaaacttgcaacagactggccttctgtttgttactttcaaaaggcccacatgatacaattagagaattcccaccgcacaaaaaaagttcctaagtatgttaaatatgtcaagctttttaggcttgtcacaaatgattgctttgttttcctaagtcatcaaaatgtatataaattatctagattggataacagtcttgcatgtttatcatgttacaatttaatattccatcctgcccaacccttcctctcccatcctcaaaaaagggccattttatgatgcattgcacaccctctggggaaattgatctttaaattttgagacagtataaggaaaatctggttggtgtcttacaagtgagctgacaccattttttattctgtgtatttagaatgaagtcttgaaaaaaactttataaagacatctttaatcattccaaaattgtgtccgttttcttgagcgttttgattttttacttttagcttataccagctgaatggcagccttgcctaatccacctacaacaagaatttcttaagctttcttttatttgcatgagagagccactaccaaggcatgttttgttatgctgaaactgggctgctgcatactgctaaatggcacctctgggattggcctacctggggatttcttggtttgtgaaaacaggagaggagaaatatctcatacaagtgaaaggatactggagagagaaattacccatttctaaaaaaaaaccacactctgtcgtatctgtgttaatgttttctagcatgtactctggtttcaacagacacaaatttatatgttaacccagttttcttgccgttctgtaagtgttttattcttagtgtgatttttttccattgggatgtttttgattgaacttgttcattttgttttgcttgggaggaaaataaacaattttacttttttccttt

SEQ ID NO: 4584 - protein, 52 aa, Homosapiens; identical to SEQ ID NO: 4576

SEQ ID NO: 4585 - DNA, 2781 bp, Homosapiens
acaagcataagtcatttccttattaattggttcaaaccagttcttacaggaactagtggtgataaatgtgggacttctgagaagtcattcattttattctttgtgccataccagagtacagtatcagctgagctgaccttactctgaggactaactcttttgctggaagcggtttctgatttacagctcttggtttctcccagacatgttggtgggagagattttggtttttaaggggttgttagatggagtaaattttctttttttttttttttttttttaactaaaaaggggtcacagaatttcagcagttctctgatttttatattttattcctcttcctatccaatccctgccttttgagtccaggtggtaagtacattttctttaacgtttttcctgcttttcttcccaaatgtgtctttttctttgggctactgtaccctgcttccagtgctgtccccggcataggtccatctctgcagaagccatttcaggagtacctggaggctcaacggcagaagcttcaccacaaaagcgaaatgggcacaccacagggagaaaactggttgtcctggatgtttgaaaagttggtcgttgtcatggtgtgttacttcatcctatctatcattaactccatggcacaaagttatgccaaacgaatccagcagcggttgaactcagaggagaaaactaaataagtagagaaagttttaaactgcagaaattggagtggatgggttctgccttaaattgggaggactccaagccgggaaggaaaattcccttttccaacctgtatcaatttttacaacttttttcctgaaagcagtttagtccatactttgcactgacatactttttccttctgtgctaaggtaaggtatccaccctcgatgcaatccaccttgtgttttcttagggtggaatgtgatgttcagcagcaaacttgcaacagactggccttctgtttgttactttcaaaaggcccacatgatacaattagagaattcccaccgcacaaaaaaagttcctaagtatgttaaatatgtcaagctttttaggcttgtcacaaatgattgctttgttttcctaagtcatcaaaatgtatataaattatctagattggataacagtcttgcatgtttatcatgttacaatttaatattccatcctgcccaacccttcctctcccatcctcaaaaaagggccattttatgatgcattgcacaccctctggggaaattgatctttaaattttgagacagtataaggaaaatctggttggtgtcttacaagtgagctgacaccattttttattctgtgtatttagaatgaagtcttgaaaaaaactttataaagacatctttaatcattccaaaattgtgtccgttttcttgagcgttttgattttttacttttagcttataccagctgaatggcagccttgcctaatccacctacaacaagaatttcttaagctttcttttatttgcatgagagagccactaccaaggcatgttttgttatgctgaaactgggctgctgcatactgctaaatggcacctctgggattggcctacctggggatttcttggtttgtgaaaacaggagaggagaaatatctcatacaagtgaaaggatactggagagagaaattacccatttctaaaaaaaaaccacactctgtcgtatctgtgttaatgttttctagcatgtactctggtttcaacagacacaaatttatatgttaacccagttttcttgccgttctgtaagtgttttattcttagtgtgatttttttccattgggatgtttttgattgaacttgttcattttgttttgcttgggaggaaaataaacaattttacttttttcctttaggagcattatgagcattatgtcagaatagaatagaattggggttcgatcttaacaggccagaaatgcctgggtttttttggtttgtttttgtttttgtttttttatcaaatcctgcctgactgtctgcttgttttgcctaccatcgtgacatctccatggctgtaccaccttgtcgggtagcttatcagactgatgttgactgttgaatctcatggcaacaccagtcgatgggctgtctgacattttggtatctttcatctgaccatccatatccaatgttctcatttaaacattacccagcatcattgtttataatcagaaactctggtccttctgtctggtggcacttagagtcttttgtgccataatgcagcagtatggagggaggattttatggagaaatggggatagtcttcatgaccacaaataaataaaggaaaactaagctgcattgtgggttttgaaaaggttattatacttcttaacaattctttttttcagggacttttctagctgtatgactgttacttgaccttctttgaaaagcattcccaaaatgctctattttagatagattaacattaaccaacataattttttttagatcgagtcagcataaatttctaagtcagcctctagtcgtggttcatctctttcacctgcattttatttggtgtttgtctgaagaaaggaaagaggaaagcaaatacgaattgtactatttgtaccaaatctttgggattcattggcaaataatttcagtgtggtgtattattaaatagaaaaaaaaaattttgtttcctaggttgaaggtctaattgatacgtttgacttatgatgaccatttatgcactttcaaatgaatttgctttcaaaataaatgaagagcagctgtc

SEQ ID NO: 4586 - protein, 56 aa, Homosapiens; identical to SEQ ID NO: 4578

SEQ ID NO: 4587 - DNA, 2699 bp, Homosapiens
acaagcataagtcatttccttattaattggttcaaaccagttcttacaggaactagtggtgataaatgtgggacttctgagaagtcattcattttattctttgtgccataccagagtacagtatcagctgagctgaccttactctgaggactaactcttttgctggaagcggtttctgatttacagctcttggtttctcccagacatgttggtgggagagattttggtttttaaggggttgttagatggagtaaattttctttttttttttttttttttttaactaaaaaggggtcacagaatttcagcagttctctgatttttatattttattcctcttcctatccaatccctgccttttgagtccaggtgtgctgtccccggcataggtccatctctgcagaagccatttcaggagtacctggaggctcaacggcagaagcttcaccacaaaagcgaaatgggcacaccacagggagaaaactggttgtcctggatgtttgaaaagttggtcgttgtcatggtgtgttacttcatcctatctatcattaactccatggcacaaagttatgccaaacgaatccagcagcggttgaactcagaggagaaaactaaataagtagagaaagttttaaactgcagaaattggagtggatgggttctgccttaaattgggaggactccaagccgggaaggaaaattcccttttccaacctgtatcaatttttacaacttttttcctgaaagcagtttagtccatactttgcactgacatactttttccttctgtgctaaggtaaggtatccaccctcgatgcaatccaccttgtgttttcttagggtggaatgtgatgttcagcagcaaacttgcaacagactggccttctgtttgttactttcaaaaggcccacatgatacaattagagaattcccaccgcacaaaaaaagttcctaagtatgttaaatatgtcaagctttttaggcttgtcacaaatgattgctttgttttcctaagtcatcaaaatgtatataaattatctagattggataacagtcttgcatgtttatcatgttacaatttaatattccatcctgcccaacccttcctctcccatcctcaaaaaagggccattttatgatgcattgcacaccctctggggaaattgatctttaaattttgagacagtataaggaaaatctggttggtgtcttacaagtgagctgacaccattttttattctgtgtatttagaatgaagtcttgaaaaaaactttataaagacatctttaatcattccaaaattgtgtccgttttcttgagcgttttgattttttacttttagcttataccagctgaatggcagccttgcctaatccacctacaacaagaatttcttaagctttcttttatttgcatgagagagccactaccaaggcatgttttgttatgctgaaactgggctgctgcatactgctaaatggcacctctgggattggcctacctggggatttcttggtttgtgaaaacaggagaggagaaatatctcatacaagtgaaaggatactggagagagaaattacccatttctaaaaaaaaaccacactctgtcgtatctgtgttaatgttttctagcatgtactctggtttcaacagacacaaatttatatgttaacccagttttcttgccgttctgtaagtgttttattcttagtgtgatttttttccattgggatgtttttgattgaacttgttcattttgttttgcttgggaggaaaataaacaattttacttttttcctttaggagcattatgagcattatgtcagaatagaatagaattggggttcgatcttaacaggccagaaatgcctgggtttttttggtttgtttttgtttttgtttttttatcaaatcctgcctgactgtctgcttgttttgcctaccatcgtgacatctccatggctgtaccaccttgtcgggtagcttatcagactgatgttgactgttgaatctcatggcaacaccagtcgatgggctgtctgacattttggtatctttcatctgaccatccatatccaatgttctcatttaaacattacccagcatcattgtttataatcagaaactctggtccttctgtctggtggcacttagagtcttttgtgccataatgcagcagtatggagggaggattttatggagaaatggggatagtcttcatgaccacaaataaataaaggaaaactaagctgcattgtgggttttgaaaaggttattatacttcttaacaattctttttttcagggacttttctagctgtatgactgttacttgaccttctttgaaaagcattcccaaaatgctctattttagatagattaacattaaccaacataattttttttagatcgagtcagcataaatttctaagtcagcctctagtcgtggttcatctctttcacctgcattttatttggtgtttgtctgaagaaaggaaagaggaaagcaaatacgaattgtactatttgtaccaaatctttgggattcattggcaaataatttcagtgtggtgtattattaaatagaaaaaaaaaattttgtttcctaggttgaaggtctaattgatacgtttgacttatgatgaccatttatgcactttcaaatgaatttgctttcaaaataaatgaagagcagctgtc

SEQ ID NO: 4588 - protein, 52 aa, Homosapiens; identical to SEQ ID NO: 4576

SEQ ID NO: 4589 - DNA, 3044 bp, Homosapiens
acaagcataagtcatttccttattaattggttcaaaccagttcttacaggaactagtggtgataaatgtgggacttctgagaagtcattcattttattctttgtgccataccagagtacagtatcagctgagctgaccttactctgaggactaactcttttgctggaagcggtttctgatttacagctcttggtttctcccagacatgttggtgggagagattttggtttttaaggggttgttagatggagtaaattttctttttttttttttttttttttaactaaaaaggggtcacagaatttcagcagttctctgatttttatattttattcctcttcctatccaatccctgccttttgagtccaggtggtaagtacattttctttaacgtttttcctgcttttcttcccaaatgtgtctttttctttgggctactgtaccctgcttccagtgctgtccccggcataggtccatctctgcagaagccatttcaggagtacctggaggctcaacggcagaagcttcaccacaaaagcgaaatgggcacaccacagggagaaaactggttgtcctggatgtttgaaaagttggtcgttgtcatggtgtgttacttcatcctatctatcattaactccatggcacaaagttatgccaaacgaatccagcagcggttgaactcagaggagaaaactaaataagtagagaaagttttaaactgcagaaattggagtggatgggttctgccttaaattgggaggactccaagccgggaaggaaaattcccttttccaacctgtatcaatttttacaacttttttcctgaaagcagtttagtccatactttgcactgacatactttttccttctgtgctaaggtaaggtatccaccctcgatgcaatccaccttgtgttttcttagggtggaatgtgatgttcagcagcaaacttgcaacagactggccttctgtttgttactttcaaaaggcccacatgatacaattagagaattcccaccgcacaaaaaaagttcctaagtatgttaaatatgtcaagctttttaggcttgtcacaaatgattgctttgttttcctaagtcatcaaaatgtatataaattatctagattggataacagtcttgcatgtttatcatgttacaatttaatattccatcctgcccaacccttcctctcccatcctcaaaaaagggccattttatgatgcattgcacaccctctggggaaattgatctttaaattttgagacagtataaggaaaatctggttggtgtcttacaagtgagctgacaccattttttattctgtgtatttagaatgaagtcttgaaaaaaactttataaagacatctttaatcattccaaaattgtgtccgttttcttgagcgttttgattttttacttttagcttataccagctgaatggcagccttgcctaatccacctacaacaagaatttcttaagctttcttttatttgcatgagagagccactaccaaggcatgttttgttatgctgaaactgggctgctgcatactgctaaatggcacctctgggattggcctacctggggatttcttggtttgtgaaaacaggagaggagaaatatctcatacaagtgaaaggatactggagagagaaattacccatttctaaaaaaaaaccacactctgtcgtatctgtgttaatgttttctagcatgtactctggtttcaacagacacaaatttatatgttaacccagttttcttgccgttctgtaagtgttttattcttagtgtgatttttttccattgggatgtttttgattgaacttgttcattttgttttgcttgggaggaaaataaacaattttacttttttcctttaggagcattatgagcattatgtcagaatagaatagaattggggttcgatcttaacaggccagaaatgcctgggtttttttggtttgtttttgtttttgtttttttatcaaatcctgcctgactgtctgcttgttttgcctaccatcgtgacatctccatggctgtaccaccttgtcgggtagcttatcagactgatgttgactgttgaatctcatggcaacaccagtcgatgggctgtctgacattttggtatctttcatctgaccatccatatccaatgttctcatttaaacattacccagcatcattgtttataatcagaaactctggtccttctgtctggtggcacttagagtcttttgtgccataatgcagcagtatggagggaggattttatggagaaatggggatagtcttcatgaccacaaataaataaaggaaaactaagctgcattgtgggttttgaaaaggttattatacttcttaacaattctttttttcagggacttttctagctgtatgactgttacttgaccttctttgaaaagcattcccaaaatgctctattttagatagattaacattaaccaacataattttttttagatcgagtcagcataaatttctaagtcagcctctagtcgtggttcatctctttcacctgcattttatttggtgtttgtctgaagaaaggaaagaggaaagcaaatacgaattgtactatttgtaccaaatctttgggattcattggcaaataatttcagtgtggtgtattattaaatagaaaaaaaaaattttgtttcctaggttgaaggtctaattgatacgtttgacttatgatgaccatttatgcactttcaaatgaatttgctttcaaaataaatgaagagcagctgtccttctttcctcttttaagtgttcagctgtggcatgctcagaggttcctgctggattccagctggagcggtgtgatacccttctttttcagctgttcgtgccttcctttcttgtatccaccaaagtggagacaaatacatgatctcaaagatacacagtacctacttaattccagctgatgggagaccaaagaatttgcaagtggatggtttggtatcactgtaaataaaaagagggcctgggaattcttgcgattccatctct

SEQ ID NO: 4590 - protein, 56 aa, Homosapiens; identical to SEQ ID NO: 4578

SEQ ID NO: 4591 - DNA, 2962 bp, Homosapiens
acaagcataagtcatttccttattaattggttcaaaccagttcttacaggaactagtggtgataaatgtgggacttctgagaagtcattcattttattctttgtgccataccagagtacagtatcagctgagctgaccttactctgaggactaactcttttgctggaagcggtttctgatttacagctcttggtttctcccagacatgttggtgggagagattttggtttttaaggggttgttagatggagtaaattttctttttttttttttttttttttaactaaaaaggggtcacagaatttcagcagttctctgatttttatattttattcctcttcctatccaatccctgccttttgagtccaggtgtgctgtccccggcataggtccatctctgcagaagccatttcaggagtacctggaggctcaacggcagaagcttcaccacaaaagcgaaatgggcacaccacagggagaaaactggttgtcctggatgtttgaaaagttggtcgttgtcatggtgtgttacttcatcctatctatcattaactccatggcacaaagttatgccaaacgaatccagcagcggttgaactcagaggagaaaactaaataagtagagaaagttttaaactgcagaaattggagtggatgggttctgccttaaattgggaggactccaagccgggaaggaaaattcccttttccaacctgtatcaatttttacaacttttttcctgaaagcagtttagtccatactttgcactgacatactttttccttctgtgctaaggtaaggtatccaccctcgatgcaatccaccttgtgttttcttagggtggaatgtgatgttcagcagcaaacttgcaacagactggccttctgtttgttactttcaaaaggcccacatgatacaattagagaattcccaccgcacaaaaaaagttcctaagtatgttaaatatgtcaagctttttaggcttgtcacaaatgattgctttgttttcctaagtcatcaaaatgtatataaattatctagattggataacagtcttgcatgtttatcatgttacaatttaatattccatcctgcccaacccttcctctcccatcctcaaaaaagggccattttatgatgcattgcacaccctctggggaaattgatctttaaattttgagacagtataaggaaaatctggttggtgtcttacaagtgagctgacaccattttttattctgtgtatttagaatgaagtcttgaaaaaaactttataaagacatctttaatcattccaaaattgtgtccgttttcttgagcgttttgattttttacttttagcttataccagctgaatggcagccttgcctaatccacctacaacaagaatttcttaagctttcttttatttgcatgagagagccactaccaaggcatgttttgttatgctgaaactgggctgctgcatactgctaaatggcacctctgggattggcctacctggggatttcttggtttgtgaaaacaggagaggagaaatatctcatacaagtgaaaggatactggagagagaaattacccatttctaaaaaaaaaccacactctgtcgtatctgtgttaatgttttctagcatgtactctggtttcaacagacacaaatttatatgttaacccagttttcttgccgttctgtaagtgttttattcttagtgtgatttttttccattgggatgtttttgattgaacttgttcattttgttttgcttgggaggaaaataaacaattttacttttttcctttaggagcattatgagcattatgtcagaatagaatagaattggggttcgatcttaacaggccagaaatgcctgggtttttttggtttgtttttgtttttgtttttttatcaaatcctgcctgactgtctgcttgttttgcctaccatcgtgacatctccatggctgtaccaccttgtcgggtagcttatcagactgatgttgactgttgaatctcatggcaacaccagtcgatgggctgtctgacattttggtatctttcatctgaccatccatatccaatgttctcatttaaacattacccagcatcattgtttataatcagaaactctggtccttctgtctggtggcacttagagtcttttgtgccataatgcagcagtatggagggaggattttatggagaaatggggatagtcttcatgaccacaaataaataaaggaaaactaagctgcattgtgggttttgaaaaggttattatacttcttaacaattctttttttcagggacttttctagctgtatgactgttacttgaccttctttgaaaagcattcccaaaatgctctattttagatagattaacattaaccaacataattttttttagatcgagtcagcataaatttctaagtcagcctctagtcgtggttcatctctttcacctgcattttatttggtgtttgtctgaagaaaggaaagaggaaagcaaatacgaattgtactatttgtaccaaatctttgggattcattggcaaataatttcagtgtggtgtattattaaatagaaaaaaaaaattttgtttcctaggttgaaggtctaattgatacgtttgacttatgatgaccatttatgcactttcaaatgaatttgctttcaaaataaatgaagagcagctgtccttctttcctcttttaagtgttcagctgtggcatgctcagaggttcctgctggattccagctggagcggtgtgatacccttctttttcagctgttcgtgccttcctttcttgtatccaccaaagtggagacaaatacatgatctcaaagatacacagtacctacttaattccagctgatgggagaccaaagaatttgcaagtggatggtttggtatcactgtaaataaaaagagggcctgggaattcttgcgattccatctct

SEQ ID NO: 4592 - protein, 52 aa, Homosapiens; identical to SEQ ID NO: 4576

SEQ ID NO: 4593 - DNA, 3156 bp, Homosapiens
acaagcataagtcatttccttattaattggttcaaaccagttcttacaggaactagtggtgataaatgtgggacttctgagaagtcattcattttattctttgtgccataccagagtacagtatcagctgagctgaccttactctgaggactaactcttttgctggaagcggtttctgatttacagctcttggtttctcccagacatgttggtgggagagattttggtttttaaggggttgttagatggagtaaattttctttttttttttttttttttttaactaaaaaggggtcacagaatttcagcagttctctgatttttatattttattcctcttcctatccaatccctgccttttgagtccaggtggtaagtacattttctttaacgtttttcctgcttttcttcccaaatgtgtctttttctttgggctactgtaccctgcttccagtgctgtccccggcataggtccatctctgcagaagccatttcaggagtacctggaggctcaacggcagaagcttcaccacaaaagcgaaatgggcacaccacagggagaaaactggttgtcctggatgtttgaaaagttggtcgttgtcatggtgtgttacttcatcctatctatcattaactccatggcacaaagttatgccaaacgaatccagcagcggttgaactcagaggagaaaactaaataagtagagaaagttttaaactgcagaaattggagtggatgggttctgccttaaattgggaggactccaagccgggaaggaaaattcccttttccaacctgtatcaatttttacaacttttttcctgaaagcagtttagtccatactttgcactgacatactttttccttctgtgctaaggtaaggtatccaccctcgatgcaatccaccttgtgttttcttagggtggaatgtgatgttcagcagcaaacttgcaacagactggccttctgtttgttactttcaaaaggcccacatgatacaattagagaattcccaccgcacaaaaaaagttcctaagtatgttaaatatgtcaagctttttaggcttgtcacaaatgattgctttgttttcctaagtcatcaaaatgtatataaattatctagattggataacagtcttgcatgtttatcatgttacaatttaatattccatcctgcccaacccttcctctcccatcctcaaaaaagggccattttatgatgcattgcacaccctctggggaaattgatctttaaattttgagacagtataaggaaaatctggttggtgtcttacaagtgagctgacaccattttttattctgtgtatttagaatgaagtcttgaaaaaaactttataaagacatctttaatcattccaaaattgtgtccgttttcttgagcgttttgattttttacttttagcttataccagctgaatggcagccttgcctaatccacctacaacaagaatttcttaagctttcttttatttgcatgagagagccactaccaaggcatgttttgttatgctgaaactgggctgctgcatactgctaaatggcacctctgggattggcctacctggggatttcttggtttgtgaaaacaggagaggagaaatatctcatacaagtgaaaggatactggagagagaaattacccatttctaaaaaaaaaccacactctgtcgtatctgtgttaatgttttctagcatgtactctggtttcaacagacacaaatttatatgttaacccagttttcttgccgttctgtaagtgttttattcttagtgtgatttttttccattgggatgtttttgattgaacttgttcattttgttttgcttgggaggaaaataaacaattttacttttttcctttaggagcattatgagcattatgtcagaatagaatagaattggggttcgatcttaacaggccagaaatgcctgggtttttttggtttgtttttgtttttgtttttttatcaaatcctgcctgactgtctgcttgttttgcctaccatcgtgacatctccatggctgtaccaccttgtcgggtagcttatcagactgatgttgactgttgaatctcatggcaacaccagtcgatgggctgtctgacattttggtatctttcatctgaccatccatatccaatgttctcatttaaacattacccagcatcattgtttataatcagaaactctggtccttctgtctggtggcacttagagtcttttgtgccataatgcagcagtatggagggaggattttatggagaaatggggatagtcttcatgaccacaaataaataaaggaaaactaagctgcattgtgggttttgaaaaggttattatacttcttaacaattctttttttcagggacttttctagctgtatgactgttacttgaccttctttgaaaagcattcccaaaatgctctattttagatagattaacattaaccaacataattttttttagatcgagtcagcataaatttctaagtcagcctctagtcgtggttcatctctttcacctgcattttatttggtgtttgtctgaagaaaggaaagaggaaagcaaatacgaattgtactatttgtaccaaatctttgggattcattggcaaataatttcagtgtggtgtattattaaatagaaaaaaaaaattttgtttcctaggttgaaggtctaattgatacgtttgacttatgatgaccatttatgcactttcaaatgaatttgctttcaaaataaatgaagagcagctgtccttctttcctcttttaagtgttcagctgtggcatgctcagaggttcctgctggattccagctggagcggtgtgatacccttctttttcagctgttcgtgccttcctttcttgtatccaccaaagtggagacaaatacatgatctcaaagatacacagtacctacttaattccagctgatgggagaccaaagaatttgcaagtggatggtttggtatcactgtaaataaaaagagggcctgggaattcttgcgattccatctctactttgtataagtctcattttgtgccttacacatctgcagtatttatcatgttccaacttggtgactgtcaggcagtgcaatacatcagcagtttatcaccgaagagctgag

SEQ ID NO: 4594 - protein, 56 aa, Homosapiens; identical to SEQ ID NO: 4578

SEQ ID NO: 4595 - DNA, 3074 bp, Homosapiens
acaagcataagtcatttccttattaattggttcaaaccagttcttacaggaactagtggtgataaatgtgggacttctgagaagtcattcattttattctttgtgccataccagagtacagtatcagctgagctgaccttactctgaggactaactcttttgctggaagcggtttctgatttacagctcttggtttctcccagacatgttggtgggagagattttggtttttaaggggttgttagatggagtaaattttctttttttttttttttttttttaactaaaaaggggtcacagaatttcagcagttctctgatttttatattttattcctcttcctatccaatccctgccttttgagtccaggtgtgctgtccccggcataggtccatctctgcagaagccatttcaggagtacctggaggctcaacggcagaagcttcaccacaaaagcgaaatgggcacaccacagggagaaaactggttgtcctggatgtttgaaaagttggtcgttgtcatggtgtgttacttcatcctatctatcattaactccatggcacaaagttatgccaaacgaatccagcagcggttgaactcagaggagaaaactaaataagtagagaaagttttaaactgcagaaattggagtggatgggttctgccttaaattgggaggactccaagccgggaaggaaaattcccttttccaacctgtatcaatttttacaacttttttcctgaaagcagtttagtccatactttgcactgacatactttttccttctgtgctaaggtaaggtatccaccctcgatgcaatccaccttgtgttttcttagggtggaatgtgatgttcagcagcaaacttgcaacagactggccttctgtttgttactttcaaaaggcccacatgatacaattagagaattcccaccgcacaaaaaaagttcctaagtatgttaaatatgtcaagctttttaggcttgtcacaaatgattgctttgttttcctaagtcatcaaaatgtatataaattatctagattggataacagtcttgcatgtttatcatgttacaatttaatattccatcctgcccaacccttcctctcccatcctcaaaaaagggccattttatgatgcattgcacaccctctggggaaattgatctttaaattttgagacagtataaggaaaatctggttggtgtcttacaagtgagctgacaccattttttattctgtgtatttagaatgaagtcttgaaaaaaactttataaagacatctttaatcattccaaaattgtgtccgttttcttgagcgttttgattttttacttttagcttataccagctgaatggcagccttgcctaatccacctacaacaagaatttcttaagctttcttttatttgcatgagagagccactaccaaggcatgttttgttatgctgaaactgggctgctgcatactgctaaatggcacctctgggattggcctacctggggatttcttggtttgtgaaaacaggagaggagaaatatctcatacaagtgaaaggatactggagagagaaattacccatttctaaaaaaaaaccacactctgtcgtatctgtgttaatgttttctagcatgtactctggtttcaacagacacaaatttatatgttaacccagttttcttgccgttctgtaagtgttttattcttagtgtgatttttttccattgggatgtttttgattgaacttgttcattttgttttgcttgggaggaaaataaacaattttacttttttcctttaggagcattatgagcattatgtcagaatagaatagaattggggttcgatcttaacaggccagaaatgcctgggtttttttggtttgtttttgtttttgtttttttatcaaatcctgcctgactgtctgcttgttttgcctaccatcgtgacatctccatggctgtaccaccttgtcgggtagcttatcagactgatgttgactgttgaatctcatggcaacaccagtcgatgggctgtctgacattttggtatctttcatctgaccatccatatccaatgttctcatttaaacattacccagcatcattgtttataatcagaaactctggtccttctgtctggtggcacttagagtcttttgtgccataatgcagcagtatggagggaggattttatggagaaatggggatagtcttcatgaccacaaataaataaaggaaaactaagctgcattgtgggttttgaaaaggttattatacttcttaacaattctttttttcagggacttttctagctgtatgactgttacttgaccttctttgaaaagcattcccaaaatgctctattttagatagattaacattaaccaacataattttttttagatcgagtcagcataaatttctaagtcagcctctagtcgtggttcatctctttcacctgcattttatttggtgtttgtctgaagaaaggaaagaggaaagcaaatacgaattgtactatttgtaccaaatctttgggattcattggcaaataatttcagtgtggtgtattattaaatagaaaaaaaaaattttgtttcctaggttgaaggtctaattgatacgtttgacttatgatgaccatttatgcactttcaaatgaatttgctttcaaaataaatgaagagcagctgtccttctttcctcttttaagtgttcagctgtggcatgctcagaggttcctgctggattccagctggagcggtgtgatacccttctttttcagctgttcgtgccttcctttcttgtatccaccaaagtggagacaaatacatgatctcaaagatacacagtacctacttaattccagctgatgggagaccaaagaatttgcaagtggatggtttggtatcactgtaaataaaaagagggcctgggaattcttgcgattccatctctactttgtataagtctcattttgtgccttacacatctgcagtatttatcatgttccaacttggtgactgtcaggcagtgcaatacatcagcagtttatcaccgaagagctgag

SEQ ID NO: 4596 - protein, 52 aa, Homosapiens; identical to SEQ ID NO: 4576

SEQ ID NO: 4597 - DNA, 575 bp, Homosapiens
ttaccagggaggaggatctttctgtgaacttgctttgatgacctccacccaaagccctttgaggaacagttttgtttattcaaggagcccttggcaggtcactcctcccctaccacaaatctaatccaaatgcgacattttcctttgaggccatctatcccttttgggggacaaaacacatcagcttttcccttcagaccacttttgactgaagcagtgatcaacattgcttaattgtgttccagtctgtttccagcggggaaaaaatgctttaggggagtgaggcagttagggatttgaaaacagggatggtgccgcctgaaggtggggaatgacttagatcactgtcttcctttggctcctcaccatgttgtgtggaggaaacgaaaagcagctcaagttcactcctcttggcagtagtgcagaagcctggcttgccacggccctggagaaccatgtttttcccaacttttttttttttcttttgagacggagtttcacttccagtctggacaacaagagcaaaactgtctcaaaaatgacaataacaataaacaatttacttgctatgtttc

SEQ ID NO: 4598 - protein, 68 aa, Homosapiens
MLCGGNEKQLKFTPLGSSAEAWLATALENHVFPNFFFFLLRRSFTSSLDNKSKTVSKMTITINNLLAM

SEQ ID NO: 4599 - DNA, 1487 bp, Homosapiens
ggttgtttttagaggtaatacacctagtttgtggctcagcatgtcaattgtaacagtgcaacttggtcagtgtggcaatcagattggttttgaagtttttgatgctttgcttagtgactcacacagttcccagggactctgctctatgagagagaatgaggcatatcaagcatcttgcaaagaaagattcttcagtgaggaggagaatggaggtattgataggcatgtatggcctcctttatcaggacttcctcctcttagtaaaatgtctctcaacaaggacctgcattttaacacttccattgctaacttggtcattcttcgtgggaaagatgtgcaaagtgcagatgtggagggatttaaagatccagctctgtatacttcctggttgaagcctgttaatgctttcaacgtgtggaaaacccagcgggcctttagcaaatatgagaagtctgcagtgttggtcagcaacagccagttcttagtaaaaccacttgatatgattgttgggaaggcatggaatatgtttgcttcaaaagcctacattcatcagtacacaaaatttggaatcgaagaagaggactttttagacagtttcacgtcattagagcaggttgttgccagttactgtaatctctgatcttgaacaatgggaaaagtataccttaaggcatttctggactaaaatattttcaatactattttctctgtaaagttttcaaagttctccatcctggctaacacggtgaaacaccgtctctaccagaaaatacaaaaaattagccaggcgcggtggcgggtgcctgtagtcccagctactcgggaggctgaggcaggagaatgacgtgaacccaggaggcggagcttgcagtgagccgagatcgcgccactgcactccagcctgggcgacagagcgagactccgtctcaaaaaaaaaaaaaaaaaaaaatgttttcaaagttccattctgttaaagtaaccacgtagaatgctgagtctattctgcatactatgcccacagaaaaggaagaaaactttttaaaatggagaatcgcatgttttcaatgaaaacattcacttggtatttcatttgtaagaaaaaaaaatggtgcttttataaagaactttggggaaacactttgctgaaatgttgggactctggaactagccaagaaaagagaatattctctttgtctacatgttcctaaatctttactccaaaacaactccaaaaacaactcacaaagcatgaaccaaactttcacagcataatttcaagctaaggaattgtaattctgtacttaatatattcatgtttgaaatgaatgctttgaaccacaggagggagatgttgtcaaatgctacagtgtgaacatgtattttgaatattctgtaacagggcaagtttccactctaagcagctatttaaaaataaatatgaggattttggtaataaatgcttatgcttaagtacaaaagtaaatagg

SEQ ID NO: 4600 - protein, 199 aa, Homosapiens
MSIVTVQLGQCGNQIGFEVFDALLSDSHSSQGLCSMRENEAYQASCKERFFSEEENGGIDRHVWPPLSGLPPLSKMSLNKDLHFNTSIANLVILRGKDVQSADVEGFKDPALYTSWLKPVNAFNVWKTQRAFSKYEKSAVLVSNSQFLVKPLDMIVGKAWNMFASKAYIHQYTKFGIEEEDFLDSFTSLEQVVASYCNL

SEQ ID NO: 4601 - DNA, 2387 bp, Homosapiens
agctggagcgttcggtggacagtgagcatgcgtaccatatctgaagttcgtaaattgaaattgaacatgcgtaattaatctttctgaataggaaaaaatatatacacaacaaaactctccgtttatggaacatgcgcatttgttctcagtaagtttttcgttttgaaagtgagcatgcgcatggtgagtaggttggtccgaagtttgaaccggacagaagcgctggtcggcgtctggcggttgtttttagagtgactcacacagttcccagggactctgctctatgagagagaatgaggcatatcaagcatcttgcaaagaaagattcttcagtgaggaggagaatggagttccaattgcccgggctgttcttgttgacatggaacccaaagttatcaatcaaatgctgtcaaaggctgcccagtctggccaatggaaatatggtcaacatgcatgcttctgtcaaaaacaaggttctggaaacaactgggcatatggttactctgttcatggacccaggcatgaagaatctataatgaacataatccggaaggaagtggagaaatgtgactctttcagtggttttttcatcataatgagtatggctgggggcacaggatcaggattaggagctttcgttacacagaatttagaagatcagtactcaaactcattgaaaatgaatcagattatttggccttatggaactggtgaggttattgttcaaaactacaactccattttgacactttctcacttgtaccgatcttcagacgccctccttcttcatgagaatgatgccatccataagatctgtgcaaaactgatgaatatcaagcagatctcctttagtgatatcaatcaagtcctcgcacatcagctgggaagtgtgttccagcctacttattctgcagaaagctcatttcactacagacgaaatccactaggagacttaatggagcatttagttccccatcctgaattcaagatgctgagtgttcgtaacattcctcacatgtctgagaattcattggcatacaccacatttacttgggctggcctcctcaagcatttgagacagatgctcatttctaatgcaaagatggaagaaggtattgataggcatgtatggcctcctttatcaggacttcctcctcttagtaaaatgtctctcaacaaggacctgcattttaacacttccattgctaacttggtcattcttcgtgggaaagatgtgcaaagtgcagatgtggagggatttaaagatccagctctgtatacttcctggttgaagcctgttaatgctttcaacgtgtggaaaacccagcgggcctttagcaaatatgagaagtctgcagtgttggtcagcaacagccagttcttagtaaaaccacttgatatgattgttgggaaggcatggaatatgtttgcttcaaaagcctacattcatcagtacacaaaatttggaatcgaagaagaggactttttagacagtttcacgtcattagagcaggttgttgccagttactgtaatctctgatcttgaacaatgggaaaagtataccttaaggcatttctggactaaaatattttcaatactattttctctgtaaagttttcaaagttctccatcctggctaacacggtgaaacaccgtctctaccagaaaatacaaaaaattagccaggcgcggtggcgggtgcctgtagtcccagctactcgggaggctgaggcaggagaatgacgtgaacccaggaggcggagcttgcagtgagccgagatcgcgccactgcactccagcctgggcgacagagcgagactccgtctcaaaaaaaaaaaaaaaaaaaaatgttttcaaagttccattctgttaaagtaaccacgtagaatgctgagtctattctgcatactatgcccacagaaaaggaagaaaactttttaaaatggagaatcgcatgttttcaatgaaaacattcacttggtatttcatttgtaagaaaaaaaaatggtgcttttataaagaactttggggaaacactttgctgaaatgttgggactctggaactagccaagaaaagagaatattctctttgtctacatgttcctaaatctttactccaaaacaactccaaaaacaactcacaaagcatgaaccaaactttcacagcataatttcaagctaaggaattgtaattctgtacttaatatattcatgtttgaaatgaatgctttgaaccacaggagggagatgttgtcaaatgctacagtgtgaacatgtattttgaatattctgtaacagggcaagtttccactctaagcagctatttaaaaataaatatgaggattttggtaataaatgcttatgcttaagtacaaaagtaaatagg

SEQ ID NO: 4602 - protein, 418 aa, Homosapiens
MRENEAYQASCKERFFSEEENGVPIARAVLVDMEPKVINQMLSKAAQSGQWKYGQHACFCQKQGSGNNWAYGYSVHGPRHEESIMNIIRKEVEKCDSFSGFFIIMSMAGGTGSGLGAFVTQNLEDQYSNSLKMNQIIWPYGTGEVIVQNYNSILTLSHLYRSSDALLLHENDAIHKICAKLMNIKQISFSDINQVLAHQLGSVFQPTYSAESSFHYRRNPLGDLMEHLVPHPEFKMLSVRNIPHMSENSLAYTTFTWAGLLKHLRQMLISNAKMEEGIDRHVWPPLSGLPPLSKMSLNKDLHFNTSIANLVILRGKDVQSADVEGFKDPALYTSWLKPVNAFNVWKTQRAFSKYEKSAVLVSNSQFLVKPLDMIVGKAWNMFASKAYIHQYTKFGIEEEDFLDSFTSLEQVVASYCNL

SEQ ID NO: 4603 - DNA, 2332 bp, Homosapiens
gcgcattgtcagctggagcgttcggtggacagtgagcatgcgtaccatatctgaagttcgtaaattgaaattgaacatgcgtaattaatctttctgaataggaaaaaatatatacacaacaaaactctccgtttatggaacatgcgcatttgttctcagtaagtttttcgttttgaaagtgagcatgcgcatggtgagtaggttggtccgaagtttgaaccggacagaagcgctggtcggcgtctggcggttgtttttagaggtaatacacctagtttgtggctcagcatgtcaattgtaacagtgcaacttggtcagtgtggcaatcagattggttttgaagtttttgatgctttgcttagtgactcacacagttcccagggactctgctctatgagagagaatgaggcatatcaagcatcttgcaaagaaagattcttcagtgaggaggagaatggagttccaattgcccgggctgttcttgttgacatggaacccaaagttatcaatcaaatgctgtcaaaggctgcccagtctggccaatggaaatatggtcaacatgcatgcttctgtcaaaaacaaggttctggaaacaactgggcatatggttactctgttcatggacccaggcatgaagaatctataatgaacataatccggaaggaagtggagaaatgtgactctttcagtggttttttcatcataatgagtatggctgggggcacaggatcaggattaggagctttcgttacacagaatttagaagatcagtactcaaactcattgaaaatgaatcagattatttggccttatggaactggtgaggttattgttcaaaactacaactccattttgacactttctcacttgtaccgatcttcagacgccctccttcttcatgagaatgatgccatccataagatctgtgcaaaactgatgaatatcaagcagatctcctttagtgatatcaatcaagtcctcgcacatcagctgggaagtgtgttccagcctacttattctgcagaaagctcatttcactacagacgaaatccactaggtattgataggcatgtatggcctcctttatcaggacttcctcctcttagtaaaatgtctctcaacaaggacctgcattttaacacttccattgctaacttggtcattcttcgtgggaaagatgtgcaaagtgcagatgtggagggatttaaagatccagctctgtatacttcctggttgaagcctgttaatgctttcaacgtgtggaaaacccagcgggcctttagcaaatatgagaagtctgcagtgttggtcagcaacagccagttcttagtaaaaccacttgatatgattgttgggaaggcatggaatatgtttgcttcaaaagcctacattcatcagtacacaaaatttggaatcgaagaagaggactttttagacagtttcacgtcattagagcaggttgttgccagttactgtaatctctgatcttgaacaatgggaaaagtataccttaaggcatttctggactaaaatattttcaatactattttctctgtaaagttttcaaagttctccatcctggctaacacggtgaaacaccgtctctaccagaaaatacaaaaaattagccaggcgcggtggcgggtgcctgtagtcccagctactcgggaggctgaggcaggagaatgacgtgaacccaggaggcggagcttgcagtgagccgagatcgcgccactgcactccagcctgggcgacagagcgagactccgtctcaaaaaaaaaaaaaaaaaaaaatgttttcaaagttccattctgttaaagtaaccacgtagaatgctgagtctattctgcatactatgcccacagaaaaggaagaaaactttttaaaatggagaatcgcatgttttcaatgaaaacattcacttggtatttcatttgtaagaaaaaaaaatggtgcttttataaagaactttggggaaacactttgctgaaatgttgggactctggaactagccaagaaaagagaatattctctttgtctacatgttcctaaatctttactccaaaacaactccaaaaacaactcacaaagcatgaaccaaactttcacagcataatttcaagctaaggaattgtaattctgtacttaatatattcatgtttgaaatgaatgctttgaaccacaggagggagatgttgtcaaatgctacagtgtgaacatgtattttgaatattctgtaacagggcaagtttccactctaagcagctatttaaaaataaatatgaggattttggtaataaatgcttatgcttaagtacaaaagtaaatagg

SEQ ID NO: 4604 - protein, 398 aa, Homosapiens
MSIVTVQLGQCGNQIGFEVFDALLSDSHSSQGLCSMRENEAYQASCKERFFSEEENGVPIARAVLVDMEPKVINQMLSKAAQSGQWKYGQHACFCQKQGSGNNWAYGYSVHGPRHEESIMNIIRKEVEKCDSFSGFFIIMSMAGGTGSGLGAFVTQNLEDQYSNSLKMNQIIWPYGTGEVIVQNYNSILTLSHLYRSSDALLLHENDAIHKICAKLMNIKQISFSDINQVLAHQLGSVFQPTYSAESSFHYRRNPLGIDRHVWPPLSGLPPLSKMSLNKDLHFNTSIANLVILRGKDVQSADVEGFKDPALYTSWLKPVNAFNVWKTQRAFSKYEKSAVLVSNSQFLVKPLDMIVGKAWNMFASKAYIHQYTKFGIEEEDFLDSFTSLEQVVASYCNL

SEQ ID NO: 4605 - DNA, 2497 bp, Homosapiens
gcgcattgtcagctggagcgttcggtggacagtgagcatgcgtaccatatctgaagttcgtaaattgaaattgaacatgcgtaattaatctttctgaataggaaaaaatatatacacaacaaaactctccgtttatggaacatgcgcatttgttctcagtaagtttttcgttttgaaagtgagcatgcgcatggtgagtaggttggtccgaagtttgaaccggacagaagcgctggtcggcgtctggcggttgtttttagaggtaatacacctagtttgtggctcagcatgtcaattgtaacagtgcaacttggtcagtgtggcaatcagattggttttgaagtttttgatgctttgcttagtgactcacacagttcccagggactctgctctatgagagagaatgaggcatatcaagcatcttgcaaagaaagattcttcagtgaggaggagaatggagttccaattgcccgggctgttcttgttgacatggaacccaaagttatcaatcaaatgctgtcaaaggctgcccagtctggccaatggaaatatggtcaacatgcatgcttctgtcaaaaacaaggttctggaaacaactgggcatatggttactctgttcatggacccaggcatgaagaatctataatgaacataatccggaaggaagtggagaaatgtgactctttcagtggttttttcatcataatgagtatggctgggggcacaggatcaggattaggagctttcgttacacagaatttagaagatcagtactcaaactcattgaaaatgaatcagattatttggccttatggaactggtgaggttattgttcaaaactacaactccattttgacactttctcacttgtaccgatcttcagacgccctccttcttcatgagaatgatgccatccataagatctgtgcaaaactgatgaatatcaagcagatctcctttagtgatatcaatcaagtcctcgcacatcagctgggaagtgtgttccagcctacttattctgcagaaagctcatttcactacagacgaaatccactaggagacttaatggagcatttagttccccatcctgaattcaagatgctgagtgttcgtaacattcctcacatgtctgagaattcattggcatacaccacatttacttgggctggcctcctcaagcatttgagacagatgctcatttctaatgcaaagatggaagaaggtattgataggcatgtatggcctcctttatcaggacttcctcctcttagtaaaatgtctctcaacaaggacctgcattttaacacttccattgctaacttggtcattcttcgtgggaaagatgtgcaaagtgcagatgtggagggatttaaagatccagctctgtatacttcctggttgaagcctgttaatgctttcaacgtgtggaaaacccagcgggcctttagcaaatatgagaagtctgcagtgttggtcagcaacagccagttcttagtaaaaccacttgatatgattgttgggaaggcatggaatatgtttgcttcaaaagcctacattcatcagtacacaaaatttggaatcgaagaagaggactttttagacagtttcacgtcattagagcaggttgttgccagttactgtaatctctgatcttgaacaatgggaaaagtataccttaaggcatttctggactaaaatattttcaatactattttctctgtaaagttttcaaagttctccatcctggctaacacggtgaaacaccgtctctaccagaaaatacaaaaaattagccaggcgcggtggcgggtgcctgtagtcccagctactcgggaggctgaggcaggagaatgacgtgaacccaggaggcggagcttgcagtgagccgagatcgcgccactgcactccagcctgggcgacagagcgagactccgtctcaaaaaaaaaaaaaaaaaaaaatgttttcaaagttccattctgttaaagtaaccacgtagaatgctgagtctattctgcatactatgcccacagaaaaggaagaaaactttttaaaatggagaatcgcatgttttcaatgaaaacattcacttggtatttcatttgtaagaaaaaaaaatggtgcttttataaagaactttggggaaacactttgctgaaatgttgggactctggaactagccaagaaaagagaatattctctttgtctacatgttcctaaatctttactccaaaacaactccaaaaacaactcacaaagcatgaaccaaactttcacagcataatttcaagctaaggaattgtaattctgtacttaatatattcatgtttgaaatgaatgctttgaaccacaggagggagatgttgtcaaatgctacagtgtgaacatgtattttgaatattctgtaacagggcaagtttccactctaagcagctatttaaaaataaatatgaggattttggtaataaatgcttatgcttaagtacaaaagtaaatagg

SEQ ID NO: 4606 - protein, 453 aa, Homosapiens; identical to SEQ ID NO: 706

SEQ ID NO: 4607 - DNA, 603 bp, Homosapiens
gcgtaccatatctgaagttcgtaaattgaaattgaacatgcgtaattaatctttctgaataggaaaaaatatatacacaacaaaactctccgtttatggaacatgcgcatttgttctcagtaagtttttcgttttgaaagtgagcatgcgcatggtgagtaggttggtccgaagtttgaaccggacagaagcgctggtcggcgtctggcggttgtttttagaggtaatacacctagtttgtggctcagcatgtcaattgtaacagtgcaacttggtcagtgtggcaatcagattggttttgaagtttttgatgctttgcttagtgactcacacagttcccagggactctgctctatgagagagaatgaggcatatcaagcatcttgcaaagaaagattcttcagtgaggaggagaatggagttccaattgcccgggctgttcttgttgacatggaacccaaagttatcaatcaaatgctgtcaaaggctgcccagtctggccaatggaaatatggtcaacatgcatgcttctgtcaaaaacaaggttctggaaacaactgggcatatgggttattgttcaaaactacaactccattttgacac

SEQ ID NO: 4608 - protein, 116 aa, Homosapiens [sequence omitted]

SEQ ID NO: 4609 - DNA, 2788 bp, Homosapiens
gaactttaggagccagtctaaggcctaggcgcagacgcactgagcctaagcagccggtgatggcggcagcggctgtggtggctgcggcgggtccgggcccatgaggcgacgaaggaggcgggacggcttttacccagccccggacttccgagacagggaagctgaggacatggcaggagtgtttgacatagacctggaccagccagaggacgcgggctctgaggatgagctggaggaggggggtcagttaaatgaaagcatggaccatgggggagttggaccatatgaacttggcatggaacattgtgagaaatttgaaatctcagaaactagtgtgaacagagggccagaaaaaatcagaccagaatgttttgagctacttcgggtacttggtaaagggggctatggaaaggtttttcaagtacgaaaagtaacaggagcaaatactgggaaaatatttgccatgaaggtgcttaaaaaggcaatgatagtaagaaatgctaaagatacagctcatacaaaagcagaacggaatattctggaggaagtaaagcatcccttcatcgtggatttaatttatgcctttcagactggtggaaaactctacctcatccttgagtatctcagtggaggagaactatttatgcagttagaaagagagggaatatttatggaagacactgcctggccttttctaacaaagaagctgcatttaagagccttagggatgaagtgcccttttttggaggaggctcactgagccgtgttggaggctgtgtttgtggtcgtgctggctgtgaaactgcctcagtcctctaggacacaccctctccatcctggagtaatctgcaggattgcaacattgttatgcagccagtattgcagtgccttgtgcttttcgaatccagacagggttgattcagccctttattcttttgagcttttacttggcagaaatctccatggctttggggcatttacatcaaaaggggatcatctacagagacctgaagccggagaatatcatgcttaatcaccaaggtcatgtgaaactaacagactttggactatgcaaagaatctattcatgatggaacagtcacacacacattttgtggaacaatagaatacatggcccctgaaatcttgatgagaagtggccacaatcgtgctgtggattggtggagtttgggagcattaatgtatgacatgctgactggagcacccccattcactggggagaatagaaagaaaacaattgacaaaatcctcaaatgtaaactcaatttgcctccctacctcacacaagaagccagagatctgcttaaaaagctgctgaaaagaaatgctgcttctcgtctgggagctggtcctggggacgctggagaagttcaagtagggattggcatctttggtgttttgtggggaagataatgctagttttatgtatttctgagggttatatgtagttgcttataagtttagcttattttgtgacttgtaacttcaaaaaggtgattaatttatcaatccagcaaagtctagtcccctcaacttttcttcctgctttttttttcctaggctcatccattctttagacacattaactgggaagaacttctggctcgaaaggtggagcccccctttaaacctctgttgcaatctgaagaggatgtaagtcagtttgattccaagtttacacgtcagacacctgtcgacagcccagatgactcaactctcagtgaaagtgccaatcaggtctttctgggttttacatatgtggctccatctgtacttgaaagtgtgaaagaaaagttttcctttgaaccaaaaatccgatcacctcgaagatttattggcagcccacgaacacctgtcagcccagtcaaattttctcctggggatttctggggaagaggtgcttcggccagcacagcaaatcctcagacacctgtggaatacccaatggaaacaagtggcatagagcagatggatgtgacaatgagtggggaagcatcggcaccacttccaatacgacagccgaactctgggccatacaaaaaacaagcttttcccatgatctccaaacggccagagcacctgcgtatgaatctatgacagagcaatgcttttaatgaatttaaggcaaaaaaggtggagagggagatgtgtgagcatcctgcaaggtgaaacgactcaaaatgacagtttcagagagtcaatgtcattacatagaacacttcagacacaggaaaaataaacgtggattttaaaaaatcaatcaatggtgcaaaaaaaaacttaaagcaaaatagtattgctgaactcttaggcacatcaattaattgattcctcgcgacatcttctcaaccttatcaaggattttcatgttgatgactcgaaactgacagtattaagggtaggatgttgcttctgaatcactgttgagttctgattgtgttgaagaagggttatcctttcattaggcaaagtacaaaattgcctataatacttgcaactaaggacaaattagcatgcaagcttggtcaaactttttccagcaaaatggaagcaaagacaaaagaaacttaccaattgatgttttacgtgcaaacaacctgaatcttttttttatataaatatatatttttcaaatagatttttgattcagctcattatgaaaaacatcccaaactttaaaatgcgaaattattggttggtgtgaagaaagccagacaacttctgtttcttctcttggtgaaataataaaatgcaaatgaatcattgtt

SEQ ID NO: 4610 - protein, 219 aa, Homosapiens
MRRRRRRDGFYPAPDFRDREAEDMAGVFDIDLDQPEDAGSEDELEEGGQLNESMDHGGVGPYELGMEHCEKFEISETSVNRGPEKIRPECFELLRVLGKGGYGKVFQVRKVTGANTGKIFAMKVLKKAMIVRNAKDTAHTKAERNILEEVKHPFIVDLIYAFQTGGKLYLILEYLSGGELFMQLEREGIFMEDTAWPFLTKKLHLRALGMKCPFLEEAH

SEQ ID NO: 4611 - DNA, 3076 bp, Homosapiens
gaactttaggagccagtctaaggcctaggcgcagacgcactgagcctaagcagccggtgatggcggcagcggctgtggtggctgcggcgggtccgggcccatgaggcgacgaaggaggcgggacggcttttacccagccccggacttccgagacagggaagctgaggacatggcaggagtgtttgacatagacctggaccagccagaggacgcgggctctgaggatgagctggaggaggggggtcagttaaatgaaagcatggaccatgggggagttggaccatatgaacttggcatggaacattgtgagaaatttgaaatctcagaaactagtgtgaacagagggccagaaaaaatcagaccagaatgttttgagctacttcgggtacttggtaaagggggctatggaaaggtttttcaagtacgaaaagtaacaggagcaaatactgggaaaatatttgccatgaaggtgcttaaaaaggcaatgatagtaagaaatgctaaagatacagctcatacaaaagcagaacggaatattctggaggaagtaaagcatcccttcatcgtggatttaatttatgcctttcagactggtggaaaactctacctcatccttgagtatctcagtggaggagaactatttatgcagttagaaagagagggaatatttatggaagacactgcctgcttttacttggcagaaatctccatggctttggggcatttacatcaaaaggggatcatctacagagacctgaagccggagaatatcatgcttaatcaccaaggtcatgtgaaactaacagactttggactatgcaaagaatctattcatgatggaacagtcacacacacattttgtggaacaatagaatacatggcccctgaaatcttgatgagaagtggccacaatcgtgctgtggattggtggagtttgggagcattaatgtatgacatgctgactggagcacccccattcactggggagaatagaaagaaaacaattgacaaaatcctcaaatgtaaactcaatttgcctccctacctcacacaagaagccagagatctgcttaaaaagctgctgaaaagaaatgctgcttctcgtctgggagctggtcctggggacgctggagaagttcaagctcatccattctttagacacattaactgggaagaacttctggctcgaaaggtggagcccccctttaaacctctgttgcaatctgaagaggatgtaagtcagtttgattccaagtttacacgtcagacacctgtcgacagcccagatgactcaactctcagtgaaagtgccaatcaggtctttctgggttttacatatgtggctccatctgtacttgaaagtgtgaaagaaaagttttcctttgaaccaaaaatccgatcacctcgaagatttattggcagcccacgaacacctgtcagcccagtcaaattttctcctggggatttctggggaagaggtgcttcggccagcacagcaaatcctcagacacctgtggaatacccaatggaaacaagtggcatagagcagatggatgtgacaatgagtggggaagcatcggcaccacttccaatacgacagccgaactctgggccatacaaaaaacaagcttttcccatgatctccaaacggccagagcacctgcgtatgaatctatgacagagcaatgcttttaatgaatttaaggcaaaaaaggtggagagggagatgtgtgagcatcctgcaaggtgaaacgactcaaaatgacagtttcagagagtcaatgtcattacatagaacacttcagacacaggaaaaataaacgtggattttaaaaaatcaatcaatggtgcaaaaaaaaacttaaagcaaaatagtattgctgaactcttaggcacatcaattaattgattcctcgcgacatcttctcaaccttatcaaggattttcatgttgatgactcgaaactgacagtattaagggtaggatgttgcttctgaatcactgttgagttctgattgtgttgaagaagggttatcctttcattaggcaaagtacaaaattgcctataatacttgcaactaaggacaaattagcatgcaagcttggtcaaactttttccagcaaaatggaagcaaagacaaaagaaacttaccaattgatgttttacgtgcaaacaacctgaatcttttttttatataaatatatatttttcaaatagatttttgattcagctcattatgaaaaacatcccaaactttaaaatgcgaaattattggttggtgtgaagaaagccagacaacttctgtttcttctcttggtgaaataataaaatgcaaatgaatcattgttaaccacagctgtggctcgtttgagggattggggtggacctggggtttattttcagtaacccagctgcaatacctgtctgtaatatgagaaaaaaaaaatgaatctatttaatcatttctacttgcagtactgctatgtgctaagcttaactggaagccttggaatgggcataagttgtatgtcctacatttcatcattgtcccgggcctgcattgcactggaaaaaaaaatcgccacctgttcttacaccagtatttggttcaagacaccaaatgtcttcagcccatggctgaagaacaacagaagagagtcaggataaaaaatacatactgtggtcggcaaggtgagggagatagggatatccaggggaagagggtgttgctgtggcccactctctgtctaatctctttacagcaaattggtaagattttcagttttacttctttctactgtttctgctgtctaccttccttatatttttttcctcaacagttttaaaaagaaaaaaaggtctatttttttttctcctatacttgggctacattttttgattgtaaaaatatttgatggccttttgatgaatgtcttccacagtaaagaaaacttagtggcttaatttaggaaacatgttaacaggacactatgtttttgaaattgtaacaaaatctacataaatgatttacaggttaaaagaataaaaataaaggtaactttacctttcttaaat

SEQ ID NO: 4612 - protein, 525 aa, Homosapiens; identical to SEQ ID NO: 708

SEQ ID NO: 4613 - DNA, 2042 bp, Homosapiens
gaactttaggagccagtctaaggcctaggcgcagacgcactgagcctaagcagccggtgatggcggcagcggctgtggtggctgcggcgggtccgggcccatgaggcgacgaaggaggcgggacggcttttacccagccccggacttccgagacagggaagctgaggacatggcaggagtgtttgacatagacctggaccagccagaggacgcgggctctgaggatgagctggaggaggggggtcagttaaatgaaagcatggaccatgggggagttggaccatatgaacttggcatggaacattgtgagaaatttgaaatctcagaaactagtgtgaacagagggccagaaaaaatcagaccagaatgttttgagctacttcgggtacttggtaaagggggctatggaaaggtttttcaagtacgaaaagtaacaggagcaaatactgggaaaatatttgccatgaaggtgcttaaaaaggcaatgatagtaagaaatgctaaagatacagctcatacaaaagcagaacggaatattctggaggaagtaaagcatcccttcatcgtggatttaatttatgcctttcagactggtggaaaactctacctcatccttgagtatctcagtggaggagaactatttatgcagttagaaagagagggaatatttatggaagacactgcctgcttttacttggcagaaatctccatggctttggggcatttacatcaaaaggggatcatctacagagacctgaagccggagaatatcatgcttaatcaccaaggtcatgtgaaactaacagactttggactatgcaaagaatctattcatgatggaacagtcacacacacattttgtggaacaatagaatacatggcccctgaaatcttgatgagaagtggccacaatcgtgctgtggattggtggagtttgggagcattaatgtatgacatgctgactggagcacccccattcactggggagaatagaaagaaaacaattgacaaaatcctcaaatgtaaactcaatttgcctccctacctcacacaagaagccagagatctgcttaaaaagctgctgaaaagaaatgctgcttctcgtctgggagctggtcctggggacgctggagaagttcaagctcatccattctttagacacattaactgggaagaacttctggctcgaaaggtggagcccccctttaaacctctgttgcaatctgaagaggatgtaagtcagtttgattccaagtttacacgtcagacacctgtcgacagcccagatgactcaactctcagtgaaagtgccaatcaggtctttctgggttttacatatgtggctccatctgtacttgaaagtgtgaaagaaaagttttcctttgaaccaaaaatccgatcacctcgaagatttattggcagcccacgaacacctgtcagtactgctatgtgctaagcttaactggaagccttggaatgggcataagttgtatgtcctacatttcatcattgtcccgggcctgcattgcactggaaaaaaaaatcgccacctgttcttacaccagtatttggttcaagacaccaaatgtcttcagcccatggctgaagaacaacagaagagagtcaggataaaaaatacatactgtggtcggcaaggtgagggagatagggatatccaggggaagagggtgttgctgtggcccactctctgtctaatctctttacagcaaattggtaagattttcagttttacttctttctactgtttctgctgtctaccttccttatatttttttcctcaacagttttaaaaagaaaaaaaggtctatttttttttctcctatacttgggctacattttttgattgtaaaaatatttgatggccttttgatgaatgtcttccacagtaaagaaaacttagtggcttaatttaggaaacatgttaacaggacactatgtttttgaaattgtaacaaaatctacataaatgatttacaggttaaaagaataaaaataaaggtaactttacctttcttaaatat

SEQ ID NO: 4614 - protein, 451 aa, Homosapiens
MRRRRRRDGFYPAPDFRDREAEDMAGVFDIDLDQPEDAGSEDELEEGGQLNESMDHGGVGPYELGMEHCEKFEISETSVNRGPEKIRPECFELLRVLGKGGYGKVFQVRKVTGANTGKIFAMKVLKKAMIVRNAKDTAHTKAERNILEEVKHPFIVDLIYAFQTGGKLYLILEYLSGGELFMQLEREGIFMEDTACFYLAEISMALGHLHQKGIIYRDLKPENIMLNHQGHVKLTDFGLCKESIHDGTVTHTFCGTIEYMAPEILMRSGHNRAVDWWSLGALMYDMLTGAPPFTGENRKKTIDKILKCKLNLPPYLTQEARDLLKKLLKRNAASRLGAGPGDAGEVQAHPFFRHINWEELLARKVEPPFKPLLQSEEDVSQFDSKFTRQTPVDSPDDSTLSESANQVFLGFTYVAPSVLESVKEKFSFEPKIRSPRRFIGSPRTPVSTAMC

SEQ ID NO: 4615 - DNA, 5313 bp, Homosapiens
gaactttaggagccagtctaaggcctaggcgcagacgcactgagcctaagcagccggtgatggcggcagcggctgtggtggctgcggcgggtccgggcccatgaggcgacgaaggaggcgggacggcttttacccagccccggacttccgagacagggaagctgaggacatggcaggagtgtttgacatagacctggaccagccagaggacgcgggctctgaggatgagctggaggaggggggtcagttaaatgaaagcatggaccatgggggagttggaccatatgaacttggcatggaacattgtgagaaatttgaaatctcagaaactagtgtgaacagagggccagaaaaaatcagaccagaatgttttgagctacttcgggtacttggtaaagggggctatggaaaggtttttcaagtacgaaaagtaacaggagcaaatactgggaaaatatttgccatgaaggtgcttaaaaaggcaatgatagtaagaaatgctaaagatacagctcatacaaaagcagaacggaatattctggaggaagtaaagcatcccttcatcgtggatttaatttatgcctttcagactggtggaaaactctacctcatccttgagtatctcagtggaggagaactatttatgcagttagaaagagagggaatatttatggaagacactgcctgcttttacttggcagaaatctccatggctttggggcatttacatcaaaaggggatcatctacagagacctgaagccggagaatatcatgcttaatcaccaaggtcatgtgaaactaacagactttggactatgcaaagaatctattcatgatggaacagtcacacacacattttgtggaacaatagaatacatggcccctgaaatcttgatgagaagtggccacaatcgtgctgtggattggtggagtttgggagcattaatgtatgacatgctgactggagcacccccattcactggggagaatagaaagaaaacaattgacaaaatcctcaaatgtaaactcaatttgcctccctacctcacacaagaagccagagatctgcttaaaaagctgctgaaaagaaatgctgcttctcgtctgggagctggtcctggggacgctggagaagttcaagctcatccattctttagacacattaactgggaagaacttctggctcgaaaggtggagcccccctttaaacctctgttgcaatctgaagaggatgtaagtcagtttgattccaagtttacacgtcagacacctgtcgacagcccagatgactcaactctcagtgaaagtgccaatcaggtctttctgggttttacatatgtggctccatctgtacttgaaagtgtgaaagaaaagttttcctttgaaccaaaaatccgatcacctcgaagatttattggcagcccacgaacacctgtcagcccagtcaaattttctcctggggatttctggggaagaggtgcttcggccagcacagcaaatcctcagacacctgtggaatacccaatggaaacaagtggcatagagcagatggatgtgacaatgagtggggaagcatcggcaccacttccaatacgacagccgaactctgggccatacaaaaaacaagcttttcccatgatctccaaacggccagagcacctgcgtatgaatctatgacagagcaatgcttttaatgaatttaaggcaaaaaaggtggagagggagatgtgtgagcatcctgcaaggtgaaacgactcaaaatgacagtttcagagagtcaatgtcattacatagaacacttcagacacaggaaaaataaacgtggattttaaaaaatcaatcaatggtgcaaaaaaaaacttaaagcaaaatagtattgctgaactcttaggcacatcaattaattgattcctcgcgacatcttctcaaccttatcaaggattttcatgttgatgactcgaaactgacagtattaagggtaggatgttgcttctgaatcactgttgagttctgattgtgttgaagaagggttatcctttcattaggcaaagtacaaaattgcctataatacttgcaactaaggacaaattagcatgcaagcttggtcaaactttttccagcaaaatggaagcaaagacaaaagaaacttaccaattgatgttttacgtgcaaacaacctgaatcttttttttatataaatatatatttttcaaatagatttttgattcagctcattatgaaaaacatcccaaactttaaaatgcgaaattattggttggtgtgaagaaagccagacaacttctgtttcttctcttggtgaaataataaaatgcaaatgaatcattgttaaccacagctgtggctcgtttgagggattggggtggacctggggtttattttcagtaacccagctgcaatacctgtctgtaatatgagaaaaaaaaaatgaatctatttaatcatttctacttgcagtactgctatgtgctaagcttaactggaagccttggaatgggcataagttgtatgtcctacatttcatcattgtcccgggcctgcattgcactggaaaaaaaaatcgccacctgttcttacaccagtatttggttcaagacaccaaatgtcttcagcccatggctgaagaacaacagaagagagtcaggataaaaaatacatactgtggtcggcaaggtgagggagatagggatatccaggggaagagggtgttgctgtggcccactctctgtctaatctctttacagcaaattggtaagattttcagttttacttctttctactgtttctgctgtctaccttccttatatttttttcctcaacagttttaaaaagaaaaaaaggtctatttttttttctcctatacttgggctacattttttgattgtaaaaatatttgatggccttttgatgaatgtcttccacagtaaagaaaacttagtggcttaatttaggaaacatgttaacaggacactatgtttttgaaattgtaacaaaatctacataaatgatttacaggttaaaagaataaaaataaaggtaactttacctttcttaaatatttcctgccttaaagagagcatttccatgactttagctggtgaaagggtttaatatctgcagagctttataaaaatatatttcagtgcatactggtataatagatgatcatgcagttgcagttgagttgtatcaccttttttgtttgtcttttataatgtcttcagtctgagtgtgcaaagtcaatttgtaatattttgcaaccctaggatttttttaaatagatgctgcttgctatgttttcaaacctttttgagccataggatccaagccataaaattctttatgcatgttgaattcagtcagaaaagagcaaggctttgctttttgaaattgcaactcaaatgagatgggatgaaatcctatgacagtaagcaaaaacagaaccatgaaaaatgattggacatacaccttttcaattgtggcaataattgaaagaatcgataaaagttcatctttggacagaaagcctttaaaaaaaaaatcactccctcttccccctcctcccttattgcagcagcctactgagaactttgactgttgctggtaaattagaagctacaataataattaagggcagaaattatacttaaaaagtgcagatccttgttctttgacaatttgtgatgtctgaaaaaacagaacccgaaaagctatggtgatatgtacaggcattatttcagactgtaaatggcttgtgatactcttgatacttgttttcaaatatgtttactaactgtagtgttgactgcctgaccaaattccagtgaaacttatacaccaaaatattcttcctaggtcctatttgctagtaacatgagcactgtgattggctggctataaccaccccagttaaaccattttcataattagtagtgccagcaatagtggcaaacactgcaacttttctgcataaaaagcattaattgcacagctaccatccacacaaatacatagtttttctgacttcacatttattaagtgaaatttatttcccatgctgtggaaagtttattgagaacttgtttcataaatggatatccctactatgactgtgaaaacatgtcaagtgtcacattagtgtcacagacagaaagcacacacctatgcaatatggcttatctatatttatttgtaaaaatccaagcatagtttaaaatatgatgtcgatattactagtcttgagtttctaagagggttctttatgttataccaggtaagtgtataaaagagattaagtgcttttttttcatcacttgattattttctttaaaatcagctattacaggatatttttttattttatacatgctgttttttaattaaaatataatcactgaagtttactaatttgattttataaggtttgtagcattacagaataactaaactgggatttataaaccagctgtgattaacaatgtaaagtattaattattgaactttgaaccagatttttaggaaaattatgttctttttccccctttatggtcttaactaatttgaatccttcaagaaggatttttccatactattttttaagatagaagataatttgtgggcaggggtggaggatgcatgtatgatactccataaattcaacattctttactataggtaatgaatgattataaacaagatgcatcttagatagtattaatatactgagccttggattatatatttaatataggacctattttgaatattcagttaatcatatggttcctagcttacaagggctagatctaagattattcccatgagaaatgttgaatttatgaagaatagattttaaggctttgaaaatggttaatttctcaaaaacatcaatgtccaaacatctaccttttttcataggagtagacactagcaagctggacaaactatcacaaaagtatttgtcacacataacctgtggtctgttgctgattaatacagtactttttcttgtgtgattcttaacattatagcacaagtattatctcagtggattatccggaataacatctgaaagatgggttcatctatgtttgtgtttgctctttaaactattgtttctcctatcccaagttcgctttgcatctatcagtaaataaaattcttcagctgccttattaggagtgctatgagggtaacacctgttctgcttttcatcttgtatttagttgactgtattatttgatttcggattgaatgaatgtaaatagaaattaaatgcaaatttgaatgaacat

SEQ ID NO: 4616 - protein, 525 aa, Homosapiens; identical to SEQ ID NO: 708

SEQ ID NO: 4617 - DNA, 5452 bp, Homosapiens
gaactttaggagccagtctaaggcctaggcgcagacgcactgagcctaagcagccggtgatggcggcagcggctgtggtggctgcggcgggtccgggcccatgaggcgacgaaggaggcgggacggcttttacccagccccggacttccgagacagggaagctgaggacatggcaggagtgtttgacatagacctggaccagccagaggacgcgggctctgaggatgagctggaggaggggggtcagttaaatgaaagcatggaccatgggggagttggaccatatgaacttggcatggaacattgtgagaaatttgaaatctcagaaactagtgtgaacagagggccagaaaaaatcagaccagaatgttttgagctacttcgggtacttggtaaagggggctatggaaaggtttttcaagtacgaaaagtaacaggagcaaatactgggaaaatatttgccatgaaggtgcttaaaaaggcaatgatagtaagaaatgctaaagatacagctcatacaaaagcagaacggaatattctggaggaagtaaagcatcccttcatcgtggatttaatttatgcctttcagactggtggaaaactctacctcatccttgagtatctcagtggaggagaactatttatgcagttagaaagagagggaatatttatggaagacactgcctgcttttacttggcagaaatctccatggctttggggcatttacatcaaaaggggatcatctacagagacctgaagccggagaatatcatgcttaatcaccaaggtcatgtgaaactaacagactttggactatgcaaagaatctattcatgatggaacagtcacacacacattttgtggaacaatagaatacatggcccctgaaatcttgatgagaagtggccacaatcgtgctgtggattggtggagtttgggagcattaatgtatgacatgctgactggagcacccccattcactggggagaatagaaagaaaacaattgacaaaatcctcaaatgtaaactcaatttgcctccctacctcacacaagaagccagagatctgcttaaaaagctgctgaaaagaaatgctgcttctcgtctgggagctggtcctggggacgctggagaagttcaagctcatccattctttagacacattaactgggaagaacttctggctcgaaaggtggagcccccctttaaacctctgttgcaatctgaagaggatgtaagtcagtttgattccaagtttacacgtcagacacctgtcgacagcccagatgactcaactctcagtgaaagtgccaatcaggtctttctgggttttacatatgtggctccatctgtacttgaaagtgtgaaagaaaagttttcctttgaaccaaaaatccgatcacctcgaagatttattggcagcccacgaacacctgtcagcccagtcaaattttctcctggggatttctggggaagaggtgcttcggccagcacagcaaatcctcagacacctgtggaatacccaatggaaacaagtggcatagagcagatggatgtgacaatgagtggggaagcatcggcaccacttccaatacgacagccgaactctgggccatacaaaaaacaagcttttcccatgatctccaaacggccagagcacctgcgtatgaatctatgacagagcaatgcttttaatgaatttaaggcaaaaaaggtggagagggagatgtgtgagcatcctgcaaggtgaaacgactcaaaatgacagtttcagagagtcaatgtcattacatagaacacttcagacacaggaaaaataaacgtggattttaaaaaatcaatcaatggtgcaaaaaaaaacttaaagcaaaatagtattgctgaactcttaggcacatcaattaattgattcctcgcgacatcttctcaaccttatcaaggattttcatgttgatgactcgaaactgacagtattaagggtaggatgttgcttctgaatcactgttgagttctgattgtgttgaagaagggttatcctttcattaggcaaagtacaaaattgcctataatacttgcaactaaggacaaattagcatgcaagcttggtcaaactttttccagcaaaatggaagcaaagacaaaagaaacttaccaattgatgttttacgtgcaaacaacctgaatcttttttttatataaatatatatttttcaaatagatttttgattcagctcattatgaaaaacatcccaaactttaaaatgcgaaattattggttggtgtgaagaaagccagacaacttctgtttcttctcttggtgaaataataaaatgcaaatgaatcattgttaaccacagctgtggctcgtttgagggattggggtggacctggggtttattttcagtaacccagctgcaatacctgtctgtaatatgagaaaaaaaaaatgaatctatttaatcatttctacttgcagtactgctatgtgctaagcttaactggaagccttggaatgggcataagttgtatgtcctacatttcatcattgtcccgggcctgcattgcactggaaaaaaaaatcgccacctgttcttacaccagtatttggttcaagacaccaaatgtcttcagcccatggctgaagaacaacagaagagagtcaggataaaaaatacatactgtggtcggcaaggtgagggagatagggatatccaggggaagagggtgttgctgtggcccactctctgtctaatctctttacagcaaattggtaagattttcagttttacttctttctactgtttctgctgtctaccttccttatatttttttcctcaacagttttaaaaagaaaaaaaggtctatttttttttctcctatacttgggctacattttttgattgtaaaaatatttgatggccttttgatgaatgtcttccacagtaaagaaaacttagtggcttaatttaggaaacatgttaacaggacactatgtttttgaaattgtaacaaaatctacataaatgatttacaggttaaaagaataaaaataaaggtaactttacctttcttaaatatttcctgccttaaagagagcatttccatgactttagctggtgaaagggtttaatatctgcagagctttataaaaatatatttcagtgcatactggtataatagatgatcatgcagttgcagttgagttgtatcaccttttttgtttgtcttttataatgtcttcagtctgagtgtgcaaagtcaatttgtaatattttgcaaccctaggatttttttaaatagatgctgcttgctatgttttcaaacctttttgagccataggatccaagccataaaattctttatgcatgttgaattcagtcagaaaagagcaaggctttgctttttgaaattgcaactcaaatgagatgggatgaaatcctatgacagtaagcaaaaacagaaccatgaaaaatgattggacatacaccttttcaattgtggcaataattgaaagaatcgataaaagttcatctttggacagaaagcctttaaaaaaaaaatcactccctcttccccctcctcccttattgcagcagcctactgagaactttgactgttgctggtaaattagaagctacaataataattaagggcagaaattatacttaaaaagtgcagatccttgttctttgacaatttgtgatgtctgaaaaaacagaacccgaaaagctatggtgatatgtacaggcattatttcagactgtaaatggcttgtgatactcttgatacttgttttcaaatatgtttactaactgtagtgttgactgcctgaccaaattccagtgaaacttatacaccaaaatattcttcctaggtcctatttgctagtaacatgagcactgtgattggctggctataaccaccccagttaaaccattttcataattagtagtgccagcaatagtggcaaacactgcaacttttctgcataaaaagcattaattgcacagctaccatccacacaaatacatagtttttctgacttcacatttattaagtgaaatttatttcccatgctgtggaaagtttattgagaacttgtttcataaatggatatccctactatgactgtgaaaacatgtcaagtgtcacattagtgtcacagacagaaagcacacacctatgcaatatggcttatctatatttatttgtaaaaatccaagcatagtttaaaatatgatgtcgatattactagtcttgagtttctaagagggttctttatgttataccaggtaagtgtataaaagagattaagtgcttttttttcatcacttgattattttctttaaaatcagctattacaggatatttttttattttatacatgctgttttttaattaaaatataatcactgaagtttactaatttgattttataaggtttgtagcattacagaataactaaactgggatttataaaccagctgtgattaacaatgtaaagtattaattattgaactttgaaccagatttttaggaaaattatgttctttttccccctttatggtcttaactaatttgaatccttcaagaaggatttttccatactattttttaagatagaagataatttgtgggcaggggtggaggatgcatgtatgatactccataaattcaacattctttactataggtaatgaatgattataaacaagatgcatcttagatagtattaatatactgagccttggattatatatttaatataggacctattttgaatattcagttaatcatatggttcctagcttacaagggctagatctaagattattcccatgagaaatgttgaatttatgaagaatagattttaaggctttgaaaatggttaatttctcaaaaacatcaatgtccaaacatctaccttttttcataggagtagacactagcaagctggacaaactatcacaaaagtatttgtcacacataacctgtggtctgttgctgattaatacagtactttttcttgtgtgattcttaacattatagcacaagtattatctcagtggattatccggaataacatctgaaagatgggttcatctatgtttgtgtttgctctttaaactattgtttctcctatcccaagttcgctttgcatctatcagtaaataaaattcttcagctgccttattaggagtgctatgagggtaacacctgttctgcttttcatcttgtatttagttgactgtattatttgatttcggattgaatgaatgtaaatagaaattaaatgcaaatttgaatgaacataaatagaagtgatttatttttttattatcttaaagataggaaggaattagtatacgtatcaggtgtataaatggtttaaatttattttaacatgtcagatgtgttcaagttgtcatataaataaactatgtatgtaagg

SEQ ID NO: 4618 - protein, 525 aa, Homosapiens; identical to SEQ ID NO: 708

SEQ ID NO: 4619 - DNA, 460 bp, Homosapiens
gagcctaagcagccggtgatggcggcagcggctgtggtggctgcggcgggtccgggcccatgaggcgacgaaggaggcgggacggcttttacccagccccggacttccgagacagggaagctgaggacatggcaggagtgtttgacatagacctggaccagccagaggacgcgggctctgaggatgagctggaggaggggggtcagttaaatgaaagcatggaccatgggggagttggaccatatgaacttggcatggaacattgtgagaaatttgaaatctcagaaactagtgtgaacagagggccagaaaaaatcagaccagaatgttttgagctacttcgggtacttggtaaagggggctatggaaaggctggagtgcagtggcacgatctcagctcactgcaacctctgccttccagattcaagcgattctcctgcctcagtctcccgagtagctg

SEQ ID NO: 4620 - protein, 132 aa, Homosapiens
MRRRRRRDGFYPAPDFRDREAEDMAGVFDIDLDQPEDAGSEDELEEGGQLNESMDHGGVGPYELGMEHCEKFEISETSVNRGPEKIRPECFELLRVLGKGGYGKAGVQWHDLSSLQPLPSRFKRFSCLSLPS

SEQ ID NO: 4621 - DNA, 471 bp, Homosapiens
agtgaaagtgccaatcaggtctttctgggttttacatatgtggctccatctgtacttgaaagtgtgaaagaaaagttttcctttgaaccaaaaatccgatcacctcgaagatttattggcagcccacgaacacctgtcagatttctggttcagtaagggtgagagccaggctccagactatagtgaattttccgaggagatatgtgtgggtcctgaataccatcccaagtgtccttataagagagaggcaaaagaggcaatagagacacagaaaagaaagccatgtgaagatggagcagagagatatatggccacaagccaaggaatgctgacagctgccagaagctggaagaaggcaaggaatggactctcccctacagcctccagaggcaatgcagccctgccaacactttgattttagacttctggcctatagaactgagaaagaataaatttctgttcttttcagct

SEQ ID NO: 4622 - protein, 35 aa, Homosapiens
MATSQGMLTAARSWKKARNGLSPTASRGNAALPTL

SEQ ID NO: 4623 - DNA, 1237 bp, Homosapiens
ggctcaatggaattctgctttcttgaagtgtgtgcctcacgaaatggctggaaagaagttaacgggtctaaaaatgaggttgaggacgtgggagagtgtacacattggtggttttaggtgtgcatcattgtgtaggtatgtcagactgaacaaccccattctcttgagatacatgacaaaatgccattctgtagtccactgttactgtctttcagggttttacatatgtggctccatctgtacttgaaagtgtgaaagaaaagttttcctttgaaccaaaaatccgatcacctcgaagatttattggcagcccacgaacacctgtcagcccagtcaaattttctcctggggatttctggggaagaggtgcttcggccagcacagcaaatcctcagacacctgtggaatacccaatggaaacaagtggcatagagcagatggatgtgacaatgagtggggaagcatcggcaccacttccaatacgacagccgaactctgggccatacaaaaaacaagcttttcccatgatctccaaacggccagagcacctgcgtatgaatctatgacagagcaatgcttttaatgaatttaaggcaaaaaaggtggagagggagatgtgtgagcatcctgcaaggtgaaacgactcaaaatgacagtttcagagagtcaatgtcattacatagaacacttcagacacaggaaaaataaacgtggattttaaaaaatcaatcaatggtgcaaaaaaaaacttaaagcaaaatagtattgctgaactcttaggcacatcaattaattgattcctcgcgacatcttctcaaccttatcaaggattttcatgttgatgactcgaaactgacagtattaagggtaggatgttgcttctgaatcactgttgagttctgattgtgttgaagaagggttatcctttcattaggcaaagtacaaaattgcctataatacttgcaactaaggacaaattagcatgcaagcttggtcaaactttttccagcaaaatggaagcaaagacaaaagaaacttaccaattgatgttttacgtgcaaacaacctgaatcttttttttatataaatatatatttttcaaatagatttttgattcagctcattatgaaaaacatcccaaactttaaaatgcgaaattattggttggtgtgaagaaagccagacaacttctgtttcttctcttggtgaaataataaaatgcaaatgaatcattgtt

SEQ ID NO: 4624 - protein, 67 aa, Homosapiens
MAGKKLTGLKMRLRTWESVHIGGFRCASLCRYVRLNNPILLRYMTKCHSVVHCYCLSGFYICGSICT

SEQ ID NO: 4625 - DNA, 1964 bp, Homosapiens
ggctcaatggaattctgctttcttgaagtgtgtgcctcacgaaatggctggaaagaagttaacgggtctaaaaatgaggttgaggacgtgggagagtgtacacattggtggttttaggtgtgcatcattgtgtaggtatgtcagactgaacaaccccattctcttgagatacatgacaaaatgccattctgtagtccactgttactgtctttcagggttttacatatgtggctccatctgtacttgaaagtgtgaaagaaaagttttcctttgaaccaaaaatccgatcacctcgaagatttattggcagcccacgaacacctgtcagcccagtcaaattttctcctggggatttctggggaagaggtgcttcggccagcacagcaaatcctcagacacctgtggaatacccaatggaaacaagtggcatagagcagatggatgtgacaatgagtggggaagcatcggcaccacttccaatacgacagccgaactctgggccatacaaaaaacaagcttttcccatgatctccaaacggccagagcacctgcgtatgaatctatgacagagcaatgcttttaatgaatttaaggcaaaaaaggtggagagggagatgtgtgagcatcctgcaaggtgaaacgactcaaaatgacagtttcagagagtcaatgtcattacatagaacacttcagacacaggaaaaataaacgtggattttaaaaaatcaatcaatggtgcaaaaaaaaacttaaagcaaaatagtattgctgaactcttaggcacatcaattaattgattcctcgcgacatcttctcaaccttatcaaggattttcatgttgatgactcgaaactgacagtattaagggtaggatgttgcttctgaatcactgttgagttctgattgtgttgaagaagggttatcctttcattaggcaaagtacaaaattgcctataatacttgcaactaaggacaaattagcatgcaagcttggtcaaactttttccagcaaaatggaagcaaagacaaaagaaacttaccaattgatgttttacgtgcaaacaacctgaatcttttttttatataaatatatatttttcaaatagatttttgattcagctcattatgaaaaacatcccaaactttaaaatgcgaaattattggttggtgtgaagaaagccagacaacttctgtttcttctcttggtgaaataataaaatgcaaatgaatcattgttaaccacagctgtggctcgtttgagggattggggtggacctggggtttattttcagtaacccagctgcaatacctgtctgtaatatgagaaaaaaaaaatgaatctatttaatcatttctacttgcagtactgctatgtgctaagcttaactggaagccttggaatgggcataagttgtatgtcctacatttcatcattgtcccgggcctgcattgcactggaaaaaaaaatcgccacctgttcttacaccagtatttggttcaagacaccaaatgtcttcagcccatggctgaagaacaacagaagagagtcaggataaaaaatacatactgtggtcggcaaggtgagggagatagggatatccaggggaagagggtgttgctgtggcccactctctgtctaatctctttacagcaaattggtaagattttcagttttacttctttctactgtttctgctgtctaccttccttatatttttttcctcaacagttttaaaaagaaaaaaaggtctatttttttttctcctatacttgggctacattttttgattgtaaaaatatttgatggccttttgatgaatgtcttccacagtaaagaaaacttagtggcttaatttaggaaacatgttaacaggacactatgtttttgaaattgtaacaaaatctacataaatgatttacaggttaaaagaataaaaataaaggtaactttacctttcttaaat

SEQ ID NO: 4626 - protein, 73 aa, Homosapiens
MNLFNHFYLQYCYVLSLTGSLGMGISCMSYISSLSRACIALEKKIATCSYTSIWFKTPNVFSPWLKNNRRESG

SEQ ID NO: 4627 - DNA, 4201 bp, Homosapiens
ggctcaatggaattctgctttcttgaagtgtgtgcctcacgaaatggctggaaagaagttaacgggtctaaaaatgaggttgaggacgtgggagagtgtacacattggtggttttaggtgtgcatcattgtgtaggtatgtcagactgaacaaccccattctcttgagatacatgacaaaatgccattctgtagtccactgttactgtctttcagggttttacatatgtggctccatctgtacttgaaagtgtgaaagaaaagttttcctttgaaccaaaaatccgatcacctcgaagatttattggcagcccacgaacacctgtcagcccagtcaaattttctcctggggatttctggggaagaggtgcttcggccagcacagcaaatcctcagacacctgtggaatacccaatggaaacaagtggcatagagcagatggatgtgacaatgagtggggaagcatcggcaccacttccaatacgacagccgaactctgggccatacaaaaaacaagcttttcccatgatctccaaacggccagagcacctgcgtatgaatctatgacagagcaatgcttttaatgaatttaaggcaaaaaaggtggagagggagatgtgtgagcatcctgcaaggtgaaacgactcaaaatgacagtttcagagagtcaatgtcattacatagaacacttcagacacaggaaaaataaacgtggattttaaaaaatcaatcaatggtgcaaaaaaaaacttaaagcaaaatagtattgctgaactcttaggcacatcaattaattgattcctcgcgacatcttctcaaccttatcaaggattttcatgttgatgactcgaaactgacagtattaagggtaggatgttgcttctgaatcactgttgagttctgattgtgttgaagaagggttatcctttcattaggcaaagtacaaaattgcctataatacttgcaactaaggacaaattagcatgcaagcttggtcaaactttttccagcaaaatggaagcaaagacaaaagaaacttaccaattgatgttttacgtgcaaacaacctgaatcttttttttatataaatatatatttttcaaatagatttttgattcagctcattatgaaaaacatcccaaactttaaaatgcgaaattattggttggtgtgaagaaagccagacaacttctgtttcttctcttggtgaaataataaaatgcaaatgaatcattgttaaccacagctgtggctcgtttgagggattggggtggacctggggtttattttcagtaacccagctgcaatacctgtctgtaatatgagaaaaaaaaaatgaatctatttaatcatttctacttgcagtactgctatgtgctaagcttaactggaagccttggaatgggcataagttgtatgtcctacatttcatcattgtcccgggcctgcattgcactggaaaaaaaaatcgccacctgttcttacaccagtatttggttcaagacaccaaatgtcttcagcccatggctgaagaacaacagaagagagtcaggataaaaaatacatactgtggtcggcaaggtgagggagatagggatatccaggggaagagggtgttgctgtggcccactctctgtctaatctctttacagcaaattggtaagattttcagttttacttctttctactgtttctgctgtctaccttccttatatttttttcctcaacagttttaaaaagaaaaaaaggtctatttttttttctcctatacttgggctacattttttgattgtaaaaatatttgatggccttttgatgaatgtcttccacagtaaagaaaacttagtggcttaatttaggaaacatgttaacaggacactatgtttttgaaattgtaacaaaatctacataaatgatttacaggttaaaagaataaaaataaaggtaactttacctttcttaaatatttcctgccttaaagagagcatttccatgactttagctggtgaaagggtttaatatctgcagagctttataaaaatatatttcagtgcatactggtataatagatgatcatgcagttgcagttgagttgtatcaccttttttgtttgtcttttataatgtcttcagtctgagtgtgcaaagtcaatttgtaatattttgcaaccctaggatttttttaaatagatgctgcttgctatgttttcaaacctttttgagccataggatccaagccataaaattctttatgcatgttgaattcagtcagaaaagagcaaggctttgctttttgaaattgcaactcaaatgagatgggatgaaatcctatgacagtaagcaaaaacagaaccatgaaaaatgattggacatacaccttttcaattgtggcaataattgaaagaatcgataaaagttcatctttggacagaaagcctttaaaaaaaaaatcactccctcttccccctcctcccttattgcagcagcctactgagaactttgactgttgctggtaaattagaagctacaataataattaagggcagaaattatacttaaaaagtgcagatccttgttctttgacaatttgtgatgtctgaaaaaacagaacccgaaaagctatggtgatatgtacaggcattatttcagactgtaaatggcttgtgatactcttgatacttgttttcaaatatgtttactaactgtagtgttgactgcctgaccaaattccagtgaaacttatacaccaaaatattcttcctaggtcctatttgctagtaacatgagcactgtgattggctggctataaccaccccagttaaaccattttcataattagtagtgccagcaatagtggcaaacactgcaacttttctgcataaaaagcattaattgcacagctaccatccacacaaatacatagtttttctgacttcacatttattaagtgaaatttatttcccatgctgtggaaagtttattgagaacttgtttcataaatggatatccctactatgactgtgaaaacatgtcaagtgtcacattagtgtcacagacagaaagcacacacctatgcaatatggcttatctatatttatttgtaaaaatccaagcatagtttaaaatatgatgtcgatattactagtcttgagtttctaagagggttctttatgttataccaggtaagtgtataaaagagattaagtgcttttttttcatcacttgattattttctttaaaatcagctattacaggatatttttttattttatacatgctgttttttaattaaaatataatcactgaagtttactaatttgattttataaggtttgtagcattacagaataactaaactgggatttataaaccagctgtgattaacaatgtaaagtattaattattgaactttgaaccagatttttaggaaaattatgttctttttccccctttatggtcttaactaatttgaatccttcaagaaggatttttccatactattttttaagatagaagataatttgtgggcaggggtggaggatgcatgtatgatactccataaattcaacattctttactataggtaatgaatgattataaacaagatgcatcttagatagtattaatatactgagccttggattatatatttaatataggacctattttgaatattcagttaatcatatggttcctagcttacaagggctagatctaagattattcccatgagaaatgttgaatttatgaagaatagattttaaggctttgaaaatggttaatttctcaaaaacatcaatgtccaaacatctaccttttttcataggagtagacactagcaagctggacaaactatcacaaaagtatttgtcacacataacctgtggtctgttgctgattaatacagtactttttcttgtgtgattcttaacattatagcacaagtattatctcagtggattatccggaataacatctgaaagatgggttcatctatgtttgtgtttgctctttaaactattgtttctcctatcccaagttcgctttgcatctatcagtaaataaaattcttcagctgccttattaggagtgctatgagggtaacacctgttctgcttttcatcttgtatttagttgactgtattatttgatttcggattgaatgaatgtaaatagaaattaaatgcaaatttgaatgaacat

SEQ ID NO: 4628 - protein, 73 aa, Homosapiens; identical to SEQ ID NO: 4626

SEQ ID NO: 4629 - DNA, 4340 bp, Homosapiens
ggctcaatggaattctgctttcttgaagtgtgtgcctcacgaaatggctggaaagaagttaacgggtctaaaaatgaggttgaggacgtgggagagtgtacacattggtggttttaggtgtgcatcattgtgtaggtatgtcagactgaacaaccccattctcttgagatacatgacaaaatgccattctgtagtccactgttactgtctttcagggttttacatatgtggctccatctgtacttgaaagtgtgaaagaaaagttttcctttgaaccaaaaatccgatcacctcgaagatttattggcagcccacgaacacctgtcagcccagtcaaattttctcctggggatttctggggaagaggtgcttcggccagcacagcaaatcctcagacacctgtggaatacccaatggaaacaagtggcatagagcagatggatgtgacaatgagtggggaagcatcggcaccacttccaatacgacagccgaactctgggccatacaaaaaacaagcttttcccatgatctccaaacggccagagcacctgcgtatgaatctatgacagagcaatgcttttaatgaatttaaggcaaaaaaggtggagagggagatgtgtgagcatcctgcaaggtgaaacgactcaaaatgacagtttcagagagtcaatgtcattacatagaacacttcagacacaggaaaaataaacgtggattttaaaaaatcaatcaatggtgcaaaaaaaaacttaaagcaaaatagtattgctgaactcttaggcacatcaattaattgattcctcgcgacatcttctcaaccttatcaaggattttcatgttgatgactcgaaactgacagtattaagggtaggatgttgcttctgaatcactgttgagttctgattgtgttgaagaagggttatcctttcattaggcaaagtacaaaattgcctataatacttgcaactaaggacaaattagcatgcaagcttggtcaaactttttccagcaaaatggaagcaaagacaaaagaaacttaccaattgatgttttacgtgcaaacaacctgaatcttttttttatataaatatatatttttcaaatagatttttgattcagctcattatgaaaaacatcccaaactttaaaatgcgaaattattggttggtgtgaagaaagccagacaacttctgtttcttctcttggtgaaataataaaatgcaaatgaatcattgttaaccacagctgtggctcgtttgagggattggggtggacctggggtttattttcagtaacccagctgcaatacctgtctgtaatatgagaaaaaaaaaatgaatctatttaatcatttctacttgcagtactgctatgtgctaagcttaactggaagccttggaatgggcataagttgtatgtcctacatttcatcattgtcccgggcctgcattgcactggaaaaaaaaatcgccacctgttcttacaccagtatttggttcaagacaccaaatgtcttcagcccatggctgaagaacaacagaagagagtcaggataaaaaatacatactgtggtcggcaaggtgagggagatagggatatccaggggaagagggtgttgctgtggcccactctctgtctaatctctttacagcaaattggtaagattttcagttttacttctttctactgtttctgctgtctaccttccttatatttttttcctcaacagttttaaaaagaaaaaaaggtctatttttttttctcctatacttgggctacattttttgattgtaaaaatatttgatggccttttgatgaatgtcttccacagtaaagaaaacttagtggcttaatttaggaaacatgttaacaggacactatgtttttgaaattgtaacaaaatctacataaatgatttacaggttaaaagaataaaaataaaggtaactttacctttcttaaatatttcctgccttaaagagagcatttccatgactttagctggtgaaagggtttaatatctgcagagctttataaaaatatatttcagtgcatactggtataatagatgatcatgcagttgcagttgagttgtatcaccttttttgtttgtcttttataatgtcttcagtctgagtgtgcaaagtcaatttgtaatattttgcaaccctaggatttttttaaatagatgctgcttgctatgttttcaaacctttttgagccataggatccaagccataaaattctttatgcatgttgaattcagtcagaaaagagcaaggctttgctttttgaaattgcaactcaaatgagatgggatgaaatcctatgacagtaagcaaaaacagaaccatgaaaaatgattggacatacaccttttcaattgtggcaataattgaaagaatcgataaaagttcatctttggacagaaagcctttaaaaaaaaaatcactccctcttccccctcctcccttattgcagcagcctactgagaactttgactgttgctggtaaattagaagctacaataataattaagggcagaaattatacttaaaaagtgcagatccttgttctttgacaatttgtgatgtctgaaaaaacagaacccgaaaagctatggtgatatgtacaggcattatttcagactgtaaatggcttgtgatactcttgatacttgttttcaaatatgtttactaactgtagtgttgactgcctgaccaaattccagtgaaacttatacaccaaaatattcttcctaggtcctatttgctagtaacatgagcactgtgattggctggctataaccaccccagttaaaccattttcataattagtagtgccagcaatagtggcaaacactgcaacttttctgcataaaaagcattaattgcacagctaccatccacacaaatacatagtttttctgacttcacatttattaagtgaaatttatttcccatgctgtggaaagtttattgagaacttgtttcataaatggatatccctactatgactgtgaaaacatgtcaagtgtcacattagtgtcacagacagaaagcacacacctatgcaatatggcttatctatatttatttgtaaaaatccaagcatagtttaaaatatgatgtcgatattactagtcttgagtttctaagagggttctttatgttataccaggtaagtgtataaaagagattaagtgcttttttttcatcacttgattattttctttaaaatcagctattacaggatatttttttattttatacatgctgttttttaattaaaatataatcactgaagtttactaatttgattttataaggtttgtagcattacagaataactaaactgggatttataaaccagctgtgattaacaatgtaaagtattaattattgaactttgaaccagatttttaggaaaattatgttctttttccccctttatggtcttaactaatttgaatccttcaagaaggatttttccatactattttttaagatagaagataatttgtgggcaggggtggaggatgcatgtatgatactccataaattcaacattctttactataggtaatgaatgattataaacaagatgcatcttagatagtattaatatactgagccttggattatatatttaatataggacctattttgaatattcagttaatcatatggttcctagcttacaagggctagatctaagattattcccatgagaaatgttgaatttatgaagaatagattttaaggctttgaaaatggttaatttctcaaaaacatcaatgtccaaacatctaccttttttcataggagtagacactagcaagctggacaaactatcacaaaagtatttgtcacacataacctgtggtctgttgctgattaatacagtactttttcttgtgtgattcttaacattatagcacaagtattatctcagtggattatccggaataacatctgaaagatgggttcatctatgtttgtgtttgctctttaaactattgtttctcctatcccaagttcgctttgcatctatcagtaaataaaattcttcagctgccttattaggagtgctatgagggtaacacctgttctgcttttcatcttgtatttagttgactgtattatttgatttcggattgaatgaatgtaaatagaaattaaatgcaaatttgaatgaacataaatagaagtgatttatttttttattatcttaaagataggaaggaattagtatacgtatcaggtgtataaatggtttaaatttattttaacatgtcagatgtgttcaagttgtcatataaataaactatgtatgtaagg

SEQ ID NO: 4630 - protein, 73 aa, Homosapiens; identical to SEQ ID NO: 4626

SEQ ID NO: 4631 - DNA, 974 bp, Homosapiens
aaattgcctataatacttgcaactaaggacaaattagcatgcaagcttggtcaaactttttccagcaaaatggaagcaaagacaaaagaaacttaccaattgatgttttacgtgcaaacaacctgaatcttttttttatataaatatatatttttcaaatagatttttgattcagctcattatgaaaaacatcccaaactttaaaatgcgaaattattggttggtgtgaagaaagccagacaacttctgtttcttctcttggtgaaataataaaatgcaaatgaatcattgttaaccacagctgtggctcgtttgagggattggggtggacctggggtttattttcagtaacccagctgcaatacctgtctgtaatatgagaaaaaaaaaatgaatctatttaatcatttctacttgcagtactgctatgtgctaagcttaactggaagccttggaatgggcataagttgtatgtcctacatttcatcattgtcccgggcctgcattgcactggaaaaaaaaatcgccacctgttcttacaccagtatttggttcaagacaccaaatgtcttcagcccatggctgaagaacaacagaagagagtcaggataaaaaatacatactgtggtcggcaaggtgagggagatagggatatccaggggaagagggtgttgctgtggcccactctctgtctaatctctttacagcaaattgcacaagtattatctcagtggattatccggaataacatctgaaagatgggttcatctatgtttgtgtttgctctttaaactattgtttctcctatcccaagttcgctttgcatctatcagtaaataaaattcttcagctgccttattaggagtgctatgagggtaacacctgttctgcttttcatcttgtatttagttgactgtattatttgatttcggattgaatgaatgtaaatagaaattaaatgcaaatttgaatga

SEQ ID NO: 4632 - protein, 58 aa, Homosapiens
MAEEQQKRVRIKNTYCGRQGEGDRDIQGKRVLLWPTLCLISLQQIAQVLSQWIIRNNI

SEQ ID NO: 4633 - DNA, 1925 bp, Homosapiens
gaacgtccggggagcgcgcgcgccgccgccgttgccgccgggctgagagaagagcttgcggggtttgcggttgatggccccgactgaagggctggaggcggtgtatgccgctgttcttgctgtcgctcccgacacctccgtccgcttctggtcatgagaggagacagaggcctgaagcaaagacatctgggtcagagaaaaagtatttaagggccatgcaagccaatcgtagccaactgcacagtcctccaggaactggaagcagtgaggatgcctcaacccctcagtgtgtccacacaagattgacaggagagggttcttgccctcattctggagatgttcatatccagataaactccatacctaaagaatgtgcagaaaatgcaagctccagaaatataaggtcaggtgtccatagctgtgcccatggatgtgtacacagtcgcttacggggtcactcccacagtgaagcaaggctgactgatgatactgccgcagaatctggagatcatggtagtagctccttctcagaattccgctatctcttcaagtggctgcaaaaaagtcttccatatattttgattctgagcgtcaaacttgttatgcagcatataacaggaatttctcttggaattgggctgctaacaacttttatgtatgcaaacaaaagcattgtaaatcaggtttttctaagacttaatttttttaaatcctactttggaccatttgagcttctgggaagtattttggattgttggaattacagacttcattctgaaattctttttcatgggcttaaaatgccttattttattggtgccttctttcatcatgccttttaaatctaagggttactggtatatgcttttagaagaattgtgtcaatactaccgaacttttgttcccataccagtttggtttcgctaccttataagctatggggagtttggtaacgtaactagatggagtcttgggatactgctggctttactctacctcatattaaaacttttggaattttttgggcatctgagaactttcagacaggttttacgaatattttttacacaaccaagttatggagtggctgccagcaagagacagtgttcagatgtggatgatatttgttcaatatgtcaagctgaatttcagaagccaattcttctcatttgtcagcatatattttgtgaagagtgcatgaccttatggtttaacagagagaaaacatgtccactctgcagaactgtgatttcagaccatataaacaaatggaaggatggagccacttcatcacaccttcaaatatattaagttgtataaactatcaaggccacaaaatactaatgtcatttggtcataatgactactgataaggcatcagaatggattttcagggctaccagaaaaatgtttccagatggttttagaatgtaggacttatgatccaattcaccaaaagattaaatgaaaccaccctgtgttttaaaatatatataatgttcaacctaatgtatatgcaacatttattctattctaattatttgacaggtaactgcagtgttaaattgtaaatgtgttttctttatgttaccaaaacagcaatttgaaattagaactagtggttttagagaactcaggtattctttcctgacattgttttcagaataaagaatatttttcataatattttaagatacatactatctaaaagtagaattttgttcagcattgacttttataattcccatcctaaaaattcttaatattttcataaaatttgtatttttaaatgaaaattctaaatgttgtattttatcagtaacattttctaagtgaagattaatttactgaggatgatacattatagtattgtattattctctgtagtaagattagtaataagtgaaaataaatgatttaaattc

SEQ ID NO: 4634 - protein, 245 aa, Homosapiens
MPLFLLSLPTPPSASGHERRQRPEAKTSGSEKKYLRAMQANRSQLHSPPGTGSSEDASTPQCVHTRLTGEGSCPHSGDVHIQINSIPKECAENASSRNIRSGVHSCAHGCVHSRLRGHSHSEARLTDDTAAESGDHGSSSFSEFRYLFKWLQKSLPYILILSVKLVMQHITGISLGIGLLTTFMYANKSIVNQVFLRLNFFKSYFGPFELLGSILDCWNYRLHSEILFHGLKMPYFIGAFFHHAF

SEQ ID NO: 4635 - DNA, 905 bp, Homosapiens
gaacgtccggggagcgcgcgcgccgccgccgttgccgccgggctgagagaagagcttgcggggtttgcggttgatggccccgactgaagggctggaggcggtgtatgccgctgttcttgctgtcgctcccgacacctccgtccgcttctggtcatgagaggagacagaggcctgaagcaaagacatctgggtcagagaaaaagtatttaagggccatgcaagccaatcgtagccaactgcacagtcctccaggaactggaagcagtgaggatgcctcaacccctcagtgtgtccacacaagattgacaggagagggttcttgccctcattctggagatgttcatatccagataaactccatacctaaagaatgtgcagaaaatgcaagctccagaaatataaggtcaggtgtccatagctgtgcccatggatgtgtacacagtcgcttacggggtcactcccacagtgaagcaaggctgactgatgatactgccgcagaatctggagatcatggtagtagctccttctcagaattccgctatctcttcaagtggctgcaaaaaagtcttccatatattttgattctgagcgtcaaacttgttatgcagcatataacaggaatttctcttggaattgggctgctaacaacttttatgtatgcaaacaaaagcattgtaaatcaggtttttctaagagtaagtataacaagcaactaaaaaattattaactgtttctctccatagattttagagaaataattttgagagaaataggaaataacttgaaagaaataggaagtaataggatatattgtaacatccacgttatgttaaatttgttatctaaatcctggaataaattatctctcctaatgctgaattccttcaccttaccttctttgtaag

SEQ ID NO: 4636 - protein, 203 aa, Homosapiens
MPLFLLSLPTPPSASGHERRQRPEAKTSGSEKKYLRAMQANRSQLHSPPGTGSSEDASTPQCVHTRLTGEGSCPHSGDVHIQINSIPKECAENASSRNIRSGVHSCAHGCVHSRLRGHSHSEARLTDDTAAESGDHGSSSFSEFRYLFKWLQKSLPYILILSVKLVMQHITGISLGIGLLTTFMYANKSIVNQVFLRVSITSN

SEQ ID NO: 4637 - DNA, 1839 bp, Homosapiens
gcatgacccaggccagctgattcatcagagtcaggatggacgtggtagaggtcgcgggtagttggtgggcacaagagcgagaggacatcattatgaaatacgaaaagatcatgaaggagaagggcaagaggtcatctgaacacatccagcagatggacctggacgtaagcgggacattaaggaggcatatattcttcagggatcgatacggaaccaagagacagcaatcaaatatatgactgatggatgtttactgaaacatattctgggagacccaagtcttaccaaattcagagtcattattttggatgaagcccatgaaagaactctaactacagatatcttatttggtctattgaagaagctatttcaggagaagtctgctaataggaaggagcatttaaaagtggtgattgtgaaagtcaccatggatatccatttgaatgaaatggctggagacatcttggtttttctgactgatcaacagaggaggatatttttgccaccgccacctggaattagaaaatgtgtcatatccaccaatatttctgcaacgtctttgacaatagatggaaccagatatgtggtagatggtggctttgtgaagcagttaaatcacaaccccagattagggttggacatcctggaggtggttccaatttcaaagtttccctatttggatccacctaatgagagacttattttagaagctcttaaacagctttaccagtgtgatgctattgacaggagtggccatgtcaccagattgggtttgtctatggtggagtttcctttgcctccacatctgacatgtgcagtaataaaagctgcttccctggattgtgaagatttactacttccaatagcagcaatgttgtctgtggaaaacgtcttcattagacctgttgatccagagtaccagaaggaagcagaacagagacatcgagaattggcagctaaagctggaggatttaatgactttgcaactttagctgtcatctttgaacaatgcaaatcaagtggagctccagcttcatggtgccaaaaacactggattcattggaggtgcttattttctgcatttcgtgtggaagctcaacttcgagaactaatcaggaagcttaaacaggagacagaggcctgaagcaaagacatctgggtcagagaaaaagtatttaagggccatgcaagccaatcgtagccaactgcacagtcctccaggaactggaagcagtgaggatgcctcaacccctcagtgtgtccacacaagattgacaggagagggttcttgccctcattctggagatgttcatatccagataaactccatacctaaagaatgtgcagaaaatgcaagctccagaaatataaggtcaggtgtccatagctgtgcccatggatgtgtacacagtcgcttacggggtcactcccacagtgaagcaaggctgactgatgatactgccgcagaatctggagatcatggtagtagctccttctcagaattccgctatctcttcaagtggctgcaaaaaagtcttccatatattttgattctgagcgtcaaacttgttatgcagcatataacaggaatttctcttggaattgggctgctaacaacttttatgtatgcaaacaaaagcattgtaaatcaggtttttctaagagtaagtataacaagcaactaaaaaattattaactgtttctctccatagattttagagaaataattttgagagaaataggaaataacttgaaagaaataggaagtaataggatatattgtaacatccacgttatgttaaatttgttatctaaatcctggaataaattatctctcct

SEQ ID NO: 4638 - protein, 302 aa, Homosapiens
MTDGCLLKHILGDPSLTKFRVIILDEAHERTLTTDILFGLLKKLFQEKSANRKEHLKVVIVKVTMDIHLNEMAGDILVFLTDQQRRIFLPPPPGIRKCVISTNISATSLTIDGTRYVVDGGFVKQLNHNPRLGLDILEVVPISKFPYLDPPNERLILEALKQLYQCDAIDRSGHVTRLGLSMVEFPLPPHLTCAVIKAASLDCEDLLLPIAAMLSVENVFIRPVDPEYQKEAEQRHRELAAKAGGFNDFATLAVIFEQCKSSGAPASWCQKHWIHWRCLFSAFRVEAQLRELIRKLKQETEA

SEQ ID NO: 4639 - DNA, 690 bp, Homosapiens
gtggagagctcacggctgccggggtgttttggcagcgagaacaagcgagctgcgcctgagaacggccttcaggcctggcgctaaataataagtcgttgttatgtgttatgtatttatgtggcatccaccacacgcctccgagatcctgggcgttttgaggttaaaaatgttcaggcttggagaacctacccctggaggagtgttagggtttccgggctcggatgtccgcgagcttgacgcctgacctagttgtgtctgtctgggcggtgacgtttggtctgagctgacctttcctcacaatcgtgaatttgggctgtgaggatcaggccttgtcagaacccgagatgagaggagagagatttctggttcagtaagggtgagagccaggctccagactatagtgaattttccgaggagatatgtgtgggtcctgaataccatcccaagtgtccttataagagagaggcaaaagaggcaatagagacacagaaaagaaagccatgtgaagatggagcagagagatatatggccacaagccaaggaatgctgacagctgccagaagctggaagaaggcaaggaatggactctcccctacagcctccagaggcaatgcagccctgccaacactttgattttagacttctggcctatagaactgagaaagaataaatttctgttcttttcagcta

SEQ ID NO: 4640 - protein, 47 aa, Homosapiens [sequence omitted]

SEQ ID NO: 4641 - DNA, 1603 bp, Homosapiens
ggtgacgtttggtctgagctgacctttcctcacaatcgtgaatttgggctgtgaggatcaggccttgtcagaacccgagatgagaggagagagatttctggttcagtaagggtgagagccaggctccagactatagtgaattttccgaggagatatgtatgacctacagtgactctgacgctaaatctgcaagttcttttaacaccacggaaataatgtctaaatgctcaagacaaaatcacttatggtgttgtctacataccttatgacatcgtgtatggcaaggcactttaaggtcagaactacagatgtcaaactagttctcttaatttcagggatcacatggtcaggcatacactggttccaaaaatctttactatagatccgaaagcattttcctgaagaagtcctgccagctcggccacttcgctgtaatgcctcgctcctacaaaaggaaaaaaacccaaaaattccccaaaatgttctgtgggtttctcaggtaatttactttgtctccccaaaacagctagaaattacctaatcagttgttctttgaataaaaagatttgacatagagacttactttgaaattggaaccacctccaggatgtccaaccctaatctggggttgtgatttaactgcttcacaaagccaccatctaccacatatctaagaagaatcaaagcaagttaagtttctggaaaataaaagaagacttgttaattgttaaccactttggtttctccttttctagcaaactagcaggtacacaatgccttttatgttaagtgtaaaacttgaaagtcaagaaattggaaccctcgtatgttgttggtgggaatgtaaaatggttcagccgaggtggaaaattgttcggaggtcctcaagaagttaaacacaaaattaccatatgatccagcaattccatttctaagtgtacaccaaaaagaactgagaacaagtactcaaacaaatacttatagaccaatgttcatatcagcactatgaatcacagccataaggtaaaaacaacctaaatgtccattaaccattaatggaagaagggatgaacaaattgctttgcatatatgtatgtagtatatatacacacgcatatatacacacacaatggaatatatatatatatacacacacacactatgcaatattattcagccacaaaaaagaatgaagtactgatacatgctacaatgtggacgaacctcaaaaatattatgctaagtgaaagaaagcaaacacagaaggccacatattatatgattctatttgtatgaaatatccagaatagaaaatacctactgcttcctgctgacacatctaaagaattttttaaaaaagaaaatacgtacaaacaaaaagtaagactggtagttgccaagggctggggtcgagaggggaatgtggagtacctgcttaatgggtatggggttttattttgaggtgttgaaatattttagaactaagcagaagcagtggttgcgcaatactgtaaatgtactaagtactacttaatttttcattttaaatgattaattttatgtgaattttgcctcaatacaaaaatacacaaacttgaaagtc

SEQ ID NO: 4642 - protein, 52 aa, Homosapiens
MLKTKSLMVLSTYLMTSCMARHFKVRTTDVKLVLLISGITWSGIHWFQKSLL

SEQ ID NO: 4643 - DNA, 1751 bp, Homosapiens
atgctgaaacgactgacttcaaaccatagggcatacataccttccactgaagaagagcacctgagtgaaatgactagaggtgcatttcaaagattattctattggaaatataaagaacgaattggaggagagacagcaatcaaatatatgactgatggatgtttactgaaacatattctgggagacccaagtcttaccaaattcagagtcattattttggatgaagcccatgaaagaactctaactacagatatcttatttggtctattgaagaagctatttcaggagaagtctgctaataggaaggagcatttaaaagtggtggtaatgtcagcaactatggaattagccaagctctctgcattctttggaaattgtccaatatttgatatacctggaaggctttatccagtcagagagaaattctgcaatttgattggtccacgagacagagaaaatactgcgtatattcaagcgattgtgaaagtcaccatggatatccatttgaatgaaatggctggagacatcttggtttttctgactggccagtttgaaatagaaaaaagttgtgagttactttttcagatggcagagtctgttgattatgattatgatgttcaagataccatcctcgatggcttgttaatattgccgtgttatggatcaatgacaactgatcaacagaggaggatatttttgccaccgccacctggaattagaaaatgtgtcatatccaccaatatttctgcaacgtctttgacaatagatggaaccagatatgtggtagatggtggctttgtgaagcagttaaatcacaaccccagattagggttggacatcctggaggtggttccaatttcaaagagcgaggcattacagcgaagtggccgagctggcaggacttcttcaggaaaatgctttcggatctatagtaaagatttttggaaccagtgtatgcctgaccatgtgatccctgaaattaagagaactagtttgacatctgtagttctgaccttaaagtgccttgccatacacgatgtcataaggtttccctatttggatccacctaatgagagacttattttagaagctcttaaacagctttaccagtgtgatgctattgacaggagtggccatgtcaccagattgggtttgtctatggtggagtttcctttgcctccacatctgacatgtgcagtaataaaagctgcttccctggattgtgaagatttactacttccaatagcagcaatgttgtctgtggaaaacgtcttcattagacctgttgatccagagtaccagaaggaagcagaacagagacatcgagaattggcagctaaagctggaggatttaatgactttgcaactttagctgtcatctttgaacaatgcaaatcaagtggagctccagcttcatggtgccaaaaacactggattcattggaggtgcttattttctgcatttcgtgtggaagctcaacttcgagaactaatcaggaagcttaaacagttcctggtccacaacgtcaaggagctggaagtgctgctgatgtgcaacaaatcttactgtgccgagatcactcaccatgtttcctccaagaaccgcaaagccatcgtggaaagagctgcccaactggccatcaaagtcaccaaccccaatgccaggctgcgcagcaaagaaaatgagtagacagctcgtgtgcatgttttctgtttaaataaaagtaaaaactgccaaaaaaaaaaaaaaaa

SEQ ID NO: 4644 - protein, 562 aa, Homosapiens
MLKRLTSNHRAYIPSTEEEHLSEMTRGAFQRLFYWKYKERIGGETAIKYMTDGCLLKHILGDPSLTKFRVIILDEAHERTLTTDILFGLLKKLFQEKSANRKEHLKVVVMSATMELAKLSAFFGNCPIFDIPGRLYPVREKFCNLIGPRDRENTAYIQAIVKVTMDIHLNEMAGDILVFLTGQFEIEKSCELLFQMAESVDYDYDVQDTILDGLLILPCYGSMTTDQQRRIFLPPPPGIRKCVISTNISATSLTIDGTRYVVDGGFVKQLNHNPRLGLDILEVVPISKSEALQRSGRAGRTSSGKCFRIYSKDFWNQCMPDHVIPEIKRTSLTSVVLTLKCLAIHDVIRFPYLDPPNERLILEALKQLYQCDAIDRSGHVTRLGLSMVEFPLPPHLTCAVIKAASLDCEDLLLPIAAMLSVENVFIRPVDPEYQKEAEQRHRELAAKAGGFNDFATLAVIFEQCKSSGAPASWCQKHWIHWRCLFSAFRVEAQLRELIRKLKQFLVHNVKELEVLLMCNKSYCAEITHHVSSKNRKAIVERAAQLAIKVTNPNARLRSKENE

SEQ ID NO: 4645 - DNA, 477 bp, Homosapiens
aggatccaagaactaagggcaaccactgggctccgcagcccctagtccatgagtcagccacccctctgcatgctgacaaaccttggctgtcacttatcctccaccccaaaccagccccagccccatcctattgcaggcctgtgtggctgctggagaggctgggctcccttcctcaccctgaggctgcctgatatgctttctggatcctggagaaaactgacccactattctcatactggtgcaacttcttccaagacctcaaaactggaccacatgaacttgtcttccttcttgtttctccttgctagggctgtcattgggacagtccgagatggggggtcgggggagacaatggatgaatggatggatgaatggactagtccagggagatgtccctgtgtgtcctgaactgggcccttcctccaatgagaagccttcctgagtgagtttctacagtcatcccttggtatccatgga

SEQ ID NO: 4646 - protein, 119 aa, Homosapiens
MSQPPLCMLTNLGCHLSSTPNQPQPHPIAGLCGCWRGWAPFLTLRLPDMLSGSWRKLTHYSHTGATSSKTSKLDHMNLSSFLFLLARAVIGTVRDGGSGETMDEWMDEWTSPGRCPCVS

SEQ ID NO: 4647 - DNA, 1115 bp, Homosapiens
atcagatctgcagctgccctttccgtcccggggaagagagagcagtacgggtctgttgaccagtatgctcggatctggaatgcattggtcaccgctttacagaagagtgaagacaccatagactttttggaattcaagtactgtgtcagcctacggacccaaatctgccaggcactgattcacctcttgagcttggccagtgcctcggacctcccttgtatgaaagaaacccttgaactgagtgggaatatggtccagtcctatattctacagtttttaaaatcaggagcagagggagatgacactggagcaccccacagcccacaggaaagagaccagatggtcagaatggcccttaaacacatgggcagcatccaggcaccaactggagacacagccagaagggccatcatgggctttttagaagagatcctggccgtttgttttgactcatctggatcacaaggggcactcccagggttaacaaatcagtgaagatcccaccatactttctagatgtcgaaggcggcagtaggaagacctgagcttgagcataagatctgtgggatttcatcttaggggcagaaacaatccgttcactatttatttagaatgacttagcagccatttaaattttcacagagggctcaaccacctttggagtgactccatagcactggccatggtcagggttgttggaacatctgacctgtgcatccaggagccgaggagtcaggttgtaatacaggccaagcagacgggctttgagggcatttagtctcagaaaaaaaaaatgtagaaggatttcggaattagaattttgtgtattgtatctgtagttttgtaataaactaacgaaaaatagtgtgtccacaatctcctgttgttaccaagttgtatttctagcaagctgcaagcagagctgcagttcagccagtttgtcctggcccagctgcacaggatgcgaggatgctgacagtgcctcacagccgcacaggaccgaggatgctgacggtgcctcacagccacacaggacgcgaggatgctgacggtgcctcacagccacacaggacgcgaggatgctgacggtgcctcacagccgcacaggacgcgag

SEQ ID NO: 4648 - protein, 38 aa, Homosapiens
MLTVPHSRTGPRMLTVPHSHTGREDADGASQPHRTRGC

SEQ ID NO: 4649 - DNA, 3934 bp, Homosapiens
agaaaagatggctgctgtgcaagttgtcggttcgtggccttccgtgcagccgcgggaggcaccgcgggaagcaatccctgagcgaggcaatgggtttcgcctcttgtctgccaggctctgcgccctgcgcccggatgacagcagctccgcccgcaccgagatccacctgctcttcgatcagctcatctccgagaactacagcgagggcagtggcgtggccccggaggacgttagtgctcttcttgtccaggcttgccgactggtacctcttaatcagaatcatcttgtcagcaaagtgagccagcttatccaccatttacttaacagattacaggtaattgttgatgaacagcacttggatttcctgttggcatatactatttcggctattcatcagtgtagttcctggacacacagggaaattcttcaagccctggcagctctggtgtactgcaatggctccaaatgtcaaaagtacctcccagagctgctaggcaacaccggactcttaatgaagttgagtgacttggctcagtctgatcctgaagtcaggagagctgcagtacattgtatggcaaacttatgtctcagtgtgccaggacagccgtatttggaggagccctaccaaaatgtctgtttccaagcttttctgactattttacagtctccaaaatcatctgatatggatgatatcacattttgcatgttattgcaaaatgcattaaaaggtatacagtcacttctaaatggtgggagaatgaaactaacacagactgatgaacttggagcacttttagctgtgctaaagaaattcatgtttcacggactccctggactaaacatagagatgcccacggtgttatacccaactccgcttcctcagtatgatgggcgaacacctatcaaaccacagcaatcagaatccagtgcttctcgaccaactttgaataaaaagaaaaaatccaaagtaaaaccaaagaaaatccagcaaggagaggaggaggaaaaggaatccagtggtgaaatagaggcagccccagtcactggcacaggcagagtgaacctgcatgaagggaacacttggtgtccctcctccctgggtgtccagagtttgcctttagatggaagtggagctgcagaaaaagatggagtctcctcatccttcagttcttccagttggaaaagggtcagcagtagtgagtcagacttttctgatgctgaaggaggcatgcagagtaaaatgaggtcttaccaagctaaagttcgccaaggagccttagtttgttttctttctactataaaatcgatagaaaaaaaagttctttatggctactggtcagcttttattcctgatacgcctgaacttggcagcccacagtcagtgtccttgatgactcttacattgaaagacccttctccaaagacacgtgcctgtgctctgcaagttttatctgccatcttggaaggctcaaagcagtttctttctgttgctgaagataccagtgaccacagaagggcttttacccccttctccgtaatgatcgcttgcagcattagagagttgcacagatgtcttttgttagctttggtggcggagtcatcctcacagaccgttactcagataattaagtgccttgcaaatttagtatcaaatgcaccttatgatcgtctaaaactcagcctgctgaccaaagtctggaaccagataaagccttatattcgccacaaagatgttaatgttcgtgtgtcaagtctcacactcttgggagctatagtgtccacccacgcacctttacctgaagtccaactacttctgcaacagccatgttcttctggactcggtaatagcaattcagcaacccctcacctcagccctcctgattggtggaagaaagcccctgcaggaccctctctggaagaaacgtcagttagctcacctaaggggtcttcagagccctgctggctcattcgactctgcatttccattgtcgtactgcccaaggaggattcctgttcaggtagcgatgctggctctgcagcaggaagcacctacgaaccatcccccatgcgactggaggccttacaggtattgactcttctggcaaggggctacttttcaatgactcaagcctacttgatggagcttggagaggtgatttgcaagtgcatgggggaagcagatccatccattcagcttcatggagcaaagcttctggaagaactgggcacaggcttaatacagcagtataaaccagactccactgcagcacctgatcagagagcaccagtcttcttggtggtgatgttctggactatgatgctgaacggtcctttacccagagccctgcagaattcagaacacccaactctccaggcgagcgcctgtgatgccctgtcttccatcttgccagaggccttcagcaatctgccgaatgacaggcagatgctgtgcatcacagtgctgctcgggctgaatgacagcaagaatcgcttagtgaaagctgcaacttcacgggccctgggagtctatgtgctttttccctgtctcagacaggatgtcatatttgttgcagacgcagcaaatgcaatattgatgtcacttgaagacaagtctctgaatgttcgagccaaagcagcctggtccctgggcaacctgacagacactctgattgtcaacatggaaacaccagacccaagtttccaggaagagttctctggtctcctgctcttgaaaatgttacgatcagctatagaagcatccaaggataaagacaaggtaaaaagcaatgcagtccgggcccttggaaatttgcttcattttctgcaaccctctcatatagaaaaacccacatttgcagaaatcattgaggagtctatccaggccctaatttctactgttctaacagaagctgccatgaaagtccgatggaatgcttgttatgcaatgggaaatgtatttaaaaatcctgcccttcctttagggacagccccatggacctcccaggcctacaatgccctgacatcggtcgtgacatcatgcaagaacttcaaagtgcgcatcagatctgcagctgccctttccgtcccggggaagagagagcagtacgggtctgttgaccagtatgctcggatctggaatgcattggtcaccgctttacagaagagtgaagacaccatagactttttggaattcaagtactgtgtcagcctacggacccaaatctgccaggcactgattcacctcttgagcttggccagtgcctcggacctcccttgtatgaaagaaacccttgaactgagtgggaatatggtccagtcctatattctacagtttttaaaatcaggagcagagggagatgacactggagcaccccacagcccacaggaaagagaccagatggtcagaatggcccttaaacacatgggcagcatccaggcaccaactggagacacagccagaagggccatcatgggctttttagaagagatcctggccgtttgttttgactcatctggatcacaaggggcactcccagggttaacaaatcagtgaagatcccaccatactttctagatgtcgaaggcggcagtaggaagacctgagcttgagcataagatctgtgggatttcatcttaggggcagaaacaatccgttcactatttatttagaatgacttagcagccatttaaattttcacagagggctcaaccacctttggagtgactccatagcactggccatggtcagggttgttggaacatctgacctgtgcatccaggagccgaggagtcaggttgtaatacaggccaagcagacgggctttgagggcatttagtctcagaaaaaaaaaatgtagaaggatttcggaattagaattttgtgtattgtatctgtagttttgtaataaactaacgaaaaatagtgtgtccacaa

SEQ ID NO: 4650 - protein, 1181 aa, Homosapiens
MAAVQVVGSWPSVQPREAPREAIPERGNGFRLLSARLCALRPDDSSSARTEIHLLFDQLISENYSEGSGVAPEDVSALLVQACRLVPLNQNHLVSKVSQLIHHLLNRLQVIVDEQHLDFLLAYTISAIHQCSSWTHREILQALAALVYCNGSKCQKYLPELLGNTGLLMKLSDLAQSDPEVRRAAVHCMANLCLSVPGQPYLEEPYQNVCFQAFLTILQSPKSSDMDDITFCMLLQNALKGIQSLLNGGRMKLTQTDELGALLAVLKKFMFHGLPGLNIEMPTVLYPTPLPQYDGRTPIKPQQSESSASRPTLNKKKKSKVKPKKIQQGEEEEKESSGEIEAAPVTGTGRVNLHEGNTWCPSSLGVQSLPLDGSGAAEKDGVSSSFSSSSWKRVSSSESDFSDAEGGMQSKMRSYQAKVRQGALVCFLSTIKSIEKKVLYGYWSAFIPDTPELGSPQSVSLMTLTLKDPSPKTRACALQVLSAILEGSKQFLSVAEDTSDHRRAFTPFSVMIACSIRELHRCLLLALVAESSSQTVTQIIKCLANLVSNAPYDRLKLSLLTKVWNQIKPYIRHKDVNVRVSSLTLLGAIVSTHAPLPEVQLLLQQPCSSGLGNSNSATPHLSPPDWWKKAPAGPSLEETSVSSPKGSSEPCWLIRLCISIVVLPKEDSCSGSDAGSAAGSTYEPSPMRLEALQVLTLLARGYFSMTQAYLMELGEVICKCMGEADPSIQLHGAKLLEELGTGLIQQYKPDSTAAPDQRAPVFLVVMFWTMMLNGPLPRALQNSEHPTLQASACDALSSILPEAFSNLPNDRQMLCITVLLGLNDSKNRLVKAATSRALGVYVLFPCLRQDVIFVADAANAILMSLEDKSLNVRAKAAWSLGNLTDTLIVNMETPDPSFQEEFSGLLLLKMLRSAIEASKDKDKVKSNAVRALGNLLHFLQPSHIEKPTFAEIIEESIQALISTVLTEAAMKVRWNACYAMGNVFKNPALPLGTAPWTSQAYNALTSVVTSCKNFKVRIRSAAALSVPGKREQYGSVDQYARIWNALVTALQKSEDTIDFLEFKYCVSLRTQICQALIHLLSLASASDLPCMKETLELSGNMVQSYILQFLKSGAEGDDTGAPHSPQERDQMVRMALKHMGSIQAPTGDTARRAIMGFLEEILAVCFDSSGSQGALPGLTNQ

SEQ ID NO: 4651 - DNA, 3889 bp, Homosapiens
gcagggtaccggtcggaggagtcccgtagtcatggaaacccctctgagccccagtccggtctaaaaaaggctctgcgccctgcgcccggatgacagcagctccgcccgcaccgagatccacctgctcttcgatcagctcatctccgagaactacagcgagggcagtggcgtggccccggaggacgttagtgctcttcttgtccaggcttgccgactggtacctcttaatcagaatcatcttgtcagcaaagtgagccagcttatccaccatttacttaacagattacaggtaattgttgatgaacagcacttggatttcctgttggcatatactatttcggctattcatcagtgtagttcctggacacacagggaaattcttcaagccctggcagctctggtgtactgcaatggctccaaatgtcaaaagtacctcccagagctgctaggcaacaccggactcttaatgaagttgagtgacttggctcagtctgatcctgaagtcaggagagctgcagtacattgtatggcaaacttatgtctcagtgtgccaggacagccgtatttggaggagccctaccaaaatgtctgtttccaagcttttctgactattttacagtctccaaaatcatctgatatggatgatatcacattttgcatgttattgcaaaatgcattaaaaggtatacagtcacttctaaatggtgggagaatgaaactaacacagactgatgaacttggagcacttttagctgtgctaaagaaattcatgtttcacggactccctggactaaacatagagatgcccacggtgttatacccaactccgcttcctcagtatgatgggcgaacacctatcaaaccacagcaatcagaatccagtgcttctcgaccaactttgaataaaaagaaaaaatccaaagtaaaaccaaagaaaatccagcaaggagaggaggaggaaaaggaatccagtggtgaaatagaggcagccccagtcactggcacaggcagagtgaacctgcatgaagggaacacttggtgtccctcctccctgggtgtccagagtttgcctttagatggaagtggagctgcagaaaaagatggagtctcctcatccttcagttcttccagttggaaaagggtcagcagtagtgagtcagacttttctgatgctgaaggaggcatgcagagtaaaatgaggtcttaccaagctaaagttcgccaaggagccttagtttgttttctttctactataaaatcgatagaaaaaaaagttctttatggctactggtcagcttttattcctgatacgcctgaacttggcagcccacagtcagtgtccttgatgactcttacattgaaagacccttctccaaagacacgtgcctgtgctctgcaagttttatctgccatcttggaaggctcaaagcagtttctttctgttgctgaagataccagtgaccacagaagggcttttacccccttctccgtaatgatcgcttgcagcattagagagttgcacagatgtcttttgttagctttggtggcggagtcatcctcacagaccgttactcagataattaagtgccttgcaaatttagtatcaaatgcaccttatgatcgtctaaaactcagcctgctgaccaaagtctggaaccagataaagccttatattcgccacaaagatgttaatgttcgtgtgtcaagtctcacactcttgggagctatagtgtccacccacgcacctttacctgaagtccaactacttctgcaacagccatgttcttctggactcggtaatagcaattcagcaacccctcacctcagccctcctgattggtggaagaaagcccctgcaggaccctctctggaagaaacgtcagttagctcacctaaggggtcttcagagccctgctggctcattcgactctgcatttccattgtcgtactgcccaaggaggattcctgttcaggtagcgatgctggctctgcagcaggaagcacctacgaaccatcccccatgcgactggaggccttacaggtattgactcttctggcaaggggctacttttcaatgactcaagcctacttgatggagcttggagaggtgatttgcaagtgcatgggggaagcagatccatccattcagcttcatggagcaaagcttctggaagaactgggcacaggcttaatacagcagtataaaccagactccactgcagcacctgatcagagagcaccagtcttcttggtggtgatgttctggactatgatgctgaacggtcctttacccagagccctgcagaattcagaacacccaactctccaggcgagcgcctgtgatgccctgtcttccatcttgccagaggccttcagcaatctgccgaatgacaggcagatgctgtgcatcacagtgctgctcgggctgaatgacagcaagaatcgcttagtgaaagctgcaacttcacgggccctgggagtctatgtgctttttccctgtctcagacaggatgtcatatttgttgcagacgcagcaaatgcaatattgatgtcacttgaagacaagtctctgaatgttcgagccaaagcagcctggtccctgggcaacctgacagacactctgattgtcaacatggaaacaccagacccaagtttccaggaagagttctctggtctcctgctcttgaaaatgttacgatcagctatagaagcatccaaggataaagacaaggtaaaaagcaatgcagtccgggcccttggaaatttgcttcattttctgcaaccctctcatatagaaaaacccacatttgcagaaatcattgaggagtctatccaggccctaatttctactgttctaacagaagctgccatgaaagtccgatggaatgcttgttatgcaatgggaaatgtatttaaaaatcctgcccttcctttagggacagccccatggacctcccaggcctacaatgccctgacatcggtcgtgacatcatgcaagaacttcaaagtgcgcatcagatctgcagctgccctttccgtcccggggaagagagagcagtacgggtctgttgaccagtatgctcggatctggaatgcattggtcaccgctttacagaagagtgaagacaccatagactttttggaattcaagtactgtgtcagcctacggacccaaatctgccaggcactgattcacctcttgagcttggccagtgcctcggacctcccttgtatgaaagaaacccttgaactgagtgggaatatggtccagtcctatattctacagtttttaaaatcaggagcagagggagatgacactggagcaccccacagcccacaggaaagagaccagatggtcagaatggcccttaaacacatgggcagcatccaggcaccaactggagacacagccagaagggccatcatgggctttttagaagagatcctggccgtttgttttgactcatctggatcacaaggggcactcccagggttaacaaatcagtgaagatcccaccatactttctagatgtcgaaggcggcagtaggaagacctgagcttgagcataagatctgtgggatttcatcttaggggcagaaacaatccgttcactatttatttagaatgacttagcagccatttaaattttcacagagggctcaaccacctttggagtgactccatagcactggccatggtcagggttgttggaacatctgacctgtgcatccaggagccgaggagtcaggttgtaatacaggccaagcagacgggctttgagggcatttagtctcagaaaaaaaaaatgtagaaggatttcggaattagaattttgtgtattgtatctgtagttttgtaataaactaacgaaaaatagtgtgtccacaa

SEQ ID NO: 4652 - protein, 1013 aa, Homosapiens
MKLSDLAQSDPEVRRAAVHCMANLCLSVPGQPYLEEPYQNVCFQAFLTILQSPKSSDMDDITFCMLLQNALKGIQSLLNGGRMKLTQTDELGALLAVLKKFMFHGLPGLNIEMPTVLYPTPLPQYDGRTPIKPQQSESSASRPTLNKKKKSKVKPKKIQQGEEEEKESSGEIEAAPVTGTGRVNLHEGNTWCPSSLGVQSLPLDGSGAAEKDGVSSSFSSSSWKRVSSSESDFSDAEGGMQSKMRSYQAKVRQGALVCFLSTIKSIEKKVLYGYWSAFIPDTPELGSPQSVSLMTLTLKDPSPKTRACALQVLSAILEGSKQFLSVAEDTSDHRRAFTPFSVMIACSIRELHRCLLLALVAESSSQTVTQIIKCLANLVSNAPYDRLKLSLLTKVWNQIKPYIRHKDVNVRVSSLTLLGAIVSTHAPLPEVQLLLQQPCSSGLGNSNSATPHLSPPDWWKKAPAGPSLEETSVSSPKGSSEPCWLIRLCISIVVLPKEDSCSGSDAGSAAGSTYEPSPMRLEALQVLTLLARGYFSMTQAYLMELGEVICKCMGEADPSIQLHGAKLLEELGTGLIQQYKPDSTAAPDQRAPVFLVVMFWTMMLNGPLPRALQNSEHPTLQASACDALSSILPEAFSNLPNDRQMLCITVLLGLNDSKNRLVKAATSRALGVYVLFPCLRQDVIFVADAANAILMSLEDKSLNVRAKAAWSLGNLTDTLIVNMETPDPSFQEEFSGLLLLKMLRSAIEASKDKDKVKSNAVRALGNLLHFLQPSHIEKPTFAEIIEESIQALISTVLTEAAMKVRWNACYAMGNVFKNPALPLGTAPWTSQAYNALTSVVTSCKNFKVRIRSAAALSVPGKREQYGSVDQYARIWNALVTALQKSEDTIDFLEFKYCVSLRTQICQALIHLLSLASASDLPCMKETLELSGNMVQSYILQFLKSGAEGDDTGAPHSPQERDQMVRMALKHMGSIQAPTGDTARRAIMGFLEEILAVCFDSSGSQGALPGLTNQ

SEQ ID NO: 4653 - DNA, 647 bp, Homosapiens
gttagatcagaatatatcttttcctgtcctgttaggtaattgttgatgaacagcacttggatttcctgttggcatatactatttcggctattcatcagtgtagttcctggacacacagggaaattcttcaagccctggcagctctggtgtactgcaatggctccaaatgtcaaaagtacctcccagagctgctaggcaacaccggactcttaatgaagttgagtgacttggctcagtctgatcctgaagtcaggagagctgcagtacattgtatggcaaacttatgtctcagtgtgccaggacagccgtatttggaggagccctaccaaaatgtctgtttccaagcttttctgactattttacagtctccaaaatcatctgatatggatgatatcacattttgcatgttattgcaaaatgcattaaaaggtatacagtcacttctaaatggtgggagaatgaaactaacacagactgatgaacttggagcacttttagctgtgctaaagaaattcatgtttcacggactccctggactaaacatagagatgcccacggtgttatacccaactccgcttcctcagtatgatgggcgaacacctatcaaaccacagcaatcagaatccagtgcttctcgaccaactttg

SEQ ID NO: 4654 - protein, 144 aa, Homosapiens
MKLSDLAQSDPEVRRAAVHCMANLCLSVPGQPYLEEPYQNVCFQAFLTILQSPKSSDMDDITFCMLLQNALKGIQSLLNGGRMKLTQTDELGALLAVLKKFMFHGLPGLNIEMPTVLYPTPLPQYDGRTPIKPQQSESSASRPT

SEQ ID NO: 4655 - DNA, 648 bp, Homosapiens
agaaaagatggctgctgtgcaagttgtcggttcgtggccttccgtgcagccgcgggaggcaccgcgggaagcaatccctgagcgaggcaatgggtttcgcctcttgtctgccaggctctgcgccctgcgcccggatgacagcagctccgcccgcaccgagatccacctgctcttcgatcagctcatctccgagaactacagcgagggcagtggcgtggccccggaggacgttagtgctcttcttgtccaggcttgccgactggtacctcttaatcagaatcatcttgtcagcaaagtgagccagcttatccaccatttacttaacagattacagagtttcacactgttgcccaggctggagtgtggcgcgatctcagctcacagcaagctccgcctcccgagtttacaccattcttctgcctcagcctcccaagtagctgggactacaggcacccgccaccacgtaattgttgatgaacagcacttggatttcctgttggcatatactatttcggctattcatcagtgtagttcctggacacacagggaaattcttcaagccctggcagctctggtgtactgcaatggctccaaatgtcaaaagtacctcccagagctgctaggcaacaccggactcttaatgaagtt

SEQ ID NO: 4656 - protein, 212 aa, Homosapiens
MAAVQVVGSWPSVQPREAPREAIPERGNGFRLLSARLCALRPDDSSSARTEIHLLFDQLISENYSEGSGVAPEDVSALLVQACRLVPLNQNHLVSKVSQLIHHLLNRLQSFTLLPRLECGAISAHSKLRLPSLHHSSASASQVAGTTGTRHHVIVDEQHLDFLLAYTISAIHQCSSWTHREILQALAALVYCNGSKCQKYLPELLGNTGLLM

SEQ ID NO: 4657 - DNA, 664 bp, Homosapiens
tagaaaagatggctgctgtgcaagttgtcggttcgtggccttccgtgcagccgcgggaggcaccgcgggaagcaatccctgagcgaggcaatgggtttcgcctcttgtctgccaggctctgcgccctgcgcccggatgacagcagctccgcccgcaccgagatccacctgctcttcgatcagctcatctccgagaactacagcgagggcagtggcgtggccccggagagacaaggtctcactctgtcatccagactggagtgcagcagcaagatcatagctcactgtgacctaaaactcctgggctcaagccatcctcccacctcagcctcccaagaagctgggactacataccaccatatccagctaatttttttaaaaaagttttttctgtagagatggagtctcactatgttgcccaagctggtcttggactcctgggctcaagcagtcctcccgctttgacctccggaagaactgggattaggtgtgagccactgtgcctggctttttccttcttttttagcacatgctgtttttgtgctatcacttcatttttttccttcctgcctcacattttctttccccattttgaatgtgaatatttacttttattttcccatttggctgtgttttgaggatcttcacttgactaataagtattt

SEQ ID NO: 4658 - protein, 128 aa, Homosapiens
MAAVQVVGSWPSVQPREAPREAIPERGNGFRLLSARLCALRPDDSSSARTEIHLLFDQLISENYSEGSGVAPERQGLTLSSRLECSSKIIAHCDLKLLGSSHPPTSASQEAGTTYHHIQLIFLKKFFL

SEQ ID NO: 4659 - DNA, 694 bp, Homosapiens
gaatggcgtgaacccgggaggcagggcttgcaatgagccaagatcgcgccactgcactccagcctgggcgacagagcgagactccgtctcagaaaaaaaaaaaaagaaagaaattggcttggagatttttcgccggccactccttcttgagccctgactgaaaagaaaaatgaacagggctaccttctgcctggactcacccaaaagccggtctcctgcagcctgaagctcttgtacctctaggctgaagatgatgaggatcacaggaggaggaaggctgccaacttcatgttgctgttggaaggctttggaaaaacacagcagggctgagagcagctgaaatttataccttccacccgctgagctggaatgcaaggccaggggtgggactagggactgcagacacctaagccctgcccagaaactgacatttctggagaatagccacccaccctgtgtaccctgggtccttctacattacctaagcaaggctctgagccaagggaacgccctcctctgacagaaaaataagactcctacaccaggccagttgcagtggctcacatctgtaatcccagcactttgggaggccaaggcaggaggatcatttgagcccaggagttcaagaccagcctgggtaacaagagcaagaccctgtctctacaaaattaaaaaaaaaaaaagttaaataatg

SEQ ID NO: 4660 - protein, 42 aa, Homosapiens
MSQDRATALQPGRQSETPSQKKKKRKKLAWRFFAGHSFLSPD

SEQ ID NO: 4661 - DNA, 673 bp, Homosapiens
cttgcattccagctcagcgggtggaaggtataaatttcagctgctctcagccctgctgtgtttttccaaagccttccaacagcaacatgaagttggcagccttcctcctcctgtgatcctcatcatcttcagcctagaggtacaagagcttcaggctgcaggagaccggcttttggatactgctaatcagtcctagcactctttctctttgaacctggacaaggtgtctgacccttctcaacacagcatcagacagccacctctattgactgaagttgacaatggagaataaaactcattacccctgctgaatccaggggcccctttttacagatgagaaaagttccagaaagacccagagacataatcaggtacctgcgtcgagctctgcacaggtgactgggactgcaaccccggagaccactgtgtcagcaatgggtgtggccatgagtgtgttgcagggtaaggacagatgaagagttatcttaaggatcatctttccctaagatcgtcatcccttcctggagttcctatcttccaagatgtgactgtctggagttccttgactaggaagatggatgaaaacagcaagcctgtggatggagactacaggggatatgggaggcagggaagaggggttgtttcttttaataaatcatcattgttaaaagca

SEQ ID NO: 4662 - protein, 66 aa, Homosapiens
MKSYLKDHLSLRSSSLPGVPIFQDVTVWSSLTRKMDENSKPVDGDYRGYGRQGRGVVSFNKSSLLK

SEQ ID NO: 4663 - DNA, 532 bp, Homosapiens
cttgcattccagctcagcgggtggaaggtataaatttcagctgctctcagccctgctgtgtttttccaaagccttccaacagcaacatgaagttggcagccttcctcctcctgtgatcctcatcatcttcagcctagaggtacaagagcttcaggctgcaggagaccggcttttgggggcccctttttacagatgagaaaagttccagaaagacccagagacataatcaggtacctgcgtcgagctctgcacaggtgactgggactgcaaccccggagaccactgtgtcagcaatgggtgtggccatgagtgtgttgcagggtaaggacagatgaagagttatcttaaggatcatctttccctaagatcgtcatcccttcctggagttcctatcttccaagatgtgactgtctggagttccttgactaggaagatggatgaaaacagcaagcctgtggatggagactacaggggatatgggaggcagggaagaggggttgtttcttttaataaatcatcattgttaaaagca

SEQ ID NO: 4664 - protein, 66 aa, Homosapiens; identical to SEQ ID NO: 4662

SEQ ID NO: 4665 - DNA, 574 bp, Homosapiens
aaggacccagggtacacagggtgggtggctattctccagaaatgtcagtttctgggcagggcttaggtgtctgcagtccctagtcccacccctggccttgcattccagctcagcgggtggaaggtataaatttcagctgctctcagccctgctgtgtttttccaaagccttccaacagcaacatgaagttggcagccttcctcctcctgtgatcctcatcatcttcagcctagaggtacaagagcttcaggctgcaggagaccggcttttgggtacctgcgtcgagctctgcacaggtgactgggactgcaaccccggagaccactgtgtcagcaatgggtgtggccatgagtgtgttgcagggtaaggacagatgaagagttatcttaaggatcatctttccctaagatcgtcatcccttcctggagttcctatcttccaagatgtgactgtctggagttccttgactaggaagatggatgaaaacagcaagcctgtggatggagactacaggggatatgggaggcagggaagaggggttgtttcttttaataaatcatcattgttaaaagca

SEQ ID NO: 4666 - protein, 66 aa, Homosapiens; identical to SEQ ID NO: 4662

SEQ ID NO: 4667 - DNA, 640 bp, Homosapiens
gggggaagaagaaaagaggatgccagtccttgttcctaggccaagacctgagccctgtaatattaatatttggatctaaaatcagccttccaacagcaacatgaagttggcagccttcctcctcctgtgatcctcatcatcttcagcctagaggtacaagagcttcaggctgcaggagaccggcttttgggtgtctgacccttctcaacacagcatcagacagccacctctattgactgaagttgacaatggagaataaaactcattacccctgctgaatccaggggcccctttttacagatgagaaaagttccagaaagacccagagacataatcaggtacctgcgtcgagctctgcacaggtgactgggactgcaaccccggagaccactgtgtcagcaatgggtgtggccatgagtgtgttgcagggtaaggacagatgaagagttatcttaaggatcatctttccctaagatcgtcatcccttcctggagttcctatcttccaagatgtgactgtctggagttccttgactaggaagatggatgaaaacagcaagcctgtggatggagactacaggggatatgggaggcagggaagaggggttgtttcttttaataaatcatcattgttaaaagca

SEQ ID NO: 4668 - protein, 66 aa, Homosapiens; identical to SEQ ID NO: 4662

SEQ ID NO: 4669 - DNA, 499 bp, Homosapiens
tactgttttgagattatgtgaatgcattgcttttaactagaatatataagatgttaatgatattattcttcaagtaataaatcatattgcatattgaatgaaaagaaaaatgtagaactgacttcttaatcaagggctgttctccctagcatctgtcccaaaagtacggtggttttcagcacatccgttcttccataggtacctgcgtcgagctctgcacaggtgactgggactgcaaccccggagaccactgtgtcagcaatgggtgtggccatgagtgtgttgcagggtaaggacagatgaagagttatcttaaggatcatctttccctaagatcgtcatcccttcctggagttcctatcttccaagatgtgactgtctggagttccttgactaggaagatggatgaaaacagcaagcctgtggatggagactacaggggatatgggaggcagggaagaggggttgtttcttttaataaatcatcattgttaaaagc

SEQ ID NO: 4670 - protein, 65 aa, Homosapiens
MKSYLKDHLSLRSSSLPGVPIFQDVTVWSSLTRKMDENSKPVDGDYRGYGRQGRGVVSFNKSSLL

SEQ ID NO: 4671 - DNA, 525 bp, Homosapiens
cttgcattccagctcagcgggtggaaggtataaatttcagctgctctcagccctgctgtgtttttccaaagccttccaacagcaacatgaagttggcagccttcctcctcctgtgatcctcatcatcttcagcctagaggtacaagagcttcaggctgcaggagaccggcttttgggtacctgcgtcgagctctgcacaggtgactgggactgcaaccccggagaccactgtgtcagcaatgggtgtggccatgagtgtgttgcagggtaaggacaggtaaaaacaccaggccctccctgctttctgaaacgttgttcagtctagatgaagagttatcttaaggatcatctttccctaagatcgtcatcccttcctggagttcctatcttccaagatgtgactgtctggagttccttgactaggaagatggatgaaaacagcaagcctgtggatggagactacaggggatatgggaggcagggaagaggggttgtttcttttaataaatcatcattgttaaaagc

SEQ ID NO: 4672 - protein, 65 aa, Homosapiens; identical to SEQ ID NO: 4670

SEQ ID NO: 4673 - DNA, 720 bp, Homosapiens
cttgcattccagctcagcgggtggaaggtataaatttcagctgctctcagccctgctgtgtttttccaaagccttccaacagcaacatgaagttggcagccttcctcctcctgtgatcctcatcatcttcagcctagaggtacaagagcttcaggctgcaggagaccggcttttggatactgctaatcagtcctagcactctttctctttgaacctggacaaggtgtctgacccttctcaacacagcatcagacagccacctctattgactgaagttgacaatggagaataaaactcattacccctgctgaatccaggggcccctttttacagatgagaaaagttccagaaagacccagagacataatcaggtacctgcgtcgagctctgcacaggtgactgggactgcaaccccggagaccactgtgtcagcaatgggtgtggccatgagtgtgttgcagggtaaggacaggtaaaaacaccaggccctccctgctttctgaaacgttgttcagtctagatgaagagttatcttaaggatcatctttccctaagatcgtcatcccttcctggagttcctatcttccaagatgtgactgtctggagttccttgactaggaagatggatgaaaacagcaagcctgtggatggagactacaggggatatgggaggcagggaagaggggttgtttcttttaataaatcatcattgttaaaagc

SEQ ID NO: 4674 - protein, 65 aa, Homosapiens; identical to SEQ ID NO: 4670

SEQ ID NO: 4675 - DNA, 705 bp, Homosapiens
aaatgttctactattattatacaagacaataaatcaccatgctgaggatattttctttcatatgtatatcagcattctatttcctctgtgaaattctgcatactcgatgagtagtcatttagtacacagggacattaaaatattcatgacgtggtcctgcagtagatcggcctgctcaattgctttaaggacatttttcttggatgtttcctgaacttcccctcccaaaagaaactcatccaaaataaaataagccttctcaaaattaaagatgatatctagttcacagacactgccgaaatacttgtcaagtaattccacataacgatgaattatttccagggtaattagttcattgtcctgatcctcaatagcacagcaaaaatacagactagcatatcttttgtaaacaatcttcagatctcgccactcaaggaagctgcacattttaggtttccgtgctaaaacggtctgaacaagttctcttgtgatctttttcttctctttgtccgatagtgggacataccatttttgcagtcgaagctttccctgacgactaaaaagcaacataaactgcatggcggccgcgggccgcgggcgcggcggagcttggccggtggcggcggagcttggccggcggcggcggcaaaggggaagcccctgtcgccgtgctgaggaagagaagccgtggtgctgtggggaagg

SEQ ID NO: 4676 - protein, 35 aa, Homosapiens
MSSHLVHRDIKIFMTWSCSRSACSIALRTFFLDVS

SEQ ID NO: 4677 - DNA, 474 bp, Homosapiens
aggatccaagaactaagggcaaccactgggctccgcagcccctagtccatgagtcagccacccctctgcatgctgacaaaccttggctgtcacttatcctccaccccaaaccagccccagccccatcctattgcaggcctgtgtggctgctggagaggctgggctcccttcctcaccctgaggctgcctgatatgctttctggatcctggagaaaactgacccactattctcatactggtgcaacttcttccaagacctcaaaactggaccacatgaacttgtcttccttcttgtttctccttgctagggctgtcattgggacagtccgagatggggggtcgggggagacaatggatgaatggatggatgaatggactccagggagatgtccctgtgtgtcctgaactgggcccttcctccaatgagaagccttcctgagtgagtttctacagtcatcccttggtatccatgga

SEQ ID NO: 4678 - protein, 118 aa, Homosapiens
MSQPPLCMLTNLGCHLSSTPNQPQPHPIAGLCGCWRGWAPFLTLRLPDMLSGSWRKLTHYSHTGATSSKTSKLDHMNLSSFLFLLARAVIGTVRDGGSGETMDEWMDEWTPGRCPCVS

SEQ ID NO: 4679 - DNA, 800 bp, Homosapiens
caatagaaatataactgtccaatttattttctgaatattttccatctgctgttgctgaatctacagatgcagagctcctggatatgagagccaagtgtgctttgagagtagggtgggtgaggttgctaatgagtacaggggagcaggtgttgatcaggaggaccctgcactggggcatctggacgtcctgcctcaggacttgagactccagttggatggcacaggcagactcggcacaggcagactcagcccaggtcaaagccctccccttggatgttcattttatcccaagctctttctggaccctggaatttggcatcccctaggccctcccagggtcccaggcacaggagcccaggttcacaccagcaggaggctaggactggaaattctgcagactttccaagcgtgtttattcacattcctgtgggcccccaggaccctgctgagcttcccaatattagttggtggacttggctaagtcacgtgatctctctgggcctccatttcttcatctataaaatggactaatactttcaacctcagctttgtttctcaaaggctttaacttttccgggaagagctgcaatcgtttcttggcaggagtagtttcaggtttgcattgctctgaaagagactctcagaaacacgggacctccattttggtgtcagcaccgcacgcacccccacccaagccagcaccgtggctggaaagcttacgtataggataagggatgtgggtggagtgggaattgacgtggaggatgttggagatcagatcaacagatgctacaaaaaaa

SEQ ID NO: 4680 - protein, 85 aa, Homosapiens
MFILSQALSGPWNLASPRPSQGPRHRSPGSHQQEARTGNSADFPSVFIHIPVGPQDPAELPNISWWTWLSHVISLGLHFFIYKMD

SEQ ID NO: 4681 - DNA, 1157 bp, Homosapiens
ggctccgctataaaacccaggccggcaggatcgctgcacccgcggcggcctcctcggtgcgcgacccccggctcagaggactctttgctgtcccgcaagatgcggatgctgctggcgctcctggccctctccgcggcgcggccatcggccagtgcagagtcacactggtgctacgaggttcaagccgagtcctccaactacccctgcttggtgccagtcaagtggggtggaaactgccagaaggaccgccagtcccccatcaacatcgtcaccaccaaggcaaaggtggacaaaaaactgggacgcttcttcttctctggctacgataagaagcaaacgtggactgtccaaaataacgggcactcagtgatgatgttgctggagaacaaggccagcatttctggaggaggactgcctgccccataccaggccaaacagttgcacctgcactggtccgacttgccatataagggctcggagcacagcctcgatggggagcactttgccatggagatgcacatagtacatgagaaagagaaggggacatcgaggaatgtgaaagaggcccaggaccctgaagacgaaattgcggtgctggcctttctggtggaggctggaacccaggtgaacgagggcttccagccactggtggaggcactgtctaatatccccaaacctgagatgagcactacgatggcagagagcagcctgttggacctgctccccaaggaggagaaactgaggcactacttccgctacctgggctcactcaccacaccgacctgcgatgagaaggtcgtctggactgtgttccgggagcccattcagcttcacagagaacagatcctggcattctctcagaagctgtactacgacaaggaacagacagtgagcatgaaggacaatgtcaggcccctgcagcagctggggcagcgcacggtgataaagtccggggccccgggtcggccgctgccctgggccctgcctgccctgctgggccccatgctggcctgcctgctggccggcttcctgcgatgatggctcacttctgcacgcagcctctctgttgcctcagctctccaagttccaggcttccggtccttagccttcccaggtgggactttaggcatgattaaaatatggacatatttttggag

SEQ ID NO: 4682 - protein, 312 aa, Homosapiens; identical to SEQ ID NO: 715

SEQ ID NO: 4683 - DNA, 5957 bp, Homosapiens
gttcctttcctcacagcaacagataccacactacagtgggacaatttagacactcctgttaacctaacgtatgggtcatcttactctggaagactatcagatctggagtgtgaaaaatgttcttgccaatgagtttttgaacctccttttccaggtgtgtcacatagttctggggttaagaccagctactccggaagaagaaggacaaattattagaggatggttagaacgagagagcaggtatggtctgcaagcaggacacaactggtttatcatctccatgcagtggtggcaacagtggaaagaatatgtcaaatacgatgccaaccctgtggtaattgagccatcatctgttttgaatggaggaaaatactcatttggaactgcagcccatcctatggagcaggtcgaagatagaattggaagcagcctcagttacgtgaatactacagaagagaaattttcagacaacatttctactgcatctgaagcctcagaaactgctggcagcggctttctgtattctgccacaccaggggcagatgtttgctttgctcgacaacataacacttctgacaataacaaccagtgtttgctgggagccaatgggaatattttgttgcaccttaaccctcagaaaccaggggctattgataatcagccattagtaactcaagaaccagtaaaggctacatcattaacactagaaggaggacgattaaaacgaactccacagctgattcatggaagagactatgaaatggtcccagaacctgtgtggagagcactttatcactggtatggagcaaacctggccttacctagaccagttatcaagaacagcaagacagacatcccagagctggaattatttccccgctatcttctcttcctgagacagcagcctgccactcggacacagcagtctaacatctgggtgaatatgggaaatgtaccttctccgaatgcacctttaaagcgggtattagcctatacaggctgttttagtcgaatgcagaccatcaaggaaattcacgaatatctatctcaaaggctgcgcattaaagaggaagatatgcgcctgtggctatacaacagtgagaactaccttactcttctggatgatgaggatcataaattggaatatttgaaaatccaggatgaacaacacctggtaattgaagttcgcaacaaagatatgagttggcctgaggagatgtcttttatagcaaatagtagtaaaatagatagacacaaggttcccacagaaaagggagccacaggtctaagcaatctgggaaacacatgcttcatgaactcaagcatccagtgtgttagtaacacacagccactgacacagtattttatctcagggagacatctttatgaactcaacaggacaaatcccattggtatgaaggggcatatggctaaatgctatggtgatttagtgcaggaactttggagtggaactcagaagaatgttgccccattaaagcttcggtggaccatagcaaaatatgctcccaggtttaatgggtttcagcaacaggactcccaagaacttctggcttttctcttggatggtcttcatgaagatcttaatcgagtccatgaaaagccatatgtggaactgaaggacagtgatgggcgaccagactgggaagtagctgcagaggcctgggacaaccatctaagaagaaatagatcaattgttgtggatttgttccatgggcagctaagatctcaagtaaaatgcaagacatgtgggcatataagtgtccgatttgaccctttcaattttttgtctttgccactaccaatggacagttatatgcacttagaaataacagtgattaagttagatggtactacccctgtacggtatggactaagactgaatatggatgaaaagtacacaggtttaaaaaaacagctgagtgatctctgtggacttaattcagaacaaatccttctagcagaagtacatggttccaacataaagaactttcctcaggacaaccaaaaagtacgactctcagtgagtggatttttgtgtgcatttgaaattcctgtccctgtgtctccaatttcagcttctagtccaacacagacagatttctcctcttcgccatctacaaatgaaatgttcaccctaactaccaatggggacctaccccgaccaatattcatccccaatggaatgccaaacactgttgtgccatgtggaactgagaagaacttcacaaatggaatggttaatggtcacatgccatctcttcctgacagcccctttacaggttacatcattgcagtccaccgaaaaatgatgaggacagaactgtatttcctgtcatctcagaagaatcgccccagcctctttggaatgccattgattgttccatgtactgtgcatacccggaagaaagacctatatgatgcggtttggattcaagtatcccggttagcgagcccactcccacctcaggaagctagtaatcatgcccaggattgtgacgacagtatgggctatcaatatccattcactctacgagttgtgcagaaagatgggaactcctgtgcttggtgcccatggtatagattttgcagaggctgtaaaattgattgtggggaagacagagctttcattggaaatgcctatatcgctgtggattgggatcccacagcccttcaccttcgctatcaaacatcccaggaaagggttgtagatgagcatgagagtgtggagcagagtcggcgagcgcaagccgagcccatcaacctggacagctgtctccgtgctttcaccagtgaggaagagctaggggaaaatgagatgtactactgttccaagtgtaagacccactgcttagcaacaaagaagctggatctctggaggcttccacccatcctgattattcaccttaagcgatttcaatttgtaaatggtcggtggataaaatcacagaaaattgtcaaatttcctcgggaaagttttgatccaagtgcttttttggtaccaagagacccggctctctgccagcataaaccactcacaccccagggggatgagctctctgagcccaggattctggcaagggaggtgaagaaagtggatgcgcagagttcggctggggaagaggacgtgctcctgagcaaaagcccatcctcactcagcgctaacatcatcagcagcccgaaaggttctccttcttcatcaagaaaaagtggaaccagctgtccctccagcaaaaacagcagccctaatagcagcccacggactttggggaggagcaaagggaggctccggctgccccagattggcagcaaaaataaactgtcaagtagtaaagagaacttggatgccagcaaagaaaatggggctgggcagatatgtgagctggctgacgccttgagtcgagggcatgtgctggggggcagccaaccagagttggtcactcctcaggaccatgaggtagctttggccaatggattcctttatgagcatgaagcatgtggcaatggctacagcaatggtcagcttggaaaccacagtgaagaagacagcactgatgaccaaagagaagatactcgtattaagcctatttataatctatatgcaatttcgtgccattcaggaattctgggtgggggccattacgtcacttatgccaaaaacccaaactgcaagtggtactgttacaatgacagcagctgtaaggaacttcacccggatgaaattgacaccgactctgcctacattcttttctatgagcagcaggggatagactatgcacaatttctgccaaagactgatggcaaaaagatggcagacacaagcagtatggatgaagactttgagtctgattacaaaaagtactgtgtgttacagtaaagctaccactctggctgctagacagcttggcggtgagggagatgactccttgtagctgacatttggcaaaagcgtcactgaaaggcaagctaaatgtagttattttatcctgtggccctgaagcacaaaataaaaattctaattaaaatagttaactttaagagtagtaatcattttattttgaagtctcatacaagctctccgatagagaactttcaggcagatcccaccattagcctgtaaacaaaaggtttggcaccagccacctgggaccaaataagaattcaattgtgcttgtccagatatgaacaaatatgtagtgagtatagagtttaccataatcataacaaatattaaagatttccttggagtcagagtaaaaaacaaacaattataatgttgtctagggacgacatgatatgctacctcctttttcctgaagttttattccattatattgacaagatggagaaagcaagatcacgaaggtgtgcaaatgattcttaaggcatggacgaggatttttcaatttattttttaaactgtttccataccctttctttgtctttcttgctttttgtttttgccgttgtatttatgtttgagacacaaccagtcattggtggcaggggcatatagtggtcagtctgaaagggaggctctcttaagagctgtgtgccttccacccagagccttgtgggagacccagtagaaagaaacagcatcctgggaaatccagctaccatggccctcccagtggaggcatcttacatttaggatacttcaagtatcctcagaaatgtattctgcacccccggccccacccatgctgagggaaggggagcagttgccaatatttgcaccatcttcacatgcacctgttgcaacaagagcttctgggaaggtaagtggcattggagctagatcacgtttcacaattagtggttgttcttttctgtgtttgtcttgcactttaaaaaagagagaacacatgcaaatgaacttgcttgtgtgtatttgatggctctaagggctataaattacaaacaaaacacatcccagacattaggagttcataagtgtatttaatgaaattggtggttttaggaagtcaactttagttttgctttgtttgcatgtccactaatttttttattttgatatttgtcttttttttaaattttacagtagtcatcgaaagttatgtttctttgcttacttcatttttttctctaatcaagactggaacaaaagtataaatattatttatttcaggtagcatttttttcgtgtagttttttaatatatacttgaaggaaatgtttcaccttatttttggtctttgtttattcatttagaccctgcaagttgattctcattaattgtcagattccactaccctttcttcctcatagatagtaattaccaatgtaactaagtatttgtgttctgatatctgaggccagtaactattaatatctagttctcagagcatttggaaaggttatcttaaatggctacctaaattgaaatccttttcagaaaaaatataattgcaagtaggtaggactggcctaaattgtctaatgtaataaagtcagacaaaatgcatactttatagtttcaagattttcagtatataaaatctgtccattcccattaaaaagtggaagattttaaataatttctttacagatgttttatttaagcaggtagctcaatctactaatgttgtttgatctgtgtttgttatactggttgtaattaatttttttaattcatgaactagcagaaaatttattaaattaactattaactacattcaccttgtaaattactgtataaaacttgttgacaatgcactgactttagaaagatgttaatgtacataaatagagtgtaaataaaatagtgttgatgtaccgaaatatgaactgtataaaaagtattggtaattgtatatggggtgtacctgtttatctgtaactagtatacaaacaaattaaatactgtggatgcctccatgtgccgtttttcctcatacaagtaaacacagaaagac

SEQ ID NO: 4684 - protein, 1274 aa, Homosapiens
MGHLTLEDYQIWSVKNVLANEFLNLLFQVCHIVLGLRPATPEEEGQIIRGWLERESRYGLQAGHNWFIISMQWWQQWKEYVKYDANPVVIEPSSVLNGGKYSFGTAAHPMEQVEDRIGSSLSYVNTTEEKFSDNISTASEASETAGSGFLYSATPGADVCFARQHNTSDNNNQCLLGANGNILLHLNPQKPGAIDNQPLVTQEPVKATSLTLEGGRLKRTPQLIHGRDYEMVPEPVWRALYHWYGANLALPRPVIKNSKTDIPELELFPRYLLFLRQQPATRTQQSNIWVNMGNVPSPNAPLKRVLAYTGCFSRMQTIKEIHEYLSQRLRIKEEDMRLWLYNSENYLTLLDDEDHKLEYLKIQDEQHLVIEVRNKDMSWPEEMSFIANSSKIDRHKVPTEKGATGLSNLGNTCFMNSSIQCVSNTQPLTQYFISGRHLYELNRTNPIGMKGHMAKCYGDLVQELWSGTQKNVAPLKLRWTIAKYAPRFNGFQQQDSQELLAFLLDGLHEDLNRVHEKPYVELKDSDGRPDWEVAAEAWDNHLRRNRSIVVDLFHGQLRSQVKCKTCGHISVRFDPFNFLSLPLPMDSYMHLEITVIKLDGTTPVRYGLRLNMDEKYTGLKKQLSDLCGLNSEQILLAEVHGSNIKNFPQDNQKVRLSVSGFLCAFEIPVPVSPISASSPTQTDFSSSPSTNEMFTLTTNGDLPRPIFIPNGMPNTVVPCGTEKNFTNGMVNGHMPSLPDSPFTGYIIAVHRKMMRTELYFLSSQKNRPSLFGMPLIVPCTVHTRKKDLYDAVWIQVSRLASPLPPQEASNHAQDCDDSMGYQYPFTLRVVQKDGNSCAWCPWYRFCRGCKIDCGEDRAFIGNAYIAVDWDPTALHLRYQTSQERVVDEHESVEQSRRAQAEPINLDSCLRAFTSEEELGENEMYYCSKCKTHCLATKKLDLWRLPPILIIHLKRFQFVNGRWIKSQKIVKFPRESFDPSAFLVPRDPALCQHKPLTPQGDELSEPRILAREVKKVDAQSSAGEEDVLLSKSPSSLSANIISSPKGSPSSSRKSGTSCPSSKNSSPNSSPRTLGRSKGRLRLPQIGSKNKLSSSKENLDASKENGAGQICELADALSRGHVLGGSQPELVTPQDHEVALANGFLYEHEACGNGYSNGQLGNHSEEDSTDDQREDTRIKPIYNLYAISCHSGILGGGHYVTYAKNPNCKWYCYNDSSCKELHPDEIDTDSAYILFYEQQGIDYAQFLPKTDGKKMADTSSMDEDFESDYKKYCVLQ

SEQ ID NO: 4685 - DNA, 7163 bp, Homosapiens
aagagggcgtgaggagggaaggagagggaggagagagaggagagagaagggcggagtaggaggcaggggaagggggcggggcggaagagtcacgtgatccggcatggaggcggtggcggcgaccgggaggagccgccggggcagaagccgcacttgttagtgtggggggaggtgggggcgggggacgccgacaccgtcaccgtcacccagggacgccgaggagaaggcgggaggggggtgggggcgagatcaggctccgaccccccgccgaggggatgaggggagcatgggtgccaaggagtcacggatcggattcctcagctacgaggaggcgctgaggagagttacagatgtagagctaaaacgactgaaggatgctttcaagaggacctgtggactctcatattacatgggccagcactgcttcatccgggaagtgcttggggatggagtgcctccaaaggttgctgaggtgatttactgttcttttggtggaacatccaaagggctgcacttcaataatttaatagttggacttgtcctccttacaagaggcaaagatgaagagaaagcaaaatacatttttagtcttttttcaagtgaatctgggaactatgttatacgggaagaaatggaaagaatgctccacgtggtggatggtaaagtcccagatacactcaggaagtgtttctcagagggtgaaaaggtaaactatgaaaagtttagaaattggctttttctaaacaaagatgcttttactttctctcgatggcttctatctggaggtgtgtatgttaccctcactgatgatagtgatactcctactttctaccaaactctggctggagtcacacatttggaggaatcagacatcattgatcttgagaaacgctattggttattgaaggctcaatcccggactggacgatttgatttagagacatttggcccattggtttcaccacctattcgtccatctctaagtgaaggtttgtttaatgcttttgatgaaaatcgtgacaatcacatagattttaaggagatatcctgtgggttatcagcctgttgcaggggacccctggctgaaagacaaaaattttgcttcaaggtatttgatgttgaccgtgatggagttctctccagggttgaactgagagacatggtggttgcacttttagaagtctggaaggacaaccgcactgatgatattcctgaattacatatggatctctctgatattgtagaaggcatactgaatgcacatgacaccacaaagatgggtcatcttactctggaagactatcagatctggagtgtgaaaaatgttcttgccaatgagtttttgaacctccttttccaggtgtgtcacatagttctggggttaagaccagctactccggaagaagaaggacaaattattagaggatggttagaacgagagagcaggtatggtctgcaagcaggacacaactggtttatcatctccatgcagtggtggcaacagtggaaagaatatgtcaaatacgatgccaaccctgtggtaattgagccatcatctgttttgaatggaggaaaatactcatttggaactgcagcccatcctatggagcaggtcgaagatagaattggaagcagcctcagttacgtgaatactacagaagagaaattttcagacaacatttctactgcatctgaagcctcagaaactgctggcagcggctttctgtattctgccacaccaggggcagatgtttgctttgctcgacaacataacacttctgacaataacaaccagtgtttgctgggagccaatgggaatattttgttgcaccttaaccctcagaaaccaggggctattgataatcagccattagtaactcaagaaccagtaaaggctacatcattaacactagaaggaggacgattaaaacgaactccacagctgattcatggaagagactatgaaatggtcccagaacctgtgtggagagcactttatcactggtatggagcaaacctggccttacctagaccagttatcaagaacagcaagacagacatcccagagctggaattatttccccgctatcttctcttcctgagacagcagcctgccactcggacacagcagtctaacatctgggtgaatatgggaaatgtaccttctccgaatgcacctttaaagcgggtattagcctatacaggctgttttagtcgaatgcagaccatcaaggaaattcacgaatatctatctcaaaggctgcgcattaaagaggaagatatgcgcctgtggctatacaacagtgagaactaccttactcttctggatgatgaggatcataaattggaatatttgaaaatccaggatgaacaacacctggtaattgaagttcgcaacaaagatatgagttggcctgaggagatgtcttttatagcaaatagtagtaaaatagatagacacaaggttcccacagaaaagggagccacaggtctaagcaatctgggaaacacatgcttcatgaactcaagcatccagtgtgttagtaacacacagccactgacacagtattttatctcagggagacatctttatgaactcaacaggacaaatcccattggtatgaaggggcatatggctaaatgctatggtgatttagtgcaggaactttggagtggaactcagaagaatgttgccccattaaagcttcggtggaccatagcaaaatatgctcccaggtttaatgggtttcagcaacaggactcccaagaacttctggcttttctcttggatggtcttcatgaagatcttaatcgagtccatgaaaagccatatgtggaactgaaggacagtgatgggcgaccagactgggaagtagctgcagaggcctgggacaaccatctaagaagaaatagatcaattgttgtggatttgttccatgggcagctaagatctcaagtaaaatgcaagacatgtgggcatataagtgtccgatttgaccctttcaattttttgtctttgccactaccaatggacagttatatgcacttagaaataacagtgattaagttagatggtactacccctgtacggtatggactaagactgaatatggatgaaaagtacacaggtttaaaaaaacagctgagtgatctctgtggacttaattcagaacaaatccttctagcagaagtacatggttccaacataaagaactttcctcaggacaaccaaaaagtacgactctcagtgagtggatttttgtgtgcatttgaaattcctgtccctgtgtctccaatttcagcttctagtccaacacagacagatttctcctcttcgccatctacaaatgaaatgttcaccctaactaccaatggggacctaccccgaccaatattcatccccaatggaatgccaaacactgttgtgccatgtggaactgagaagaacttcacaaatggaatggttaatggtcacatgccatctcttcctgacagcccctttacaggttacatcattgcagtccaccgaaaaatgatgaggacagaactgtatttcctgtcatctcagaagaatcgccccagcctctttggaatgccattgattgttccatgtactgtgcatacccggaagaaagacctatatgatgcggtttggattcaagtatcccggttagcgagcccactcccacctcaggaagctagtaatcatgcccaggattgtgacgacagtatgggctatcaatatccattcactctacgagttgtgcagaaagatgggaactcctgtgcttggtgcccatggtatagattttgcagaggctgtaaaattgattgtggggaagacagagctttcattggaaatgcctatatcgctgtggattgggatcccacagcccttcaccttcgctatcaaacatcccaggaaagggttgtagatgagcatgagagtgtggagcagagtcggcgagcgcaagccgagcccatcaacctggacagctgtctccgtgctttcaccagtgaggaagagctaggggaaaatgagatgtactactgttccaagtgtaagacccactgcttagcaacaaagaagctggatctctggaggcttccacccatcctgattattcaccttaagcgatttcaatttgtaaatggtcggtggataaaatcacagaaaattgtcaaatttcctcgggaaagttttgatccaagtgcttttttggtaccaagagacccggctctctgccagcataaaccactcacaccccagggggatgagctctctgagcccaggattctggcaagggaggtgaagaaagtggatgcgcagagttcggctggggaagaggacgtgctcctgagcaaaagcccatcctcactcagcgctaacatcatcagcagcccgaaaggttctccttcttcatcaagaaaaagtggaaccagctgtccctccagcaaaaacagcagccctaatagcagcccacggactttggggaggagcaaagggaggctccggctgccccagattggcagcaaaaataaactgtcaagtagtaaagagaacttggatgccagcaaagaaaatggggctgggcagatatgtgagctggctgacgccttgagtcgagggcatgtgctggggggcagccaaccagagttggtcactcctcaggaccatgaggtagctttggccaatggattcctttatgagcatgaagcatgtggcaatggctacagcaatggtcagcttggaaaccacagtgaagaagacagcactgatgaccaaagagaagatactcgtattaagcctatttataatctatatgcaatttcgtgccattcaggaattctgggtgggggccattacgtcacttatgccaaaaacccaaactgcaagtggtactgttacaatgacagcagctgtaaggaacttcacccggatgaaattgacaccgactctgcctacattcttttctatgagcagcaggggatagactatgcacaatttctgccaaagactgatggcaaaaagatggcagacacaagcagtatggatgaagactttgagtctgattacaaaaagtactgtgtgttacagtaaagctaccactctggctgctagacagcttggcggtgagggagatgactccttgtagctgacatttggcaaaagcgtcactgaaaggcaagctaaatgtagttattttatcctgtggccctgaagcacaaaataaaaattctaattaaaatagttaactttaagagtagtaatcattttattttgaagtctcatacaagctctccgatagagaactttcaggcagatcccaccattagcctgtaaacaaaaggtttggcaccagccacctgggaccaaataagaattcaattgtgcttgtccagatatgaacaaatatgtagtgagtatagagtttaccataatcataacaaatattaaagatttccttggagtcagagtaaaaaacaaacaattataatgttgtctagggacgacatgatatgctacctcctttttcctgaagttttattccattatattgacaagatggagaaagcaagatcacgaaggtgtgcaaatgattcttaaggcatggacgaggatttttcaatttattttttaaactgtttccataccctttctttgtctttcttgctttttgtttttgccgttgtatttatgtttgagacacaaccagtcattggtggcaggggcatatagtggtcagtctgaaagggaggctctcttaagagctgtgtgccttccacccagagccttgtgggagacccagtagaaagaaacagcatcctgggaaatccagctaccatggccctcccagtggaggcatcttacatttaggatacttcaagtatcctcagaaatgtattctgcacccccggccccacccatgctgagggaaggggagcagttgccaatatttgcaccatcttcacatgcacctgttgcaacaagagcttctgggaaggtaagtggcattggagctagatcacgtttcacaattagtggttgttcttttctgtgtttgtcttgcactttaaaaaagagagaacacatgcaaatgaacttgcttgtgtgtatttgatggctctaagggctataaattacaaacaaaacacatcccagacattaggagttcataagtgtatttaatgaaattggtggttttaggaagtcaactttagttttgctttgtttgcatgtccactaatttttttattttgatatttgtcttttttttaaattttacagtagtcatcgaaagttatgtttctttgcttacttcatttttttctctaatcaagactggaacaaaagtataaatattatttatttcaggtagcatttttttcgtgtagttttttaatatatacttgaaggaaatgtttcaccttatttttggtctttgtttattcatttagaccctgcaagttgattctcattaattgtcagattccactaccctttcttcctcatagatagtaattaccaatgtaactaagtatttgtgttctgatatctgaggccagtaactattaatatctagttctcagagcatttggaaaggttatcttaaatggctacctaaattgaaatccttttcagaaaaaatataattgcaagtaggtaggactggcctaaattgtctaatgtaataaagtcagacaaaatgcatactttatagtttcaagattttcagtatataaaatctgtccattcccattaaaaagtggaagattttaaataatttctttacagatgttttatttaagcaggtagctcaatctactaatgttgtttgatctgtgtttgttatactggttgtaattaatttttttaattcatgaactagcagaaaatttattaaattaactattaactacattcaccttgtaaattactgtataaaacttgttgacaatgcactgactttagaaagatgttaatgtacataaatagagtgtaaataaaatagtgttgatgtaccgaaatatgaactgtataaaaagtattggtaattgtatatggggtgtacctgtttatctgtaactagtatacaaacaaattaaatactgtggatgcctccatgtgccgtttttcctcatacaagtaaacacagaaagac

SEQ ID NO: 4686 - protein, 1604 aa, Homosapiens; identical to SEQ ID NO: 717

SEQ ID NO: 4687 - DNA, 5918 bp, Homosapiens
gttcctttcctcacagcaacagataccacactacagtgggacaatttagacactcctgttaacctaacgtatgggtcatcttactctggaagactatcagatctggagtgtgaaaaatgttcttgccaatgagtttttgaacctccttttccaggtgtgtcacatagttctggggttaagaccagctactccggaagaagaaggacaaattattagaggatggttagaacgagagagcaggtatggtctgcaagcaggacacaactggtttatcatctccatgcagtggtggcaacagtggaaagaatatgtcaaatacgatgccaaccctgtggtaattgagccatcatctgttttgaatggaggaaaatactcatttggaactgcagcccatcctatggagcaggtcgaagatagaattggaagcagcctcagttacgtgaatactacagaagagaaattttcagacaacatttctactgcatctgaagcctcagaaactgctggcagcggctttctgtattctgccacaccaggggcagatgtttgctttgctcgacaacataacacttctgacaataacaaccagtgtttgctgggagccaatgggaatattttgttgcaccttaaccctcagaaaccaggggctattgataatcagccattagtaactcaagaaccagtaaaggctacatcattaacactagaaggaggacgattaaaacgaactccacagctgattcatggaagagactatgaaatggtcccagaacctgtgtggagagcactttatcactggtatggagcaaacctggccttacctagaccagttatcaagaacagcaagacagacatcccagagctggaattatttccccgctatcttctcttcctgagacagcagcctgccactcggacacagcagtctaacatctgggtgaatatgggaaatgtaccttctccgaatgcacctttaaagcgggtattagcctatacaggctgttttagtcgaatgcagaccatcaaggaaattcacgaatatctatctcaaaggctgcgcattaaagaggaagatatgcgcctgtggctatacaacagtgagaactaccttactcttctggatgatgaggatcataaattggaatatttgaaaatccaggatgaacaacacctggtaattgaagttcgcaacaaagatatgagttggcctgaggagatgtcttttatagcaaatagtagtaaaatagatagacacaaggttcccacagaaaagggagccacaggtctaagcaatctgggaaacacatgcttcatgaactcaagcatccagtgtgttagtaacacacagccactgacacagtattttatctcagggagacatctttatgaactcaacaggacaaatcccattggtatgaaggggcatatggctaaatgctatggtgatttagtgcaggaactttggagtggaactcagaagaatgttgccccattaaagcttcggtggaccatagcaaaatatgctcccaggtttaatgggtttcagcaacaggactcccaagaacttctggcttttctcttggatggtcttcatgaagatcttaatcgagtccatgaaaagccatatgtggaactgaaggacagtgatgggcgaccagactgggaagtagctgcagaggcctgggacaaccatctaagaagaaatagatcaattgttgtggatttgttccatgggcagctaagatctcaagtaaaatgcaagacatgtgggcatataagtgtccgatttgaccctttcaattttttgtctttgccactaccaatggacagttatatgcacttagaaataacagtgattaagttagatggtactacccctgtacggtatggactaagactgaatatggatgaaaagtacacaggtttaaaaaaacagctgagtgatctctgtggacttaattcagaacaaatccttctagcagaagtacatggttccaacataaagaactttcctcaggacaaccaaaaagtacgactctcagtgagtggatttttgtgtgcatttgaaattcctgtccctgtgtctccaatttcagcttctagtccaacacagacagatttctcctcttcgccatctacaaatgaaatgttcaccctaactaccaatggggacctaccccgaccaatattcatccccaatggaatgccaaacactgttgtgccatgtggaactgagaagaacttcacaaatggaatggttaatggtcacatgccatctcttcctgacagcccctttacaggttacatcattgcagtccaccgaaaaatgatgaggacagaactgtatttcctgtcatctcagaagaatcgccccagcctctttggaatgccattgattgttccatgtactgtgcatacccggaagaaagacctatatgatgcggtttggattcaagtatcccggttagcgagcccactcccacctcaggaagctagtaatcatgcccaggattgtgacgacagtatgggctatcaatatccattcactctacgagttgtgcagaaagatgggaactcctgtgcttggtgcccatggtatagattttgcagaggctgtaaaattgattgtggggaagacagagctttcattggaaatgcctatatcgctgtggattgggatcccacagcccttcaccttcgctatcaaacatcccaggaaagggttgtagatgagcatgagagtgtggagcagagtcggcgagcgcaagccgagcccatcaacctggacagctgtctccgtgctttcaccagtgaggaagagctaggggaaaatgagatgtactactgttccaagtgtaagacccactgcttagcaacaaagaagctggatctctggaggcttccacccatcctgattattcaccttaagcgatttcaatttgtaaatggtcggtggataaaatcacagaaaattgtcaaatttcctcgggaaagttttgatccaagtgcttttttggtaccaagagacccggctctctgccagcataaaccactcacaccccagggggatgagctctctgagcccaggattctggcaagggaggtgaagaaagtggatgcgcagagttcggctggggaagaggacgtgctcctgagcaaaagcccatcctcactcagcgctaacatcatcagcagcccgaaaggttctccttcttcatcaagaaaaagtggaaccagctgtccctccagcaaaaacagcagccctaatagcagcccacggactttggggaggagcaaagggaggctccggctgccccagattggcagcaaaaataaactgtcaagtagtaaagagaacttggatgccagcaaagaaaatggggctgggcagatatgtgagctggctgacgccttgagtcgagggcatgtgctggggggcagccaaccagagttggtcactcctcaggaccatgaggtagctttggccaatggattcctttatgagcatgaagcatgtggcaatggctacagcaatggtcagcttggaaaccacagtgaagaagacagcactgatgaccaaagagaagatactcgtattaagcctatttataatctatatgcaatttcgtgccattcaggaattctgggtgggggccattacgtcacttatgccaaaaacccaaactgcaagtggtactgttacaatgacagcagctgtaaggaacttcacccggatgaaattgacaccgactctgcctacattcttttctatgagcagcaggggatagactatgcacaatttctgccaaagactgatggcaaaaagatggcagacacaagcagtatggatgaagactttgagtctgattacaaaaagtactgtgtgttacagtaaagctaccactctggctgctagacagcttggcggtgagggagatgactccttgtagctgacatttggcaaaagcgtcactgaaaggcaagctaaatgtagttattttatcctgtggccctgaagcacaaaataaaaattctaattaaaatagttaactttaagagtagtaatcattttattttgaagtctcatacaagctctccgatagagaactttcaggcagatcccaccattagcctgtaaacaaaaggtttggcaccagccacctgggaccaaataagaattcaattgtgcttgtccagatatgaacaaatatgtagtgagtatagagtttaccataatcataacaaatattaaagatttccttggagtcagagtaaaaaacaaacaattataatgttgtctagggacgacatgatatgctacctcctttttcctgaagttttattccattatattgacaagatggagaaagcaagatcacgaaggtgtgcaaatgattcttaaggcatggacgaggatttttcaatttattttttaaactgtttccataccctttctttgtctttcttgctttttgtttttgccgttgtatttatgtttgagacacaaccagtcattggtggcaggggcatatagtggtcagtctgaaagggaggctctcttaagagctgtgtgccttccacccagagccttgtgggagacccagtagaaagaaacagcatcctgggaaatccagctaccatggccctcccagtggaggcatcttacatttaggatacttcaagtatcctcagaaatgtattctgcacccccggccccacccatgctgagggaaggggagcagttgccaatatttgcaccatcttcacatgcacctgttgcaacaagagcttctgggaaggtaagtggcattggagctagatcacgtttcacaattagtggttgttcttttctgtgtttgtcttgcactttaaaaaagagagaacacatgcaaatgaacttgcttgtgtgtatttgatggctctaagggctataaattacaaacaaaacacatcccagacattaggagttcataagtgtatttaatgaaattggtggttttaggaagtcaactttagttttgctttgtttgcatgtccactaatttttttattttgatatttgtcttttttttaaattttacagtagtcatcgaaagttatgtttctttgcttacttcatttttttctctaatcaagactggaacaaaagtataaatattatttatttcaggtagcatttttttcgtgtagttttttaatatatacttgaaggaaatgtttcaccttatttttggtctttgtttattcatttagaccctgcaagttgattctcattaattgtcagattccactaccctttcttcctcatagatagtaattaccaatgtaactaagtatttgtgttctgatatctgaggccagtaactattaatatctagttctcagagcatttggaaaggttatcttaaatggctacctaaattgaaatccttttcagaaaaaatataattgcaagtaggtaggactggcctaaattgtctaatgtaataaagtcagacaaaatgcatactttatagtttcaagattttcagtatataaaatctgtccattcccattaaaaagtggaagattttaaataatttctttacagatgttttatttaagcaggtagctcaatctactaatgttgtttgatctgtgtttgttatactggttgtaattaatttttttaattcatgaactagcagaaaatttattaaattaactattaactacattcaccttgtaaattactgtataaaacttgttgacaatgcactgactttagaaagatgttaatgtacataaatagagtgtaaataaaatagtgttgatgtaccgaaatatgaactgtataaaaagtattggtaattgtatatggggtgtacctgtttatctgtaactagtatacaaacaaattaaatactgtggatgcctcc

SEQ ID NO: 4688 - protein, 1274 aa, Homosapiens; identical to SEQ ID NO: 4684

SEQ ID NO: 4689 - DNA, 7124 bp, Homosapiens
aagagggcgtgaggagggaaggagagggaggagagagaggagagagaagggcggagtaggaggcaggggaagggggcggggcggaagagtcacgtgatccggcatggaggcggtggcggcgaccgggaggagccgccggggcagaagccgcacttgttagtgtggggggaggtgggggcgggggacgccgacaccgtcaccgtcacccagggacgccgaggagaaggcgggaggggggtgggggcgagatcaggctccgaccccccgccgaggggatgaggggagcatgggtgccaaggagtcacggatcggattcctcagctacgaggaggcgctgaggagagttacagatgtagagctaaaacgactgaaggatgctttcaagaggacctgtggactctcatattacatgggccagcactgcttcatccgggaagtgcttggggatggagtgcctccaaaggttgctgaggtgatttactgttcttttggtggaacatccaaagggctgcacttcaataatttaatagttggacttgtcctccttacaagaggcaaagatgaagagaaagcaaaatacatttttagtcttttttcaagtgaatctgggaactatgttatacgggaagaaatggaaagaatgctccacgtggtggatggtaaagtcccagatacactcaggaagtgtttctcagagggtgaaaaggtaaactatgaaaagtttagaaattggctttttctaaacaaagatgcttttactttctctcgatggcttctatctggaggtgtgtatgttaccctcactgatgatagtgatactcctactttctaccaaactctggctggagtcacacatttggaggaatcagacatcattgatcttgagaaacgctattggttattgaaggctcaatcccggactggacgatttgatttagagacatttggcccattggtttcaccacctattcgtccatctctaagtgaaggtttgtttaatgcttttgatgaaaatcgtgacaatcacatagattttaaggagatatcctgtgggttatcagcctgttgcaggggacccctggctgaaagacaaaaattttgcttcaaggtatttgatgttgaccgtgatggagttctctccagggttgaactgagagacatggtggttgcacttttagaagtctggaaggacaaccgcactgatgatattcctgaattacatatggatctctctgatattgtagaaggcatactgaatgcacatgacaccacaaagatgggtcatcttactctggaagactatcagatctggagtgtgaaaaatgttcttgccaatgagtttttgaacctccttttccaggtgtgtcacatagttctggggttaagaccagctactccggaagaagaaggacaaattattagaggatggttagaacgagagagcaggtatggtctgcaagcaggacacaactggtttatcatctccatgcagtggtggcaacagtggaaagaatatgtcaaatacgatgccaaccctgtggtaattgagccatcatctgttttgaatggaggaaaatactcatttggaactgcagcccatcctatggagcaggtcgaagatagaattggaagcagcctcagttacgtgaatactacagaagagaaattttcagacaacatttctactgcatctgaagcctcagaaactgctggcagcggctttctgtattctgccacaccaggggcagatgtttgctttgctcgacaacataacacttctgacaataacaaccagtgtttgctgggagccaatgggaatattttgttgcaccttaaccctcagaaaccaggggctattgataatcagccattagtaactcaagaaccagtaaaggctacatcattaacactagaaggaggacgattaaaacgaactccacagctgattcatggaagagactatgaaatggtcccagaacctgtgtggagagcactttatcactggtatggagcaaacctggccttacctagaccagttatcaagaacagcaagacagacatcccagagctggaattatttccccgctatcttctcttcctgagacagcagcctgccactcggacacagcagtctaacatctgggtgaatatgggaaatgtaccttctccgaatgcacctttaaagcgggtattagcctatacaggctgttttagtcgaatgcagaccatcaaggaaattcacgaatatctatctcaaaggctgcgcattaaagaggaagatatgcgcctgtggctatacaacagtgagaactaccttactcttctggatgatgaggatcataaattggaatatttgaaaatccaggatgaacaacacctggtaattgaagttcgcaacaaagatatgagttggcctgaggagatgtcttttatagcaaatagtagtaaaatagatagacacaaggttcccacagaaaagggagccacaggtctaagcaatctgggaaacacatgcttcatgaactcaagcatccagtgtgttagtaacacacagccactgacacagtattttatctcagggagacatctttatgaactcaacaggacaaatcccattggtatgaaggggcatatggctaaatgctatggtgatttagtgcaggaactttggagtggaactcagaagaatgttgccccattaaagcttcggtggaccatagcaaaatatgctcccaggtttaatgggtttcagcaacaggactcccaagaacttctggcttttctcttggatggtcttcatgaagatcttaatcgagtccatgaaaagccatatgtggaactgaaggacagtgatgggcgaccagactgggaagtagctgcagaggcctgggacaaccatctaagaagaaatagatcaattgttgtggatttgttccatgggcagctaagatctcaagtaaaatgcaagacatgtgggcatataagtgtccgatttgaccctttcaattttttgtctttgccactaccaatggacagttatatgcacttagaaataacagtgattaagttagatggtactacccctgtacggtatggactaagactgaatatggatgaaaagtacacaggtttaaaaaaacagctgagtgatctctgtggacttaattcagaacaaatccttctagcagaagtacatggttccaacataaagaactttcctcaggacaaccaaaaagtacgactctcagtgagtggatttttgtgtgcatttgaaattcctgtccctgtgtctccaatttcagcttctagtccaacacagacagatttctcctcttcgccatctacaaatgaaatgttcaccctaactaccaatggggacctaccccgaccaatattcatccccaatggaatgccaaacactgttgtgccatgtggaactgagaagaacttcacaaatggaatggttaatggtcacatgccatctcttcctgacagcccctttacaggttacatcattgcagtccaccgaaaaatgatgaggacagaactgtatttcctgtcatctcagaagaatcgccccagcctctttggaatgccattgattgttccatgtactgtgcatacccggaagaaagacctatatgatgcggtttggattcaagtatcccggttagcgagcccactcccacctcaggaagctagtaatcatgcccaggattgtgacgacagtatgggctatcaatatccattcactctacgagttgtgcagaaagatgggaactcctgtgcttggtgcccatggtatagattttgcagaggctgtaaaattgattgtggggaagacagagctttcattggaaatgcctatatcgctgtggattgggatcccacagcccttcaccttcgctatcaaacatcccaggaaagggttgtagatgagcatgagagtgtggagcagagtcggcgagcgcaagccgagcccatcaacctggacagctgtctccgtgctttcaccagtgaggaagagctaggggaaaatgagatgtactactgttccaagtgtaagacccactgcttagcaacaaagaagctggatctctggaggcttccacccatcctgattattcaccttaagcgatttcaatttgtaaatggtcggtggataaaatcacagaaaattgtcaaatttcctcgggaaagttttgatccaagtgcttttttggtaccaagagacccggctctctgccagcataaaccactcacaccccagggggatgagctctctgagcccaggattctggcaagggaggtgaagaaagtggatgcgcagagttcggctggggaagaggacgtgctcctgagcaaaagcccatcctcactcagcgctaacatcatcagcagcccgaaaggttctccttcttcatcaagaaaaagtggaaccagctgtccctccagcaaaaacagcagccctaatagcagcccacggactttggggaggagcaaagggaggctccggctgccccagattggcagcaaaaataaactgtcaagtagtaaagagaacttggatgccagcaaagaaaatggggctgggcagatatgtgagctggctgacgccttgagtcgagggcatgtgctggggggcagccaaccagagttggtcactcctcaggaccatgaggtagctttggccaatggattcctttatgagcatgaagcatgtggcaatggctacagcaatggtcagcttggaaaccacagtgaagaagacagcactgatgaccaaagagaagatactcgtattaagcctatttataatctatatgcaatttcgtgccattcaggaattctgggtgggggccattacgtcacttatgccaaaaacccaaactgcaagtggtactgttacaatgacagcagctgtaaggaacttcacccggatgaaattgacaccgactctgcctacattcttttctatgagcagcaggggatagactatgcacaatttctgccaaagactgatggcaaaaagatggcagacacaagcagtatggatgaagactttgagtctgattacaaaaagtactgtgtgttacagtaaagctaccactctggctgctagacagcttggcggtgagggagatgactccttgtagctgacatttggcaaaagcgtcactgaaaggcaagctaaatgtagttattttatcctgtggccctgaagcacaaaataaaaattctaattaaaatagttaactttaagagtagtaatcattttattttgaagtctcatacaagctctccgatagagaactttcaggcagatcccaccattagcctgtaaacaaaaggtttggcaccagccacctgggaccaaataagaattcaattgtgcttgtccagatatgaacaaatatgtagtgagtatagagtttaccataatcataacaaatattaaagatttccttggagtcagagtaaaaaacaaacaattataatgttgtctagggacgacatgatatgctacctcctttttcctgaagttttattccattatattgacaagatggagaaagcaagatcacgaaggtgtgcaaatgattcttaaggcatggacgaggatttttcaatttattttttaaactgtttccataccctttctttgtctttcttgctttttgtttttgccgttgtatttatgtttgagacacaaccagtcattggtggcaggggcatatagtggtcagtctgaaagggaggctctcttaagagctgtgtgccttccacccagagccttgtgggagacccagtagaaagaaacagcatcctgggaaatccagctaccatggccctcccagtggaggcatcttacatttaggatacttcaagtatcctcagaaatgtattctgcacccccggccccacccatgctgagggaaggggagcagttgccaatatttgcaccatcttcacatgcacctgttgcaacaagagcttctgggaaggtaagtggcattggagctagatcacgtttcacaattagtggttgttcttttctgtgtttgtcttgcactttaaaaaagagagaacacatgcaaatgaacttgcttgtgtgtatttgatggctctaagggctataaattacaaacaaaacacatcccagacattaggagttcataagtgtatttaatgaaattggtggttttaggaagtcaactttagttttgctttgtttgcatgtccactaatttttttattttgatatttgtcttttttttaaattttacagtagtcatcgaaagttatgtttctttgcttacttcatttttttctctaatcaagactggaacaaaagtataaatattatttatttcaggtagcatttttttcgtgtagttttttaatatatacttgaaggaaatgtttcaccttatttttggtctttgtttattcatttagaccctgcaagttgattctcattaattgtcagattccactaccctttcttcctcatagatagtaattaccaatgtaactaagtatttgtgttctgatatctgaggccagtaactattaatatctagttctcagagcatttggaaaggttatcttaaatggctacctaaattgaaatccttttcagaaaaaatataattgcaagtaggtaggactggcctaaattgtctaatgtaataaagtcagacaaaatgcatactttatagtttcaagattttcagtatataaaatctgtccattcccattaaaaagtggaagattttaaataatttctttacagatgttttatttaagcaggtagctcaatctactaatgttgtttgatctgtgtttgttatactggttgtaattaatttttttaattcatgaactagcagaaaatttattaaattaactattaactacattcaccttgtaaattactgtataaaacttgttgacaatgcactgactttagaaagatgttaatgtacataaatagagtgtaaataaaatagtgttgatgtaccgaaatatgaactgtataaaaagtattggtaattgtatatggggtgtacctgtttatctgtaactagtatacaaacaaattaaatactgtggatgcctcc

SEQ ID NO: 4690 - protein, 1604 aa, Homosapiens; identical to SEQ ID NO: 717

SEQ ID NO: 4691 - DNA, 4054 bp, Homosapiens
gttcctttcctcacagcaacagataccacactacagtgggacaatttagacactcctgttaacctaacgtatgggtcatcttactctggaagactatcagatctggagtgtgaaaaatgttcttgccaatgagtttttgaacctccttttccaggtgtgtcacatagttctggggttaagaccagctactccggaagaagaaggacaaattattagaggatggttagaacgagagagcaggtatggtctgcaagcaggacacaactggtttatcatctccatgcagtggtggcaacagtggaaagaatatgtcaaatacgatgccaaccctgtggtaattgagccatcatctgttttgaatggaggaaaatactcatttggaactgcagcccatcctatggagcaggtcgaagatagaattggaagcagcctcagttacgtgaatactacagaagagaaattttcagacaacatttctactgcatctgaagcctcagaaactgctggcagcggctttctgtattctgccacaccaggggcagatgtttgctttgctcgacaacataacacttctgacaataacaaccagtgtttgctgggagccaatgggaatattttgttgcaccttaaccctcagaaaccaggggctattgataatcagccattagtaactcaagaaccagtaaaggctacatcattaacactagaaggaggacgattaaaacgaactccacagctgattcatggaagagactatgaaatggtcccagaacctgtgtggagagcactttatcactggtatggagcaaacctggccttacctagaccagttatcaagaacagcaagacagacatcccagagctggaattatttccccgctatcttctcttcctgagacagcagcctgccactcggacacagcagtctaacatctgggtgaatatgggaaatgtaccttctccgaatgcacctttaaagcgggtattagcctatacaggctgttttagtcgaatgcagaccatcaaggaaattcacgaatatctatctcaaaggctgcgcattaaagaggaagatatgcgcctgtggctatacaacagtgagaactaccttactcttctggatgatgaggatcataaattggaatatttgaaaatccaggatgaacaacacctggtaattgaagttcgcaacaaagatatgagttggcctgaggagatgtcttttatagcaaatagtagtaaaatagatagacacaaggttcccacagaaaagggagccacaggtctaagcaatctgggaaacacatgcttcatgaactcaagcatccagtgtgttagtaacacacagccactgacacagtattttatctcagggagacatctttatgaactcaacaggacaaatcccattggtatgaaggggcatatggctaaatgctatggtgatttagtgcaggaactttggagtggaactcagaagaatgttgccccattaaagcttcggtggaccatagcaaaatatgctcccaggtttaatgggtttcagcaacaggactcccaagaacttctggcttttctcttggatggtcttcatgaagatcttaatcgagtccatgaaaagccatatgtggaactgaaggacagtgatgggcgaccagactgggaagtagctgcagaggcctgggacaaccatctaagaagaaatagatcaattgttgtggatttgttccatgggcagctaagatctcaagtaaaatgcaagacatgtgggcatataagtgtccgatttgaccctttcaattttttgtctttgccactaccaatggacagttatatgcacttagaaataacagtgattaagttagatggtactacccctgtacggtatggactaagactgaatatggatgaaaagtacacaggtttaaaaaaacagctgagtgatctctgtggacttaattcagaacaaatccttctagcagaagtacatggttccaacataaagaactttcctcaggacaaccaaaaagtacgactctcagtgagtggatttttgtgtgcatttgaaattcctgtccctgtgtctccaatttcagcttctagtccaacacagacagatttctcctcttcgccatctacaaatgaaatgttcaccctaactaccaatggggacctaccccgaccaatattcatccccaatggaatgccaaacactgttgtgccatgtggaactgagaagaacttcacaaatggaatggttaatggtcacatgccatctcttcctgacagcccctttacaggttacatcattgcagtccaccgaaaaatgatgaggacagaactgtatttcctgtcatctcagaagaatcgccccagcctctttggaatgccattgattgttccatgtactgtgcatacccggaagaaagacctatatgatgcggtttggattcaagtatcccggttagcgagcccactcccacctcaggaagctagtaatcatgcccaggattgtgacgacagtatgggctatcaatatccattcactctacgagttgtgcagaaagatgggaactcctgtgcttggtgcccatggtatagattttgcagaggctgtaaaattgattgtggggaagacagagctttcattggaaatgcctatatcgctgtggattgggatcccacagcccttcaccttcgctatcaaacatcccaggaaagggttgtagatgagcatgagagtgtggagcagagtcggcgagcgcaagccgagcccatcaacctggacagctgtctccgtgctttcaccagtgaggaagagctaggggaaaatgagatgtactactgttccaagtgtaagacccactgcttagcaacaaagaagctggatctctggaggcttccacccatcctgattattcaccttaagcgatttcaatttgtaaatggtcggtggataaaatcacagaaaattgtcaaatttcctcgggaaagttttgatccaagtgcttttttggtaccaagagacccggctctctgccagcataaaccactcacaccccagggggatgagctctctgagcccaggattctggcaagggaggtgaagaaagtggatgcgcagagttcggctggggaagaggacgtgctcctgagcaaaagcccatcctcactcagcgctaacatcatcagcagcccgaaaggttctccttcttcatcaagaaaaagtggaaccagctgtccctccagcaaaaacagcagccctaatagcagcccacggactttggggaggagcaaagggaggctccggctgccccagattggcagcaaaaataaactgtcaagtagtaaagagaacttggatgccagcaaagaaaatggggctgggcagatatgtgagctggctgacgccttgagtcgagggcatgtgctggggggcagccaaccagagttggtcactcctcaggaccatgaggtagctttggccaatggattcctttatgagcatgaagcatgtggcaatggctacagcaatggtcagcttggaaaccacagtgaagaagacagcactgatgaccaaagagaagatactcgtattaagcctatttataatctatatgcaatttcgtgccattcaggaattctgggtgggggccattacgtcacttatgccaaaaacccaaactgcaagtggtactgttacaatgacagcagctgtaaggaacttcacccggatgaaattgacaccgactctgcctacattcttttctatgagcagcaggggatagactatgcacaatttctgccaaagactgatggcaaaaagatggcagacacaagcagtatggatgaagactttgagtctgattacaaaaagtactgtgtgttacagtaaagctaccactctggctgctagacagcttggcggtgagggagatgactccttgtagctgacatttggcaaaagcgtcactgaaaggcaagctaaatgtagttattttatcctgtggccctgaagcacaaaataaaaattctaattaaaatagttaacttt

SEQ ID NO: 4692 - protein, 1274 aa, Homosapiens; identical to SEQ ID NO: 4684

SEQ ID NO: 4693 - DNA, 5146 bp, Homosapiens
ggcggcgaccgggaggagccgccggggcagaagccgcacttgttagtgtggggggaggtgggggcgggggacgccgacaccgtcaccgtcacccagggacgccgaggagaaggcgggaggggggtgggggcgagatcaggctccgaccccccgccgaggggatgaggggagcatgggtgccaaggagtcacggatcggattcctcagctacgaggaggcgctgaggagagttacagatgtagagctaaaacgactgaaggatgctttcaagaggacctgtggactctcatattacatgggccagcactgcttcatccgggaagtgcttggggatggagtgcctccaaaggttgctgaggtgatttactgttcttttggtggaacatccaaagggctgcacttcaataatttaatagttggacttgtcctccttacaagaggcaaagatgaagagaaagcaaaatacatttttagtcttttttcaagtgaatctgggaactatgttatacgggaagaaatggaaagaatgctccacgtggtggatggtaaagtcccagatacactcaggaagtgtttctcagagggtgaaaaggtaaactatgaaaagtttagaaattggctttttctaaacaaagatgcttttactttctctcgatggcttctatctggaggtgtgtatgttaccctcactgatgatagtgatactcctactttctaccaaactctggctggagtcacacatttggaggaatcagacatcattgatcttgagaaacgctattggttattgaaggctcaatcccggactggacgatttgatttagagacatttggcccattggtttcaccacctattcgtccatctctaagtgaaggtttgtttaatgcttttgatgaaaatcgtgacaatcacatagattttaaggagatatcctgtgggttatcagcctgttgcaggggacccctggctgaaagacaaaaattttgcttcaaggtatttgatgttgaccgtgatggagttctctccagggttgaactgagagacatggtggttgcacttttagaagtctggaaggacaaccgcactgatgatattcctgaattacatatggatctctctgatattgtagaaggcatactgaatgcacatgacaccacaaagatgggtcatcttactctggaagactatcagatctggagtgtgaaaaatgttcttgccaatgagtttttgaacctccttttccaggtgtgtcacatagttctggggttaagaccagctactccggaagaagaaggacaaattattagaggatggttagaacgagagagcaggtatggtctgcaagcaggacacaactggtttatcatctccatgcagtggtggcaacagtggaaagaatatgtcaaatacgatgccaaccctgtggtaattgagccatcatctgttttgaatggaggaaaatactcatttggaactgcagcccatcctatggagcaggtcgaagatagaattggaagcagcctcagttacgtgaatactacagaagagaaattttcagacaacatttctactgcatctgaagcctcagaaactgctggcagcggctttctgtattctgccacaccaggggcagatgtttgctttgctcgacaacataacacttctgacaataacaaccagtgtttgctgggagccaatgggaatattttgttgcaccttaaccctcagaaaccaggggctattgataatcagccattagtaactcaagaaccagtaaaggctacatcattaacactagaaggaggacgattaaaacgaactccacagctgattcatggaagagactatgaaatggtcccagaacctgtgtggagagcactttatcactggtatggagcaaacctggccttacctagaccagttatcaagaacagcaagacagacatcccagagctggaattatttccccgctatcttctcttcctgagacagcagcctgccactcggacacagcagtctaacatctgggtgaatatgggaaatgtaccttctccgaatgcacctttaaagcgggtattagcctatacaggctgttttagtcgaatgcagaccatcaaggaaattcacgaatatctatctcaaaggctgcgcattaaagaggaagatatgcgcctgtggctatacaacagtgagaactaccttactcttctggatgatgaggatcataaattggaatatttgaaaatccaggatgaacaacacctggtaattgaagttcgcaacaaagatatgagttggcctgaggagatgtcttttatagcaaatagtagtaaaatagatagacacaaggttcccacagaaaagggagccacaggtctaagcaatctgggaaacacatgcttcatgaactcaagcatccagtgtgttagtaacacacagccactgacacagtattttatctcagggagacatctttatgaactcaacaggacaaatcccattggtatgaaggggcatatggctaaatgctatggtgatttagtgcaggaactttggagtggaactcagaagaatgttgccccattaaagcttcggtggaccatagcaaaatatgctcccaggtttaatgggtttcagcaacaggactcccaagaacttctggcttttctcttggatggtcttcatgaagatcttaatcgagtccatgaaaagccatatgtggaactgaaggacagtgatgggcgaccagactgggaagtagctgcagaggcctgggacaaccatctaagaagaaatagatcaattgttgtggatttgttccatgggcagctaagatctcaagtaaaatgcaagacatgtgggcatataagtgtccgatttgaccctttcaattttttgtctttgccactaccaatggacagttatatgcacttagaaataacagtgattaagttagatggtactacccctgtacggtatggactaagactgaatatggatgaaaagtacacaggtttaaaaaaacagctgagtgatctctgtggacttaattcagaacaaatccttctagcagaagtacatggttccaacataaagaactttcctcaggacaaccaaaaagtacgactctcagtgagtggatttttgtgtgcatttgaaattcctgtccctgtgtctccaatttcagcttctagtccaacacagacagatttctcctcttcgccatctacaaatgaaatgttcaccctaactaccaatggggacctaccccgaccaatattcatccccaatggaatgccaaacactgttgtgccatgtggaactgagaagaacttcacaaatggaatggttaatggtcacatgccatctcttcctgacagcccctttacaggttacatcattgcagtccaccgaaaaatgatgaggacagaactgtatttcctgtcatctcagaagaatcgccccagcctctttggaatgccattgattgttccatgtactgtgcatacccggaagaaagacctatatgatgcggtttggattcaagtatcccggttagcgagcccactcccacctcaggaagctagtaatcatgcccaggattgtgacgacagtatgggctatcaatatccattcactctacgagttgtgcagaaagatgggaactcctgtgcttggtgcccatggtatagattttgcagaggctgtaaaattgattgtggggaagacagagctttcattggaaatgcctatatcgctgtggattgggatcccacagcccttcaccttcgctatcaaacatcccaggaaagggttgtagatgagcatgagagtgtggagcagagtcggcgagcgcaagccgagcccatcaacctggacagctgtctccgtgctttcaccagtgaggaagagctaggggaaaatgagatgtactactgttccaagtgtaagacccactgcttagcaacaaagaagctggatctctggaggcttccacccatcctgattattcaccttaagcgatttcaatttgtaaatggtcggtggataaaatcacagaaaattgtcaaatttcctcgggaaagttttgatccaagtgcttttttggtaccaagagacccggctctctgccagcataaaccactcacaccccagggggatgagctctctgagcccaggattctggcaagggaggtgaagaaagtggatgcgcagagttcggctggggaagaggacgtgctcctgagcaaaagcccatcctcactcagcgctaacatcatcagcagcccgaaaggttctccttcttcatcaagaaaaagtggaaccagctgtccctccagcaaaaacagcagccctaatagcagcccacggactttggggaggagcaaagggaggctccggctgccccagattggcagcaaaaataaactgtcaagtagtaaagagaacttggatgccagcaaagaaaatggggctgggcagatatgtgagctggctgacgccttgagtcgagggcatgtgctggggggcagccaaccagagttggtcactcctcaggaccatgaggtagctttggccaatggattcctttatgagcatgaagcatgtggcaatggctacagcaatggtcagcttggaaaccacagtgaagaagacagcactgatgaccaaagagaagatactcgtattaagcctatttataatctatatgcaatttcgtgccattcaggaattctgggtgggggccattacgtcacttatgccaaaaacccaaactgcaagtggtactgttacaatgacagcagctgtaaggaacttcacccggatgaaattgacaccgactctgcctacattcttttctatgagcagcaggggatagactatgcacaatttctgccaaagactgatggcaaaaagatggcagacacaagcagtatggatgaagactttgagtctgattacaaaaagtactgtgtgttacagtaaagctaccactctggctgctagacagcttggcggtgagggagatgactccttgtagctgacatttggcaaaagcgtcactgaaaggcaagctaaatgtagttattttatcctgtggccctgaagcacaaaataaaaattctaattaaaatagttaacttt

SEQ ID NO: 4694 - protein, 1604 aa, Homosapiens; identical to SEQ ID NO: 717

SEQ ID NO: 4695 - DNA, 1857 bp, Homosapiens
ggtgggggcgagatcaggctccgaccccccgccgaggggatgaggggagcatgggtgccaaggagtcacggatcggattcctcagctacgaggaggcgctgaggagagttacagatgtagagctaaaacgactgaaggatgctttcaagaggacctgtggactctcatattacatgggccagcactgcttcatccgggaagtgcttggggatggagtgcctccaaaggttgctgaggtgatttactgttcttttggtggaacatccaaagggctgcacttcaataatttaatagttggacttgtcctccttacaagaggcaaagatgaagagaaagcaaaatacatttttagtcttttttcaagtgaatctgggaactatgttatacgggaagaaatggaaagaatgctccacgtggtggatggtaaagtcccagatacactcaggaagtgtttctcagagggtgaaaaggtaaactatgaaaagtttagaaattggctttttctaaacaaagatgcttttactttctctcgatggcttctatctggaggtgtgtatgttaccctcactgatgatagtgatactcctactttctaccaaactctggctggagtcacacatttggaggaatcagacatcattgatcttgagaaacgctattggttattgaaggctcaatcccggactggacgatttgatttagagacatttggcccattggtttcaccacctattcgtccatctctaagtgaaggtttgtttaatgcttttgatgaaaatcgtgacaatcacatagattttaaggagatatcctgtgggttatcagcctgttgcaggggacccctggctgaaagacaaaaattttgcttcaaggtatttgatgttgaccgtgatggagttctctccagggttgaactgagagacatggtggttgcacttttagaagtctggaaggacaaccgcactgatgatattcctgaattacatatggatctctctgatattgtagaaggcatactgaatgcacatgacaccacaaagatgggtcatcttactctggaagactatcagatctggagtgtgaaaaatgttcttgccaatgagtttttgaacctccttttccaggtgtgtcacatagttctggggttaagaccagctactccggaagaagaaggacaaattattaggactctggaaactgaccaaatatatacaagaaattgagaagcatttattcaagaactactaatccttggtgagaacaatggaagtgtgtggtaatttaaccaggagcagctttcatttcctcccatccagcaagtctgcatgggctgtcagtctgattcatgatttgaaggagagcaggaataaatgcctgtccaaggataataaaataaatacataccatcatggtggtaaacagtgagggaaaactgacatcaccagcttggggataaaatactggttaggggaagcagcagactaacaacagaccagtcaaatttttaacagggaacaggatcaccatagtgagccttagcaagctttctcatgtccccagtgatctgtagactgcttgtacaaggctatacacaaactcaggagaaaccaaagtgggctttagcactttattcttccctagttgaaggtgaagccttgcatgtgcagaaagtaaaagccagggtaggcttgtaacctgcccaaactttaaatgcattccccaaaccatgtacagatccatcaggaaaagggtgtgaatgttactggctaaacacaaccagtaaactgctgagagcacaacctctcagcagtcattggctgaccagtaagttaggctcaccccaagaaggccaagctt

SEQ ID NO: 4696 - protein, 390 aa, Homosapiens
MGAKESRIGFLSYEEALRRVTDVELKRLKDAFKRTCGLSYYMGQHCFIREVLGDGVPPKVAEVIYCSFGGTSKGLHFNNLIVGLVLLTRGKDEEKAKYIFSLFSSESGNYVIREEMERMLHVVDGKVPDTLRKCFSEGEKVNYEKFRNWLFLNKDAFTFSRWLLSGGVYVTLTDDSDTPTFYQTLAGVTHLEESDIIDLEKRYWLLKAQSRTGRFDLETFGPLVSPPIRPSLSEGLFNAFDENRDNHIDFKEISCGLSACCRGPLAERQKFCFKVFDVDRDGVLSRVELRDMVVALLEVWKDNRTDDIPELHMDLSDIVEGILNAHDTTKMGHLTLEDYQIWSVKNVLANEFLNLLFQVCHIVLGLRPATPEEEGQIIRTLETDQIYTRN

SEQ ID NO: 4697 - DNA, 468 bp, Homosapiens
catggtggctcacgcctataattccagcacttcgggaggccgaggcgtgtggatcacgaggtcaggaaatcgagaccatcctggctaacatggtgaaaccctgactctactaaaaatacaaaaaaattagccaggcatggtggtgggcgcctgtagtcccagctactcgggaggctgaggcaggatgaggtgagaggactgcttgagcccaggaagttgagactgccgtaagccacgatggtgccactgcactccagcctgggacagaatttaaataaatttctcctttataagcatattctcatattaccagccaattatatatataaaaaaaggcaaacagaaaacaatgaaatgtcattacttacaatgtgtgactccagccagagtttggtagaaagtaggagtatcactatcatcagtgagggtaacatacacacctccagatagaagccatcgagagaaagt

SEQ ID NO: 4698 - protein, 70 aa, Homosapiens
MVPLHSSLGQNLNKFLLYKHILILPANYIYKKRQTENNEMSLLTMCDSSQSLVESRSITIISEGNIHTSR

SEQ ID NO: 4699 - DNA, 433 bp, Homosapiens
gagtcacggatcggattcctcagctacgaggaggcgctgaggagagttacagatgtagagctaaaacgactgaaggatgctttcaagaggacctgtggactctcatattacatgggccagcactgcttcatccgggaagtgcttggggatggagtgcctccaaaggttgctgaggtgatttactgttcttttggtggaacatccaaagggctgcacttcaataatttaatagttggacttgtcctccttacaagaggcaaagatgaagagaaagcaaaatgtaagtacttttattatctcaaaaataattcgtctatgtacagaataatttatctcaaaattctgatgacaggtagaggatttgaattgacattttcccaaagaagatatacaagtggtaaataaacacctaaaaaatgtgcaacataattag

SEQ ID NO: 4700 - protein, 97 aa, Homosapiens
MGQHCFIREVLGDGVPPKVAEVIYCSFGGTSKGLHFNNLIVGLVLLTRGKDEEKAKCKYFYYLKNNSSMYRIIYLKILMTGRGFELTFSQRRYTSGK

SEQ ID NO: 4701 - DNA, 670 bp, Homosapiens
cagaccaggcctgtaatgatgacgtttctttacccctccaatagagggtgcactcttgtgaatggcttttgtggctagttacttcgtgggtgctttaccatggtcagtttgcaggcaatctgttttgtacaggccatgctatagagacttatttacttattcttcagctccctctgcaggagctcagtgagctaaaggtgctagagagctgtaatggctgcaaacacccattcttttttatggctaaataatacttcactgtgtgtatataccacatttttttcatctttttatgggttgtttccacctttcttctattgtcaataatgctgctgtgaatattggcatacaagtatctgtttgaatctctgttttcaattctttttggaacagaattgtcaggtcatatggtaattctatgtttacctttttgaagaaccaccaggctgttttccagaacagctgtacccttttacatttccatcaacagtgtatagatgttgcaggggtttttttacattcttgttatttattcattttattttatttatttttattttttgagatggagtctcactctgtcgcccaggctggagtgtggagtgcatgagccaagatcaatgccactgtattctccagcctgggcaacaacagagaaagaccctgtctc

SEQ ID NO: 4702 - protein, 63 aa, Homosapiens
MFTFLKNHQAVFQNSCTLLHFHQQCIDVAGVFLHSCYLFILFYLFLFFEMESHSVAQAGVWSA

SEQ ID NO: 4703 - DNA, 572 bp, Homosapiens
aagaatttcttaatttccaaatggcagaagctgtagagatgttttgacgctttttagaaaacagtaaagcatataatacttcacatgaaggtttatcttgaactacttttccagtcttccttctttcttgttatatttgactttcagaaattttaggtgagatataaaaagccttataggagcagtattcagcaaagtgtgtttaaccaactttgttacatacaccagttctttgctttaaaagaaatagtgttttgtttttcttaaaagcttttattgagctataatttacatgtcacactattcacacatttaaagtatacaattcagtggcttttactatgttcatagattgtgtctcattgtggttttgatttgcattttcctgatctccagatgttcaaatttcttgatcaaatggactagtaaatctgaaatgaaaatatttatacattcatgtggtgtatatgtatatggaaatttgtaattggcataattggctcaatccattttagtgctttgaagaatgttaaagttttctgttttttagcaataaatatctttaaaatgtt

SEQ ID NO: 4704 - protein, 37 aa, Homosapiens
MWCICIWKFVIGIIGSIHFSALKNVKVFCFLAINIFK

SEQ ID NO: 4705 - DNA, 436 bp, Homosapiens
gcgaagactttggcagagcgcacagcaggccaggagaggctggcgccccttctcccaagaatactgtcagatgctgatcctgacaccacctggaattccttctcccggaccttccttcgtgtcctctgggcccgggcccagttgtccccactcagtgtggccctgttcttcgcctgccttcgcgacagtgcggtgggaccgccgtcggcccgggcctcccctgccacccagcggccacctcgggcacaggagaggggcatagcggcttcaagtaggggtagcccggaggcccggagctttggaggagcaccctttgagtccagaaactttttaacttgtcctctatgccagcatgttcagcaaacgtcttgttgttattgttgtcgttgttgttgttgtaaggggaggaataaaccttccacttatccgcctccaa

SEQ ID NO: 4706 - protein, 63 aa, Homosapiens
MLILTPPGIPSPGPSFVSSGPGPSCPHSVWPCSSPAFATVRWDRRRPGPPLPPSGHLGHRRGA

SEQ ID NO: 4707 - DNA, 959 bp, Homosapiens
gagacggctaggtcacagaagcagtgggtcagaagccagaggggacgtggggagtgccaccctggagcctaccggcacacctgctgagatggaggcctcagatgggcaagggggtgaaggggacaagccactagagcaggtgacaaatgtgtcatgcctggagacaagctccagcgccagccctgctagagactcgctcatgcgccatgccaagggcctggatcaggacaccttcaaaacttgtaaagaatacctaagaccgctgaagaagttcctgcgaaagttgcacctgcccagggaccttccccagaagaagaagctgaagtacatgaagcagagccttgtggtcctaggggaccacatcaacacctttctgcagcattactgccaagcctgggaaatcaaacactggagaaagatgctctggcggttcatctccctcttctcggagctggaagcaaagcagcttcgccgactttacaagtacaccaagagcagccagccggccaagttcctggtgacattctgcgcctcggatgcgccggagaggtccttgctggccgaccgggaagacagtctgcccaagctctgccatgcatgggggctgcacagcaacatcagcggcatgaaggagcggctgtccaacatgcagaccccaggtcaagggagccccctgcctgggcagccaagatcccaggaccatgtcaagaaagattctttaagggagctttctcaaaaaccaaaactcaagaggaagaggataaaggaagccccagaaactccagagactgaaccgtaagaagaccaactgggacaaagggcccgcttgtcctggctctcagagcacggggaatggagaccaaaaagggaaaagaattgtccttatcaaaaagattctcaggtcttaattaggaataaatgaggtgggaaataaacattcttatgacagttctacctta

SEQ ID NO: 4708 - protein, 236 aa, Homosapiens
MEASDGQGGEGDKPLEQVTNVSCLETSSSASPARDSLMRHAKGLDQDTFKTCKEYLRPLKKFLRKLHLPRDLPQKKKLKYMKQSLVVLGDHINTFLQHYCQAWEIKHWRKMLWRFISLFSELEAKQLRRLYKYTKSSQPAKFLVTFCASDAPERSLLADREDSLPKLCHAWGLHSNISGMKERLSNMQTPGQGSPLPGQPRSQDHVKKDSLRELSQKPKLKRKRIKEAPETPETEP

SEQ ID NO: 4709 - DNA, 2319 bp, Homosapiens
agtcatcatggacaccctccagcccggcttcccttctctctgaaatcctccctgctttgacaaaactgtcagggtctagccaagccaggctggccccaggcctatgccttggccgtctcatcttgccacttccaggaggcgatgactctaaggaggaaagaaatggcgcttcctccccgcttcccccattcatgcttccctgaactccttcttcgagactagattgatattcattttagccttgtcagtctatgacgatacttacttctgaacacaaatcgagggagggagggagaagagtcacacacatctgccctggcctctcctgctccagggcagccctgcaccctatatgctgctgcctcaggcagagccctggaaaatatgtcatttgtgtttttggggaatgtttggacctacttaccctcctggaaatgataaaagttcacaaaatttggaggaagaagaggcgagaacgatccccgaaccgagcaaagcccgcgcgccgctgcatcctgcgcccagtgcctacgtctcaatgccatcgtcgccgccaccatgaccaagagaaaggctgaaggggatgctaaaggagataaagccaagacgaaggacgaaccacagaaaagatccgcgaggttgtctgctaaacctgcttttccaaagccggagcccaagcctaaaatggcccctgcaaagaagggagagaaggtacccaaagggaaaaagggaaaagctgatgctggcaaggagggaatagccctgcagaaaatgaagatgccaaaacagatcaggcacagaaagctgaaggtgctggagatgccaagtgaagtgtgtgcatttttgataactgtgtacatctggtgactatacagtttgaaatactattttttatcaagatttataaaaatgcagaattttattttactttttttttttaagctacgttgttagcacacagaacacttcattgttgtttttaggggaaggggcatacgtcactaatagaatgactccgaagctggattgatatggggaaaacacctttcccttctagtttttagagacttccttttggctcccaggaggagggattccctggctttgatacacatggccaccttggcacaaaaggcttgcggtatggaaaaacaaatttatttttatgtcctcttctccctttccatctttcagcatagacttaactcccttaagcccagacgtctgttgggacctgacccctagtcattggttaccagtgtcaggcaatctggactttccagatgccactgagatggcacctgtcaaaagagcagtggttccatttctagattgtgaatcttcagataaattctgccattttcatttcacttcctgaaagtcaaggttggtttgtgaaaagttaacagcatgctgaatgtgaaatatcaaccctcactctaaactttccctgttcagagcatcagatgaagacttcattgggttttatactggctttctttttggtagtccactgaagaatccagggagtttgaaagttgttgtatactgttaatgattgtctgcccatgtcctgcctgaaataccatgactgtttatggaaagtatctttaataaagctggatacagtttggcttggaaaaaaaaagttcacaaaatttgcagcctgacaatgcaatagaaaaagaaaaactcgctcttggctttcggcttggaggaggccaaggtgcaactttcttcggttgtcccgaatccgggttcatctgacaccagccgcctccaccatgccgccaaagttcgaccccaacgagatcaaagtcatatacctgaggtgcaccggagatgccacttctgccctggcccccaagatcggccccctgggtctgtctccaaaaaacgttggtggtgacattgccaaggcaacgggtgactggaagggcctgaggattacagtgaaactgaccattcagaacagacaggcccagattgaggtggtgccttctgcctctgccctgatcatcaaagccctcaaggaaccaccagagacagaaagaaacagaaaaacattaaacacagtgggaatatcacttttgatgagatcgtcaaccttgctcgacagatggagcaccgatccttagccagagaactctctggaaccattaaagagatcctggggactgcccagtctctgtgggttgtaatgttgatggccgccaccctcatgacatcatagatgacatcaacagtggtgctgtggaatgcccagctagttaagcacaaaggaaaatatttcaataaaggatcatttgacaactagtg

SEQ ID NO: 4710 - protein, 117 aa, Homosapiens [sequence omitted]

SEQ ID NO: 4711 - DNA, 6481 bp, Homosapiens
gcagagatcagcgctgggacggaacccgggttcctctcgaaccgggattgtgacgcttttggcctggctggccgctgttttctgtcccactttttactcgggcctgcgtccgctgccgccgtccctcagtttgcccccggaggaggcagggcggccgtgccttctgccgtgcgcccgcgtggctgccaccgcccctccgaatcctccggggccgcagaggggttcgctacggagggaggtgggggccttcgggaggaggaggcggaggaggcggaggaggagggaaggaagatggcggccgtggaactagagtggatcccagagactctctataacaccgccatctccgctgtcgtggacaactacatccgctcccgccgagacatccgctccttgcccgagaacatccagtttgatgtttactacaagctttaccaacagggacgcttatgtcaactgggcagtgaattttgtgaattggaagtttttgctaaagtactgagagctttggataaaagacatttgcttcatcattgttttcaggctttgatggatcatggtgttaaagttgcttcagtcttggcctactcattcagtaggcggtgctcttatatagcagaatcagatgctgcagtaaaggaaaaagccattcaggttggctttgttttaggtggctttctttcagatgcaggctggtacagtgatgctgagaaagtttttctgtcctgccttcagttgtgtactctacacgatgagatgcttcattggtttcgtgcagtagaatgttgtgtgaggttgcttcatgtgcgaaatggaaactgcaaatatcatttgggtgaagaaacatttaaattagctcagacatatatggataaactatcaaaacatggccagcaagcaaataaagctgcactctatggagaactgtgtgcactcctatttgcaaaaagtcactatgatgaggcatacaaatggtgcatcgaggcaatgaaagaaattacagcaggcttaccagtgaaagttgtggtggatgtcttaagacaagcttctaaggcttgtgtagtaaaacgtgaatttaagaaggcagaacagttaattaaacatgcagtgtatttggcacgggatcattttggatccaaacacccaaaatattctgatacactgctagattatgggttctacttactcaatgtagataatatctgtcagtctgttgcaatttatcaggcagcccttgacattagacagtcagtgtttggtggcaaaaatatccacgtagcaacagctcatgaagatttggcctactcttcttatgtccaccagtatagctctgggaaatttgacaatgcactatttcatgcagaaagagctattggtatcattacccacatcctacctgaagatcatcttcttttggcttcttcaaagagggtgaaagcacttattttagaggagattgcaattgattgtcataataaggaaactgaacagaggctgcttcaagaagctcatgatttgcacctgtcttcactccaactagctaaaaaagcttttggggaatttaatgtacagactgcaaaacactatggaaaccttggaagactttatcagtcaatgagaaaatttaaggaagctgaagaaatgcacatcaaagcaattcagattaaagaacaacttcttggtcaagaagattatgaagtagccctttcagtgggacatctggcttctttatataattatgacatgaatcagtatgaaaatgctgagaaactttatttgcgatctatagcaattgggaagaaactttttggtgagggctacagtggactagaatatgattatcgaggtctcattaaactttacaactccattggaaattacgagaaagtgtttgaatatcacaatgttctgtctaactggaaccggttgcgagatcggcaatattcagtgacagatgctcttgaagatgtcagcaccagcccccagtccactgaagaagtggtgcagtccttcctgatttctcagaatgtcgagggaccgagctgctgagggaggacctcagttaaccaattaccttttcccggattccagggaattcatactgtgaaatcaaaaccatgttgttttggggggctggaatttgcattgaaacactggtccagtccattgaagaccctattttgggtgatccctatcttgcagaatgtctgtaggaataagcatatattcagttatattcagcatgtaccgcatgtgtaagtagtctggcccacattttcaacctagtagaacaaacaacaggaaatcttttttttgttgtttttaaaaaattcattttgcagaaagcctgaaagaaaaaaaatacccctaaataaaactatttaagagtttaaaagagttgcattcttattatgtaaggatgattttaacaactttttaatatgtaattcttccatgtggaggtattcaatactgtagtgtaaagaaattttatgcggaaaatctttatatgcagtatagaaaagttaacacaagtactaataaaagagggacatcccgacttacgtttttctaccttgcccagataagtggatacaaccactctatattacaaggaaaggactgtcagattcatctgaactggaccagtgttgatctgtaatgtaatagaaaatctgatagaccagcacttctgacttttttttttttggtacaacaatgcaagatgctctgatagcatttgctaacaggaccaggaggatctaaaaaggaccagcctaatgtagaaggtggttacttggaccagaggctttagattattattttagatcctacatatacttttatcagtagaatgatttcatttagatgtataatgaaaaaggataatgcaaaaattatgtaatagataccaaattagggaagtttggcaatttcaatggcatatttttagtcaaggtacacagatggcagtgccataagcaagtctataaatatcggctgcagccatccccctcattttaaatgttgccctaataatcaatgcagttaacaagtatattggctgtgtgtcatgaaatagttcatgttcagatggaaatgttaggttactgtatggtttatggagattaatgaaaatgaatgcccaaaaataagtcttagaaaatcctccatttttatggtaaatagtaatacaactaggtcatttcatttgaaatctaggagtcaaatggaaagatcccctaataatacacctatttcactaacttgtctttctgtttattgggttttgatttgattttttgtaagccagtcaggttatttaatgatgaggtaataatcaaatttaagaatttgtgacatgtagcaattcaagaaacaaaaaggtattttgctgttacctcaattcttactgtagtagcccatctgatgcttctatagttaagaatctgggttccccccctattttcaggggttcatgacttggctgttaaagatgttgctcctagctaatgcttggagtagtctgtgggtgaatggatgtgtgttgaattttagttttcttttaacatgcatgttgggtgagaggggaaaaaaatctaagctgtctgccacattgagtacagaaaagttgtagatttcaaattttattaatattttaagcacttttttgaacttcccaaccttgtttgaagctgttatttgcagtcctattagttttgagccattgcatttaagttccctaggagggggttggttgggggatgtactgaaagagatgaagcaaacccacaccctaagatggtaactgtgtgatttagaaacctgagtttactcctcaaatcgaattattttctttttaaattttggaaagagtaaattgacgtacttgcagtttatgaagctgccccccacccctcagttaattgcagtctaatgtcaagaggcacttctttattaattaccaaatagtctttgtgaccaaggactaacatttttaagttactcagctctatcctcatgggcctatatatttaatacctccaaagatattttcaggataggctttgtatacttttattggttatttagaatccagtggtatgtttgtggtataggaatgtcatggtaaattgtttttcaataaatattttgaaacatgtttccatatgaagtttttttttcaatctgtattttttggttttgtgcacatacagcatttcctaggataaaaataaacaaatgacttacagcctcatcctccctaactccatttgaactcaacttagctcacactcagtgataaaacaacatggtatgtagaagcctaggatcacagggtgataatgtcaattggcagccagttgtgtttttttgaaacatcattattggcagtttctccttatcaccactgctttaatgtagtttttttgtaaatccatatactttaatgcatacactctagcttaagaaaacattgccattttggttagggatatgacttaatgtgctattatttctggttctaatgaagaataataccctatgactttaagtgtaagattcatcctttaagtagggatgtttaggataagttagatgtgtgccactatgatttattgggtttcttaaaaatcttgaagaaaataataaaatttatctcacaataagttaacttgcgcaaactttttacatatggtgaggtgcgtaaggaagccctggccaacttaaagatttttctggaggttcagcaaagttatgttaaattaggggcctttggtctcatccttctctgactcttctacccagtcttttcctaaagttcggtgctactccagttgggtgcatcagggagctccgtcagcactcgcatgtgtcgctcaggtggccactcatgcctgcattccatttaatagagtcaattggaatttttagagcataatctttatggatcctcaaagctgactttgccaaagggattgagacccttactaccatcaaatctctgtctctgcttggttaaaaattggctcactattgctttgtagtaacccctgcccaggtattttttcacttgtgaaaataatttgagaaagacctttgttcctagcctgttgggaaaagtttataattttatgaaaattaagtacagaggctgcgatcttagaaataatgaaggtgccatttggctgctccttaatagtgcagacagaaaactgcagtgaacacatgccaaaacatgattgaagcctttggctgaaactttatacatagaaataatgatttgctcataacaggtatcattaactgccactttttatgttttccctagaatttgtagccttgctgcttgcttttcttctgggtggcaaagttactactggaaaaacactataagtacaaagtttttggggttttatctttgctttagaagtggatgtgtacttcacctcttggctgtggaggaacttagttgccaggaaattttttttttttttttcagacggagtttcgctcttgttgcccaggctgggagggcaatggcaccgtcttggctcactgcaacctccgcctcccgggttccagcgattctcctgcctcagccttccgagtagctgggattacaggctcctgccaccacgcctggctaggaaattttttgttgttaatatgacatttggattaatctccagcttcaacagtacttcttttgtccataaatctcaggaatgttttaggcagaaaactggttttaccctgttgataatcagaaggagtgtgctttaggatttattgcataatactattctttaattgcaatcctaggtatctatagcatgagtggccttagtgagtttgttgaagtgcacatgtttttcaagagtaaaatttaagattaaaaatatatcctatatatagatatctagaaaacttggtttgtggtgcacagttaagtgttggatcactaaataaccattgcaggtaccgtttgtgtaacattactcatttctgtatattccttttatgggaagatattttgccatggtaactaaaacttttcagttctacttttatgatgtgaatgaatgctacgttttattaaatattaccaggtcagtactatttttatactttattaagcaacaggggattttagtttaataggctcaaaataaaaagttcttaatggaacagttaaaaacaaaacactaacaatctttacgtgaaaatccccactaatagtgccacaataatttctatagaaatatctaaggtcattaaatagatttttgaagacggttcttcattgtgtcaggatgacctttcatatcattctcaccaacttgtagtgcccaccgttatttgtaactattaaaccatactaagtatgtttgtaaccagcattgtgatatattctgtacttgtattgctaaaaatgaattattgacctaataaatatagtgttcctgcattcatagtg

SEQ ID NO: 4712 - protein, 585 aa, Homosapiens; identical to SEQ ID NO: 721

SEQ ID NO: 4713 - DNA, 4172 bp, Homosapiens
gcagagatcagcgctgggacggaacccgggttcctctcgaaccgggattgtgacgcttttggcctggctggccgctgttttctgtcccactttttactcgggcctgcgtccgctgccgccgtccctcagtttgcccccggaggaggcagggcggccgtgccttctgccgtgcgcccgcgtggctgccaccgcccctccgaatcctccggggccgcagaggggttcgctacggagggaggtgggggccttcgggaggaggaggcggaggaggcggaggaggagggaaggaagatggcggccgtggaactagagtggatcccagagactctctataacaccgccatctccgctgtcgtggacaactacatccgctcccgccgagacatccgctccttgcccgagaacatccagtttgatgtttactacaagctttaccaacagggacgcttatgtcaactgggcagtgaattttgtgaattggaagtttttgctaaagtactgagagctttggataaaagacatttgcttcatcattgttttcaggctttgatggatcatggtgttaaagttgcttcagtcttggcctactcattcagtaggcggtgctcttatatagcagaatcagatgctgcagtaaaggaaaaagccattcaggttggctttgttttaggtggctttctttcagatgcaggctggtacagtgatgctgagaaagtttttctgtcctgccttcagttgtgtactctacacgatgagatgcttcattggtttcgtgcagtagaatgttgtgtgaggttgcttcatgtgcgaaatggaaactgcaaatatcatttgggtgaagaaacatttaaattagctcagacatatatggataaactatcaaaacatggccagcaagcaaataaagctgcactctatggagaactgtgtgcactcctatttgcaaaaagtcactatgatgaggcatacaaatggtgcatcgaggcaatgaaagaaattacagcaggcttaccagtgaaagttgtggtggatgtcttaagacaagcttctaaggcttgtgtagtaaaacgtgaatttaagaaggcagaacagttaattaaacatgcagtgtatttggcacgggatcattttggatccaaacacccaaaatattctgatacactgctagattatgggttctacttactcaatgtagataatatctgtcagtctgttgcaatttatcaggcagcccttgacattagacagtcagtgtttggtggcaaaaatatccacgtagcaacagctcatgaagatttggcctactcttcttatgtccaccagtatagctctgggaaatttgacaatgcactatttcatgcagaaagagctattggtatcattacccacatcctacctgaagatcatcttcttttggcttcttcaaagagggtgaaagcacttattttagaggagattgcaattgattgtcataataaggaaactgaacagaggctgcttcaagaagctcatgatttgcacctgtcttcactccaactagctaaaaaagcttttggggaatttaatgtacagactgcaaaacactatggaaaccttggaagactttatcagtcaatgagaaaatttaaggaagctgaagaaatgcacatcaaagcaattcagattaaagaacaacttcttggtcaagaagattatgaagtagccctttcagtgggacatctggcttctttatataattatgacatgaatcagtatgaaaatgctgagaaactttatttgcgatctatagcaattgggaagaaactttttggtgagggctacagtggactagaatatgattatcgaggtctcattaaactttacaactccattggaaattacgagaaagtgtttgaatatcacaatgttctgtctaactggaaccggttgcgagatcggcaatattcagtgacagatgctcttgaagatgtcagcaccagcccccagtccactgaagaagtggtgcagtccttcctgatttctcagaatgtcgagggaccgagctgctgagggaggacctcagttaaccaattaccttttcccggattccagggaattcatactgtgaaatcaaaaccatgttgttttggggggctggaatttgcattgaaacactggtccagtccattgaagaccctattttgggtgatccctatcttgcagaatgtctgtaggaataagcatatattcagttatattcagcatgtaccgcatgtgtaagtagtctggcccacattttcaacctagtagaacaaacaacaggaaatcttttttttgttgtttttaaaaaattcattttgcagaaagcctgaaagaaaaaaaatacccctaaataaaactatttaagagtttaaaagagttgcattcttattatgtaaggatgattttaacaactttttaatatgtaattcttccatgtggaggtattcaatactgtagtgtaaagaaattttatgcggaaaatctttatatgcagtatagaaaagttaacacaagtactaataaaagagggacatcccgacttacgtttttctaccttgcccagataagtggatacaaccactctatattacaaggaaaggactgtcagattcatctgaactggaccagtgttgatctgtaatgtaatagaaaatctgatagaccagcacttctgacttttttttttttggtacaacaatgcaagatgctctgatagcatttgctaacaggaccaggaggatctaaaaaggaccagcctaatgtagaaggtggttacttggaccagaggctttagattattattttagatcctacatatacttttatcagtagaatgatttcatttagatgtataatgaaaaaggataatgcaaaaattatgtaatagataccaaattagggaagtttggcaatttcaatggcatatttttagtcaaggtacacagatggcagtgccataagcaagtctataaatatcggctgcagccatccccctcattttaaatgttgccctaataatcaatgcagttaacaagtatattggctgtgtgtcatgaaatagttcatgttcagatggaaatgttaggttactgtatggtttatggagattaatgaaaatgaatgcccaaaaataagtcttagaaaatcctccatttttatggtaaatagtaatacaactaggtcatttcatttgaaatctaggagtcaaatggaaagatcccctaataatacacctatttcactaacttgtctttctgtttattgggttttgatttgattttttgtaagccagtcaggttatttaatgatgaggtaataatcaaatttaagaatttgtgacatgtagcaattcaagaaacaaaaaggtattttgctgttacctcaattcttactgtagtagcccatctgatgcttctatagttaagaatctgggttccccccctattttcaggggttcatgacttggctgttaaagatgttgctcctagctaatgcttggagtagtctgtgggtgaatggatgtgtgttgaattttagttttcttttaacatgcatgttgggtgagaggggaaaaaaatctaagctgtctgccacattgagtacagaaaagttgtagatttcaaattttattaatattttaagcacttttttgaacttcccaaccttgtttgaagctgttatttgcagtcctattagttttgagccattgcatttaagttccctaggagggggttggttgggggatgtactgaaagagatgaagcaaacccacaccctaagatggtaactgtgtgatttagaaacctgagtttactcctcaaatcgaattattttctttttaaattttggaaagagtaaattgacgtacttgcagtttatgaagctgccccccacccctcagttaattgcagtctaatgtcaagaggcacttctttattaattaccaaatagtctttgtgaccaaggactaacatttttaagttactcagctctatcctcatgggcctatatatttaatacctccaaagatattttcaggataggctttgtatacttttattggttatttagaatccagtggtatgtttgtggtataggaatgtcatggtaaattgtttttcaataaatattttgaaacatgtttccatatg

SEQ ID NO: 4714 - protein, 585 aa, Homosapiens; identical to SEQ ID NO: 721

SEQ ID NO: 4715 - DNA, 2391 bp, Homosapiens
gcagagatcagcgctgggacggaacccgggttcctctcgaaccgggattgtgacgcttttggcctggctggccgctgttttctgtcccactttttactcgggcctgcgtccgctgccgccgtccctcagtttgcccccggaggaggcagggcggccgtgccttctgccgtgcgcccgcgtggctgccaccgcccctccgaatcctccggggccgcagaggggttcgctacggagggaggtgggggccttcgggaggaggaggcggaggaggcggaggaggagggaaggaagatggcggccgtggaactagagtggatcccagagactctctataacaccgccatctccgctgtcgtggacaactacatccgctcccgccgagacatccgctccttgcccgagaacatccagtttgatgtttactacaagctttaccaacagggacgcttatgtcaactgggcagtgaattttgtgaattggaagtttttgctaaagtactgagagctttggataaaagacatttgcttcatcattgttttcaggctttgatggatcatggtgttaaagttgcttcagtcttggcctactcattcagtaggcggtgctcttatatagcagaatcagatgctgcagtaaaggaaaaagccattcaggttggctttgttttaggtggctttctttcagatgcaggctggtacagtgatgctgagaaagtttttctgtcctgccttcagttgtgtactctacacgatgagatgcttcattggtttcgtgcagtagaatgttgtgtgaggttgcttcatgtgcgaaatggaaactgcaaatatcatttgggtgaagaaacatttaaattagctcagacatatatggataaactatcaaaacatggccagcaagcaaataaagctgcactctatggagaactgtgtgcactcctatttgcaaaaagtcactatgatgaggcatacaaatggtgcatcgaggcaatgaaagaaattacagcaggcttaccagtgaaagttgtggtggatgtcttaagacaagcttctaaggcttgtgtagtaaaacgtgaatttaagaaggcagaacagttaattaaacatgcagtgtatttggcacgggatcattttggatccaaacacccaaaatattctgatacactgctagattatgggttctacttactcaatgtagataatatctgtcagtctgttgcaatttatcaggcagcccttgacattagacagtcagtgtttggtggcaaaaatatccacgtagcaacagctcatgaagatttggcctactcttcttatgtccaccagtatagctctgggaaatttgacaatgcactatttcatgcagaaagagctattggtatcattacccacatcctacctgaagatcatcttcttttggcttcttcaaagagggtgaaagcacttattttagaggagattgcaattgattgtcataataaggaaactgaacagaggctgcttcaagaagctcatgatttgcacctgtcttcactccaactagctaaaaaagcttttggggaatttaatgtacagactgcaaaacactatggaaaccttggaagactttatcagtcaatgagaaaatttaaggaagctgaagaaatgcacatcaaagcaattcagattaaagaacaacttcttggtcaagaagattatgaagtagccctttcagtgggacatctggcttctttatataattatgacatgaatcagtatgaaaatgctgagaaactttatttgcgatctatagcaattgggaagaaactttttggtgagggctacagtggactagaatatgattatcgaggtctcattaaactttacaactccattggaaattacgagaaagtgtttgaatatcacaatgttctgtctaactggaaccggttgcgagatcggcaatattcagtgacagatgctcttgaagatgtcagcaccagcccccagtccactgaagaagtggtgcagtccttcctgatttctcagaatgtcgagggaccgagctgctgagggaggacctcagttaaccaattaccttttcccggattccagggaattcatactgtgaaatcaaaaccatgttgttttggggggctggaatttgcattgaaacactggtccagtccattgaagaccctattttgggtgatccctatcttgcagaatgtctgtaggaataagcatatattcagttatattcagcatgtaccgcatgtgtaagtagtctggcccacattttcaacctagtagaacaaacaacaggaaatcttttttttgttgtttttaaaaaattcattttgcagaaagcctgaaagaaaaaaaatacccctaaataaaactatttaagagttt

SEQ ID NO: 4716 - protein, 585 aa, Homosapiens; identical to SEQ ID NO: 721

SEQ ID NO: 4717 - DNA, 3555 bp, Homosapiens
gaaacttcatggagaagtactgccggctcttggacttttcttccagaagtggcacatttcacttctcatattttaattgtggaaagaaatcacatggccacacttgtctttgtttgtttgtttgtctgtttgtttgagacagcgtctcactccatcaccaaggtctggagtgcagtggcatgatcacggctcactgcagcctccacctcagctctaccaagtagctggaactacaggtgcacatcaccacgcccagctaatttttttgatttttgatagagacaaagtctcactatgttataacccaggctggtttcaaacttctgagcttggcgatcctcccatctcagcctcccaaagtgctgggattacaggcatgagccactgtgcccggccacaagatttatatttctatatgcaaattatatttagagtttttagaaaatgcctagctataatcatggatcaaaataacaactgagagctgtgcacagtggcacatccctgtagccaggagttcaagtccagcctgggcaacataaaaccttgtctcttaagaaaagaattaataggaaaacttgaaattctatgcatttaaaaattattaaatgaaaataacaaaagattgttgtcagccactccaggactgggatataaggaccttagaaaatgctgtggtaaattctgcccccattgttttattttaataatagcggaaaatgggggtataccagctttgtaaggtaactttgttttgacagatttgtactaggactgactgtcaaaattttaaactttataattttcccagcttatatacagatctgtttataatagaatttttaagtacttggaaggaaagaaattacaaatagaacctttgtatttatgtttggagggttttttttcttattaactcttatagccagaatatataaactacacgtattttagcacactaatgaactgtttgagagttaaccatttttcactttatctttaggcttgtgtagtaaaacgtgaatttaagaaggcagaacagttaattaaacatgcagtgtatttggcacggtaggtgattattattaaaaatatccttttaaattgtctctatactttatatcctaataattttgtgtctttttatagggatcattttggatccaaacacccaaaatattctgatacactgctagattatgggttctacttactcaatgtagataatatctgtcagtctgttgcaatttatcaggtatgttaatggttaccctttttttctttcaacctgtattgacttgctgacctgtatttgtttgtggtgtataaaccactctaaaaatgactttttgacaactaccccgcccaccaatataggttgcatcattattttattaagtattacctagaaggtgtaaaagttaatgctttgggaattaaagaaaatcattcaggaaaggaattattgggttgtgagctcatatgtgggagtagttttccattttttatttacccatgtaatggcttgtctttgttgttgatttagcaaatgtcactaaaactgcctttgtagtaacaaagatggctgataattattttaggtctttcttactcattctcaggtaaatgatgtattatgccattgctgtagacaaggcatacttgacttcaaggttcactttttttttttgagacacagttttgatctgtcgcccaggctggagtgcaatggcgcaatctcagctcactgcaacctctgcctcccaagttcaagcaattctcgtgcctcggcctcctgagtatctgggattacaggcccgtgccacaatgcccggctaatttttgtatttttagtagagaggcggtttcagcatgttgcccaggctagtcttgaactactgacctcaggtgatccacccacctttgcctcccagaagtactaggattacaggtgtgagccaccgcgcctggcctaaggttcacttttgaagaaggaaacagagcaaaacattcccaatgtcttgattctcaagacataggaatgattattattattattattattaagccgtggccttttaagtcaaactcgtatcttcagaaattcaggacttctaggtgactttcatgttctgtaatttaaatacagcaggactttctgggcttcaaaattttatggtgttaggcatatagatatatatttaaattactaggatgtttaatttaactaggtggtattttctacagtattgacaaatatttttatgattctttcaggcagcccttgacattagacagtcagtgtttggtggcaaaaatatccacgtagcaacagctcatgaagatttggcctactcttcttatgtccaccagtatagctctgggaaatttgacaatgcactgtaagttccacattccttttctctgaaggaggaaatactgtttttgttttattttgttttttcccattagggaactattattacattaataatagtacttgatatactttatggattgaacttgtcttcctggagctttatcagaatgcctaaaatgttcttgaagtcatttaaaatcataccagttttcaggtgcagaggctcccgcctgtaatcccagcactttgggaggctgaggtggaaagattgcttgagcccaagagtttgagaccctgtctactcaaaaaatttttaaaactagatggacgttttggtgcatgcctgtggtcccagcttctctggaggctgaggcaggagaatcgcttgagcccaagaggtcaaggatgcagcgaagcatattcacaccactgcattccagcctgggcaacagagtgagaccctgtttccaaaaataaataaagtcatactaatttataggttattcatttagcctttatgtgatttactattgagacttgtatattttcatgcagaatataacttatgttttgagtatttccttcaataatttttgagtaatacagtagcaaacttaataacctaaaaacttcttggtgataacacatagaaatactgaataacaattgtctttttaaatatataactgagcttgcaagagtgagggggaaatcccccaagggccaataatggacactaaaatttaaaggattaagtatggcctgtggtataactgctctggggtgatgggaaagtttacagatttctgtaaccttggtttaagaaacagcctataggaggctgggagttagaactgaaaccctcacatgaagcaaagtcaagactgcaacccggccgggcgtggtggctcacgcctgtaatctcagcactttggcgggccaaggcaggtggatcacctgaggtcaggagttcaagacaagcctggccaagacgatgaaatgccatctctactaaaaatacaaaaattagccgggcatggtggtgggcacttgtaatcccagctattcgggaggctgaggcagacaattgcttgaacccaagaggtggaggttgcagtgagccgagatcacgccactgctctccagcctaggcaacagagtgagactctgtctcc

SEQ ID NO: 4718 - protein, 45 aa, Homosapiens
MPVVPASLEAEAGESLEPKRSRMQRSIFTPLHSSLGNRVRPCFQK

SEQ ID NO: 4719 - DNA, 264 bp, Homosapiens
agtagcattaagacatgcatgcattcacttaaacagtcatttgttaaatatattattccatcacactctacattctatgaggtgactacagtcaccactatattcccaatacctagcacagtgcctagtacaagatatacattcaatattttcttttttaaaaaaaacattttccccccgggcgcggtggctcgcgcctgtaatgccagcatttggatggaactcagaacctcagaagacacaaaaaaattcaagacacagtct

SEQ ID NO: 4720 - protein, 81 aa, Homosapiens
MHSLKQSFVKYIIPSHSTFYEVTTVTTIFPIPSTVPSTRYTFNIFFFKKNIFPPGAVARACNASIWMELRTSEDTKKFKTQ

SEQ ID NO: 4721 - DNA, 646 bp, Homosapiens
tttaacccaaaacaaagggccttgatcccctgtatggcctgcattccatgggatgagatggggattcctatgttcctcataggatctctataaaagtagagatcaggcctgagctcccatgagtgttcacaggagatggtgccatgcatgcacagaagttcccaaaccagcatccaccatatcaaacccggaatctgtgtgagaaggcatgccttcatacttcaggcagtttacaagacagccttagctttcgttttctgcttgctacagagccttaaggtcagccagaagcgagtgactggaaacttcttcattcccatctctctcctggcatctcaccattgtcacaatgactgccagttcccaggcctcaacctggaatctcagaagcaactctttttgtacagctgaggggcacctggaacatagaagttaagaagagatctggctgggatcaagaaacctcttttcactgcacctgaggctcagttgtgccctctgctgacactaggtcaggaggctggacagctccaactggaaacttggagcagggttttaagacctctgctttctcactttgaagaattggaatagaaaaatagaaaatacaaaaatgatgagtccttggaattgataggacacgtag

SEQ ID NO: 4722 - protein, 91 aa, Homosapiens
MVPCMHRSSQTSIHHIKPGICVRRHAFILQAVYKTALAFVFCLLQSLKVSQKRVTGNFFIPISLLASHHCHNDCQFPGLNLESQKQLFLYS

SEQ ID NO: 4723 - DNA, 2443 bp, Homosapiens
ggcggtggggggaagcgcagtgcgcaggcgcaactgcctggctctgctcgctccggcgctccggcccagctctcgcggacaagtccagacatcgcgcgcccccccttctccgggtccgccccctcccccttctcggcgtcgtcgaagataaacaatagttggccggcgagcgcctagtgtgtctcccgccgccggattcggcgggctgcgtgggaccggcgggatcccggccagccggccatggcggggctgtactcgctgggagtgagcgtcttctccgaccagggcgggaggaagtacatggaggacgttactcaaatcgttgtggagcccgaaccgacggctgaagaaaagccctcgccgcggcggtcgctgtctcagccgttgcctccgcggccgtcgccggccgcccttcccggcggcgaagtctcggggaaaggcccagcggtggcagcccgagaggctcgcgaccctctcccggacgccggggcctcgccggcacctagccgctgctgccgccgccgttcctccgtggcctttttcgccgtgtgcgacgggcacggcgggcgggaggcggcacagtttgcccgggagcacttgtggggtttcatcaagaagcagaagggtttcacctcgtccgagccggctaaggtttgcgctgccatccgcaaaggctttctcgcttgtcaccttgccatgtggaagaaactggcggaatggccaaagactatgacgggtcttcctagcacatcagggacaactgccagtgtggtcatcattcggggcatgaagatgtatgtagctcacgtaggtgactcaggggtggttcttggaattcaggatgacccgaaggatgactttgtcagagctgtggaggtgacacaggaccataagccagaacttcccaaggaaagagaacgaatcgaaggacttggtgggagtgtaatgaacaagtctggggtgaatcgtgtagtttggaaacgacctcgactcactcacaatggacctgttagaaggagcacagttattgaccagattccttttctggcagtagcaagagcacttggtgatttgtggagctatgatttcttcagtggtgaatttgtggtgtcacctgaaccagacacaagtgtccacactcttgaccctcagaagcacaagtatattatattggggagtgatggactttggaatatgattccaccacaagatgccatctcaatgtgccaggaccaagaggagaaaaaatacctgatgggtgagcatggacaatcttgtgccaaaatgcttgtgaatcgagcattgggccgctggaggcagcgtatgctccgagcagataacactagtgccatagtaatctgcatctctccagaagtggacaatcagggaaactttaccaatgaagatgagttatacctgaacctgactgacagcccttcctataatagtcaagaaacctgtgtgatgactccttccccatgttctacaccaccagtcaagtcactggaggaggatccatggccaagggtgaattctaaggaccatatacctgccctggttcgtagcaatgccttctcagagaattttttagaggtttcagctgagatagctcgagagaatgtccaaggtgtagtcataccctcaaaagatccagaaccacttgaagaaaattgcgctaaagccctgactttaaggatacatgattctttgaataatagccttccaattggccttgtgcctactaattcaacaaacactgtcatggaccaaaaaaatttgaagatgtcaactcctggccaaatgaaagcccaagaaattgaaagaacccctccaacaaactttaaaaggacattagaagagtccaattctggccccctgatgaagaagcatagacgaaatggcttaagtcgaagtagtggtgctcagcctgcaagtctccccacaacctcacagcgaaagaactctgttaaactcaccatgcgacgcagacttaggggccagaagaaaattggaaatcctttacttcatcaacacaggaaaactgtttgtgtttgctgaaatgcatctgggaaatgaggtttttccaaacttaggatataagagggctttttaaatttggtgccgatgttgaactttttttaaggggagaaaattaaaagaaatatacagtttgactttttggaattcagcagttttatcctggccttgtacttgcttgtattgtaaatgtggattttgtagatgttagggtataagttgctgtaaaatttgtgtaaatttgtatccacacaaattcagtctctgaatacacagtattcagagtctctgatacacagtaattgtgacaatagggctaaatgtttaaagaaatcaaaagaatctattagattttagaaaaacatttaaactttttaaaatacttattaaaaaatttgtataagcc

SEQ ID NO: 4724 - protein, 605 aa, Homosapiens; identical to SEQ ID NO: 723

SEQ ID NO: 4725 - DNA, 2495 bp, Homosapiens
ggcggtggggggaagcgcagtgcgcaggcgcaactgcctggctctgctcgctccggcgctccggcccagctctcgcggacaagtccagacatcgcgcgcccccccttctccgggtccgccccctcccccttctcggcgtcgtcgaagataaacaatagttggccggcgagcgcctagtgtgtctcccgccgccggattcggcgggctgcgtgggaccggcgggatcccggccagccggccatggcggggctgtactcgctgggagtgagcgtcttctccgaccagggcgggaggaagtacatggaggacgttactcaaatcgttgtggagcccgaaccgacggctgaagaaaagccctcgccgcggcggtcgctgtctcagccgttgcctccgcggccgtcgccggccgcccttcccggcggcgaagtctcggggaaaggcccagcggtggcagcccgagaggctcgcgaccctctcccggacgccggggcctcgccggcacctagccgctgctgccgccgccgttcctccgtggcctttttcgccgtgtgcgacgggcacggcgggcgggaggcggcacagtttgcccgggagcacttgtggggtttcatcaagaagcagaagggtttcacctcgtccgagccggctaaggtttgcgctgccatccgcaaaggctttctcgcttgtcaccttgccatgtggaagaaactggcggaatggccaaagactatgacgggtcttcctagcacatcagggacaactgccagtgtggtcatcattcggggcatgaagatgtatgtagctcacgtaggtgactcaggggtggttcttggaattcaggatgacccgaaggatgactttgtcagagctgtggaggtgacacaggaccataagccagaacttcccaaggaaagagaacgaatcgaaggacttggtgggagtgtaatgaacaagtctggggtgaatcgtgtagtttggaaacgacctcgactcactcacaatggacctgttagaaggagcacagttattgaccagattccttttctggcagtagcaagagcacttggtgatttgtggagctatgatttcttcagtggtgaatttgtggtgtcacctgaaccagacacaagtgtccacactcttgaccctcagaagcacaagtatattatattggggagtgatggactttggaatatgattccaccacaagatgccatctcaatgtgccaggaccaagaggagaaaaaatacctgatgggtgagcatggacaatcttgtgccaaaatgcttgtgaatcgagcattgggccgctggaggcagcgtatgctccgagcagataacactagtgccatagtaatctgcatctctccagaagtggacaatcagggaaactttaccaatgaagatgagttatacctgaacctgactgacagcccttcctataatagtcaagaaacctgtgtgatgactccttccccatgttctacaccaccagtcaagtcactggaggaggatccatggccaagggtgaattctaaggaccatatacctgccctggttcgtagcaatgccttctcagagaattttttagaggtttcagctgagatagctcgagagaatgtccaaggtgtagtcataccctcaaaagatccagaaccacttgaagaaaattgcgctaaagccctgactttaaggatacatgattctttgaataatagccttccaattggccttgtgcctactaattcaacaaacactgtcatggaccaaaaaaatttgaagatgtcaactcctggccaaatgaaagcccaagaaattgaaagaacccctccaacaaactttaaaaggacattagaagagtccaattctggccccctgatgaagaagcatagacgaaatggcttaagtcgaagtagtggtgctcagcctgcaagtctccccacaacctcacagcgaaagaactctgttaaactcaccatgcgacgcagacttaggggccagaagaaaattggaaatcctttacttcatcaacacaggaaaactgtttgtgtttgctgaaatgcatctgggaaatgaggtttttccaaacttaggatataagagggctttttaaatttggtgccgatgttgaactttttttaaggggagaaaattaaaagaaatatacagtttgactttttggaattcagcagttttatcctggccttgtacttgcttgtattgtaaatgtggattttgtagatgttagggtataagttgctgtaaaatttgtgtaaatttgtatccacacaaattcagtctctgaatacacagtattcagagtctctgatacacagtaattgtgacaatagggctaaatgtttaaagaaatcaaaagaatctattagattttagaaaaacatttaaactttttaaaatacttattaaaaaatttgtataagccacttgtcttgaaaactgtgcaactttttaaagtaaattattaagcagactgg

SEQ ID NO: 4726 - protein, 605 aa, Homosapiens; identical to SEQ ID NO: 723

SEQ ID NO: 4727 - DNA, 3103 bp, Homosapiens
ggcggtggggggaagcgcagtgcgcaggcgcaactgcctggctctgctcgctccggcgctccggcccagctctcgcggacaagtccagacatcgcgcgcccccccttctccgggtccgccccctcccccttctcggcgtcgtcgaagataaacaatagttggccggcgagcgcctagtgtgtctcccgccgccggattcggcgggctgcgtgggaccggcgggatcccggccagccggccatggcggggctgtactcgctgggagtgagcgtcttctccgaccagggcgggaggaagtacatggaggacgttactcaaatcgttgtggagcccgaaccgacggctgaagaaaagccctcgccgcggcggtcgctgtctcagccgttgcctccgcggccgtcgccggccgcccttcccggcggcgaagtctcggggaaaggcccagcggtggcagcccgagaggctcgcgaccctctcccggacgccggggcctcgccggcacctagccgctgctgccgccgccgttcctccgtggcctttttcgccgtgtgcgacgggcacggcgggcgggaggcggcacagtttgcccgggagcacttgtggggtttcatcaagaagcagaagggtttcacctcgtccgagccggctaaggtttgcgctgccatccgcaaaggctttctcgcttgtcaccttgccatgtggaagaaactggcggaatggccaaagactatgacgggtcttcctagcacatcagggacaactgccagtgtggtcatcattcggggcatgaagatgtatgtagctcacgtaggtgactcaggggtggttcttggaattcaggatgacccgaaggatgactttgtcagagctgtggaggtgacacaggaccataagccagaacttcccaaggaaagagaacgaatcgaaggacttggtgggagtgtaatgaacaagtctggggtgaatcgtgtagtttggaaacgacctcgactcactcacaatggacctgttagaaggagcacagttattgaccagattccttttctggcagtagcaagagcacttggtgatttgtggagctatgatttcttcagtggtgaatttgtggtgtcacctgaaccagacacaagtgtccacactcttgaccctcagaagcacaagtatattatattggggagtgatggactttggaatatgattccaccacaagatgccatctcaatgtgccaggaccaagaggagaaaaaatacctgatgggtgagcatggacaatcttgtgccaaaatgcttgtgaatcgagcattgggccgctggaggcagcgtatgctccgagcagataacactagtgccatagtaatctgcatctctccagaagtggacaatcagggaaactttaccaatgaagatgagttatacctgaacctgactgacagcccttcctataatagtcaagaaacctgtgtgatgactccttccccatgttctacaccaccagtcaaggattttggatttgaactcgattcaagaaagtgatgtaacttattatcagagagccatctttacatcaatactaatctgaatgccagccatgtgtacagcactaataaaaagtcactggaggaggatccatggccaagggtgaattctaaggaccatatacctgccctggttcgtagcaatgccttctcagagaattttttagaggtttcagctgagatagctcgagagaatgtccaaggtgtagtcataccctcaaaagatccagaaccacttgaagaaaattgcgctaaagccctgactttaaggatacatgattctttgaataatagccttccaattggccttgtgcctactaattcaacaaacactgtcatggaccaaaaaaatttgaagatgtcaactcctggccaaatgaaagcccaagaaattgaaagaacccctccaacaaactttaaaaggacattagaagagtccaattctggccccctgatgaagaagcatagacgaaatggcttaagtcgaagtagtggtgctcagcctgcaagtctccccacaacctcacagcgaaagaactctgttaaactcaccatgcgacgcagacttaggggccagaagaaaattggaaatcctttacttcatcaacacaggaaaactgtttgtgtttgctgaaatgcatctgggaaatgaggtttttccaaacttaggatataagagggctttttaaatttggtgccgatgttgaactttttttaaggggagaaaattaaaagaaatatacagtttgactttttggaattcagcagttttatcctggccttgtacttgcttgtattgtaaatgtggattttgtagatgttagggtataagttgctgtaaaatttgtgtaaatttgtatccacacaaattcagtctctgaatacacagtattcagagtctctgatacacagtaattgtgacaatagggctaaatgtttaaagaaatcaaaagaatctattagattttagaaaaacatttaaactttttaaaatacttattaaaaaatttgtataagccacttgtcttgaaaactgtgcaactttttaaagtaaattattaagcagactggaaaagtgatgtattttcatagtgacctgtgtttcacttaatgtttcttagagccaagtgtcttttaaacattattttttatttctgatttcataattcagaactaaatttttcatagaagtgttgagccatgctacagttagtcttgtcccaattaaaatactatgcagtatctcttacatcagtagcatttttctaaaaccttagtcatcagatatgcttactaaatcttcagcatagaaggaagtgtgtttgcctaaaacaatctaaaacaattcccttctttttcatcccagaccaatggcattattaggtcttaaagtagttactcccttctcgtgtttgcttaaaatatgtgaagttttccttgctatttcaataacagatggtgctgctaattcccaacatttcttaaattattttatatcatacagttttcattgattatatgggtatatattcatctaataaatcagtgaactgttcctcatgttgctg

SEQ ID NO: 4728 - protein, 430 aa, Homosapiens
MAGLYSLGVSVFSDQGGRKYMEDVTQIVVEPEPTAEEKPSPRRSLSQPLPPRPSPAALPGGEVSGKGPAVAAREARDPLPDAGASPAPSRCCRRRSSVAFFAVCDGHGGREAAQFAREHLWGFIKKQKGFTSSEPAKVCAAIRKGFLACHLAMWKKLAEWPKTMTGLPSTSGTTASVVIIRGMKMYVAHVGDSGVVLGIQDDPKDDFVRAVEVTQDHKPELPKERERIEGLGGSVMNKSGVNRVVWKRPRLTHNGPVRRSTVIDQIPFLAVARALGDLWSYDFFSGEFVVSPEPDTSVHTLDPQKHKYIILGSDGLWNMIPPQDAISMCQDQEEKKYLMGEHGQSCAKMLVNRALGRWRQRMLRADNTSAIVICISPEVDNQGNFTNEDELYLNLTDSPSYNSQETCVMTPSPCSTPPVKDFGFELDSRK

SEQ ID NO: 4729 - DNA, 2992 bp, Homosapiens
ggcggtggggggaagcgcagtgcgcaggcgcaactgcctggctctgctcgctccggcgctccggcccagctctcgcggacaagtccagacatcgcgcgcccccccttctccgggtccgccccctcccccttctcggcgtcgtcgaagataaacaatagttggccggcgagcgcctagtgtgtctcccgccgccggattcggcgggctgcgtgggaccggcgggatcccggccagccggccatggcggggctgtactcgctgggagtgagcgtcttctccgaccagggcgggaggaagtacatggaggacgttactcaaatcgttgtggagcccgaaccgacggctgaagaaaagccctcgccgcggcggtcgctgtctcagccgttgcctccgcggccgtcgccggccgcccttcccggcggcgaagtctcggggaaaggcccagcggtggcagcccgagaggctcgcgaccctctcccggacgccggggcctcgccggcacctagccgctgctgccgccgccgttcctccgtggcctttttcgccgtgtgcgacgggcacggcgggcgggaggcggcacagtttgcccgggagcacttgtggggtttcatcaagaagcagaagggtttcacctcgtccgagccggctaaggtttgcgctgccatccgcaaaggctttctcgcttgtcaccttgccatgtggaagaaactggcggaatggccaaagactatgacgggtcttcctagcacatcagggacaactgccagtgtggtcatcattcggggcatgaagatgtatgtagctcacgtaggtgactcaggggtggttcttggaattcaggatgacccgaaggatgactttgtcagagctgtggaggtgacacaggaccataagccagaacttcccaaggaaagagaacgaatcgaaggacttggtgggagtgtaatgaacaagtctggggtgaatcgtgtagtttggaaacgacctcgactcactcacaatggacctgttagaaggagcacagttattgaccagattccttttctggcagtagcaagagcacttggtgatttgtggagctatgatttcttcagtggtgaatttgtggtgtcacctgaaccagacacaagtgtccacactcttgaccctcagaagcacaagtatattatattggggagtgatggactttggaatatgattccaccacaagatgccatctcaatgtgccaggaccaagaggagaaaaaatacctgatgggtgagcatggacaatcttgtgccaaaatgcttgtgaatcgagcattgggccgctggaggcagcgtatgctccgagcagataacactagtgccatagtaatctgcatctctccagaagtggacaatcagggaaactttaccaatgaagatgagttatacctgaacctgactgacagcccttcctataatagtcaagaaacctgtgtgatgactccttccccatgttctacaccaccagtcaagtcactggaggaggatccatggccaagggtgaattctaaggaccatatacctgccctggttcgtagcaatgccttctcagagaattttttagaggtttcagctgagatagctcgagagaatgtccaaggtgtagtcataccctcaaaagatccagaaccacttgaagaaaattgcgctaaagccctgactttaaggatacatgattctttgaataatagccttccaattggccttgtgcctactaattcaacaaacactgtcatggaccaaaaaaatttgaagatgtcaactcctggccaaatgaaagcccaagaaattgaaagaacccctccaacaaactttaaaaggacattagaagagtccaattctggccccctgatgaagaagcatagacgaaatggcttaagtcgaagtagtggtgctcagcctgcaagtctccccacaacctcacagcgaaagaactctgttaaactcaccatgcgacgcagacttaggggccagaagaaaattggaaatcctttacttcatcaacacaggaaaactgtttgtgtttgctgaaatgcatctgggaaatgaggtttttccaaacttaggatataagagggctttttaaatttggtgccgatgttgaactttttttaaggggagaaaattaaaagaaatatacagtttgactttttggaattcagcagttttatcctggccttgtacttgcttgtattgtaaatgtggattttgtagatgttagggtataagttgctgtaaaatttgtgtaaatttgtatccacacaaattcagtctctgaatacacagtattcagagtctctgatacacagtaattgtgacaatagggctaaatgtttaaagaaatcaaaagaatctattagattttagaaaaacatttaaactttttaaaatacttattaaaaaatttgtataagccacttgtcttgaaaactgtgcaactttttaaagtaaattattaagcagactggaaaagtgatgtattttcatagtgacctgtgtttcacttaatgtttcttagagccaagtgtcttttaaacattattttttatttctgatttcataattcagaactaaatttttcatagaagtgttgagccatgctacagttagtcttgtcccaattaaaatactatgcagtatctcttacatcagtagcatttttctaaaaccttagtcatcagatatgcttactaaatcttcagcatagaaggaagtgtgtttgcctaaaacaatctaaaacaattcccttctttttcatcccagaccaatggcattattaggtcttaaagtagttactcccttctcgtgtttgcttaaaatatgtgaagttttccttgctatttcaataacagatggtgctgctaattcccaacatttcttaaattattttatatcatacagttttcattgattatatgggtatatattcatctaataaatcagtgaactgttcctcatgttgctg

SEQ ID NO: 4730 - protein, 605 aa, Homosapiens; identical to SEQ ID NO: 723

SEQ ID NO: 4731 - DNA, 3343 bp, Homosapiens
ggcggtggggggaagcgcagtgcgcaggcgcaactgcctggctctgctcgctccggcgctccggcccagctctcgcggacaagtccagacatcgcgcgcccccccttctccgggtccgccccctcccccttctcggcgtcgtcgaagataaacaatagttggccggcgagcgcctagtgtgtctcccgccgccggattcggcgggctgcgtgggaccggcgggatcccggccagccggccatggcggggctgtactcgctgggagtgagcgtcttctccgaccagggcgggaggaagtacatggaggacgttactcaaatcgttgtggagcccgaaccgacggctgaagaaaagccctcgccgcggcggtcgctgtctcagccgttgcctccgcggccgtcgccggccgcccttcccggcggcgaagtctcggggaaaggcccagcggtggcagcccgagaggctcgcgaccctctcccggacgccggggcctcgccggcacctagccgctgctgccgccgccgttcctccgtggcctttttcgccgtgtgcgacgggcacggcgggcgggaggcggcacagtttgcccgggagcacttgtggggtttcatcaagaagcagaagggtttcacctcgtccgagccggctaaggtttgcgctgccatccgcaaaggctttctcgcttgtcaccttgccatgtggaagaaactggcggaatggccaaagactatgacgggtcttcctagcacatcagggacaactgccagtgtggtcatcattcggggcatgaagatgtatgtagctcacgtaggtgactcaggggtggttcttggaattcaggatgacccgaaggatgactttgtcagagctgtggaggtgacacaggaccataagccagaacttcccaaggaaagagaacgaatcgaaggacttggtgggagtgtaatgaacaagtctggggtgaatcgtgtagtttggaaacgacctcgactcactcacaatggacctgttagaaggagcacagttattgaccagattccttttctggcagtagcaagagcacttggtgatttgtggagctatgatttcttcagtggtgaatttgtggtgtcacctgaaccagacacaagtgtccacactcttgaccctcagaagcacaagtatattatattggggagtgatggactttggaatatgattccaccacaagatgccatctcaatgtgccaggaccaagaggagaaaaaatacctgatgggtgagcatggacaatcttgtgccaaaatgcttgtgaatcgagcattgggccgctggaggcagcgtatgctccgagcagataacactagtgccatagtaatctgcatctctccagaagtggacaatcagggaaactttaccaatgaagatgagttatacctgaacctgactgacagcccttcctataatagtcaagaaacctgtgtgatgactccttccccatgttctacaccaccagtcaagtcactggaggaggatccatggccaagggtgaattctaaggaccatatacctgccctggttcgtagcaatgccttctcagagaattttttagaggtttcagctgagatagctcgagagaatgtccaaggtgtagtcataccctcaaaagatccagaaccacttgaagaaaattgcgctaaagccctgactttaaggatacatgattctttgaataatagccttccaattggccttgtgcctactaattcaacaaacactgtcatggaccaaaaaaatttgaagatgtcaactcctggccaaatgaaagcccaagaaattgaaagaacccctccaacaaactttaaaaggacattagaagagtccaattctggccccctgatgaagaagcatagacgaaatggcttaagtcgaagtagtggtgctcagcctgcaagtctccccacaacctcacagcgaaagaactctgttaaactcaccatgcgacgcagacttaggggccagaagaaaattggaaatcctttacttcatcaacacaggaaaactgtttgtgtttgctgaaatgcatctgggaaatgaggtttttccaaacttaggatataagagggctttttaaatttggtgccgatgttgaactttttttaaggggagaaaattaaaagaaatatacagtttgactttttggaattcagcagttttatcctggccttgtacttgcttgtattgtaaatgtggattttgtagatgttagggtataagttgctgtaaaatttgtgtaaatttgtatccacacaaattcagtctctgaatacacagtattcagagtctctgatacacagtaattgtgacaatagggctaaatgtttaaagaaatcaaaagaatctattagattttagaaaaacatttaaactttttaaaatacttattaaaaaatttgtataagccacttgtcttgaaaactgtgcaactttttaaagtaaattattaagcagactggaaaagtgatgtattttcatagtgacctgtgtttcacttaatgtttcttagagccaagtgtcttttaaacattattttttatttctgatttcataattcagaactaaatttttcatagaagtgttgagccatgctacagttagtcttgtcccaattaaaatactatgcagtatctcttacatcagtagcatttttctaaaaccttagtcatcagatatgcttactaaatcttcagcatagaaggaagtgtgtttgcctaaaacaatctaaaacaattcccttctttttcatcccagaccaatggcattattaggtcttaaagtagttactcccttctcgtgtttgcttaaaatatgtgaagttttccttgctatttcaataacagatggtgctgctaattcccaacatttcttaaattattttatatcatacagttttcattgattatatgggtatatattcatctaataaatcagtgaactgttcctcatgttgctgaatttgtagttgttggtttattttaatggtatgtacaagttgagtatcccttatccaaaatgcttgggaccagaagtgtttcagattttttaaaattttggaatatttgctttatactgagcttttgagtgttcccaatctgaaattcaaaatgctctaatgagcatttcctttgagcatcatgcctgctctgaaaaagtttctgattctggagcattttggattttggattttcagattagggatgcttaacctggattaacattctgttgtgccatgatcatgctttacagtgagtgtattttatttatttattattttgtttgtttgtttgagatggagtctcactct

SEQ ID NO: 4732 - protein, 605 aa, Homosapiens; identical to SEQ ID NO: 723

SEQ ID NO: 4733 - DNA, 3539 bp, Homosapiens
gtggctgccgtcaatcactcggggagactccaaacagtgagcctagagctggagactagcgttaaccggcggggcggccggttttatgaatgaagctatggctacagattccccaagaagacccagtcgttgtactggtggagttgtggttcgcccccaggctgtcacagagcagtcctacatggaaagtgttgtgacttttctgcaggatgttgtgccacaggcttacagtggaacacctctaacagaagaaaaggagaaaatagtctgggtcagatttgaaaatgcagatttaaatgatacatcaagaaatctggaatttcatgaaatacatagtactgggaatgaaccgcctttgttgattatgattggctacagtgatggaatgcaggtctggagcatccctatcagtggtgaagcacaagagctcttctctgttcgacatggcccaattcgagcggctagaatcttgcctgctccacagtttggtgctcaaaaatgtgataactttgctgaaaaaagacccctccttggtgtttgtaagagcattggatcttctggcacaagcccaccgtactgttgtgtggatctgtattcacttcgtactggggagatggtcaagtccattcaatttaagacacctatttatgatctccattgcaataaacggatccttgtcgtagtcttgcaggagaaaattgctgcctttgatagctgtactttcacgaagaaattctttgttacaagctgctatccatgtccagggccaaacatgaatcctattgctcttgggagccgctggcttgcttatgcagaaaacaagttgattcgatgtcatcagtcccgtggtggagcctgtggagacaacattcagtcttatactgccacagtcattagtgctgctaaaacattgaaaagtggcctgacaatggtagggaaagtggtgactcagctgacaggcacactgccttcaggtgtgacagaagatgatgttgccatccacagtaattcacggcggagtcctttggtcccaggcatcatcacagttattgacaccgaaaccgttggagagggccaggtgcttgtgagtgaggattctgacagtgatggcattgtggcccacttccctgcccatgagaagccagtgtgctgcatggcttttaatacaagtggaatgcttctagtcacaacagacacccttggccatgactttcatgtcttccaaattctgactcatccttggtcctcatcacaatgtgctgtccaccatctgtatactcttcacaggggagaaactgaagccaaagtacaggacatctgcttcagccatgactgtcgctgggttgtggtcagtactctccggggtacttcccacgttttccccatcaacccttatggtggccagccttgtgttcgtacacatatgtcaccacgagtagtgaatcgcatgagccgtttccagaaaagtgctggactggaagagattgaacaagaactgacgtctaagcaaggaggtcgctgtagccctgttccaggtctatcaagcagcccttctgggtcacccttgcatgggaaactgaacagccaagactcctataacaattttaccaacaacaaccctggcaaccctcggctctctcctcttcccagcttgatggtagtgatgcctcttgcacaaatcaagcagccaatgacattggggaccatcaccaaacgaaccggcaaagttaaacctcctccacaaatttcacccagcaaatcgatgggcggagaattttgtgtggctgctatcttcggaacatccaggtcatggtttgcaaataatgcaggtctgaaaagagaaaaagatcagtccaaacaagttgtagttgagtccctgtacattatcagttgctatggcaccttagtggaacacatgatggagccgcgacccctcagcactgcacccaagattagtgacgacacaccactggaaatgatgacatcgcctcgagccagctggactctggttagaacccctcaatggaatgaattgcagccaccgtttaatgcaaaccaccctctgctcctcgctgcagatgcagtacagtattatcagttcctgcttgctggcctggttccccctggaagtcctgggcccattactcgacatgggtcttacgacagtttagcttctgaccatagtggacaggaagatgaagaatggctttcccaggttgaaattgtaacacacactggaccccatagacgtctgtggatgggtccacagttccagttcaaaaccatccatccctcaggccaaaccacagttatctcatccagttcatctgtgttgcagtctcatggtccgagtgacacgccacagcctcttttggattttgatacagatgatcttgatctcaacagtctcaggatccagccagtccgctctgaccccgtcagcatgccagggtcatcccgtccagtctctgatcgaaggggagtttccacagtgattgatgctgcctcaggtacctttgacaggagcgtgaccctgctggaggtgtgcgggagctggcctgagggcttcgggctgcggcacatgtcctccatggagcacacggaggagggcctccgggagcgacttgccgacgccatggccgagtcacctagccgggacgtcgtgggatccggaacagaacttcagcgagagggaagcatcgagactctgagtaacagctcaggctccaccagcggcagcataccaagaaactttgatggctaccgatctccgctgcccaccaatgagagccagcccctcagcctcttcccgactggcttcccgtaggtaccagcaacctgcttctgactggccagccccctcccctgctggaggaggggagaagccccgctctggtcctacccttcagtctctgctcttccttcatcaaccaccttccccaagcttagtgacagcagccgcccatcctacctggatggagaagagacccttctccaagcacctcagcgcacttgccctctgccacacctgtcggtggaggctgtggccaggagagactgtagaagctcggtccctgtgtatgtttgcatatgacatcctgcattggatccgcttttgtattttttaaccatacccacggtggggcgggtggggggagcctggaacagtgaccagatctgggggcctgagtggggacagagttgatcgtccacctggccattttgaccctgagtggacagtcacagcctcagctcatgtctggctgtgacacacactgcccccagcttcccttggtcagccccactccagcacggggtgaacggaggcccagagtactagggaaggaggaagggaggacatgcctcttcttcctcctttctttccccatctgttcatgggaagagtttgtctttcttatctttaagcccctttaccctggtcctgtactgatcagtgaaggaaaccgtggttactgaggccctgttgaaaagtgcacgtcttgtccaataaatcacgctgcagttggtgtccatccctg

SEQ ID NO: 4734 - protein, 913 aa, Homosapiens
MNEAMATDSPRRPSRCTGGVVVRPQAVTEQSYMESVVTFLQDVVPQAYSGTPLTEEKEKIVWVRFENADLNDTSRNLEFHEIHSTGNEPPLLIMIGYSDGMQVWSIPISGEAQELFSVRHGPIRAARILPAPQFGAQKCDNFAEKRPLLGVCKSIGSSGTSPPYCCVDLYSLRTGEMVKSIQFKTPIYDLHCNKRILVVVLQEKIAAFDSCTFTKKFFVTSCYPCPGPNMNPIALGSRWLAYAENKLIRCHQSRGGACGDNIQSYTATVISAAKTLKSGLTMVGKVVTQLTGTLPSGVTEDDVAIHSNSRRSPLVPGIITVIDTETVGEGQVLVSEDSDSDGIVAHFPAHEKPVCCMAFNTSGMLLVTTDTLGHDFHVFQILTHPWSSSQCAVHHLYTLHRGETEAKVQDICFSHDCRWVVVSTLRGTSHVFPINPYGGQPCVRTHMSPRVVNRMSRFQKSAGLEEIEQELTSKQGGRCSPVPGLSSSPSGSPLHGKLNSQDSYNNFTNNNPGNPRLSPLPSLMVVMPLAQIKQPMTLGTITKRTGKVKPPPQISPSKSMGGEFCVAAIFGTSRSWFANNAGLKREKDQSKQVVVESLYIISCYGTLVEHMMEPRPLSTAPKISDDTPLEMMTSPRASWTLVRTPQWNELQPPFNANHPLLLAADAVQYYQFLLAGLVPPGSPGPITRHGSYDSLASDHSGQEDEEWLSQVEIVTHTGPHRRLWMGPQFQFKTIHPSGQTTVISSSSSVLQSHGPSDTPQPLLDFDTDDLDLNSLRIQPVRSDPVSMPGSSRPVSDRRGVSTVIDAASGTFDRSVTLLEVCGSWPEGFGLRHMSSMEHTEEGLRERLADAMAESPSRDVVGSGTELQREGSIETLSNSSGSTSGSIPRNFDGYRSPLPTNESQPLSLFPTGFP

SEQ ID NO: 4735 - DNA, 502 bp, Homosapiens
ggagactccaaacagtgagcctagagctggagactagcgttaaccggcggggcggccggttttatgaatgaagctatggctacagattccccaagaagacccagtcgttgtactggtggagttgtggttcgcccccaggctgtcacagagcagtcctacatggaaagtgttgtgacttttctgcaggatgttgtgccacaggcttacagtggaacacctctaacagaagaaaaggagaaaatagtctgggtcagatttgaaaatgcagatttaaatgatacatcaagaaatctggaatttcatgaaatacatagtactgggaatgaaccgcctttgttgattatgattggctacagtgatggaatgcaggtctggagcatccctgctggaatgcagtggtgcgatctcggctcactgcaacctctgcctcccagcttcaagcgattctcctgcctcaacctcccgagtagctgagattacaggcatgtgtcaccacacccag

SEQ ID NO: 4736 - protein, 136 aa, Homosapiens
MNEAMATDSPRRPSRCTGGVVVRPQAVTEQSYMESVVTFLQDVVPQAYSGTPLTEEKEKIVWVRFENADLNDTSRNLEFHEIHSTGNEPPLLIMIGYSDGMQVWSIPAGMQWCDLGSLQPLPPSFKRFSCLNLPSS

SEQ ID NO: 4737 - DNA, 699 bp, Homosapiens
agtgagcctagagctggagactagcgttaaccggcggggcggccggttttatgaatgaagctatggctacagattccccaagaagacccagtcgttgtactggtggagttgtggttcgcccccaggctgtcacagagcagtcctacatggaaagtgttgtgacttttctgcaggatgttgtgccacaggcttccaggaagcagctgataggttgggtctagaagcttgataagagactaaaaaagtacagtaatactcacaccagtataattgccacaaacacctagcacttaatagttaaaggcttacagtggaacacctctaacagaagaaaaggagaaaatagtctgggtcagatttgaaaatgcagatttaaatgatacatcaagaaatctggaatttcatgaaatacatagtactgggaatgaaccgcctttgttgattatgattggctacagtgatggaatgcaggtctggagcatccctatcagtggtgaagcacaagagctcttctctgttcgacatggcccaattcgagcggctagaatcttgcctgctccacagtttggtgctcaaaaatgtgataactttgctgaaaaaagacccctccttggtgtttgtaagagcattggatcttctggcacaagcccaccgtactgttgtgtggatctgtattcacttcgtactggggagatggtc

SEQ ID NO: 4738 - protein, 84 aa, Homosapiens
MIGYSDGMQVWSIPISGEAQELFSVRHGPIRAARILPAPQFGAQKCDNFAEKRPLLGVCKSIGSSGTSPPYCCVDLYSLRTGEM

SEQ ID NO: 4739 - DNA, 569 bp, Homosapiens
ggttttatgaatgaagctatggctacagattccccaagaagacccagtcgttgtactggtggagttgtggttcgcccccaggctgtcacatggagtctcactctgttgcccaggttggagtgcagtggcgccgtctcggctcgctgcagcctccacctcctcctctgtctcccagattcaagcgattctcctgccttggcctcccaagtagctgggattacaggcgagcgccaccaggcctggccaaattttgtatttttagcaaagacggggttttgccatttggccaggctggtcttgaactcctgacctcaggtgatctgcctgtcttggcctcccaaagtgctagaattacatgtgtgagccactgtgcctggccaaagatatgtatacttgaaggctgacatgggaggattgcttgaaaccaggagtttgacaccagcctgaacaacatcctgagaccctcatgccttaaaaaaatacaaaaattagccaggcattgtggcaggcgcctggagccttagctactcgggaggctgagatgggaggatcacctcggcccaggagct

SEQ ID NO: 4740 - protein, 104 aa, Homosapiens
MESHSVAQVGVQWRRLGSLQPPPPPLSPRFKRFSCLGLPSSWDYRRAPPGLAKFCIFSKDGVLPFGQAGLELLTSGDLPVLASQSARITCVSHCAWPKICILEG

SEQ ID NO: 4741 - DNA, 426 bp, Homosapiens
acctgctgcgcgtgagatcccattaccaagtaaagggtcactgaaaggcgataacaagagaaagggctcatgtctgactgccagtgttagcataaaggagagccattttgccaagaacaatacagcctgtggaactcaccagagaagtgccccagtaacaacccgacctgcattatttgcaaaccatgacctggatgttccgaagatagcagccacacaaaattctccgcccatcgatttgctgggtgaaatttgtggaggaggtttaactttgcttaaaaaataaaataagagtaaaaaacaattatcatgatgaaatgatactcctttaggtaatgacagtttttcctttaaattccacccctattcaaatcctccagtatgaacatgcattttgccttaagtaataaatggtgatgtgagact

SEQ ID NO: 4742 - protein, 94 aa, Homosapiens
PAAREIPLPSKGSLKGDNKRKGSCLTASVSIKESHFAKNNTACGTHQRSAPVTTRPALFANHDLDVPKIAATQNSPPIDLLGEICGGGLTLLKK

SEQ ID NO: 4743 - DNA, 504 bp, Homosapiens
acacaggagccagatcctaaaggctttgtatgccacattaggaaagaatttggaatacagcttctgtttggaaaacattttctgtaaccagcccgacacagagacggggttttgcatgttggccaggcttgtctcgaactcccgacctcaagtgatcagcccgccttggcctcccaaagtgctgggattacaggtgtgaggcaccgctcctggccaagaccaatatttcttgacgctgacttcaggagctagaacagaactggttggagcccagctaaactaaaaagcacagccaagggcagcaaagccttctatgtttacagagccaaaaggatgccgaaggccctggaagttgaaaatcaagactggctgctgtaaagcagaccatctcagacgtattctcattcctgacaaatacccacccaccagcaggactgggagacacatggcaaccagagcaagttgtcaaaacttatcattataaaacgtccatcttacaaaagt

SEQ ID NO: 4744 - protein, 56 aa, Homosapiens
MFTEPKGCRRPWKLKIKTGCCKADHLRRILIPDKYPPTSRTGRHMATRASCQNLSL

SEQ ID NO: 4745 - DNA, 537 bp, Homosapiens
gcagtttgatttaaaaaggatctaaggtcaggcacgatggctcacacctgtaatctcagcctgccttgtagctgggactacaggtgtgcaccactacacctggctaattttttaaaatttttgttgagatgaggtcctactgttttgccctgttggtctcaaactcctggcctcaagtgatcctcccactttggcttctcaaggtgctaggattgtaggcatgagccaccatatgtggccattgctttatgcttgagattaaaaatgctgtctcatagtatccagatattctaaattttgtgaaagcatcccaccatttttgagaggcatctaaaccatttttagctagttgtttattaacggtagtggaagagtgtggactatgagtttgtgataacggttttttttaacttcttattttgaaaaattttaaacataggcagaaggagaaagaatagcttaaaaaaaccccactagccatcacccatcttcaataattatcaataaataaccaagcttgtcttatccttatctccc

SEQ ID NO: 4746 - protein, 31 aa, Homosapiens
MAHTCNLSLPCSWDYRCAPLHLANFLKFLLR

SEQ ID NO: 4747 - DNA, 755 bp, Homosapiens
taaataaaaatttaaggacaaaccataatagaaatataatctatagcttccaaacatatagagaaaaaattactatagaaaactgtcagtgcaatacaaggcgggaaagaacagatcatacaaaataagatagtagaaataagccccaatatgtcaataatcaaacttcaatgacaggggatataagactgaatttttggccaggtgcggtggctcacgcctgtaatcccagcactttgggaggccgagatgggtggatcacctgaggtccggagtttgagaccagtctgaccaacatgaagaaactccgtctctactaaaaatacaaaattagctgggtgtcgtggcgcatgcctgtaatcccagctactctggaggctgaggcaggagaatggcttgaacccgggaggtggaggttgctgtgagccgagatcgtgccattgcactccagcctgggcaacaagagcgaaacctgtctcagaaaaagaaaagaaaggaaaggcagggaggggaggggagaggaggggaatctgcagattgtgctattagctcgtattagtggtgtcaaattttaagtcagattctgctgtaagcaacaaatggcttcattctttcctcactattacaaatgcgagacagagaaagaaaacatggccttgtaatgtcacagactttgtcattggttaacccgagttcagagaggcttccaaatcacatcagttaattcccccagcaagtgaaagctgactgaaatt

SEQ ID NO: 4748 - protein, 31 aa, Homosapiens
MRDRERKHGLVMSQTLSLVNPSSERLPNHIS

SEQ ID NO: 4749 - DNA, 1390 bp, Homosapiens
gttttaggagtagcagaggataacatgcaactgttaagatctagatcatgctaaaagtattaaagttggctttcagagattagttttttcctacttaaaattaagaacttaaagattttaatcaagataatcctaaaatgtcttaaggtgcaacttattctggagttgataccagttggaatagtaaagaccaaaggagaaattgtacctttgacaggagcgtgaccctgctggaggtgtgcgggagctggcctgagggcttcgggctgcggcacatgtcctccatggagcacacggaggagggcctccgggagcgacttgccgacgccatggccgagtcacctagccgggacgtcgtgggatccggaacagacacagcccttgacgtagcagtaaaaaccttcccccctgagagacacgtggcagtgaagtgttttgggaaaaaaaaaggaaaaaaaaaacaatgccaacagcccagcgtccgtgagcaacccaacagtaacaaagcatgcgttcgggatggaggaagaacttcagcgagagggaagcatcgagactctgagtaacagctcaggctccaccagcggcagcataccaagaaactttgatggctaccgatctccgctgcccaccaatgagagccagcccctcagcctcttcccgactggcttcccgtaggtaccagcaacctgcttctgactggccagccccctcccctgctggaggaggggagaagccccgctctggtcctacccttcagtctctgctcttccttcatcaaccaccttccccaagcttagtgacagcagccgcccatcctacctggatggagaagagacccttctccaagcacctcagcgcacttgccctctgccacacctgtcggtggaggctgtggccaggagagactgtagaagctcggtccctgtgtatgtttgcatatgacatcctgcattggatccgcttttgtattttttaaccatacccacggtggggcgggtggggggagcctggaacagtgaccagatctgggggcctgagtggggacagagttgatcgtccacctggccattttgaccctgagtggacagtcacagcctcagctcatgtctggctgtgacacacactgcccccagcttcccttggtcagccccactccagcacggggtgaacggaggcccagagtactagggaaggaggaagggaggacatgcctcttcttcctcctttctttccccatctgttcatgggaagagtttgtctttcttatctttaagcccctttaccctggtcctgtactgatcagtgaaggaaaccgtggttactgaggccctgttgaaaagtgcacgtcttgtccaataaatcacgctgcagttggtgtccatccctg

SEQ ID NO: 4750 - protein, 96 aa, Homosapiens
MSSMEHTEEGLRERLADAMAESPSRDVVGSGTDTALDVAVKTFPPERHVAVKCFGKKKGKKKQCQQPSVREQPNSNKACVRDGGRTSARGKHRDSE

SEQ ID NO: 4751 - DNA, 637 bp, Homosapiens
taaagaggaatcatttctcagtgttaagtatatctgggaccagaaatggctcttgttatccaaggtaaagaatccaaacattgtgctgggattacaggcatgagccactgcgccctactgctatacacatttaatgtctacactgtgatgagtatggagatacgtatatacctatccatcacctccaaaagttacctgctgctctggcagaatctctttcttatttaaagctgagtaatattccattgtgtctatatactatattttctttatccattcattcatggatggacatttagtttgcttctacatcttgactattgtgcataatgctacagtgaacgttccatacagtgaagtggagatacctcttcgagatccacatttcagttccttttgatatatacacccagcagtgggactgctgggtcatatggtggttttatttttaattttttgaggaatgtcataagtgtgtctcaagaaaatataaagacagtataagaagacttagaattgagtacagtttgattgaatcaagggtaatcaccattatcctgattttcaggactttcattcacttccttcatgtagcacagttccctgccagaaatatccatcatggacgaagtgactg

SEQ ID NO: 4752 - protein, 60 aa, Homosapiens
MALVIQGKESKHCAGITGMSHCALLLYTFNVYTVMSMEIRIYLSITSKSYLLLWQNLFLI

SEQ ID NO: 4753 - DNA, 2100 bp, Homosapiens
gatctcgtgagaaccaactcactaaaacaagaacaggatggggaaactgcccccatgattcaattatctccacctggtccctcccaggacacatggggattatgggaactacaagtcaagatgagatttgggtggagacacagccaaacgatatcagggtgttgtgaggattcatggagcaaatggctgtgaaagcaccttgtaaagggtagagcagtgtgcggcgtgagggattattatcattgttaagacgtctacgcctcgttgctcaccctgtgtgatcctgcagcttctcaacttttccctcctttctccctggtttccacgcctgggctgctgagtcaggcggaccggccaaggctggcgagggctgaacagatgctctgacatgtcaaggcaggaaatgacagttcccaggcagccctctgtttcaggtgtggaacaggctccgaacacactttgtgtgataaattgtagtaacgccaggctgagctctacctccacccccttaggctgcaagactaggacatgaggctgaaagtcagagaagtccctgtgagacgagggccctgagcaagcactggccagactgtagcaaggccactcaccaggccaccccgctggttctacttccgcacccacctctggcagccatgatgcttctgcagcatgccagtttgttcactgagaccttcacagaaggtcgcacaaccaccctggacggtgagaaactaaggtgactgaggcaagtcattgaaccaccctgagccttggcttcctcatctatgaaatggagttgacagcatctgtcctgcctgtggtaaaaattgctgtgatcccacaaccaaaaggaaagagagaattatgagaaaaatatgtacttattctgtgaaaatatgtgagattttcatgagagacttcctgttccagtggactcttccaccgcccttgagtggggaacatccaggccttcacactcacgctcagcccatcacccctctgtgcaaggtgcaaggtcctctgcccacctgaagcctcaaggcctgatggaaaccatccacagccactctagtacctttgacaggagcgtgaccctgctggaggtgtgcgggagctggcctgagggcttcgggctgcggcacatgtcctccatggagcacacggaggagggcctccgggagcgacttgccgacgccatggccgagtcacctagccgggacgtcgtgggatccggaacagaacttcagcgagagggaagcatcgagactctgagtaacagctcaggctccaccagcggcagcataccaagaaactttgatggctaccgatctccgctgcccaccaatgagagccagcccctcagcctcttcccgactggcttcccgtaggtaccagcaacctgcttctgactggccagccccctcccctgctggaggaggggagaagccccgctctggtcctacccttcagtctctgctcttccttcatcaaccaccttccccaagcttagtgacagcagccgcccatcctacctggatggagaagagacccttctccaagcacctcagcgcacttgccctctgccacacctgtcggtggaggctgtggccaggagagactgtagaagctcggtccctgtgtatgtttgcatatgacatcctgcattggatccgcttttgtattttttaaccatacccacggtggggcgggtggggggagcctggaacagtgaccagatctgggggcctgagtggggacagagttgatcgtccacctggccattttgaccctgagtggacagtcacagcctcagctcatgtctggctgtgacacacactgcccccagcttcccttggtcagccccactccagcacggggtgaacggaggcccagagtactagggaaggaggaagggaggacatgcctcttcttcctcctttctttccccatctgttcatgggaagagtttgtctttcttatctttaagcccctttaccctggtcctgtactgatcagtgaaggaaaccgtggttactgaggccctgttgaaaagtgcacgtcttgtccaataaatcacgctgcagttggtgtccatccctg

SEQ ID NO: 4754 - protein, 113 aa, Homosapiens [sequence omitted]

SEQ ID NO: 4755 - DNA, 1167 bp, Homosapiens
caggacacatggggattatgggaactacaagtcaagatgagatttgggtggagacacagccaaacgatatcagtacctttgacaggagcgtgaccctgctggaggtgtgcgggagctggcctgagggcttcgggctgcggcacatgtcctccatggagcacacggaggagggcctccgggagcgacttgccgacgccatggccgagtcacctagccgggacgtcgtgggatccggaacagacacagcccttgacgtagcagtaaaaaccttcccccctgagagacacgtggcagtgaagtgttttgaacttcagcgagagggaagcatcgagactctgagtaacagctcaggctccaccagcggcagcataccaagaaactttgatggctaccgatctccgctgcccaccaatgagagccagcccctcagcctcttcccgactggcttcccgtaggtaccagcaacctgcttctgactggccagccccctcccctgctggaggaggggagaagccccgctctggtcctacccttcagtctctgctcttccttcatcaaccaccttccccaagcttagtgacagcagccgcccatcctacctggatggagaagagacccttctccaagcacctcagcgcacttgccctctgccacacctgtcggtggaggctgtggccaggagagactgtagaagctcggtccctgtgtatgtttgcatatgacatcctgcattggatccgcttttgtattttttaaccatacccacggtggggcgggtggggggagcctggaacagtgaccagatctgggggcctgagtggggacagagttgatcgtccacctggccattttgaccctgagtggacagtcacagcctcagctcatgtctggctgtgacacacactgcccccagcttcccttggtcagccccactccagcacggggtgaacggaggcccagagtactagggaaggaggaagggaggacatgcctcttcttcctcctttctttccccatctgttcatgggaagagtttgtctttcttatctttaagcccctttaccctggtcctgtactgatcagtgaaggaaaccgtggttactgaggccctgttgaaaagtgcacgtcttgtccaataaatcacgctgcagttggtgtccatccctg

SEQ ID NO: 4756 - protein, 148 aa, Homosapiens
MGIMGTTSQDEIWVETQPNDISTFDRSVTLLEVCGSWPEGFGLRHMSSMEHTEEGLRERLADAMAESPSRDVVGSGTDTALDVAVKTFPPERHVAVKCFELQREGSIETLSNSSGSTSGSIPRNFDGYRSPLPTNESQPLSLFPTGFP

SEQ ID NO: 4757 - DNA, 1099 bp, Homosapiens
ggacacatggggattatgggaactacaagtcaagatgagatttgggtggagacacagccaaacgatatcagtacctttgacaggagcgtgaccctgctggaggtgtgcgggagctggcctgagggcttcgggctgcggcacatgtcctccatggagcacacggaggagggcctccgggagcgacttgccgacgccatggccgagtcacctagccgggacgtcgtgggatccggaacagaacttcagcgagagggaagcatcgagactctgagtaacagctcaggctccaccagcggcagcataccaagaaactttgatggctaccgatctccgctgcccaccaatgagagccagcccctcagcctcttcccgactggcttcccgtaggtaccagcaacctgcttctgactggccagccccctcccctgctggaggaggggagaagccccgctctggtcctacccttcagtctctgctcttccttcatcaaccaccttccccaagcttagtgacagcagccgcccatcctacctggatggagaagagacccttctccaagcacctcagcgcacttgccctctgccacacctgtcggtggaggctgtggccaggagagactgtagaagctcggtccctgtgtatgtttgcatatgacatcctgcattggatccgcttttgtattttttaaccatacccacggtggggcgggtggggggagcctggaacagtgaccagatctgggggcctgagtggggacagagttgatcgtccacctggccattttgaccctgagtggacagtcacagcctcagctcatgtctggctgtgacacacactgcccccagcttcccttggtcagccccactccagcacggggtgaacggaggcccagagtactagggaaggaggaagggaggacatgcctcttcttcctcctttctttccccatctgttcatgggaagagtttgtctttcttatctttaagcccctttaccctggtcctgtactgatcagtgaaggaaaccgtggttactgaggccctgttgaaaagtgcacgtcttgtccaataaatcacgctgcagttggtgtccatccctg

SEQ ID NO: 4758 - protein, 126 aa, Homosapiens
MGIMGTTSQDEIWVETQPNDISTFDRSVTLLEVCGSWPEGFGLRHMSSMEHTEEGLRERLADAMAESPSRDVVGSGTELQREGSIETLSNSSGSTSGSIPRNFDGYRSPLPTNESQPLSLFPTGFP

SEQ ID NO: 4759 - DNA, 1173 bp, Homosapiens
gggaactacaagtcaagatgagatttgggtggagacacagccaaacgatatcagtacctttgacaggagcgtgaccctgctggaggtgtgcgggagctggcctgagggcttcgggctgcggcacatgtcctccatggagcacacggaggagggcctccgggagcgacttgccgacgccatggccgagtcacctagccgggacgtcgtgggatccggaacagggaaaaaaaaaggaaaaaaaaaacaatgccaacagcccagcgtccgtgagcaacccaacagtaacaaagcatgcgttcgggatggaggaagaacttcagcgagagggaagcatcgagactctgagtaacagctcaggctccaccagcggcagcataccaagaaactttgatggctaccgatctccgctgcccaccaatgagagccagcccctcagcctcttcccgactggcttcccgtaggtaccagcaacctgcttctgactggccagccccctcccctgctggaggaggggagaagccccgctctggtcctacccttcagtctctgctcttccttcatcaaccaccttccccaagcttagtgacagcagccgcccatcctacctggatggagaagagacccttctccaagcacctcagcgcacttgccctctgccacacctgtcggtggaggctgtggccaggagagactgtagaagctcggtccctgtgtatgtttgcatatgacatcctgcattggatccgcttttgtattttttaaccatacccacggtggggcgggtggggggagcctggaacagtgaccagatctgggggcctgagtggggacagagttgatcgtccacctggccattttgaccctgagtggacagtcacagcctcagctcatgtctggctgtgacacacactgcccccagcttcccttggtcagccccactccagcacggggtgaacggaggcccagagtactagggaaggaggaagggaggacatgcctcttcttcctcctttctttccccatctgttcatgggaagagtttgtctttcttatctttaagcccctttaccctggtcctgtactgatcagtgaaggaaaccgtggttactgaggccctgttgaaaagtgcacgtcttgtccaataaatcacgctgcagttggtgtccatccctg

SEQ ID NO: 4760 - protein, 74 aa, Homosapiens
MSSMEHTEEGLRERLADAMAESPSRDVVGSGTGKKKGKKKQCQQPSVREQPNSNKACVRDGGRTSARGKHRDSE

SEQ ID NO: 4761 - DNA, 4559 bp, Homosapiens
atggtctttcagttgaagtgtggttcagggccagtgtatattagtggacagcacttagtatctgtggaggaagatgcagagtcagaagatgaagaagaggaggatgtgaaactcttaagtatatctggaaagcaatctgccctggaggtggaagcaagattccacaaaaaagacgatgctgtggaacccgaaccgcaccggagtcggctgccgcgcgccaagcctcccctcacctctgctcccggaaccgcagcgccaaagctgccgctgagcccctgggggatgcccgccggcctcaccgaacccgccggcgccgctcccccggctgctgtgagcgcctcggggaccgtgaccatggccccggccggggcgctgccggtgcgggtggagagcactccggtggccctgggcgccgtgactaaggctcctgtcagcgtctgcgtggagcccacggcgtcccagcccctgcggtcccccgtggggaccctggtgaccaaagtggctccggtcagcgcccctcctaaagtcagcagcggccctaggctgcctgctcctcagatagtcgccgtgaaagcccccaacaccacgacaatccagtttcctgctaatttgcagcttcctccaggaaccgttttgattaaaagtaacagtggtccgttgatgttggtatctcctcagcaaactgtaacaagagccgagaccacaagtaacataacctcaaggccagcagtaccagcgaatcctcaaacagtcaaaatctgtacagtgccgaactctagctcacaattaatcaagaaagtggcagtgacacctgttaaaaaattggcacaaataggaactactgtggtaaccactgttccgaagccttcctcagtacaatctgtggctgtgccaaccagtgtcgtcacagttactcctggaaagccattgaatactgtaactaccctgaagccttcaagtttgggagcatcatccactccttcaaatgagcccaatcttaaagcagagaactcagcagctgttcagattaatctttctccgacaatgctagaaaatgtgaagaaatgcaagaacttccttgcaatgttaataaaactagcatgtagtggatcacagtccccagaaatggggcaaaatgtgaagaagctggtggaacaacttttggatgcaaaaatcgaagcagaagaatttactaggaaactgtatgttgaactcaagtcttcacctcagcctcacctggttccttttcttaagaaaagcgtggttgccttacgacaacttctgcctaactcccagagcttcatccagcaatgtgttcagcagacttctagtgacatggtcattgctacctgtactacaacagtaacaacttctcctgtggtgacaactacagtgtcctcaagccagtctgaaaagtcaattattgtttctggagcaacagcacccagaactgtgtcagtgcaaactttgaacccacttgctggtccagtgggagcaaaagctggagttgtgacacttcattctgtgggcccaactgctgcaacaggaggaacaacagctggaactggtttgcttcagacttcaaaaccacttgtgacatctgtggcaaacacagtgaccacggtctcactgcaacctgaaaagccagttgtctctggaacagcagtaacactgtcccttccagcagtaacttttggagaaacttcaggtgcagctatttgtcttccatctgtgaaacctgttgtttcttctgctgggaccacatctgacaagcctgttattgggactccagttcaaatcaaacttgcccagccgggccctgtcctttcacaaccagctgggattccacaggcagttcaagtcaagcaactattctcattgtttcaggtagttcagcagccttcaggaggcaatgaaaaacaagtgaccacaatttcacattcctcaacattgaccattcagaaatgtggacagaagacgatgccagtgaacaccataatacctactagtcagtttcctccagcttccattctaaagcaaattactctgcctggaaataaaattctgtcacttcaagcatctcctactcagaaaaatagaataaaagagaatgtaacatcatgcttccgagatgaggatgacatcaatgatgtgacttctatggcaggggtcaaccttaatgaagaaaatgcctgcatcttagcaacaaactctgaattggttggcacactcattcagtcatgtaaagatgaaccatttctttttattggagctctacaaaagagaattttagacattggtaaaaagcatgacattacagaacttaactctgatgctgtgaacttgatctcccaagcaacacaggaacgactacgaggccttctagaaaaactgactgcaattgctcagcatcgaatgactacttacaaggcaagtgaaaattacatcctgtgtagtgataccaggtcacagctcaaatttcttgaaaagctggatcaattggagaagcagagaaaggatttggaagaaagagaaatgttacttaaggcagccaagagtcgttctaataaagaagatccagaacagctgagattaaagcagaaagccaaagagttacagcaattggaacttgcacagatacagcatagagacgctaatctcacagctcttgcagctattggaccaaggaagaagagaccactagaatctggaattgagggcttaaaagacaaccttcttgcttctgggacatccagcctgacagccaccaaacagttgcatcgtccaagaatcacgagaatctgcctcagggacttgatattttgtatggaacaggaacgggagatgaagtattctcgagctctatacctggcccttctgaagtgaccactccactcttccatccagatccttgctatttactgccaaagaagacacaaagcattgttgcactgtcctgaaatttcaatttctggaaaataatcaccaacatgaaagagcattgtttacagttagaaactttattaactcttacctatccatctcatgggactcttacagactcagattcatctttgtcttctgaaaatcagttatgaaatacactttgcacagaattaggcatctgcctatctgtgcattaaattaaagcaagttaaggccctatttgttactacctgcctcatttgccaaattgtagcaggtgaggtgtccttccctaatacagcatgcattgagatgcaggagaaaggaagaggcataagaaaatacaagaatgactatttcattctatattgaacctgtcccaaagtggtaggttttctgggctggaatcagaagttgcttagctaactatgacagtcaccctctgtacgtgacaggccactgtggtgactttggtcggctgagttccagtgttgtcaaaacaagacaaatggggatagattgtgcctggggttgctaattctctgcttcatatcaccatatgccgtttctggtaccaagtgaggggacatgcttgtcagggaaaccttaaaattgaatctactgatatatcttgttgaaaaaatggaaaaggtgcaaagtattagaaggaacgttagggcgttgctttcaaactgatgaggggaatgtgaaaatggtatcataaaacaggaaatgtgcttcatatgcccaagaggggaagaggtggaatcggaactccaaaacaactggtacatgttttgttgatgggcaaaaaaaatcacagcacaaccagaaaggagaatgtaccagatgttttcaaattagagtatttcaaaaggaaaatgttattttttgttttgtattgttttaaatcccaaggatagtttttatagttccttctgtcataatatattttagttatcctaatttttaagcatgttggcacatttaaaaaatcctaattgatgatgagaaatttttaacaataggactttatgttggattctgtacttaaaaggtactgtcaatatctcactcttggggatatgagctctaaatatgagaagcaagttatatgtgttcacctgaggaagaagctgacggacaaagcaaaccctctttaaaaaaaaaaaaaagaaaattccacgtgtgtggaatacagccggtgaaaaataatcactgtagttagaatcacatacagaaaaaaaatgattgaatcctccaagaaggtatttcaaaaatgggaaatgctatacttataagaattgaaggaaaaaaaaaaaaacacctcacgtatgttattcttcatcctgttcttcccattgggactgttatggccatattctacagtatagtaaattttaaattggccacatttttttttgtttcagcaagttatgtaaaatgctataaattatgtgtatgttaaaggagtactttaagaagagatctttatccaaagttgtttttgtatatttaaatgcttacctttattttttgtaaagtgcagcatactcatttgtgtataatcttactgatcagatgtttaaaattattccaaatacttcattaaaataattattttattataagaa

SEQ ID NO: 4762 - protein, 961 aa, Homosapiens
MVFQLKCGSGPVYISGQHLVSVEEDAESEDEEEEDVKLLSISGKQSALEVEARFHKKDDAVEPEPHRSRLPRAKPPLTSAPGTAAPKLPLSPWGMPAGLTEPAGAAPPAAVSASGTVTMAPAGALPVRVESTPVALGAVTKAPVSVCVEPTASQPLRSPVGTLVTKVAPVSAPPKVSSGPRLPAPQIVAVKAPNTTTIQFPANLQLPPGTVLIKSNSGPLMLVSPQQTVTRAETTSNITSRPAVPANPQTVKICTVPNSSSQLIKKVAVTPVKKLAQIGTTVVTTVPKPSSVQSVAVPTSVVTVTPGKPLNTVTTLKPSSLGASSTPSNEPNLKAENSAAVQINLSPTMLENVKKCKNFLAMLIKLACSGSQSPEMGQNVKKLVEQLLDAKIEAEEFTRKLYVELKSSPQPHLVPFLKKSVVALRQLLPNSQSFIQQCVQQTSSDMVIATCTTTVTTSPVVTTTVSSSQSEKSIIVSGATAPRTVSVQTLNPLAGPVGAKAGVVTLHSVGPTAATGGTTAGTGLLQTSKPLVTSVANTVTTVSLQPEKPVVSGTAVTLSLPAVTFGETSGAAICLPSVKPVVSSAGTTSDKPVIGTPVQIKLAQPGPVLSQPAGIPQAVQVKQLFSLFQVVQQPSGGNEKQVTTISHSSTLTIQKCGQKTMPVNTIIPTSQFPPASILKQITLPGNKILSLQASPTQKNRIKENVTSCFRDEDDINDVTSMAGVNLNEENACILATNSELVGTLIQSCKDEPFLFIGALQKRILDIGKKHDITELNSDAVNLISQATQERLRGLLEKLTAIAQHRMTTYKASENYILCSDTRSQLKFLEKLDQLEKQRKDLEEREMLLKAAKSRSNKEDPEQLRLKQKAKELQQLELAQIQHRDANLTALAAIGPRKKRPLESGIEGLKDNLLASGTSSLTATKQLHRPRITRICLRDLIFCMEQEREMKYSRALYLALLK

SEQ ID NO: 4763 - DNA, 1211 bp, Homosapiens
gagcagttggtttcgttgtcttaatttggggcagtaatgatttctgagaagcaggtgattgataacgcgcaaattcaaagccccttgggggctgcattgtagcatggtgtggggatggggagacagagggctggtaggatcccgaattcctagtttttctctccctctcccttgcttcttcattttcttccttcaggctttcttccatttctttcttccatcaaatatttgtggagctggaactgggcttcactatcatattccaaggccctgtactgggaacagacaaagaagctcctcccagagactggaagaatggtacaaggtgtgaaaaccaaggcttaaagcatgcaagttatttgcccgaggtttttcagccacaaatgaagaagctgggtctgctccacacctgtgaaccaggctatttccaccataacctgaactcagatgagcaccagcccatggagaatagtccagaaggctgcccatagccttaaaggacagtgtgagcattaatcacagcctgttgcatttgaagaccacctccggaacaatgtcgttttaaatctatgcccaaggctgaacttggattggaaagatgggagagacagcaggcctgggtgtattcaggattatttcctaataactcactctctcctccctcctccctttcttgaaagtgagtggttagggatgagcggttgcaggcagagatgacagcatgagatatttcaccaaagagtgggtgtttaaccaccacttgtctaggagatgggcaacatgtcccagagatgattctaacagggaactcttcctggcagagtccagtgaagggaaccaggaaattcgggggcagggcaatcccactctctctgtcaggtgagatcacctgcgcagtggtttgagttcaggcatcttactttcttttagttagattcataggattaaaaattatctgcttatctagtccaatatttttaaggcatgtcaaaaaatctgcagaatccccccccccccttttttttcataagaaatatacataaatctgagaaaaagcagagctggaaaaaaagtgggggcatctcggaggatgaactacctggagccccattctggcagctcttgagaattctggaattcctctggaaactactgatttagtttctcatttccatttgagaaaacaaaatataataatagcgatcaaggtt

SEQ ID NO: 4764 - protein, 75 aa, Homosapiens
MVWGWGDRGLVGSRIPSFSLPLPCFFIFFLQAFFHFFLPSNICGAGTGLHYHIPRPCTGNRQRSSSQRLEEWYKV

SEQ ID NO: 4765 - DNA, 1367 bp, Homosapiens
tgcttgttaacattgttcctgagttgctgcctccccctcattctcttttgtcttcccattcagtggcttatgactacactttgttatatgaagaggcaaaatattttcagcttcagcccatgttgttggagatggaaagatggaagcaggacagagaaactggtcgattttcaaggccctgtgagtgcctcgtcgtgcgtgtggccccagacctcggagaaaggatcacgctaagcggtgacaaatccttgatagaagaagtatttccagagatcggcgacgtgatgtgtaactctgtcaatgcaggctggaatcacgactcgacgcacgtcatcaggtttccactaaatggctactgtcacctcaactcagtccaggtcctcgagaggttgcagcaaagaggatttgaaatcgtgggctcctgtgggggaggagtagactcgtcccagttcagcgaatacgtccttcggcgggaactgaggcggacgccccgtgtaccctccgtcatccggataaagcaagagcctctggactaaatggacatatttcttatgcaaaaaggaaaacacacacaaccaataactcaaacaaaaaagggacatttatgtgcagttgggacagcaaaccaagtcctggacgtaaaatcgaataaaagacacatttatatccaatagagaccacacctgtattcatatgggaacaattggaatagtgatatcctcaaggtgtaaaaaatatataaatatatatatatatgtcaaaaggtaggaaatgcaaaaaagaaaaaaaaaaaaggtgacagccgcagttggtgctgtgatggccgtgaagtgtcctgggccttccgaggcctctgacaaataaacaagccatgagtggtgaggacacagtctccttacagtttccattgccaacaacagccatccatatttcttttttcctttgtctttctttttcctttttttttaaaaaaacaaaacaaacaaaacaccttgaatcaagtttgtttgtatatggaggttccacgtctttctttaggcagggaccaggcaggacttcagaaaaaccctcatgagcacattgcaaagatgttagacatgaaattttaaatgtagtttgtacagaagtcacacttttttgtccacctcacagatgtgaactttactttgttttaaaactgatcagttttgccaaggggccagaattattccttgttagaattgctccagttcaagtctgctgctttcctacaatttttcaaattttataatgtattaaatacaataaactctgtttaaaaaataaggtctgtgtgaaacacacatgtgggggtgaggctggattaaagtgaaattttttctttttga

SEQ ID NO: 4766 - protein, 138 aa, Homosapiens
MLLEMERWKQDRETGRFSRPCECLVVRVAPDLGERITLSGDKSLIEEVFPEIGDVMCNSVNAGWNHDSTHVIRFPLNGYCHLNSVQVLERLQQRGFEIVGSCGGGVDSSQFSEYVLRRELRRTPRVPSVIRIKQEPLD

SEQ ID NO: 4767 - DNA, 2553 bp, Homosapiens
tacacctccagcgtcttcagcaccaacacgcccttcgggctgctcaacaaggtctggttcgagacgtgcatgtacttctgtacccgcggccgcgagaaccagcgtgagttggaggaggactcttttgggctggccatggacgaggacggtcgcaagttcgtctacttcaagtccctcgggccctaccacaagtcgcgctcgtcgtcgtggagcaagaagcgcgccgagagcagcgacgaggagaacttgccccgcatgtatgagacgggcaccgagttctgcccctacgccagcttcgtcaagtacctgtcgaaacgcaaccctctctgcaaggcgttcttccagcggccccgggaccactgcagcgagggcgatgtgacctggtacgagaacaaagccatcggcaagaacttgctaggcactcggatgcagatgctctccaaggcggccaagctctccaagacctacaccaaccactgcatcggcgccgtctccatcgccacgctcaacagcatcgcgggcattggcaccaagctgggctcgcccgccccgcagggctgctacgccgaggctctgaacggggcggcacggcaccactcccaccacccccccacccatccctcccaccaccaccgcccccagccgccctcgctggggaacacttacatcctccccaaagacagccaggtcgggcccgacgtgaaatccgaggctgcgcccaagcgcgccctgtacgagtctgtgttcgggtcgggggaaatctgcggccccacttcccccaaaagactttgtatccgcccctcggagcctgtggatgcggtggtggtggtttccgtgaaacacgaccccctgcctcttcttccagaagccaatgggcacagaagcaccaattctcccacaatagtttcacctgctattgtttcccccacccaggacagtcggcccaatatgtcaagacctctgatcactagatcccctgcatctccactgaacaaccaaggcatccctactccagcacaactcacaaaatccaatgcgcctgtccacattgatgtgggcggccacatgtacaccagcagcctggccaccctcaccaaataccctgaatccagaatcggaagactttttgatggtacagagcccattgttttggacagtctcaaacagcactatttcattgacagagatggacagatgttcagatatatcttgaattttctacgaacatccaaactcctcattcctgatgatttcaaggactacactttgttatatgaagaggcaaaatattttcagcttcagcccatgttgttggagatggaaagatggaagcaggacagagaaactggtcgattttcaaggccctgtgagtgcctcgtcgtgcgtgtggccccagacctcggagaaaggatcacgctaagcggtgacaaatccttgatagaagaagtatttccagagatcggcgacgtgatgtgtaactctgtcaatgcaggctggaatcacgactcgacgcacgtcatcaggtttccactaaatggctactgtcacctcaactcagtccaggtcctcgagaggttgcagcaaagaggatttgaaatcgtgggctcctgtgggggaggagtagactcgtcccagttcagcgaatacgtccttcggcgggaactgaggcggacgccccgtgtaccctccgtcatccggataaagcaagagcctctggactaaatggacatatttcttatgcaaaaaggaaaacacacacaaccaataactcaaacaaaaaagggacatttatgtgcagttgggacagcaaaccaagtcctggacgtaaaatcgaataaaagacacatttatatccaatagagaccacacctgtattcatatgggaacaattggaatagtgatatcctcaaggtgtaaaaaatatataaatatatatatatatgtcaaaaggtaggaaatgcaaaaaagaaaaaaaaaaaaggtgacagccgcagttggtgctgtgatggccgtgaagtgtcctgggccttccgaggcctctgacaaataaacaagccatgagtggtgaggacacagtctccttacagtttccattgccaacaacagccatccatatttcttttttcctttgtctttctttttcctttttttttaaaaaaacaaaacaaacaaaacaccttgaatcaagtttgtttgtatatggaggttccacgtctttctttaggcagggaccaggcaggacttcagaaaaaccctcatgagcacattgcaaagatgttagacatgaaattttaaatgtagtttgtacagaagtcacacttttttgtccacctcacagatgtgaactttactttgttttaaaactgatcagttttgccaaggggccagaattattccttgttagaattgctccagttcaagtctgctgctttcctacaatttttcaaattttataatgtattaaatacaataaactctgtttaaaaaataaggtctgtgtgaaacacacatgtgggggtgaggctggattaaagtgaaattttttctttttga
